United States Patent Application Publication US 2012/0227134 A1 - sequence listing, part 2

SEQ ID NO: 3041 - DNA, 1200 bp, Acidovorax avenae subsp. citrulli AAC00-1
  CDS (1)..(1200): transl_table=11
atggcaaaacaaatgcaggacgcctacatcgtcgccgccacgcgcacgcccatcggcaagtcgcaccgcggctacttccgcaacacccgccccgacgacctgctggccacgaccctgaaggccgcgctggcccaggtgccggggctggacccggccgccatcgaggacatcatctgcggttgcgcgattcccgagggcgcacagggcctgaacgtggcgcgcatcggcgccgtgctggcggggctgcccaccagcgtgggcggcatcaccgtcaaccgcttctgcgcctcgggcctctcggccgtgcagatggccgccgaccgcatccgcgtgggcgaggccgaggtgatgatcgccgcgggtgtcgagagcatgagcatggtgccgatgatgggcaatacgccgtcgctctcgcccagcatcttcgcgaaggacggcgacgtgggcatcgcctacggcatgggcctgacggccgagaaggtcgcccagcagtggaaggtgtcgcgcgaggaccaggatgccttcgcgctgcagtcgcaccagcgggcgctggccgcgcagcaggcgggcgaattcacggacgagatcacgccgatcgaagtgaccgaccgcaccgcggacctggagtcgggcgagagcgtcgcgaagacccgtacggtgacgctggacgagggcgcgcggcccgacaccagtctggaggggctcgccaagctcaagacggtgttcgccgcgcgcggctcggtcacggccggcaacagttcacagaccagtgacggcgccggtgcgctgatcctcgcgagcgaatcggccgtgaagcgcttcggcctgaccccgctggcgcgtttcgtcagcttcgccagcaagggcgtgccgccgagcatcatgggcatcggcccgatcgaggccatcccggccgcgctgcgctatgccggcctgaatcagcaggacatcgactggttcgagctgaacgaggccttcgccgcgcagtcgctcgccgtgctgcgccagctgggcctggacccggccaaggtgaatccgatgggcggcgccatcgcgctgggccatccgctgggcgccacgggcgccatccgctcggccacggtcgtgcatgcgctgcgcagaaagaacctgaaatacggcatggtcacgatgtgcgtgggcatggggcagggcgctgcgggcatcttcgaaagggtgtga

SEQ ID NO: 3042 - protein, 399 aa, Acidovorax avenae subsp. citrulli AAC00-1
MAKQMQDAYIVAATRTPIGKSHRGYFRNTRPDDLLATTLKAALAQVPGLDPAAIEDIICGCAIPEGAQGLNVARIGAVLAGLPTSVGGITVNRFCASGLSAVQMAADRIRVGEAEVMIAAGVESMSMVPMMGNTPSLSPSIFAKDGDVGIAYGMGLTAEKVAQQWKVSREDQDAFALQSHQRALAAQQAGEFTDEITPIEVTDRTADLESGESVAKTRTVTLDEGARPDTSLEGLAKLKTVFAARGSVTAGNSSQTSDGAGALILASESAVKRFGLTPLARFVSFASKGVPPSIMGIGPIEAIPAALRYAGLNQQDIDWFELNEAFAAQSLAVLRQLGLDPAKVNPMGGAIALGHPLGATGAIRSATVVHALRRKNLKYGMVTMCVGMGQGAAGIFERV

SEQ ID NO: 3043 - DNA, 1200 bp, Polaromonas naphthalenivorans CJ2
  CDS (1)..(1200): transl_table=11
atggccaaacaagtccaggaagcctacatcgttgccgccacgcgcacgcccatcgggcgctcgcaccggggatttttccgcaatacccggcccgacgacctgctggtcagcgtcctcaaggccgcgctggcgcaggtgccgacgcttgacccgaaagccattgaggacatcatctgcggctgcgcgattcccgaaggcccgcaggggctgaacatcgcgcgcatcggcgcggtgctggccggcctgccgaccagcgtgggcggcatcaccgtgaaccgtttttgcgcttcgggcctgtcggccatccagatggccgccgaccgcatccgcgtcggcgaggccgatgtgatgtttgccgccggcaccgaaagcatgagcatggtgccaatgtcgggcaactcgccgtcgctgtcgcccgccatgttcgccaacgacgagaacgtcggcattgcctacggcatgggcctgaccgccgagaaggtcgcgcagcaatggaaagtctcgcgcgcggcacaggatcagtttgcgtatgaatcccacatgaaggcgctgaaagcccagcaggccggcgagttcagcgccgagatcacgccggtcgaagtgactgaccgcacggccaacctggaaaccggcgaagtcatcgccaccacgcgcaccgtgagccttgatgaaggcgcgcgccccgacaccacgctcgaaggcctggccaagctgaaaacgccgtttgccgcgcgcggctcggtcacggccggcaacagttcgcaaacctcggacggcgccggcgcgctgatcctggccagcgaaaaagcggtgaaggaattcggcctcaagccgctggcccgctttgtcagctacgccgccaagggcgtgccgcccgaaatcatgggcatcggcccaatcgaggccatcccggccgcgctgcgctatgccggcttgacgcaaaacgacatcgactggttcgagctgaacgaagcgtttgccgcgcagtcgctggcggtcatcaacacgctgggcctggacccggcgaaggtcaacccgatgggcggcgcgattgcgctgggccatccgctcggcgccaccggggcgattcgcgccgccacggtgatccatgcgctgcaccgccatcaactcaaatacggcatggtgacgatgtgcgtcggcatggggcagggcgcggccggcatcttcgagcgggtctga

SEQ ID NO: 3044 - protein, 399 aa, Polaromonas naphthalenivorans CJ2
MAKQVQEAYIVAATRTPIGRSHRGFFRNTRPDDLLVSVLKAALAQVPTLDPKAIEDIICGCAIPEGPQGLNIARIGAVLAGLPTSVGGITVNRFCASGLSAIQMAADRIRVGEADVMFAAGTESMSMVPMSGNSPSLSPAMFANDENVGIAYGMGLTAEKVAQQWKVSRAAQDQFAYESHMKALKAQQAGEFSAEITPVEVTDRTANLETGEVIATTRTVSLDEGARPDTTLEGLAKLKTPFAARGSVTAGNSSQTSDGAGALILASEKAVKEFGLKPLARFVSYAAKGVPPEIMGIGPIEAIPAALRYAGLTQNDIDWFELNEAFAAQSLAVINTLGLDPAKVNPMGGAIALGHPLGATGAIRAATVIHALHRHQLKYGMVTMCVGMGQGAAGIFERV

SEQ ID NO: 3045 - DNA, 1197 bp, Acidovorax sp. JS42
  CDS (1)..(1197): transl_table=11
atgaaacagatccaagacgcctacatcgttgccgccacgcgcacgcccatcggccgttcgcacaagggctttttccgcaactaccgcccggacgacctgctggccaccacgctcaagagcgcgctggcccaggtgccggggctggaccccgcctcgatcgaggacatcatctgcggctgcgccatccctgaggcgcagcagggcctgaacgtggcgcgcatcggtgccgtgctggcgggcctgcccaccagcgtgggcggcatcacggtgaaccgcttctgcgcttcgggcctgtcggccgtggccatggcggccgaccgcatccgcgtgggcgaggccgaggtgatgatcgccgccggcgtggagagcatgagcatggtgcccatgatgggcaacgcgcccagcctgtcgcccagcatcttcgagcgtgacggcgacgtgggcatcgcctacggcatgggcctcaccgccgagaaggtggcccagcagtggaaggtgagccgcgaggcgcaggacgccttcgcactggagtcgcaccgccgcgccatcgccgcgcagcaggccggcgagtttgccgacgagatcacgcccatcgaggtgaccgaccgcacggccaacctggagacgggcgaagtcattgccagcacccgcaccgtgagcctggacgagggcgcccgccccgacaccagcctggaaggcctggccaagctgcgcaccgtgttcgccgcgcgcggcacggtcacggctggcaacagctcgcagaccagcgacggcgccggcgcgctgatcctggccagcgaatccgccgtcaagcgcttcggcctcacgccgctggcgcgcttcgtcagcttcgccagcaagggcgtgccgccgtccatcatgggcatcggtccgatcgaggccattcccgccgcgctgcgctatgccggtctgaagcaggacgacatcggctggtacgagctcaacgaagccttcgccgcccagtcgctggccgtcatcaacacgctggggctggacacggccaaggtcaaccccatgggcggcgccatcgcgctgggccacccgctgggcgcgacgggcgccatccgctcggccaccgtggtgcatgcgctgcgccgcaagcagctcaagtacggcatggtcaccatgtgcgtgggcatgggccagggcgcggcgggtatcttcgagcgcgtgtaa

SEQ ID NO: 3046 - protein, 398 aa, Acidovorax sp. JS42
MKQIQDAYIVAATRTPIGRSHKGFFRNYRPDDLLATTLKSALAQVPGLDPASIEDIICGCAIPEAQQGLNVARIGAVLAGLPTSVGGITVNRFCASGLSAVAMAADRIRVGEAEVMIAAGVESMSMVPMMGNAPSLSPSIFERDGDVGIAYGMGLTAEKVAQQWKVSREAQDAFALESHRRAIAAQQAGEFADEITPIEVTDRTANLETGEVIASTRTVSLDEGARPDTSLEGLAKLRTVFAARGTVTAGNSSQTSDGAGALILASESAVKRFGLTPLARFVSFASKGVPPSIMGIGPIEAIPAALRYAGLKQDDIGWYELNEAFAAQSLAVINTLGLDTAKVNPMGGAIALGHPLGATGAIRSATVVHALRRKQLKYGMVTMCVGMGQGAAGIFERV

SEQ ID NO: 3047 - DNA, 1203 bp, Verminephrobacter eiseniae EF01-2
  CDS (1)..(1203): transl_table=11
atgcgtgaagccgcgatcgtttcgaccgcccgcacaccgatcggcaaggcctttcggggggccttcaacaacacccaggcgcaggaactgggcgcgcatgcgattgcgcatgccgtgcagcgcgccggcatcgacccggcgctggtcgacgacgtcgtgatgggctgcgccgcgcagcaaggcacgagcggcggcaacaccgcgcgccagagcctgctgcgcgccggcctgccgcagaccgtgtcgggcatgagcatcgaccgcatgtgctcgtccggcctgatggccgtggccacggcggccaagcagatcgtcgtggacggcatgcaggtgacggtgggcggcgggctggagtcgatctcgctcgtgcagtcgggcaagcccaacacgcaccgggcgcgtgatccccacttggtcaagaacatcccgcagctctacatggcgatgatcgagacggccgagatcgtggccgagcgctacggcatctcgcgcgcgcagcaggacgcgtacgcggtggagtcgcaggcgcgcacggcgaaggcgcagcgtgaaggccgcttcgacgccgagatcgtgcccatgtccaccgtcatgaccgtgaccgacaaggccaccggcgccgtgtcggaaaagccggtcaccatcgccgccgacgaaggcaaccgccccggcaccacgctggccgatctgcagaagctgaacccggtgttcaaggacggccaggtcgtcaaggaaggccgcttcatcacggccggcaacgcctcgcaactgtccgatggcgcatcggccatggtgctgatggaggccagggaggccgagcgccggggcctcgcgccgttaggcgcctaccgcggcatggcggtggccggctgcaaccccgacgagatgggcatcggccccgcgttcgcgattcccaagctgctcaagctgcacgggcttacggtcaacgacatcggcatctgggaactgaacgaggccttcgcgagccaggtgatctattgccgcgacaggctgggcatcccggacgacaggctcaacgtgtcgggcggggccatctccatcggccacccgttcggcatgtcgggcgcgcgcatggccggccatgtgctgatcgagggcaagcgccgtggcgtgaagttcggcgtggtgacgatgtgcgtgggcggcggcatgggcgcggccggtctgtttgaaatctactga

SEQ ID NO: 3048 - protein, 400 aa, Verminephrobacter eiseniae EF01-2
MREAAIVSTARTPIGKAFRGAFNNTQAQELGAHAIAHAVQRAGIDPALVDDVVMGCAAQQGTSGGNTARQSLLRAGLPQTVSGMSIDRMCSSGLMAVATAAKQIVVDGMQVTVGGGLESISLVQSGKPNTHRARDPHLVKNIPQLYMAMIETAEIVAERYGISRAQQDAYAVESQARTAKAQREGRFDAEIVPMSTVMTVTDKATGAVSEKPVTIAADEGNRPGTTLADLQKLNPVFKDGQVVKEGRFITAGNASQLSDGASAMVLMEAREAERRGLAPLGAYRGMAVAGCNPDEMGIGPAFAIPKLLKLHGLTVNDIGIWELNEAFASQVIYCRDRLGIPDDRLNVSGGAISIGHPFGMSGARMAGHVLIEGKRRGVKFGVVTMCVGGGMGAAGLFEIY

SEQ ID NO: 3049 - DNA, 1173 bp, Bacillus cereus G9241
  CDS (1)..(1173): transl_table=11
atgagagaagctgtcattgttgcgggagcaagaacaccaattggaaaagcaaagaggggttcattaaaaacagttcgtcctgacgatctaggggcgttagtagtaaaggaaacgttaaagcgtgcgaattatgaaggaccaatcgatgatttaattttcggttgtgcgatgccagaagcagagcaaggtttaaatatggctcgtaatatcggtggattagcaggactttcttacgatgttccagctattacgattaaccgttactgttcttcaggtttacaaagtatcgcttatggagcagagcgcattatgcttggtcactctgaagctgtattatcaggcggagcggaatcaatgagtttagttccaatgatgggacacgttgttcgtccgaatagtcgccttgtagaagcggctccagaatattatatgggtatgggacatacagcagagcaagttgctgtgaaatatggaatttctcgtgaagagcaagatgcatttgcagtaagaagtcatcaacgtgctgcgaaagcattagctgcagggaactttgctgatgaaacagtatctgtagatgtaacgttacgtactgttggatcaaataacaaactgcaagaagaaacaatcattttcgcacaagacgaaggtgtaagagcagaaacgacgctagacattttaggtaaattacgtccagcatttaacgttcgcggttctgtaacagctggtaactcttcacaaatgagtgacggtgcagcatctgtactattaatggatcgtgaaaaagcagtgagtgatggcatgaaaccacttgcgaaattccgttcatttgcagtagctggcgtaccaccagaagtaatgggaattggcccaattgctgcaattccaaaagcgttaaaactagctggcttagagctatctgatattggcttattcgaactaaatgaagcattcgcttctcaatcgatccaagttattcgtgaacttggtttagatgaagaaaaagtaaacgtaaacggcggtgcaatcgcacttggacatccacttggctgtacaggagcaaaactaacactatctcttattcacgaaatgaaacgccgcaacgaacaattcggtatcgtaacaatgtgtatcggcggcggaatgggagcagcgggagtatttgaattactataa

SEQ ID NO: 3050 - protein, 390 aa, Bacillus cereus G9241
MREAVIVAGARTPIGKAKRGSLKTVRPDDLGALVVKETLKRANYEGPIDDLIFGCAMPEAEQGLNMARNIGGLAGLSYDVPAITINRYCSSGLQSIAYGAERIMLGHSEAVLSGGAESMSLVPMMGHVVRPNSRLVEAAPEYYMGMGHTAEQVAVKYGISREEQDAFAVRSHQRAAKALAAGNFADETVSVDVTLRTVGSNNKLQEETIIFAQDEGVRAETTLDILGKLRPAFNVRGSVTAGNSSQMSDGAASVLLMDREKAVSDGMKPLAKFRSFAVAGVPPEVMGIGPIAAIPKALKLAGLELSDIGLFELNEAFASQSIQVIRELGLDEEKVNVNGGAIALGHPLGCTGAKLTLSLIHEMKRRNEQFGIVTMCIGGGMGAAGVFELL

SEQ ID NO: 3051 - DNA, 1200 bp, Brevibacterium linens BL2
  CDS (1)..(1200): transl_table=11
atgcgcgaagcagtcatcgtctccaccgctagaactccgatcggaaaggcgtacaagggtgcgttcaacgacacccaagcccaggaattggcgggtcacgccatttcccacgctgtctcacgggcaggtctggaagggggcgaagtcgaagacgtcgtcttcggtgcagccctgcagcagggcagccaatccaccaacgtcgctcgccaggcggcactgcgagccggcctcccgacaacggtcccaggaatgacgattgatcgtcagtgctcctccgggctgatggggatcgccaccgctgccaagcagatcctcttcgatggccaggagattgcagtcggcggcggcgtggagtctgtgtccctggtgcagaacgacaagatgaatatgttccgggcgaaggacccgtggctggtcgaacatgttcccggaatctactacccgatgctcgccaccgccgaggttgtggccgaacgctatggcatcagccgggaagcacaggacgagtacgcgttttcttcgcagcagcggactgccgcagcccaggaggctggccggttcgacgacgagatcgtcgcgttgccgacgacgaagatcgtcgtggacaaggagaccaaggaaacctcggctcaacaggtgactctcgagcgcgatgaagggaaccgtccgtcgacgaccttggagagcttggctggtctgaacccagtcctcaagcccggcgacgcttcgaaggtcccaagcatcaccgctggcaatgcttcacagctgtctgacggagcctctgcttcggtactgatgtcgagtgatgaagcgagccgacgtggactggagccactgggcatctatcggggcatggccgtcgctggctgcgatcccgacgagatggggatcggtcccgtctttgcgattccgaagctgctcaaggcgcagggactgtccatcgatgacatcggtctgtgggagctcaacgaagcattcgcggtccaggctctctactgccgtgaccgcctcgggatcgatccagagaagtacaacgtcgacggtggaggaatctcggtcggtcacccttacggaatgaccggtgcccgcctggtcggtcacgctctcatcgaggggcgtcgccgcggagtcaagtatgtcgtcgtcacgatgtgcatcggcggcggtcagggagcggccggactcttcgaagtctgctga

SEQ ID NO: 3052 - protein, 399 aa, Brevibacterium linens BL2
MREAVIVSTARTPIGKAYKGAFNDTQAQELAGHAISHAVSRAGLEGGEVEDVVFGAALQQGSQSTNVARQAALRAGLPTTVPGMTIDRQCSSGLMGIATAAKQILFDGQEIAVGGGVESVSLVQNDKMNMFRAKDPWLVEHVPGIYYPMLATAEVVAERYGISREAQDEYAFSSQQRTAAAQEAGRFDDEIVALPTTKIVVDKETKETSAQQVTLERDEGNRPSTTLESLAGLNPVLKPGDASKVPSITAGNASQLSDGASASVLMSSDEASRRGLEPLGIYRGMAVAGCDPDEMGIGPVFAIPKLLKAQGLSIDDIGLWELNEAFAVQALYCRDRLGIDPEKYNVDGGGISVGHPYGMTGARLVGHALIEGRRRGVKYVVVTMCIGGGQGAAGLFEVC

SEQ ID NO: 3053 - DNA, 1179 bp, Azotobacter vinelandii
  CDS (1)..(1179): transl_table=11
atgaaagaggttgtaatcgtcgctgcaacccggactgcagtaggtagcttccaagggtccttggcaagtattcctgccgcagaactgggcgccgccgtgattcgtcggctgctcgaacaaaccaagctggatggggcccaagtcgatgaagtgattctgggtcaggtactcactgctggcgtaggccagaacccggctcgccaggccgtgatcaaggcgggtttgccccataccgttcccgccatgaccttgaacaaggtctgcggctccggcctcaaggctctgcacttggccactcaagccattcgctgtggagacgccgatgtgatcatcgcgggcggccaggagaacatgagcctttcgccctatgttcttccgggcgcgcgcaccggtctgcgcatgggacatgccaacctgatcgacagcatgatccaagacggcctatgggatgtcttcaacaactaccacatgggtatcaccgcagagaacctggtcgagaaattcggtatttcccgagaagaacaggatacctttgccgctgcctcacagcagaaggctgtggccgccatcgaggctggtcatttccgcagtcagatcacgccgatatcaatcccgcagcgcaagggggatccgatcatcttcgacaccgatgaacaaccacgtgccgagaccaccctcgaagcgctgagcaaactcaagccagccttcaagaaagacggaagcgtcaccgccggtaatgcttccagcatcaacgacggtgctgccgcggtactgctgatgagtgcggaaaaggctcgttcgctcggcttgccagccctggcacgaatcaaagcctatgccaatgcggctgtagacccggccatcatgggcatcggtccggtttcggctacccgtcgctgtctggaaaaagctggctggaatctggacgagttggatttgatcgaggccaatgaggccttcgcagctcaatccctgagtgtgagcaaagaactgggatgggatgccagcaaagtcaatgtaaatggcggcgctattgcgattggccacccgatcggagcctccggttgtcgcattctggtcactctggtgcatgaaatgatcaggcgcgacgccaaaaaaggcttggcaactctctgcatcggtggtggacaaggcgtagccctcgcagtggagcgttga

SEQ ID NO: 3054 - protein, 392 aa, Azotobacter vinelandii
MKEVVIVAATRTAVGSFQGSLASIPAAELGAAVIRRLLEQTKLDGAQVDEVILGQVLTAGVGQNPARQAVIKAGLPHTVPAMTLNKVCGSGLKALHLATQAIRCGDADVIIAGGQENMSLSPYVLPGARTGLRMGHANLIDSMIQDGLWDVFNNYHMGITAENLVEKFGISREEQDTFAAASQQKAVAAIEAGHFRSQITPISIPQRKGDPIIFDTDEQPRAETTLEALSKLKPAFKKDGSVTAGNASSINDGAAAVLLMSAEKARSLGLPALARIKAYANAAVDPAIMGIGPVSATRRCLEKAGWNLDELDLIEANEAFAAQSLSVSKELGWDASKVNVNGGAIAIGHPIGASGCRILVTLVHEMIRRDAKKGLATLCIGGGQGVALAVER

SEQ ID NO: 3055 - DNA, 1188 bp, Azotobacter vinelandii
  CDS (1)..(1188): transl_table=11
atgcaagaacaggaagtagtgatagtcgccgccgcccgcaccgccatcggcagcttccagggcagcctggcgcaggtgtcggcggtcgagctgggcgccgttgtcgtccgcgcgctgctcgagcgcagcggactggcgccggccgaggtggacgaggtcatcctcggccaggtgctgaccgccggggcgggacagaatcccgcccggcagaccgcgctgaaggcggggctgccgcagagcgtgccggccatgaccgtcaacaaggtctgcggctccggcctcaaggccctgcacctggcggcccaggcgatccgctgcggcgatgccgaggcggtcgtcgccggcggccaggagaacatgagcctggcgccccatgtcctgccgggcgcgcgcagcggcctgcgcctgggccacgccagtctggtcgacagcatgatcgtcgacggcctgtgggatgccttcaacgactaccatatgggcatcaccgcggagaacctggcggacaggtacggcatcgatcgcgaggcgcaggacgccttcgccgccgcctcgcagcgaaaagccctggccgccatcgaggccggacgcttccgggacgagatcgttccggtgacgatcccgcagcgcaagggcgagccgctgcgcttcgacaccgacgagcagccgcgccccggcaccaccgccgaggccctggccaagctgaagccggctttccgcaaggatggcagcgtcaccgccggcaattcctcgaccctcaacgacggggccgccgccgtgctgctgatgagcggcgccaaggcgcgcgccctgggcgtgccggtgctggcgcggatcaaggcctgtgccagcgccggcgtcgatccggcgatcatgggcatcggcccggtggcggccagccgccgctgcctggagaaggccggctggacgctcgagcagctcgacctgatcgaggccaacgaggcgttcgccgcccaggcgctggcagttggccaggagctgtgctggaataccgggctcgtcaacgtgaacggtggcgccatcgccctggggcaccctatcggggcctcgggctgtcgcatactggtcacgttgctgcatgaaatgatccggcgagagtcgcacaaggggttggccaccctgtgcatagggggaggacagggcgtggccctggcgatcgaacgcgactga

SEQ ID NO: 3056 - protein, 395 aa, Azotobacter vinelandii
MQEQEVVIVAAARTAIGSFQGSLAQVSAVELGAVVVRALLERSGLAPAEVDEVILGQVLTAGAGQNPARQTALKAGLPQSVPAMTVNKVCGSGLKALHLAAQAIRCGDAEAVVAGGQENMSLAPHVLPGARSGLRLGHASLVDSMIVDGLWDAFNDYHMGITAENLADRYGIDREAQDAFAAASQRKALAAIEAGRFRDEIVPVTIPQRKGEPLRFDTDEQPRPGTTAEALAKLKPAFRKDGSVTAGNSSTLNDGAAAVLLMSGAKARALGVPVLARIKACASAGVDPAIMGIGPVAASRRCLEKAGWTLEQLDLIEANEAFAAQALAVGQELCWNTGLVNVNGGAIALGHPIGASGCRILVTLLHEMIRRESHKGLATLCIGGGQGVALAIERD

SEQ ID NO: 3057 - DNA, 1182 bp, Azotobacter vinelandii
  CDS (1)..(1182): transl_table=11
atgaatgacgccgtgatcgtttcgactgcgcgtaccgccctcaccaagtcctggcggggcgctttcaacatgacccatcccgtgaccctcggcggacatgtcgtggaacaggccatcctgcgcgccggcatcgagccgggcgaagtggaggatgtgatcatgggctcgaccttcctggaagggccggcggggatgaatatggcccgccagatcgccctgcgtgccggctgcccggtgaccaccggcggcctgaccatcaaccgcttctgttccaccgggctgcagagcatcgttctcgccgcgcagcgggtgatcgccggcgaaggcgacgtctacgtggccggcggcgtggagtcgatttccctggtgcagaacgacgccaacttcgcgctccttcaagaagcctggatccgccagcacaggccggcggtgcactgggacatgctgcgcaccgcggaaaccgtcgccgcccgctacggcatcggccgcgaagcgcaggaccgctacggcgtcgacagccagttgcgggccgccgccgcccaggccgaagggcgctatgccgaggaaatcgcgccgctgaccaccgtcatgggcgtgttcgagcgcgacagcgggcatttcgcccgccgggaaatcacggtttcccgcgacgagggcatccggcccgacaccacctacgagtccgtcgccgccattccgtccgtggtgccgggcggggtgatcgccgcgggcaacgccagccagttctccgacggggcttccgcctgcgtcgtcatgaacgcgggcctggccgaacggcgcggcctgcagcctctgggcctgttcctgggcttcgcggtcgccggctgcgagccggacgaaatgggtgtcggcccggtccatgcggtgcccaggctgctcaggcagaccggcctgggcgtcgacgacatcgggctctgggaactcaacgaagccttcgcggtgcaggtactttactgccgcgaccgcctgggcatcgacgagcggcgcctgaacgtcaatggcggagcgatcgccctgggacatccctacggcatgtccggctcgcgtctggtcggccacgcgctgatcgagggacgccgccgcggcgtgaaatacgtggtggtgaccatgtgcatcggcggtggcatgggcgccgcgggactcttcgaggtgctgccatga

SEQ ID NO: 3058 - protein, 393 aa, Azotobacter vinelandii
MNDAVIVSTARTALTKSWRGAFNMTHPVTLGGHVVEQAILRAGIEPGEVEDVIMGSTFLEGPAGMNMARQIALRAGCPVTTGGLTINRFCSTGLQSIVLAAQRVIAGEGDVYVAGGVESISLVQNDANFALLQEAWIRQHRPAVHWDMLRTAETVAARYGIGREAQDRYGVDSQLRAAAAQAEGRYAEEIAPLTTVMGVFERDSGHFARREITVSRDEGIRPDTTYESVAAIPSVVPGGVIAAGNASQFSDGASACVVMNAGLAERRGLQPLGLFLGFAVAGCEPDEMGVGPVHAVPRLLRQTGLGVDDIGLWELNEAFAVQVLYCRDRLGIDERRLNVNGGAIALGHPYGMSGSRLVGHALIEGRRRGVKYVVVTMCIGGGMGAAGLFEVLP

SEQ ID NO: 3059 - DNA, 1176 bp, Azotobacter vinelandii
  CDS (1)..(1176): transl_table=11
atgagtccgaatccgaaagacgccgtcatcgtcgacttcgcccgcaccccgatgggccgttccaagggcggcatgcaccgccacacccgcgccgagaacctttccgcgcatctcatcaccgagttactggcgcgcaatccgcaggtcgacccggcggaggtcgaggacgtgatctggggctgcgtcaaccagaccctggagcagggctggaacatcgcgcgcatggctgcgctgctgacgccgatcccgcacggcagcggcgcgcagaccgtcaaccgcctgtgcggctcctcgatgagcgcgctgcacagcgcggtgcaggcgatccagaccggcaacggcgaggtgttcgtggtcggtggcgtcgagcacatgggccacctgccgatgacccatggggtcgatccgaacccgaagctgtccctacaggtggccaaggccgccggaatgatgggactgaccgccgagatgctggcgatgatgcatggcgtgacccgcgagcagcaggacgccttcgccctgcgctcgcaccagcgggcgcaccgcgccacggtcgagggccacttcgccgaggaaatagcgccgatcgagggttacgacgagcacggccagttgcgggtcttcgagcaggacgagacgatccgcccggacaccaccctggagggcctggccaagctcaagccggtgttcaacccgaagagcggcaccgtcaccgcgggcagttcctcgcagatcaccgacggcgcttcctgcatgatcgtcatgtccggccagcgcgccagcgacctgggcatccagccgctggccgtggtgcgcgccatggcggtggtcggggtggacccgtcgatcatgggctacggtccggtgccggccacccagagggcgctggcgcgggccggactgtcgatggccgacatcgacttcgtcgagctcaacgaggccttcgccgcccaggccatcccggtgctcaaggacctcaagctgctcgacgtgctggacgacaaggtcaacctgcacggcggcgccatcgccctgggccaccccttcggctgttcgggagtgcggatttccggcaccctgctgaacatcatgcggcagaagagtggcaccctggggctggcgaccatgtgcatcggtctcggccagggcatcgccaccgtcttcgagcgcgcctga

SEQ ID NO: 3060 - protein, 391 aa, Azotobacter vinelandii
MSPNPKDAVIVDFARTPMGRSKGGMHRHTRAENLSAHLITELLARNPQVDPAEVEDVIWGCVNQTLEQGWNIARMAALLTPIPHGSGAQTVNRLCGSSMSALHSAVQAIQTGNGEVFVVGGVEHMGHLPMTHGVDPNPKLSLQVAKAAGMMGLTAEMLAMMHGVTREQQDAFALRSHQRAHRATVEGHFAEEIAPIEGYDEHGQLRVFEQDETIRPDTTLEGLAKLKPVFNPKSGTVTAGSSSQITDGASCMIVMSGQRASDLGIQPLAVVRAMAVVGVDPSIMGYGPVPATQRALARAGLSMADIDFVELNEAFAAQAIPVLKDLKLLDVLDDKVNLHGGAIALGHPFGCSGVRISGTLLNIMRQKSGTLGLATMCIGLGQGIATVFERA

SEQ ID NO: 3061 - DNA, 1206 bp, Azotobacter vinelandii
  CDS (1)..(1206): transl_table=11
atgagccgcgacgtcttcatctgcgatgccgtgcgcacgcccatcggccgcttcggcggcggcctggccggcgtgcgcgccgacgacctggccgccatcccgctgaaggcgctgctggcgcgcaacccgcgactcgatccggccgccgtcgatgaggtgttcctgggctgcgccaaccaggccggcgaggacaaccgcaacgtggcgcgcatggcgtcgctgctcgccggcctgccggagacggtgccgggggtgacactcaaccgcctgtgcgcctcgggcatggatgcgatcggcaccgccgcccgcgccatcgccagcggcgagatcgagctggccatcgccggcggcgtggagtccatgtcgcgtgcgcccttcgtgatgggcaaggccgacgccgccttctcgcgcaacatgaagatcgaggacaccaccatcggctggcgtttcgtcaacccgttgatgaagcagcagtacggcgtggactccatgccggaaaccgccgacaacgtcgccgacgactaccggatcggccgcgccgaccaggacgccttcgccctgcgcagccagcagcgcgcggcggcggccatggagtccggctacttcgccgaggagatcgtcccggtggtcatcaagaccaggaagggcgagacgctgatcgacacggacgagcatccgcgcccggacaccagcgccgaggcgctggccaggctcaagccggtcaacggcgagggcaagacggttaccgccggcaacgcctcgggggtcaacgacggcgccgcggcgctgatcctggcctccgccgaggcggtgcgcaaatacggcctgaaggcccgcgcccgggtgctcggcatggccagcgccggggtcgcgccgcggatcatgggctacggcccggtgccggcggtgcgcaagctcctgcagcgcttggagctgagcatcgacgccttcgatgtgatcgaactcaacgaggccttcgccagccagggcctggcggtattgcgcgacctggacctcgccgacgacgatgcgcgggtcaaccccaacggcggcgccatcgccctcggccacccgctgggcatgagcggcgcgcgcctggtgctgaccgccctgcatcaactggagaagtccggcggcagcaagggcctggcgaccatgtgcatcggcgtcggccaggggctggcgctggccatcgagcgcgtctga

SEQ ID NO: 3062 - protein, 401 aa, Azotobacter vinelandii
MSRDVFICDAVRTPIGRFGGGLAGVRADDLAAIPLKALLARNPRLDPAAVDEVFLGCANQAGEDNRNVARMASLLAGLPETVPGVTLNRLCASGMDAIGTAARAIASGEIELAIAGGVESMSRAPFVMGKADAAFSRNMKIEDTTIGWRFVNPLMKQQYGVDSMPETADNVADDYRIGRADQDAFALRSQQRAAAAMESGYFAEEIVPVVIKTRKGETLIDTDEHPRPDTSAEALARLKPVNGEGKTVTAGNASGVNDGAAALILASAEAVRKYGLKARARVLGMASAGVAPRIMGYGPVPAVRKLLQRLELSIDAFDVIELNEAFASQGLAVLRDLDLADDDARVNPNGGAIALGHPLGMSGARLVLTALHQLEKSGGSKGLATMCIGVGQGLALAIERV

SEQ ID NO: 3063 - DNA, 1260 bp, Azotobacter vinelandii
  CDS (1)..(1260): transl_table=11
atggcgccatccgcatggccgcccgctagggcgctcccttctttcgtcaataaccgccagcgaggacgtcacatgtcccaggatccggttgtcatcgtttccgccgcgcgcacgccgctcggcgcgttccagggcgaactctccgggctgagcgcgccgcggctgggcggcgtcgccgtgcgcgcggcgctgcagcgggccggccttcccggcgagcgggtgcaggaactgatcctcggctgcgtgctgccggccgggctcggccaggcgccggcccgccaggcggcgatcgaggcaggtttgccgctgtcggtcggctgcaccacggtcaacaaggtgtgcggctccgggatgaaggccgccatgctggcccatgacctgctgctcgccggcagcgccgaggtcgtgctggccggcggcatggagtcgatgagcaacgccccctacctgctgcccggcgcgcgcggcggctaccggctcgggcatcggcaggcgctcgaccacatgttcttcgacggtctggaggatgcctacttcgaccggggccggctgatgggcaccttcgccgaggattgcgcggccagccacggcttcggccgcgaggagcaggacacctgggccatcgcctcgacgagccgcgcccgggcggccatcgagtccggtgccttcgcctgggaaatcgccccggtgagcctctccggccgccacggcgaggtactgatcgagcacgatgaacagccgccgaaggcacgtctggagcggattcccgaactcaagccggcctttcgcgagggcggtacggtgacgccggccaactccagctcgatttccgacggcgccgccgcactgctgctgatgcgccgctccacggccggacggctcggactcgcgcccctggcgaccgttgtcggccatgccagccatgcccatgagccgcggctgtttccgaccgcgccggtcggcgcgatgcgaaaactgctggagcggctcggctggtcggtcggcgacgtcgacctgtgggaaatcaacgaggccttcgcggtggtgaccctggcggcgatccgcgatcttaggctcgatccggcacgggtcaacgtccatggcggcgcctgcgccctgggacatccgatcggcgcgtccggggcgcgtatcctggttaccctgctgggcgccctgcgccgcggcggcggacggcgtggcgtcgccagcctgtgcatcggcggtggcgaggcgacggcgatggcggtggagatggcctga

SEQ ID NO: 3064 - protein, 419 aa, Azotobacter vinelandii
MAPSAWPPARALPSFVNNRQRGRHMSQDPVVIVSAARTPLGAFQGELSGLSAPRLGGVAVRAALQRAGLPGERVQELILGCVLPAGLGQAPARQAAIEAGLPLSVGCTTVNKVCGSGMKAAMLAHDLLLAGSAEVVLAGGMESMSNAPYLLPGARGGYRLGHRQALDHMFFDGLEDAYFDRGRLMGTFAEDCAASHGFGREEQDTWAIASTSRARAAIESGAFAWEIAPVSLSGRHGEVLIEHDEQPPKARLERIPELKPAFREGGTVTPANSSSISDGAAALLLMRRSTAGRLGLAPLATVVGHASHAHEPRLFPTAPVGAMRKLLERLGWSVGDVDLWEINEAFAVVTLAAIRDLRLDPARVNVHGGACALGHPIGASGARILVTLLGALRRGGGRRGVASLCIGGGEATAMAVEMA

SEQ ID NO: 3065 - DNA, 1194 bp, Azotobacter vinelandii
  CDS (1)..(1194): transl_table=11
atgagcgcacaaatacaagaagtggtcatcgtcagcggggttcgcacggccatcggcggcttcggcggcagcctgaagagccaccggcccggcgaactgggcggcctgctggtcgccgaggcggtacgccgggcgggcatcgatgcggccggcatcggccattgcgtgttcggcaacgtcatccacagcgagccgcgcgacatgtacatcagccgggtggcggcgctgcagggcggcctgtccgtggataccccggcgctgaccgtcaaccgcctgtgcggcagcggcctgcaggccatcgtcagcgccgcccagcagatccagctcggcctgtgcgacgcggcggtggccggcggcgccgagtcgatgagcctggcgccctaccacctgcccgccgggcgcttcggccagcggatgggcgacggggtgaccgtcgacccgatggtcggcgccctgcagtgcccgatcaaccgctaccacatgggcgtgaccgcggagaacgtcgccgagcagtacggcatcacccgcgagcagcaggatgcgctggccgtcgagagccacaagcgcgcccagcgcgccgtcgagcaggggtatttcaaggagcagatcctgcccatcgagctgaagagccgcaaaggctcgaccttcttcgataccgacgagcacatccgcttcgactgcacgctcggcgacctcgagccgctgaagccggtgttcaagaaggagggcggcacggtcaccgccggcaacgcctccgggctcaacgacggcgccgccgccctggtgctgatggcgcgcaccagggccgaagccgagggtcgtcaggtcctggcccgattggtcgattatgcggtggtcggcgtcgagccgagcatcatgggcatcggcccggttccggccattcgccagttgctcgaacgcaacggcctgggcgtcggcgacatcgacgtcttcgaggtcaacgaggccttcgccgcccaggcgctggccgtcgcccagcaactggaactgcccgccgagcgcctcaaccccaacggcagcggcatctccatgggccatccgatcggcgccaccggcgccatcatcacggtgaaggcgatccacgagctggcccgcgtcctgggccgctacgccatcgtcagcctgtgcatcggcggcggccagggcatcgcggcgctgctgcggcgcgactga

SEQ ID NO: 3066 - protein, 397 aa, Azotobacter vinelandii
MSAQIQEVVIVSGVRTAIGGFGGSLKSHRPGELGGLLVAEAVRRAGIDAAGIGHCVFGNVIHSEPRDMYISRVAALQGGLSVDTPALTVNRLCGSGLQAIVSAAQQIQLGLCDAAVAGGAESMSLAPYHLPAGRFGQRMGDGVTVDPMVGALQCPINRYHMGVTAENVAEQYGITREQQDALAVESHKRAQRAVEQGYFKEQILPIELKSRKGSTFFDTDEHIRFDCTLGDLEPLKPVFKKEGGTVTAGNASGLNDGAAALVLMARTRAEAEGRQVLARLVDYAVVGVEPSIMGIGPVPAIRQLLERNGLGVGDIDVFEVNEAFAAQALAVAQQLELPAERLNPNGSGISMGHPIGATGAIITVKAIHELARVLGRYAIVSLCIGGGQGIAALLRRD

SEQ ID NO: 3067 - DNA, 1200 bp, Ralstonia solanacearum UW551
  CDS (1)..(1200): transl_table=11
atgaccaagcaactgcaagacgcctacatcgtcgccgccacccgctccccgatcggcaaggcgcccaagggctcgttcaagaacctgcgtccggacgacctgctggcgaccgtgctcaagagcgcggtggcccaggtgccgaacctggacccgaagctgatcgaagacgccatcgtcggctgcgcgattcccgaagcgcagcagggcctgaacgtggcgcgcatcggcgcgctgctggccggcctgccgaacacggtgggcggcgtgaccgtcaaccgcttctgcgcctcgggcctgaccgccgtggcgatggccgccgaccgcatccgcgtgggcgaatccgacgtgatgattgccgccggtgtcgagtcgatgagcatggtgccgatgatgggcaatgcgccgtcgatgtcgccgtcgatcttcgagcgcgacgagaacatcggcattgcctacggcatgggcctgaccgccgagaaggtcgcccagcagtggaagatcacgcgcgatgcgcaggacgcgttctcgctggcgtcgcaccagaaggcattggccgcgcagcaggccggcgagttcaaggacgagatcaccccgatcgagatcatcgagaaattccccaacctgggcactggcgcgatcgacctgaagacgcgcacgctgtcgctcgacgaaggcccgcgtgccgatacgtcgctcgaagggctggccaagctgcgcgccgtgttcgccaacaagggcagcgtgacggcgggcaacagctcgcagacgtcggatggttcgggtgcgttgatcctggtgtcggagaagatcctcaagcagttcaacctgacgccgctggcgcgcttcgtgtcgttcgcggtgcgcggcgtgccgccggagatcatgggcatcggcccgaaggaagcgattccggccgcgctcaaggccggtggcctgacgcaggaccagatcgactggatcgagctgaacgaagcgtttgccgcgcagtcgctggcggtcatccaggacctgggcctggacaccggcaaggtcaacccgctgggcggcgcgatcgcgctgggccacccgctgggcgcgaccggcgccattcgtgcagccaccgtcgtgcacggcctgcgccgccgcaacctgaagtacggcatggtgacgatgtgcgttggcaccggcatgggcgccgcgggtatcttcgaacgcgtctga

SEQ ID NO: 3068 - protein, 399 aa, Ralstonia solanacearum UW551
MTKQLQDAYIVAATRSPIGKAPKGSFKNLRPDDLLATVLKSAVAQVPNLDPKLIEDAIVGCAIPEAQQGLNVARIGALLAGLPNTVGGVTVNRFCASGLTAVAMAADRIRVGESDVMIAAGVESMSMVPMMGNAPSMSPSIFERDENIGIAYGMGLTAEKVAQQWKITRDAQDAFSLASHQKALAAQQAGEFKDEITPIEIIEKFPNLGTGAIDLKTRTLSLDEGPRADTSLEGLAKLRAVFANKGSVTAGNSSQTSDGSGALILVSEKILKQFNLTPLARFVSFAVRGVPPEIMGIGPKEAIPAALKAGGLTQDQIDWIELNEAFAAQSLAVIQDLGLDTGKVNPLGGAIALGHPLGATGAIRAATVVHGLRRRNLKYGMVTMCVGTGMGAAGIFERV

SEQ ID NO: 3069 - DNA, 1209 bp, Oceanicaulis alexandrii HTCC2633
  CDS (1)..(1209): transl_table=11
atgacacgcgaagccgcaatcgtttcaacagcgcgcacgccgatcggcaaggcccatcgcggcgccttcaacgacaccgcgccggaccggctggccgctcatgtcatgaaggcggcggtcgagcgcgcgggcgtcgatccgcaaaggctcgatgatgtgatcttcggcgcgggtaatcagtacggtcctcaattctacaaccttgcccgcatgagcctgttcacggcgggcctgccccagtcgctgggggcgaccacgctggatcgcaaatgcgcctccggccttaccgccgtcgccctggcggcgcgctcgatcatggcggatgacgcggacatgatcctggcgggcggggtggagtcggtctccatgacgcggctgccgggcctgcctgatgaaagctggcggtcacaaagcgttatcgccgccgagccggacgcctatatggcgatgatcgagaccgccgaagtggtggccgagcgctatagcgtcagccgggaggcgcaggaccgctacgccgttgaaagccagcaccgcgcggccgccgcgattgaagcggggcggcaggcggcggaaatcgcgcccttgcccaccgagaagatcgtgcgcgccaaggacgggtccgaaaccgggcgcgaggaagtcaatctgacagcggatgaaggcgtgcgcccggacacgagctatgcggcgctcagcagtctcaagccggtgtggagcgggggcgaggctgtggcggaaggccgttttgtcacggcgggcaatgccagccagctgtcggatggcgcggcggcgcaagtggtcatggaccacgcaaccgccagggccgaaggtcgcgaggtgctgggcgtgttccggggctttcaggtcgccggctgcgcgccggacgaaatgggcatcggcccggtgttcgccattccgaaactgctcaagcgcgccggtctcggggtcggggatatcggtctgtgggagatcaacgaggccttcgccagccagatcgtgtactgccgcgaccggttggacctgccgtcagacaggctcaatgtgaacggaggcgcgatcgcggtgggccaccccttcggtatgaccggatcgcgcctcgtgggggcggcgctgctggaaggccggcgccggggtgttagatatgtcgtcgtatccatgtgcgtcgcaggcggcatgggcgcggccggcctgttcgagctggtcgactag

SEQ ID NO: 3070 - protein, 402 aa, Oceanicaulis alexandrii HTCC2633
MTREAAIVSTARTPIGKAHRGAFNDTAPDRLAAHVMKAAVERAGVDPQRLDDVIFGAGNQYGPQFYNLARMSLFTAGLPQSLGATTLDRKCASGLTAVALAARSIMADDADMILAGGVESVSMTRLPGLPDESWRSQSVIAAEPDAYMAMIETAEVVAERYSVSREAQDRYAVESQHRAAAAIEAGRQAAEIAPLPTEKIVRAKDGSETGREEVNLTADEGVRPDTSYAALSSLKPVWSGGEAVAEGRFVTAGNASQLSDGAAAQVVMDHATARAEGREVLGVFRGFQVAGCAPDEMGIGPVFAIPKLLKRAGLGVGDIGLWEINEAFASQIVYCRDRLDLPSDRLNVNGGAIAVGHPFGMTGSRLVGAALLEGRRRGVRYVVVSMCVAGGMGAAGLFELVD

SEQ ID NO: 3071 - DNA, 1203 bp, Rhodobacterales bacterium HTCC2654
  CDS (1)..(1203): transl_table=11
atgcgcgatgccgtcatcgtctcgaccgcccgcaccccgatcggcaaggcctttcgcggtgccttcaacaacacccatgcgcaggaattgatcggtcatgccgttcgccatgccgtcgaccgcgccgggctcgagggtggcgaggtgcaggattgcgtgatcggcacggcgatccagcagggctccacgggcggcaacatcgggcgtcaggcggtcatccgcgcggggctgccgaccagcgtggcgggcatgtcgatggatcggcagtgcgcgtcgggcatgatggcgattgcgacggcggccaagcaggtcgtgcatgacgggatgcaggttgccatcggcggcggggtcgagtcgatcagcctcgtccagaatcaggacatgcgcaccgatcacctgcgcgacccttgggtgatggagcatgtgccatcgctctacatgagcatgttggagacggccgagatcgtcgcggaccgctacaacgtcagccgcgaggatcaggacgaatacgcgcttcaaagccagcagcgcacggcggcggcgcaggcggcgggcaaattcgacgacgagatcgtgccgctgacttcgacgcaggccatcatcgaccgggacaccaaggaagtgtccttcgccgaggtgacgctggagaaggacgagggcaaccgcccctcgacgaccatcgaaaacctctcgagcctgtcgccggtgttccgggacggtcaggtcgtgcaggagggcaagttcatcacggcgggcaatgcctcgcaactgtccgacggggccagcgcaagcgtcatcatggaggcgaaagaggccgagaagcgcgggcttcagcctttgggccgctatgtcggcgtgatggccgccggtctcgaccccgacgaaatggggatcgggcccatctacgcggtgccgaaactgcttgaggctcatgggctcaagatggacgacatcgggctgtgggaactgaacgaggcttttgcctgtcaggtgctccattccgcccgcgtccttggcattccgaatgaaatcctgaacgtgaacggcggcgccatctcgatcggccatccctacggcatgtccggggcgcgcatggtcgggcacgcgttgatcgaaggaaaacgtcgcggcgcgaaatacgtagtctgcaccatgtgcgtcggcggcggcatgggcgcggcagggttgttcgaggtgctctaa

SEQ ID NO: 3072 - protein, 400 aa, Rhodobacterales bacterium HTCC2654
MRDAVIVSTARTPIGKAFRGAFNNTHAQELIGHAVRHAVDRAGLEGGEVQDCVIGTAIQQGSTGGNIGRQAVIRAGLPTSVAGMSMDRQCASGMMAIATAAKQVVHDGMQVAIGGGVESISLVQNQDMRTDHLRDPWVMEHVPSLYMSMLETAEIVADRYNVSREDQDEYALQSQQRTAAAQAAGKFDDEIVPLTSTQAIIDRDTKEVSFAEVTLEKDEGNRPSTTIENLSSLSPVFRDGQVVQEGKFITAGNASQLSDGASASVIMEAKEAEKRGLQPLGRYVGVMAAGLDPDEMGIGPIYAVPKLLEAHGLKMDDIGLWELNEAFACQVLHSARVLGIPNEILNVNGGAISIGHPYGMSGARMVGHALIEGKRRGAKYVVCTMCVGGGMGAAGLFEVL

SEQ ID NO: 3073 - DNA, 1176 bp, Roseobacter sp. MED193
  CDS (1)..(1176): transl_table=11
atgaaacaagtcgttattgtctccgctgcccggactggtctggccaagtccttccgtggctctttcaacatgacgcatggggccactatgggcggcacggctgtggaagccgctgttgcccgtgctggcattgaggctgctgagatcgaagactgcatctttgggtgcggcacgcccgaaggcgagaccggcgccaatatcgcgcgccagattgccctgcgggcaggcatgccagtgacaacatctggcctgaccgtgaaccggttctgttcgtccggtttgcagtccatcgccctggctgctcagcagatcatctgcgagggtgcagggcctatggtcgccggtggggttgagagcatctcgatggtgcagcccaaggcgcgttcagtcaaagaagcttggttggcggaacacaagccggcaacctacatgacgatgatcgaaactgcggacattgtggcacagcgctatggtatcaaccgcgaagatcaggacgcctatggtctgcgcagccagcagcgcattgccgcggcgcaagaggccggactgttcgcagatgagatcgtacctatgaccaccacaatggcggtcaaggacaaggaaaccggtgagatctcaatgaaggaggcgctggtagaccgggatgaatgcaaccgtcccaccaccaccttggatggtctgagtggcctggccccggttcggggcgagggtaattttgttactgcaggcaatgcaagccagctgtcggatggcgccgctgcggtggtgctgatggatgcaaaagaggctgagcaacgcgggattgaggccatgggtgccttcaaaggttttgctgttgctggttgtgagccggatgagatgggtattggcccagtttttgctgtgccacgtctgttggagcgtcatggtctgaccgtggatgacatcgatatctgggaactgaacgaagcttttgcgagccaagcactgtatagccgggatcgcctgggaatcgacgacgagaaatgcaacgtcaatggcggttctatcgcgattggacatccctttgggatgaccggtgcccggatggttggccacatcctgcgcgaaggcaagcgccgtggggccaagctgggcgttgtcaccatgtgcgtcggaggcggcatgggcgctgcaggcctgttcgagatctactga

SEQ ID NO: 3074 - protein, 391 aa, Roseobacter sp. MED193
MKQVVIVSAARTGLAKSFRGSFNMTHGATMGGTAVEAAVARAGIEAAEIEDCIFGCGTPEGETGANIARQIALRAGMPVTTSGLTVNRFCSSGLQSIALAAQQIICEGAGPMVAGGVESISMVQPKARSVKEAWLAEHKPATYMTMIETADIVAQRYGINREDQDAYGLRSQQRIAAAQEAGLFADEIVPMTTTMAVKDKETGEISMKEALVDRDECNRPTTTLDGLSGLAPVRGEGNFVTAGNASQLSDGAAAVVLMDAKEAEQRGIEAMGAFKGFAVAGCEPDEMGIGPVFAVPRLLERHGLTVDDIDIWELNEAFASQALYSRDRLGIDDEKCNVNGGSIAIGHPFGMTGARMVGHILREGKRRGAKLGVVTMCVGGGMGAAGLFEIY

SEQ ID NO: 3075 - DNA, 1191 bp, Leeuwenhoekiella blandensis MED217
  CDS (1)..(1191): transl_table=11
atgaaaacagcatatatcgtaaaagcatacagaacagccgtagggaaagcaccgcgaggtttgttccgatttaagagaccagacgaactcgccgcagaaaccatcgattacatgatgaacgagcttcctgattttgacaagaagcgcattgatgacgtgatggtaggtaacgcgatgccggaagctgagcaaggccttaacgtagggcgattgatctcgttgatgggattaaagatcgaagacgtaccgggagtgacggtgaaccgttattgcgcttcaggaatagaaaccatcgctatggcttcggctaaaattcaggcaggaatggctgattgtattatcgccgggggtgccgaaagtatgagttacatcccgatgggtggttacaaaccggttcctgattataaagtggcaaaagccggaaatgaagattattactggggaatgggtcttactgcagaagcggttgccaatcaatttaatgtttctcgtgaagatcaggatgagtttgcatacaactcgcatcagaaagccttaaaagcgcaggaagaagatcgttttaaagagcaaatcgttccgattgatgttgaacacacttttgtaaatggtgccggaaagaaagaaactaaaacctatacggttagcaaagacgaaggtcctcgtgcagataccaagcttgaaattctggcgaaactacgtcctgttttcgccgaaggcggaagcgtaaccgcaggtaactcttcacaaatgagtgacggtgcagcattcgtactagtgatgagcgaagaaatggttaaagaattaaaattagagcctatagctcgcctggtgaatttcgctgccgttggtgtggaaccacgcattatgggaattggtccggttaaagccattccaaaggcattaaaacaagccggattacagcagaaagatatcgacctaatcgaattgaatgaagcattcgcgtcgcaatctttagcagtgatcagagagttaggtctcaatccggatatcgtaaacgtcaacggtggtgcaatcgctttaggtcacccgctaggttgtacgggagctaaactttccgttcagctttttgatgaaatgcgcaaacgcgaaatgaaaaataaatacggcgttgtgacgatgtgcgttggtaccggtcaaggtgcagccgggatttatgagttcctcaattag

SEQ ID NO: 3076 - protein, 396 aa, Leeuwenhoekiella blandensis MED217
MKTAYIVKAYRTAVGKAPRGLFRFKRPDELAAETIDYMMNELPDFDKKRIDDVMVGNAMPEAEQGLNVGRLISLMGLKIEDVPGVTVNRYCASGIETIAMASAKIQAGMADCIIAGGAESMSYIPMGGYKPVPDYKVAKAGNEDYYWGMGLTAEAVANQFNVSREDQDEFAYNSHQKALKAQEEDRFKEQIVPIDVEHTFVNGAGKKETKTYTVSKDEGPRADTKLEILAKLRPVFAEGGSVTAGNSSQMSDGAAFVLVMSEEMVKELKLEPIARLVNFAAVGVEPRIMGIGPVKAIPKALKQAGLQQKDIDLIELNEAFASQSLAVIRELGLNPDIVNVNGGAIALGHPLGCTGAKLSVQLFDEMRKREMKNKYGVVTMCVGTGQGAAGIYEFLN

SEQ ID NO: 3077 - DNA, 1170 bp, Blastopirellula marina DSM 3645
  CDS (1)..(1170): transl_table=11
atgacggcgatgacacaagccgtagtgatagatggcgttcgcacggcgattggtcgcgcgcatgctgaaaagggcgtttttcgtgacgttcgcagcgacgatctggcggttgcctgcgtcgaagcgttgctggcgcgcaccggcgtaccgccgcaagaaatcgaagacgtgatcttcggcaatacgcagcaaacgctcgaacaagggctgaacgtcggccgcctgatcgggctgatgtctggcgttccgcataccgccggcggcgcgacgatgaatcgcttgtgcggcagcagtctgcaagcgctcaaccaagccgcgcacagtattttggcaggcgccgaagatgtccaaatcgccggtgggctcgagcatatgcagcatgtgccgatggaccatgggctcgacatcaaccccaaactctttcagcaaacttcgaaagcggcgttgatgatggggatcactgccgaatttttggcgcagacccaagagatcacgcgcagcgatcaggatgagttcgcgttggctagccacaaaaaagcgaccgcggcctatgccgaaggggagttcaaaaatgaaattgtcccgatctacggtcgcaatgaagaaggtcagcgaacgctgatcaccatggatcagtgcgtgcggaccgacgcgagtatcgaagcgctcgcggccttgcagccggcctttatgccgggttcaggaacggttaccgccggcaatagctcgccgcttaacgatggcgccgcggcgctgctgctgatgtcggatgggaaagcgaaagagctgggcctgaaaccgctggtccgcgtcgtcgcgacggccgtcgccggcgttgatcccagcgtgatggggactgggccgattcccgcgaccaaaaaagcgttgcagcgcgccgggctgaagatcgaagatatcgacctgatcgaactgaacgaagcgttcgcgtcgcagtcgctcgcctgcatccgggcgctcaagctggatgtcagcaaggtcaacgttcgcggcggagcgatcgcgattgggcatccgctgggttgtagcggcgctcgcattgcgacgacgttgattcacgcaatggtcgaccgccaagtgaagtatggtctcgcgacgatgtgcatcggcgccggtcagggaatcgccaccatctttgagcggatcgactag

SEQ ID NO: 3078 - protein, 389 aa, Blastopirellula marina DSM 3645
MTAMTQAVVIDGVRTAIGRAHAEKGVFRDVRSDDLAVACVEALLARTGVPPQEIEDVIFGNTQQTLEQGLNVGRLIGLMSGVPHTAGGATMNRLCGSSLQALNQAAHSILAGAEDVQIAGGLEHMQHVPMDHGLDINPKLFQQTSKAALMMGITAEFLAQTQEITRSDQDEFALASHKKATAAYAEGEFKNEIVPIYGRNEEGQRTLITMDQCVRTDASIEALAALQPAFMPGSGTVTAGNSSPLNDGAAALLLMSDGKAKELGLKPLVRVVATAVAGVDPSVMGTGPIPATKKALQRAGLKIEDIDLIELNEAFASQSLACIRALKLDVSKVNVRGGAIAIGHPLGCSGARIATTLIHAMVDRQVKYGLATMCIGAGQGIATIFERID

SEQ ID NO: 3079 - DNA, 1200 bp, Nitrococcus mobilis Nb-231
  CDS (1)..(1200): transl_table=11
atggcggcacagattcaggatgccttcatcgtagcggccgtgcgcacgcccgtgggcaaggcgccgcgcggcgtgttccgctctacccgcccggatgatctgctggtccatgtattgcgcggggtaatcgacgcggttcccggtttggagccggcggcgatcgaagatgtactcatcggctgcgccatgcccgaggcggcgcaggggctcaacgtggcccgtatgggggccttgctcgccggcctgccggattcggtgccgggggccaccgtcaatcgattctgcgcttccgggctgcagaccatcgctatggcagcggatcgggtgcggcttggcgaagccgattgcatcatcgccggcggtaccgagagcatgagcgccatcccctggatgggcaacaagccctcgttcaaccccgcgatctttgcgcacgacgaggaggtcggtatcgccttcggcatgggtttgactgccgagaaggtggccgagcgctggcgggtcgcgcgcgaggaccaggatgccttcgccgtgcaaagccatcagcgcgctttgcacgccatcgagacgggcgagttcaaagccgagattctgccctataccgtacagcagcgggcaccttctgcggacggccagaccgtcacggtgcacgagcaaatcgtggacatcgacgagggaccaagacgcggcaccaaccaggaggcgctcgccaaactgcgcccagtgtttgcggcgcaggggtcggtgacggcgggcaatagttcgcaaaccagcgacggggccggggcggtcgtggtcatgagcgagcggatgattaagcgccttggcatccagccgctggctcgctgggtggcctacagcgtgatcggcgtgccgccgcagatcatgggcatcggtccgaagctagcgatcccaagggcactcgagcgagcgggtctgagtcaggagcagctcgaatggatcgagctcaacgaggcgttcgcggcccagagcgtggcggtgatccgcgagttggagctcgaccccgagcgggttaaccctctgggcggggccatcgcgctcggtcatccgctcggtgccaccggcgccatccgcacggccaccctgttgcacggcctgcaccggcgcggcctgcgctacggaatggtcaccatgtgcgtcggcagcggcatgggggcggcgggaattttcgaggcggtatag

SEQ ID NO: 3080 - protein, 399 aa, Nitrococcus mobilis Nb-231
MAAQIQDAFIVAAVRTPVGKAPRGVFRSTRPDDLLVHVLRGVIDAVPGLEPAAIEDVLIGCAMPEAAQGLNVARMGALLAGLPDSVPGATVNRFCASGLQTIAMAADRVRLGEADCIIAGGTESMSAIPWMGNKPSFNPAIFAHDEEVGIAFGMGLTAEKVAERWRVAREDQDAFAVQSHQRALHAIETGEFKAEILPYTVQQRAPSADGQTVTVHEQIVDIDEGPRRGTNQEALAKLRPVFAAQGSVTAGNSSQTSDGAGAVVVMSERMIKRLGIQPLARWVAYSVIGVPPQIMGIGPKLAIPRALERAGLSQEQLEWIELNEAFAAQSVAVIRELELDPERVNPLGGAIALGHPLGATGAIRTATLLHGLHRRGLRYGMVTMCVGSGMGAAGIFEAV

SEQ ID NO: 3081 - DNA, 1182 bp, Oceanicola granulosus HTCC2516
  CDS (1)..(1182): transl_table=11
atgcgcgaagccgtcatcgtctcgaccgcccgcaccgggatcgccaaggcgttccgcggcgcgttcaacgtcacccacccggcgacgctcggcggccacgtcatcgcccacgccgtggagcgcgcgggcgtcgatccggccgcgatcgaggacgtggtgatgggctgcggcatccccgagggggccgccggcttcaacatcgcccgcgcgtcggccctgcgcgcgggggtgccggtcagcgccggcgggcaggtcgtcgcccgccattgcggctcgggcctgcagagcttcatggccgccgccggcgagatcgtgctgggcggcgccgacatcgtcgtcgccggcgggctcgagcacgtcaccctggtccagaccggccgccgcgcgggctacgccgacgagccgtggctcgccgcgcaccggatggacctgttcatgccgatgctcgacaccgccgaggtcgtcgccgcccgctacggcatttcccgcgaggcgcaggacgaatacgccctcgagagccagcgccgcaccgccgccgcgcagcaggcgggccgcttcgacgccgagatcgtgccgctcgccgtcgagcgcgagatcaccgacaaggccactggcgagacccgccgcgagaccgtcaccctcgcccgggacgagggcaaccgcccgaacaccacgctcgagggcctcgccgcgctcgagccggtgcgcgggccgggccacaccgtcaccgccggcaacgccagccagctctccgacggcgcctcggcggcaatcgtcatggaggcccgcgccgccgagcgcgccgggctcgagccgctcggcatcttccgcggcatggtcgtcgccggggtcgagcccgacgagatgggcatcggccccgtcgccgccgtcccccgcctgctcgcgcgccacggcctcagcgtcgacgacatcgacctctgggagctcaacgaggccttcgccgtccagaccctcttttgccgcgaccgcctcggcatccccgccgagcggctcaacgtcgacggcggcgccatctccatcggccacccgttcggcatgagcggggcccgcctcgtcggccacgccctcctcgagggccgccggcgcggcgcgaagttcgccgtcgtcaccatgtgcatcggcggcggccagggcgcggcggggctgctccagctgcgctga

SEQ ID NO: 3082 - protein, 393 aa, Oceanicola granulosus HTCC2516
MREAVIVSTARTGIAKAFRGAFNVTHPATLGGHVIAHAVERAGVDPAAIEDVVMGCGIPEGAAGFNIARASALRAGVPVSAGGQVVARHCGSGLQSFMAAAGEIVLGGADIVVAGGLEHVTLVQTGRRAGYADEPWLAAHRMDLFMPMLDTAEVVAARYGISREAQDEYALESQRRTAAAQQAGRFDAEIVPLAVEREITDKATGETRRETVTLARDEGNRPNTTLEGLAALEPVRGPGHTVTAGNASQLSDGASAAIVMEARAAERAGLEPLGIFRGMVVAGVEPDEMGIGPVAAVPRLLARHGLSVDDIDLWELNEAFAVQTLFCRDRLGIPAERLNVDGGAISIGHPFGMSGARLVGHALLEGRRRGAKFAVVTMCIGGGQGAAGLLQLR

SEQ ID NO: 3083 - DNA, 1176 bp, Bacillus sp. NRRL B-14911
  CDS (1)..(1176): transl_table=11
atgagagaagcagttattgttgctggtgccaggacgcccgtcggcaaagcgaaaaaaggaacgctcgcccatgtccgtccagatgatttgggggcactggctgtaaaagaaaccttaaggcgtgccggaggctatgaaggcaacattgatgacttgattatcggctgtgccatgccggaggctgagcaggggctgaatatggcccgcaatatcggggcgcttgccgggctgccacatacagtgccggcagtaacagtaaaccgttattgttcttccggcctgcagaccattgcttatgctgcagaaaaaatcatggtaggcagtgcggacactgtcatcgcaggcggggctgaatcaatgagccttgtgccgatgatgggccatgtggtccgtccgaatgcaaagctcgcggaaagtgcacctgaatattatatgggcatggggcatacggcagaagaagtggccaaaaaatacggcatcagccgtgaagaccaggatgctttcgcggtccggagccatcagcgagcggcaaaagcgatccaggaaggcaagttccaggatgaaattgtgccggtggatgtgaccttccgttcagtcggaaaggacaataagcttgttgagaaaaacgttcaattcactacagatgagggagtgcgccctgattcaacggtcgatacgctcggcaagctccgtccagctttttctgtcacaggttcagttacagcaggaaactcatcacagacaagcgacggcgctgccgcggtcatggtgatggaccgcgagaaagcagattccctcagcctgaagccgatggccaagttcagaagctttgccgttggcggtgtgcctccagaagtaatgggaatcgggccgattgtggccattcctaaagcactgaagcttgccggcctggagctgtctgatatcggcctgttcgaactgaatgaggcatttgcatctcaatccatccagattatcagggagcttggccttgatgaggataaggtgaatgtaaacggcggagcaattgcacttggtcacccgcttggctgtacaggtgcaaaattgacgctaacgcttctgcacgaaatgaagcgccgcaatcagcagttcggggttgtcacaatgtgcatcggcggcggcatgggtgcagcgggcgtattcgagcttatctaa

SEQ ID NO: 3084 - protein, 391 aa, Bacillus sp. NRRL B-14911
MREAVIVAGARTPVGKAKKGTLAHVRPDDLGALAVKETLRRAGGYEGNIDDLIIGCAMPEAEQGLNMARNIGALAGLPHTVPAVTVNRYCSSGLQTIAYAAEKIMVGSADTVIAGGAESMSLVPMMGHVVRPNAKLAESAPEYYMGMGHTAEEVAKKYGISREDQDAFAVRSHQRAAKAIQEGKFQDEIVPVDVTFRSVGKDNKLVEKNVQFTTDEGVRPDSTVDTLGKLRPAFSVTGSVTAGNSSQTSDGAAAVMVMDREKADSLSLKPMAKFRSFAVGGVPPEVMGIGPIVAIPKALKLAGLELSDIGLFELNEAFASQSIQIIRELGLDEDKVNVNGGAIALGHPLGCTGAKLTLTLLHEMKRRNQQFGVVTMCIGGGMGAAGVFELI

SEQ ID NO: 3085 - DNA, 1203 bp, Aurantimonas sp. SI85-9A1
  CDS (1)..(1203): transl_table=11
atgagagaagcggtcatcgtctcgacggcccgcacgccgatcggcaaggcctatcgcggcgccttcaacgacacccaggcccaggcgctgggcgggcacgccatccgccacgcggtcgagcgcgccggcgtcgatccggccgagatcgaggacgtggtgatgggcgcggccctgcagcagggctcgaccggcaccaatatcgcccgccagtgcgcgctgcgcgccggcctgccgacgcaggtcgccggcatgtcggtggaccggcaatgcgcctccggcctgatgggcatcgccatcgccgccaagcagatcgtccaggacaacatgaccgtggcggtcggcggcgggctggaatcggtgtcgctggtccagaacgacaagatgaacatgctccgcgccgccgatccctggctgcgcgagcaccggcccgacctctacatgtcgatgctggagaccgccgagatcgtcgccgaccgctatggtatctcgcgcgaggaccaggacgccttcgcgctgcagtcgcagcagcgcacggccgcagcccaacaggccggccgctacgacaacgagatcgtgccgatgaccgtgaccatgaaggtcaaggatcgcgagaccggcgagatctccgatcgcgaggtcaccattgatcgcgacgagggcaaccggccgcagacgacgctcgccgatctcgagaagctgaatccggtcttcaaggacggccaggaggtcgccgaagggcgcttcatcaccgccggcaacgcctcgcagctctccgatggcgcctccgccgcggtgctgatggaagcccgcgacgctgagcgccgcggcctgcagccgctcggccgctatgccggcatcgcggtcgccggctgcgacccggacgagatgggtatcggcccggttttcgcggtgcccaagcttctggagaagaacggcctgaagatcggcgacatcggcctgtgggagctgaacgaggccttcgcctcccaggcgatctattgccgcgacaagctcggcatttccggcgaaatcctcaacgtcgacggcggcgcgatctcgatcggccatccctacggcatgtccggcgcccgcatggccggccacgcgctcatcgagggccggcggcgcggcgtgcgctgggtcgtcgtgaccatgtgtgtcggcggcggcatgggcgcggccggcctcttcgaggtcctgtga

SEQ ID NO: 3086 - protein, 400 aa, Aurantimonas sp. SI85-9A1
MREAVIVSTARTPIGKAYRGAFNDTQAQALGGHAIRHAVERAGVDPAEIEDVVMGAALQQGSTGTNIARQCALRAGLPTQVAGMSVDRQCASGLMGIAIAAKQIVQDNMTVAVGGGLESVSLVQNDKMNMLRAADPWLREHRPDLYMSMLETAEIVADRYGISREDQDAFALQSQQRTAAAQQAGRYDNEIVPMTVTMKVKDRETGEISDREVTIDRDEGNRPQTTLADLEKLNPVFKDGQEVAEGRFITAGNASQLSDGASAAVLMEARDAERRGLQPLGRYAGIAVAGCDPDEMGIGPVFAVPKLLEKNGLKIGDIGLWELNEAFASQAIYCRDKLGISGEILNVDGGAISIGHPYGMSGARMAGHALIEGRRRGVRWVVVTMCVGGGMGAAGLFEVL

SEQ ID NO: 3087 - DNA, 1233 bp, Sphingomonas sp. SKA58
  CDS (1)..(1233): transl_table=11
atggcggctgatgctattgcgcctgcgaaaacccatccaccatcaaagaggatagaggccttgtcagacatcgtcatcaccgccgcgaagcgcacgcctgtcggcagctttcttggcgcattcagcagcacgccggcgcatgtcctgggccagaccgcgattcaggccgcgctggaacaggcgggggtttcggccgaggaggtggatgaagtcattctgggccatgtcctgaccgcagggctgggccaaaatcccgcccgtcaggcagcgatcgctgccggcatcccggtggaccgtaccgccttcgcgatcaatcaggtctgcgggtcaggcctgcgtgccgtcgcgctcgcagcgcaggcgatcgcgctgggcgacgcgcgcatcatggttgcgggcggtcaggaaaatatgtcgctcgccccgcacgcccagttcctgcgcgccgggcagaaaatgggcaatgtcagcctgatcgacaccatgatcgtcgatggcctgaccgatgcgttcaacggctatcatatgggcattacggccgagaatctggccgagaaatatcagatcagccgcgaagcgcaggacgcattcgccgtggccagccagaacaaggcgtcggccgcgcggtcctccggtcgcttcaaggatgaaatcacgcccgtgacggtcaaggggcgcaagggcgacacgatcgtcgataccgatgaatatatccgcgatggcgcgacgatcgaggcgatgagtggcctcaaacccgctttcaagaaggacggctcggtcacggcaggcaatgccagcggcctgaacgacggcgccgccgcgctggtgctgatgacggccgatgaggccgccaagcgcggcgcgacgatcctgggccgtatcgcaggctttgcgacctgcggcgtcgatccgtcgatcatgggcattggcccggctccggccagccgcaaggcgttgtccaaggcgggctggtcggtcgccgacctcgacctcatcgaagccaatgaggcgttcgcggcacaggccctgtccgtcagccaggaactgggctttgatcctaacaaggtcaatgtgaatggcggtgcaatcgcgatcggccatcccatcggcgcatcgggcgcgcgggtgctgacgaccttgctctatgaaatgggcaagcgcgacgcgaaaaagggcttggccacgctttgcatcggcggcggcatgggcgttgccatgtgcatcgaacgctga

SEQ ID NO: 3088 - protein, 410 aa, Sphingomonas sp. SKA58
MAADAIAPAKTHPPSKRIEALSDIVITAAKRTPVGSFLGAFSSTPAHVLGQTAIQAALEQAGVSAEEVDEVILGHVLTAGLGQNPARQAAIAAGIPVDRTAFAINQVCGSGLRAVALAAQAIALGDARIMVAGGQENMSLAPHAQFLRAGQKMGNVSLIDTMIVDGLTDAFNGYHMGITAENLAEKYQISREAQDAFAVASQNKASAARSSGRFKDEITPVTVKGRKGDTIVDTDEYIRDGATIEAMSGLKPAFKKDGSVTAGNASGLNDGAAALVLMTADEAAKRGATILGRIAGFATCGVDPSIMGIGPAPASRKALSKAGWSVADLDLIEANEAFAAQALSVSQELGFDPNKVNVNGGAIAIGHPIGASGARVLTTLLYEMGKRDAKKGLATLCIGGGMGVAMCIER

SEQ ID NO: 3089 - DNA, 1185 bp, Oceanobacter sp. RED65
  CDS (1)..(1185): transl_table=11
atgagtactcgtgacatagtaattgtcgctgctgggcgcagcgccatcggtactttccaaggtggcctaagtagtttatctgccgttgatctaggcagccaagtcatcaaacacttattgactaaacaccagatcgacggtgcccaggtcgatgaagttatccttggtcaggtgttaactgctggcacaggtcaaaatccggctcgccaaagtgctattagggctgggctaccgaatacaacacctgcaatgactattaataaagtgtgtggttctgctctaaaagcactgcacttgggtgctcaagccattgcttgcggcgatgctgatatgatcatcgcaggtggtcaagaaagcatgagcaatgccccacacgtcatgcctaattctcgcaatggtcaacgaatgggccctatcactatgattgataccatgattactgacggcctttgggatgcatttaacgactatcacatggggattacagcagagaacttggcagaaaagtttggcatcagccgtgaagaacaagatacctttgccgcagccagtcaacaaaaggcagtggcagcgcaagaagcgggtcgcttcgatgatgaaatcattccaatcacagtgccacaacgaaaaggcgatgatctagtctttgataaagacgagggtccgcgcgcaggcaccaccccagaaaaactcgcagccatgcgccctgcttttaaaaaagacggtactgtaactgctgccaatgcatctagcttaaatgatggtgccgccgcagtaattatgtgtagtcgcgaaaaggcagacgaattaggtctacctgtattagccacgattaaagcttatgcaaacgcaggagtagatcccagcattatgggaattggcccagtaagcgcaacacaacgctgcttaagtaaagccggttgggagctgaatgatatagacctaattgaagccaacgaagcctttgccgtgcaagcattaagcgtaggcaaagaacttggctgggatagcgacaaagtaaatgttaatggcggcgctattgcccttggtcatcctattggcgcttcaggctgccgtgttctcgtaacactattaaatgaaatgcaaaaacgtgacgtgaacaaaggattagcaactctttgtattggtggcggtatgggagtgtccatagccattgaacgctag

SEQ ID NO: 3090 - protein, 394 aa, Oceanobacter sp. RED65
MSTRDIVIVAAGRSAIGTFQGGLSSLSAVDLGSQVIKHLLTKHQIDGAQVDEVILGQVLTAGTGQNPARQSAIRAGLPNTTPAMTINKVCGSALKALHLGAQAIACGDADMIIAGGQESMSNAPHVMPNSRNGQRMGPITMIDTMITDGLWDAFNDYHMGITAENLAEKFGISREEQDTFAAASQQKAVAAQEAGRFDDEIIPITVPQRKGDDLVFDKDEGPRAGTTPEKLAAMRPAFKKDGTVTAANASSLNDGAAAVIMCSREKADELGLPVLATIKAYANAGVDPSIMGIGPVSATQRCLSKAGWELNDIDLIEANEAFAVQALSVGKELGWDSDKVNVNGGAIALGHPIGASGCRVLVTLLNEMQKRDVNKGLATLCIGGGMGVSIAIER

SEQ ID NO: 3091 - DNA, 1155 bp, Desulfitobacterium hafniense DCB-2
  CDS (1)..(1155): transl_table=11
atgaaagaagcattcattattgaagcgaaacgtactgccatcggcaaagctggccggggctccctggctcatatgcgtccggatgatttggcagcctttgttattcaggatgttttgaaaagtgcccccaatctaaattcggcagatattgatgattgtgtcatcggctgctccttccccgaaggagaacaagggatgaacatggcccgggtgattgccctgcgggcaggtcttcccatcgatgtatccggactcaccatcaaccgcttttgttcctcaggactgcaggctatctccctggcagcagacagaatccggctgggagaagcccatgccatgctggccggcggagcagaaagcatgtccgcggtgcccatgggcggcggcaaaccagcccccaatccctacatgatggagcattgtccggaagtctacctctccatgggacttaccgccgaaaatgtcgccaagaaatatgaaattacccgggaacaacaggatgagtttgccgcagccagccatcaaaaggcccacgcggcccaagtcggcggccgttttgaggaagagatcgtccctgtcctcatcgccagcggtaaaaagggagaggtatggttcagtaaagacgaaggaatccgtgccgatagtaccgtggaatccctcggcaaactaaaaccggctttcaaaaacggcggctgcgtcacggcggggaactcctctcagaccagtgacggcgccgcggccaccctccttatgtccgaggagaaggtcaaggagctggacctgaaaccccttgccctatggcgcggtttcgctgtggcaggagtcgaggcggaactcatgggaatcggccccatcaaggccatccccaaagttctcaagcaagtgggcttaacccttgagcaaatagacctctttgagctcaacgaggcttttgcctcacagtccctggccatcatcaagaccctgggcatcgacccggccaaggtcaatcccaacggcggcgctatcgctttcggacaccccctgggctgcaccggagcaaagctcaccgccaccctgctccatgaaatgaaacgccgcggtctcaaatacggtatggtgaccatgtgcatcggcggcggcatgggagccgcaggagtctacgagcttctgtag

SEQ ID NO: 3092 - protein, 384 aa, Desulfitobacterium hafniense DCB-2
MKEAFIIEAKRTAIGKAGRGSLAHMRPDDLAAFVIQDVLKSAPNLNSADIDDCVIGCSFPEGEQGMNMARVIALRAGLPIDVSGLTINRFCSSGLQAISLAADRIRLGEAHAMLAGGAESMSAVPMGGGKPAPNPYMMEHCPEVYLSMGLTAENVAKKYEITREQQDEFAAASHQKAHAAQVGGRFEEEIVPVLIASGKKGEVWFSKDEGIRADSTVESLGKLKPAFKNGGCVTAGNSSQTSDGAAATLLMSEEKVKELDLKPLALWRGFAVAGVEAELMGIGPIKAIPKVLKQVGLTLEQIDLFELNEAFASQSLAIIKTLGIDPAKVNPNGGAIAFGHPLGCTGAKLTATLLHEMKRRGLKYGMVTMCIGGGMGAAGVYELL

SEQ ID NO: 3093 - DNA, 1179 bp, Chloroflexus aggregans DSM 9485
  CDS (1)..(1179): transl_table=11
atgcgtgaagcagtgatcgtatcaggagtgcgcaccgctgtcggcaaagccggtcgtggcgcattgcgcacggtgcggcccgatgatttagcagccattgtgattaaggcagccatcgagcgcgccgggatcgagccggccttggttgaagatgtgattatgggctgcgcgatgccggaaggtgagcagggattgaacgttgcccgtattgcagcccagcgtgccggtttacccgatagtgtctgcggtgtaaccgtaaaccggttctgttcgtcaggtttgcagacgattgcgatggcggcgtaccagataatggccggccagaacgacatcatcgtcgccggtggtaccgaaagtatgagcatggtaccgatgagcggtaacaagttctctcccaatccctaccttgcccaacacgatccggcagtctatttgagcatggggttgacggctgagcgtgtagcccgtcggtttgagatcagccgcgccgatcaagatgcgtttgccttgcgctcacaccagcgcgcattagcggcccaagcagccggtctgttcgatagcagcatcgtgccggttgaggttgaaatggtcgaaccggggccggacggacgaccgcaacgtcgcgttcagatcttcacccgtgatgaagggcctcgcgccgacacctcggcagaggcgttggcaaaactcaagccggtctttgccgccgatgggacggttacggccggtaattcgtcacaaaccagcgacggtgcggcagcggtggttgtgatgagtgccgagcgtgccgccgaactcggtctcaaaccacgtgcccgctttgtgagttttgcggtgggcggggtcgaaccagaggtgatgggaatcgggccggttgtggcaattccgaaggctttgaaactggccggtctctctctggccgatattgacctgatcgagctaaacgaagcctttgcggcacaggcgctcgccgtcattcgccggctcgacctcgacgaagaacgggtgaatgtcaacggtggcgcaatcgccctcggtcacccgctcggttgcaccggagccaaactgaccgtccagatcctcgatgagcttgagcgacgtggtggacggtacgggatggtgacaatgtgcatcggaggtgggatgggagccgccgggatttttgagcggctggcataa

SEQ ID NO: 3094 - protein, 392 aa, Chloroflexus aggregans DSM 9485
MREAVIVSGVRTAVGKAGRGALRTVRPDDLAAIVIKAAIERAGIEPALVEDVIMGCAMPEGEQGLNVARIAAQRAGLPDSVCGVTVNRFCSSGLQTIAMAAYQIMAGQNDIIVAGGTESMSMVPMSGNKFSPNPYLAQHDPAVYLSMGLTAERVARRFEISRADQDAFALRSHQRALAAQAAGLFDSSIVPVEVEMVEPGPDGRPQRRVQIFTRDEGPRADTSAEALAKLKPVFAADGTVTAGNSSQTSDGAAAVVVMSAERAAELGLKPRARFVSFAVGGVEPEVMGIGPVVAIPKALKLAGLSLADIDLIELNEAFAAQALAVIRRLDLDEERVNVNGGAIALGHPLGCTGAKLTVQILDELERRGGRYGMVTMCIGGGMGAAGIFERLA

SEQ ID NO: 3095 - DNA, 1197 bp, Comamonas testosteroni KF-1
  CDS (1)..(1197): transl_table=11
atgaaacaagtacaagacgcctatatcgttgctgccacgcgcacgcccatcggtcgctcgcacaagggttttttccgcaactaccgtcccgacgatctgctggccaccacgctcaaggcggcgctggcccaggtacctggcctggaccccaaggcgatcgaggacatcgtctgcggttgtgcgattcccgaagcccagcagggcctgaacgtggcgcgtatcggtgctgtcctggcgggactgcccaccagcattggcggcatcaccgtcaaccgtttctgcgcctccggtctgtcggccgtggccatggcggcggaccgcatccgcgtcggtgaagccgatgtgatggttgctgcgggcgtggagagcatgagcatggtgcccatgatgggcaatgcgcccagtctttcgcccagcatcttcgagcgcgatggcgatgtgggcattgcctacggcatgggcctgacggcagagaaggtggcccagcagtggaaggtctcacgagaggcgcaggatgcgtttgcactcgaatcgcaccgccgcgcgatcgccgcgcagcaggccggcgagttcgcagccgagatcacgccgatcgaagtcacggaccgtacgctgaacatcgccacgggcgaaaccgtggccagcacgcgcaccgtgagtctggacgaaggcccgcgccccgataccagcctggaaggcctggccaagctgcgcaccgtgtttgcagcgcgcggcacggtcactgcgggcaatagctcgcagaccagcgacggtgcgggcgcgttgatcattgccagcggcgatgccgtcaagcgctttggcctgacgccgctggcgcgctttgtcagctatgccagcaagggcgtgccgcccgccatcatgggcattggccccattgaggccattcccgccgcgctgcgctacgcaggtctcaagcaggacgatatcgactggttcgagctcaacgaggcttttgcggcccagtccctggccgtcatcaacaccctcggtctggaccagagcaaggtcaaccccatgggcggtgcgattgcactgggccatcccctgggggcaaccggtgccatccgtgccgccaccgtggtgcatgcgctgcaacgcaagcagctcaagtacggcatggtgaccatgtgcgtgggcatgggtcagggcgcggcaggcatcttcgagcgcgtctga

SEQ ID NO: 3096 - protein, 398 aa, Comamonas testosteroni KF-1
MKQVQDAYIVAATRTPIGRSHKGFFRNYRPDDLLATTLKAALAQVPGLDPKAIEDIVCGCAIPEAQQGLNVARIGAVLAGLPTSIGGITVNRFCASGLSAVAMAADRIRVGEADVMVAAGVESMSMVPMMGNAPSLSPSIFERDGDVGIAYGMGLTAEKVAQQWKVSREAQDAFALESHRRAIAAQQAGEFAAEITPIEVTDRTLNIATGETVASTRTVSLDEGPRPDTSLEGLAKLRTVFAARGTVTAGNSSQTSDGAGALIIASGDAVKRFGLTPLARFVSYASKGVPPAIMGIGPIEAIPAALRYAGLKQDDIDWFELNEAFAAQSLAVINTLGLDQSKVNPMGGAIALGHPLGATGAIRAATVVHALQRKQLKYGMVTMCVGMGQGAAGIFERV

SEQ ID NO: 3097 - DNA, 1179 bp, Bacillus coagulans 36D1
  CDS (1)..(1179): transl_table=11
atgagggaagctgtcattgttgcaggggcgagaacaccggtcggcaaagcaaaaaaagggacgctcgcacaaacacggccggatgatttaggtgcacttgtcgtaaaagaaacgttaaaacgcgccggcaactatgaaggaaatattgatgatttgattatcggctgcgccatgccggaagcggaacaggggctcaatatggcacgcaatatcggggccctagcaggattgccggatacggtgccggcgattacgatcaaccgctactgctcatccgggctgcaggcgattgcttacggcgccgaaaggatcatgctcggccacgctgacacgatcattgccggcggtgcggaatcgatgagccttgtcccgatgatggggcatgtcgtccgcccgaatgtacgacttgcagaaactgcgccggaatattatatgggcatggggcatacggccgaagaagtcgccaaaaaattcggcgtcagccgcgaagaccaggatgccttcagcgtgcgcagccaccaaaaagcggcaaaagcgattgcagaaggcaaattcaaagacgaaattgtgccggttgaggtcacattacgttcggtcggcgaagacaacaaacttgttgaaaagaaagtcgtcttttcgcaggatgaaggggtccggccggatacaaatgtagaaacgctcggaaaactgcgcccggcattctcggtaaccggaaccgtaacggccgggaactcgtcgcaaacaagcgacggcgcggctgcagtaatgctcatggataaagaaaaggctgaatcactcgggcttaagccgctgttgaaattccgctcgttcgccgttgccggggtgccgcctgaaatcatggggatcggcccggtggaagccgtgccgaaagctttgaaactggcagggttgagccttgaggatatcgggttgttcgaactgaatgaagcttttgcttcccagtccatccaggttatccgccagctcggccttaatgaagacatcgtcaatgttaacggcggcgcaattgccctcggccatccgctcggctgcacaggcgccaagctgactttgacgcttgcccatgaaatgaagcgcagaaacgtgcagttcggcgtcgtcacgatgtgtatcggcggcggcatgggtgcagcaggtgtgtttgagctcgtgtcctga

SEQ ID NO: 3098 - protein, 392 aa, Bacillus coagulans 36D1
MREAVIVAGARTPVGKAKKGTLAQTRPDDLGALVVKETLKRAGNYEGNIDDLIIGCAMPEAEQGLNMARNIGALAGLPDTVPAITINRYCSSGLQAIAYGAERIMLGHADTIIAGGAESMSLVPMMGHVVRPNVRLAETAPEYYMGMGHTAEEVAKKFGVSREDQDAFSVRSHQKAAKAIAEGKFKDEIVPVEVTLRSVGEDNKLVEKKVVFSQDEGVRPDTNVETLGKLRPAFSVTGTVTAGNSSQTSDGAAAVMLMDKEKAESLGLKPLLKFRSFAVAGVPPEIMGIGPVEAVPKALKLAGLSLEDIGLFELNEAFASQSIQVIRQLGLNEDIVNVNGGAIALGHPLGCTGAKLTLTLAHEMKRRNVQFGVVTMCIGGGMGAAGVFELVS

SEQ ID NO: 3099 - DNA, 1176 bp, Algoriphagus sp. PR1
  CDS (1)..(1176): transl_table=11
atggaagcatatatagtaaacggatatagatcagcagtcggaaaagccaaaaaaggtggttttcgattttacaggccagatgatttagctgctgatgtgatcaaacatctagtggctaacactccaggtctggaaacgaaacatgtggatgatttaatcgtcggaaatgccgttcctgaagcagagcaaggaatgcaaatgggtaggatgatttccttattggcacttggagtagaaaacccaggctttataatcaatagatattgtggatcaggactggaagcaattgctttggcggtaggcaaaatcaaagctggtatggcagattgtatcattgccggagggacagaaagtatgtccatggttccaatgatgggatataagacggtattgaattataagattgctacggagcacccagattattatatcagcatggggcttacagcagaggagctggccaaggaatacgggattactcgcgaagagtctgatgctttttccgttaaatctcatgaaaaagctttggcagctatagcagaaggaagattcaaagatgagattgttcctgtagaagttgaggaaacttatttggatgaaaaagggaaaaagaaaaccagaaaatatactgtagatacagatgaagggccaagaccaggtactaccatggaagtattatctggattaagacctgccttcaaaaataaaggacaagtaacagcaggcaactcttcacagacttctgatggggcagcatttgtggtggtaatgtccgaaagatttatgaaatcattgaatcttgaacctgtggccagattagcatcttattcagttgctggtgttgagcctcgaataatgggaattggcccgaaagaggctgttccaaaagcgctaaagcaagcgggtttaacactgaatgacattgatttgattgagttaaatgaggcgtttgctgctcaaggtctggcagtaatcaagtcattggatatgaatcctgacattgtcaatgtaaatggaggtgcagtggcattaggtcacccattaggttgtactggtgccaaactatcagttcagatgtttaatgaacttcaaaagcggaataagaaatacggtttagtgactgcctgcgtaggaggaggacagggagttgccggagtttatgagctcttgaagtag

SEQ ID NO: 3100 - protein, 391 aa, Algoriphagus sp. PR1
MEAYIVNGYRSAVGKAKKGGFRFYRPDDLAADVIKHLVANTPGLETKHVDDLIVGNAVPEAEQGMQMGRMISLLALGVENPGFIINRYCGSGLEAIALAVGKIKAGMADCIIAGGTESMSMVPMMGYKTVLNYKIATEHPDYYISMGLTAEELAKEYGITREESDAFSVKSHEKALAAIAEGRFKDEIVPVEVEETYLDEKGKKKTRKYTVDTDEGPRPGTTMEVLSGLRPAFKNKGQVTAGNSSQTSDGAAFVVVMSERFMKSLNLEPVARLASYSVAGVEPRIMGIGPKEAVPKALKQAGLTLNDIDLIELNEAFAAQGLAVIKSLDMNPDIVNVNGGAVALGHPLGCTGAKLSVQMFNELQKRNKKYGLVTACVGGGQGVAGVYELLK

SEQ ID NO: 3101 - DNA, 1173 bp, Bacillus sp. B14905
  CDS (1)..(1173): transl_table=11
atgcgtgaagccgttattgtagcaggagcacgaactccaattggaaaagcaaaaaaaggttctttagcaacagtaagaccagatgactttggtgctgccgttgtcaaagaaacattaaaaagagcaggctatgagggaccgatagatgatttaattttaggctgtgctatgccagaagcagaacaagggatgaatgtagctcgtagtatcggtgcacttgccggattgccagatacaactccggctctaacaattaatagattttgttcttcaggtctacaggcgattgcctatgcagctgaacgaattatgctagggcactcaaaggctattcttgccggtggtgtcgagtcaatgagtatggtgccaatggtggggaacacaccccgcttaaatccaactttagcagaaacagctccacaatattatatgggaatggggcatacagctgaggaagtagctcgacagtacaatgtaagtcgagaagatcaagatgcatttgctgttcgttcacatgaacttgctgaaaaggcgatcaaagaaggtaaatttaatgatgagattgtaccaatagaagtggaacaacattatgttgacgaaaacaataagccacaggtgaaaaaattcactttcagtatggatgaaggtgtacgtcctggtacatcggttgaaggcttagcgaagcttcgtccagctttccatgtgaaagggagtgtgacggcagggaacgcttctcaaacttccgatggtgcagcagctgtattggtgatggatcgcgaagaggctgtcaagcaaggtttaacaccaatggcaaaattcctaggctttgcagtaggtggtgtaccacctgaagtaatgggaattggtccaattgtggcggtaccaaaagcattagaaattgcaggtttatcagtagatgctattgatctatgggaaatcaatgaggcatttgcatcccaatccttacaggttgttcgtcatttaggcattgaccaagataaggtcaatgtgaatggtggagctatagcattaggacatccacttggtgcaacgggtgctattttaacactaaaacttattcatgaattaaagcgtcaaggcaagaaatatggtgtagtaactatgtgcattggtggcggcatgggggctgctggagtatttgaaattctataa

SEQ ID NO: 3102 - protein, 390 aa, Bacillus sp. B14905
MREAVIVAGARTPIGKAKKGSLATVRPDDFGAAVVKETLKRAGYEGPIDDLILGCAMPEAEQGMNVARSIGALAGLPDTTPALTINRFCSSGLQAIAYAAERIMLGHSKAILAGGVESMSMVPMVGNTPRLNPTLAETAPQYYMGMGHTAEEVARQYNVSREDQDAFAVRSHELAEKAIKEGKFNDEIVPIEVEQHYVDENNKPQVKKFTFSMDEGVRPGTSVEGLAKLRPAFHVKGSVTAGNASQTSDGAAAVLVMDREEAVKQGLTPMAKFLGFAVGGVPPEVMGIGPIVAVPKALEIAGLSVDAIDLWEINEAFASQSLQVVRHLGIDQDKVNVNGGAIALGHPLGATGAILTLKLIHELKRQGKKYGVVTMCIGGGMGAAGVFEIL

SEQ ID NO: 3103 - DNA, 1179 bp, Bacillus sp. SG-1
  CDS (1)..(1179): transl_table=11
atgcgagaagcggtaatagtagccggcgcacgtacaccggtcggaaaagcaggcaaagggactctggcaaccgtcagacctgatgaccttggtgcgttggttgtaaaagaaacacttaaaagagctggaaactatgaaggtaatatagatgacttgattataggatgcgccatgccggaagcagaacaaggcttgaacatggcaagaaacatcggaggattggcgggacttccacataatgtccctgccattaccatcaatcgatactgctcatcaggactgcagtccattgcttatgcagcagaaaaaatcatgctgggccattcagatacagccattgcaggcggagcagaatccatgagccttgtgccgatgatgggccatgtggtccgtccgaacgctaaattggcagaaacggctcctcagtattatatgagcatgggccatacggcagaggaagtggccaagaagttcggtatcacaagggaagatcaggatgcctttgcggtacgaagccatgaaaaagcggcaaaagcaatcgcagaaggcaggtttcaggatgagattgtccctgtggatgtggttcttcgttcggtgaacgaccagaacaaggtagtcgaaaagaatatcaccttcagcactgacgaaggggtaagacccggaacaaaccaacaagtcttgtctaaattgcgtccggtctttaatgtaaaaggttccgttacggcggggaactcgtctcaaacaagtgacggagcagctgcagtgatggttatggaccgtgaaaaagcaagctcattgggcttagggccgatggcaaaattcagatcgttcgctgttgcaggggtgccgccggaaatcatgggggtaggtccagttgaggcgatcccgaaagcgttgaaaatggctggtcttcaattggaggacatagggctgtttgaattgaatgaagcctttgcttcgcaatccatccaggtcatccgccagcttggactcaatgaggaaatcgtgaatgttaatggcggcgcgatcgctcttggtcacccgcttggctgttctggtacaaaactgactctttctctaattcatgaaatgaagagaagaaacgttcaatttggagtcgtaacgatgtgtatcggcggaggaatgggtgctgccggtgtgtttgaactgattggttaa

SEQ ID NO: 3104 - protein, 392 aa, Bacillus sp. SG-1
MREAVIVAGARTPVGKAGKGTLATVRPDDLGALVVKETLKRAGNYEGNIDDLIIGCAMPEAEQGLNMARNIGGLAGLPHNVPAITINRYCSSGLQSIAYAAEKIMLGHSDTAIAGGAESMSLVPMMGHVVRPNAKLAETAPQYYMSMGHTAEEVAKKFGITREDQDAFAVRSHEKAAKAIAEGRFQDEIVPVDVVLRSVNDQNKVVEKNITFSTDEGVRPGTNQQVLSKLRPVFNVKGSVTAGNSSQTSDGAAAVMVMDREKASSLGLGPMAKFRSFAVAGVPPEIMGVGPVEAIPKALKMAGLQLEDIGLFELNEAFASQSIQVIRQLGLNEEIVNVNGGAIALGHPLGCSGTKLTLSLIHEMKRRNVQFGVVTMCIGGGMGAAGVFELIG

SEQ ID NO: 3105 - DNA, 1179 bp, Pedobacter sp. BAL39
  CDS (1)..(1179): transl_table=11
atgcaggaagcatatattatagcaggatttcgtaccgctgtgggcaaggctccacgtggtgtatttcgttttaccagggccgatgacctggcggcagaagtgatcaggcagctggtggcctctgtgcccaacctgaacaaggaacagattgatgatgtgattgttggtaatgccacaccggaggctgaacagggattgaacattggcaggatgatctcactgatgggcctggatacggataaagtaccgggggtaacggttaacaggtattgtgcgtcagggctggagactattgctacggcggtagccaagattcgtagcgggatggcggactgtattgttgcgggaggtgtcgaagtgatgtcgggaatgcccttcggcggatggaaactggtgcccaacgctgaggttgccaggacaaatccggactggtactggggcatgggcttgactgctgaggctgtagcaaatgagtataaggtgagccgcgaggatcaggatgagtttgcctatcattctcacagaaaagccgtagaagccataaaaaacggacacctgaaagatgggattgccccgattacggtggtagagaattttcttgatgataaaatgaagaaacaaagccgcagttatgtggtcgatacggacgagggcccaagggcggatacgtcaatggaaaagctggcgaagctgaagcctgtgtttgcggcagacggtagcgttaccgctggaaactcttctcagacttctgatggggctgcctttgtgctcgtggtatcagagaaaaaaatgaaggagcttggggtggatccggtggcgcgattgctgagttatggcattgccggtgtgccgccaagaattatgggcatcgggcctatagaggcgatccctaaagcccttgctatggcggggatgaaactggaagatcttgatttgatagagctcaacgaggctttttcgtcacagtcgctcgcagtgatcagaacattgggcattgaccaggagaaggtgaacgtaaatggaggggccattgcgttgggacatccgctgggttgcacgggggcgaaattgagcgtgcagttgtttaacgagttaaaacgaagggatcagaagtatggaatggtgaccatgtgcgtgggtagcggacagggcgcagcaggtatttttgaaatgctttaa

SEQ ID NO: 3106 - protein, 392 aa, Pedobacter sp. BAL39
MQEAYIIAGFRTAVGKAPRGVFRFTRADDLAAEVIRQLVASVPNLNKEQIDDVIVGNATPEAEQGLNIGRMISLMGLDTDKVPGVTVNRYCASGLETIATAVAKIRSGMADCIVAGGVEVMSGMPFGGWKLVPNAEVARTNPDWYWGMGLTAEAVANEYKVSREDQDEFAYHSHRKAVEAIKNGHLKDGIAPITVVENFLDDKMKKQSRSYVVDTDEGPRADTSMEKLAKLKPVFAADGSVTAGNSSQTSDGAAFVLVVSEKKMKELGVDPVARLLSYGIAGVPPRIMGIGPIEAIPKALAMAGMKLEDLDLIELNEAFSSQSLAVIRTLGIDQEKVNVNGGAIALGHPLGCTGAKLSVQLFNELKRRDQKYGMVTMCVGSGQGAAGIFEML

SEQ ID NO: 3107 - DNA, 1200 bp, Marinobacter algicola DG893
  CDS (1)..(1200): transl_table=11
atgtccaatgatgttgtcatcgtatccaccgcccgcacgcccctggccaaatcctggcgcggcggcctgaacatgacccacggcgccacgctggccggtcacgccatccagcacgcggtcgagcgctccaaagtcgacccgaacgaaattgaagacgtactgatgggctgcgccctgcccgaaggctccaccggcaacgacgtcgcccgcatgggcgcgatccgcgccggactacccgtcactgtaggcggcgccaccattaaccgcttctgctcgtccggcctgcaagccattgccatggccgctcagcacattgcggtcgataaagtgccggtgatggtcgctggcggcgtggaatcgatttccaccgtgcaggccaacgtgaaccagaactacttcatggaaccctggctggcgaagcacaagccggagctctactggtccatgctggacaccgctgaaacggtggccaagcgctacgacatcaagaaagaagacatggacgaatacggcgtccgcagtcagaacctggccacccaggcccgtgaagacggcaaattcgacgacgaaatcgtgcccatcaccaccaccatgggcgtcgcggacaaagccaccggccagctcagcagccaggaagtgaccgtcagccaggacgaaggcatccgcccgggcaccaacctggaaggcgtgagcaagatccgctcggccatggaaggcggcgtagtcaccgccggcaatgccagccagttctccgacggcgcctctgcctgcgtactgatggacagcaaaatcgccgaacagcgcggcgctaccccgctgggtatcttccgcggtttcgcggtggccggctgcgaacccgacgaaatgggcatcggcccggttttcgcggtacccaagctgttgaagcgtgccggcctgacggtagacgacatcggcctatgggaactcaacgaagccttcgccgtgcaggttctctactgccagcgcaaactcggcatcccgatggaccgcctgaacgtcaacggcggcgccattgcagtaggccatccctacggcaccaccggctcccgcctggtcggccacgcgctgatcgaaggcaagcgccggggcgtaaaatacgtcgtggttaccatgtgcgtaggcactggcatgggtgccgcaggcttgtttgagttgcctgaagctttggtcgctgcctga

SEQ ID NO: 3108 - protein, 399 aa, Marinobacter algicola DG893
MSNDVVIVSTARTPLAKSWRGGLNMTHGATLAGHAIQHAVERSKVDPNEIEDVLMGCALPEGSTGNDVARMGAIRAGLPVTVGGATINRFCSSGLQAIAMAAQHIAVDKVPVMVAGGVESISTVQANVNQNYFMEPWLAKHKPELYWSMLDTAETVAKRYDIKKEDMDEYGVRSQNLATQAREDGKFDDEIVPITTTMGVADKATGQLSSQEVTVSQDEGIRPGTNLEGVSKIRSAMEGGVVTAGNASQFSDGASACVLMDSKIAEQRGATPLGIFRGFAVAGCEPDEMGIGPVFAVPKLLKRAGLTVDDIGLWELNEAFAVQVLYCQRKLGIPMDRLNVNGGAIAVGHPYGTTGSRLVGHALIEGKRRGVKYVVVTMCVGTGMGAAGLFELPEALVAA

SEQ ID NO: 3109 - DNA, 1155 bp, Plesiocystis pacifica SIR-1
  CDS (1)..(1155): transl_table=11
atgcctgaaattcgtgaagcagtcatcgttgcgagcaagcgctccgccgtcggcaagtccggccggggcacgctccgcaacacccgtcccgacgacatgggatccgaggtcctcaaggcgaccatggcgagcatcgagggcttcgaccccgcgatggtcgaggacatcgccatcgggtgcgccatgcccgaggccgagcagggcctgaacgtcggccgggtcatcggcatcggggcgggctgccccgacgagacccccgcgctgacggtcaaccggttctgtagctccggcctgcagaccatcgccggcatcgccaaccgcatccaggtcggcgccatcgactgtggcgtcggcggcggcatcgagtcgatgtcgatggtgcccatgggcggcaacaagccgcgcgtgagccccaagatgatcgccgagcgccccgaggtctacgtgtccatgggcgtcacggccgagaacgtcgcgcgcaagtacggcgtgagccgcgaggaccaggacgccttcgccctcgagagccaccgccgggccatcgcggccatcgagggcgggcgcttcaaggacgagatcatcccggtcaccaccctcgagggcaagctcttcgacaccgacgaaggcccccgcgccgacaccagcccggccgccctcgcccggctgcgcccggtcttccacgtcaagggcacggtcaccgcgggcaactcctcgcagaccagcgacggcgtggcgatgaccgtggtcatgtccgccgacaaggccaaggagatcggcgccaagccgctcgcgcgcttcgtcggcttcgccgtcgccggcgtggccccggagatcatgggcatcggccccgtcgccgccatccccaaggtcttgaagcagaccggcctgaagctcgaggacatcgatctcttcgagctcaacgaggccttcgcggcacaatccctcgcggtcgtgcgcgagctcggcctcgaccaggacaaagtcaacgtcaacggcggcgcgatcgccctgggccaccccctgggctgcaccggcgccaagctgaccgcgaccttgctgtccgagctgcgccgtcgccagggccgctacggcatggtcaccatgtgcatcggcggcggcatgggtgccgcgggcatcttcgaagccatctactga

SEQ ID NO: 3110 - protein, 384 aa, Plesiocystis pacifica SIR-1
MPEIREAVIVASKRSAVGKSGRGTLRNTRPDDMGSEVLKATMASIEGFDPAMVEDIAIGCAMPEAEQGLNVGRVIGIGAGCPDETPALTVNRFCSSGLQTIAGIANRIQVGAIDCGVGGGIESMSMVPMGGNKPRVSPKMIAERPEVYVSMGVTAENVARKYGVSREDQDAFALESHRRAIAAIEGGRFKDEIIPVTTLEGKLFDTDEGPRADTSPAALARLRPVFHVKGTVTAGNSSQTSDGVAMTVVMSADKAKEIGAKPLARFVGFAVAGVAPEIMGIGPVAAIPKVLKQTGLKLEDIDLFELNEAFAAQSLAVVRELGLDQDKVNVNGGAIALGHPLGCTGAKLTATLLSELRRRQGRYGMVTMCIGGGMGAAGIFEAIY

SEQ ID NO: 3111 - DNA, 1200 bp, Limnobacter sp. MED105
  CDS (1)..(1200): transl_table=11
atggctcaaacttgtaaagatgtttacatcgtcgctgcaacgcgtaccccaatcggcaaggccccgcgtggcgtgttcaaagacactcgccccgatgacctgctggtgcacgccattgccagcgccatggcccaggtgccaacgctcgaccccgcatccattaatgatgcaatcgtgggttgtgcattccccgaaggcgagcagggcatgaacatggcccgtatcgctgtgttgctggcaggtctgcccaacaccgtgggcggcgtgaccatcaaccgcttctgtgcatcgggcattaccgcggtttcaatggccgccaatgcaatcgccatgggcgaagccgaagtcatgattgccgctggtgctgaaagcatgagcatggtacccatgagcggcaacaagcccagctttaacaacgcaattttccagaaagacgaaaacctgggtattgcctacggcatgggcatgactgctgaaaaagtagcgcagcagtggggcatcagccgcgatgcacaagacgaattcgccttgaacagccacaaaaaagcaatcgccgctcaacaggctggcgagttcaacgatgaaatcacaccattcaccgtggttaaagccacacctgatttgggttctggtgaaatcaagaccagcaccaaagaagtgaagctggacgaaggtccccgtgccgattcatccattgaaggcctcaccaagcttcgcccggtgtttgctgcaaaaggttctgtgaccgctggcaacagctcgcaaatgagcgacggcgcgggcgcacttattttggcttctgaagaagctgtgaagcgctacaacctgacccccttggccaagtggcgcggctttgcggtgcgcggtgtgcctccagaaattatgggcatcggccccaaggaagcgattcccgccgtgttgaaaaccgcaggtttgaaaaccagcgacatcgactggtttgaattgaacgaggcgtttgctgcgcaatcgctggctgtaatgaaagacctggagctcgaccccgcaaaagtgaaccccatgggcggcgcaatcgccttgggtcacccgctgggtgcaactggtgcaattcgtgcagccaccgtggtgcatgcactgcgtcgccacaacctgaaatacggtatggtaaccatgtgtatcggcaccggcatgggtgcagcaggcatcttcgaacgcgtgtaa

SEQ ID NO: 3112 - protein, 399 aa, Limnobacter sp. MED105
MAQTCKDVYIVAATRTPIGKAPRGVFKDTRPDDLLVHAIASAMAQVPTLDPASINDAIVGCAFPEGEQGMNMARIAVLLAGLPNTVGGVTINRFCASGITAVSMAANAIAMGEAEVMIAAGAESMSMVPMSGNKPSFNNAIFQKDENLGIAYGMGMTAEKVAQQWGISRDAQDEFALNSHKKAIAAQQAGEFNDEITPFTVVKATPDLGSGEIKTSTKEVKLDEGPRADSSIEGLTKLRPVFAAKGSVTAGNSSQMSDGAGALILASEEAVKRYNLTPLAKWRGFAVRGVPPEIMGIGPKEAIPAVLKTAGLKTSDIDWFELNEAFAAQSLAVMKDLELDPAKVNPMGGAIALGHPLGATGAIRAATVVHALRRHNLKYGMVTMCIGTGMGAAGIFERV

SEQ ID NO: 3113 - DNA, 1185 bp, Phaeobacter gallaeciensis BS107
  CDS (1)..(1185): transl_table=11
atgagagaagccgttatcgtctcaaccgcacgaacccccattggggttgccttcaaaggtgcgctgaacaacatcaagtcccctaccatgatggggcacgccatgcagcacgcggttgaacgtgcaggcgtggaccccggtttgatcgaagatgttgtcatcggatcggtcctgactgcgggaacagcaggcatgaatgtcgctcgtttgtcggcgctggctgcgggccttcccaatacggtggcaggacagacgatcgacaggcaatgctcctccgggttgatggccattgcgacggctgcaaagcagatcatcgtggatggtcagaacgttgccgtggctggcgggcaggagaatatttccgccctgcagaatgcctatctgaaatgggcgggcgatgagaaagatccaaacgttatcgcccaatctgagcatgcctacatgccgatgctgatgacggcggaaaatgtggcgcggacctatgggatcagccgcgacgtccaagatgaatacgccgcactttcgcaaggtcggaccgcccgggctcaggcggctggcgcgtttgaagatgagatcgtcccgatcactgcgattaagcgggtcaagaaccgcgaaaccggagaggaaaccgtggaagaggtgaccttgtcaaaagacgagggcaaccggccgggtacgacggccgaaacactcggggcattgaacccggttgtcgaaggaggactgatcactgccggaaacgcaagccagctttctgacggggcctcggcttgtgtgctcatggaaggcaaaatggctgagcaacagggtctcacaccgctgggtatttatcgcggcatggctgttgcaggaaacgcaccggaagagatgggggtcggcccgatctttgcaattccaaagctgctgaagaatgcaggtcttcgcatcgaagacatcggcctttgggagcttaacgaagcctttgcctgccaggttctgtattgccgtgaccatcttgggatcgatcccgaaatctacaacgtgaacggcggtgcaatatcgattggccacccctacggcatgacaggtgtgagacaagtcgggcatgctctaattgaggggaggcgtcgtggcgtgaaatacgtggtgacctccatgtgtgtcggcggaggcatgggcgccgcagcactgttcgaagtcgcctga

SEQ ID NO: 3114 - protein, 394 aa, Phaeobacter gallaeciensis BS107
MREAVIVSTARTPIGVAFKGALNNIKSPTMMGHAMQHAVERAGVDPGLIEDVVIGSVLTAGTAGMNVARLSALAAGLPNTVAGQTIDRQCSSGLMAIATAAKQIIVDGQNVAVAGGQENISALQNAYLKWAGDEKDPNVIAQSEHAYMPMLMTAENVARTYGISRDVQDEYAALSQGRTARAQAAGAFEDEIVPITAIKRVKNRETGEETVEEVTLSKDEGNRPGTTAETLGALNPVVEGGLITAGNASQLSDGASACVLMEGKMAEQQGLTPLGIYRGMAVAGNAPEEMGVGPIFAIPKLLKNAGLRIEDIGLWELNEAFACQVLYCRDHLGIDPEIYNVNGGAISIGHPYGMTGVRQVGHALIEGRRRGVKYVVTSMCVGGGMGAAALFEVA

SEQ ID NO: 3115 - DNA, 1176 bp, Oceanibulbus indolifex HEL-45
  CDS (1)..(1176): transl_table=11
atgaaacaggctgtcatcgtctctgccgtccgcaccgggctggccaaatccttccgcgggtcattcaacatgacccacggcgccaccatgggcggccatgtcgttgccgaagcggtcaaacgctcgggcgtcgatccgtcggccatcgaagatgtgatgatcggctgtggctaccccgaaggggctacgggctcgaacatcgcgcggcagatcgccctgcgtgcgggcctgccggtcaccgcgtctggtgtgaccgtgaaccgcttctgttcgtccggcctgcaaaccgtcgccatggccgccaacgccatctgccaagagggcgcaggcccgatggttgcaggcggggtcgaaagcatctcgatggtgcagcccgacgccaaatcggtgaaagaggcgtggctgatggagcataagcccgacgtctatatggcgatgatcgacaccgccgacatcgtggcgaaacgctatggcatctcccgagaggaccaagacgcttacgggttgcgcagccaacagctgatcgccgccgcgcaggaagccggcctcttcgacgatgagatcgcgccgatgcaaaccacaatgggcgtgcaggacaaggaaaccaaagagatttccacccgcgaagtcaccgtggaccgcgacgaatgcaaccgccccacaaccacgctggaaggtctcgcaggcctgacgcccgtgcgcggcgatggtgctttcatcaccgcaggcaacgccagccagctttctgatggggccgccgcattggtcttgatggacagcaaagaggctgagcagaaaggtctgcaagccatgggcgcgttcaaaggcttcgccgtcgcaggttgcgagccggacgagatgggcatcggcccggtctttgccgtgccgcgtctgctggagcgccatggcctgaccgtcaatgacatcgacctgtgggaattgaacgaagctttcgccagccaagcgctttactgtcgcgacaagctggggatcgaccccgacaaatgcaacgtcaacggcggctccatcgccatcggtcaccccttcggcatgaccggcgcgcggatgacgggccacctcctgcgcgaaggcaaccgccggggcgcaaagctgggtgtcgtgacgatgtgtatcggcggcggcatgggggcggctggcctctttgaaatctactga

SEQ ID NO: 3116 - protein, 391 aa, Oceanibulbus indolifex HEL-45
MKQAVIVSAVRTGLAKSFRGSFNMTHGATMGGHVVAEAVKRSGVDPSAIEDVMIGCGYPEGATGSNIARQIALRAGLPVTASGVTVNRFCSSGLQTVAMAANAICQEGAGPMVAGGVESISMVQPDAKSVKEAWLMEHKPDVYMAMIDTADIVAKRYGISREDQDAYGLRSQQLIAAAQEAGLFDDEIAPMQTTMGVQDKETKEISTREVTVDRDECNRPTTTLEGLAGLTPVRGDGAFITAGNASQLSDGAAALVLMDSKEAEQKGLQAMGAFKGFAVAGCEPDEMGIGPVFAVPRLLERHGLTVNDIDLWELNEAFASQALYCRDKLGIDPDKCNVNGGSIAIGHPFGMTGARMTGHLLREGNRRGAKLGVVTMCIGGGMGAAGLFEIY

SEQ ID NO: 3117 - DNA, 1176 bp, Hoeflea phototrophica DFL-43
  CDS (1)..(1176): transl_table=11
atgacccgcgccgtcatcgtctcaaccgcccgcaccgccatcggaaaggccgcacgcggcgctttcaaccagacccatggcgtcacgatggcgggatttgccacccgccatgccatcgaacgcgccgggattgacccgtctctgatcgaggattcgatctggggcaccggctacccggaaaatgtcaccggcggaaatctcggccgccaggcggtcattcgcgcagagctcccggtcaccgttgcaggcaccacggtcaaccgcttttgcgcatccggtcttcaggccatcgccatgggcggccagatgattgccggagaaggcgcccgcgcggtgctggtgggcggtgtcgaaagcatctcgctcaatcagccaaccccgcgccactctcgcgacacctggatcgaggaacacaagcccgatctctatatgacgatgatcgacacggctgacatcgtcgccgcacgctacggcatatcgcgccaggctcaggatgaacttgcgctgcaatcacaacagcgcacggcagcggcacaagccgcgggcctgttcagcgatgaaatcgtttcaatgacggtcaccaaggcggtcaaagacaaggagaccggcgcggtttcccaggtcgagaccaccatttccgccgatgaatgcaaccgcccctccaccgcgattgaaggcctggccggactgaccccggtgatgggcggggacaaattcgtcaccgccggcaacgcctcgcaattgtcagacggcgcggcagcactcgtgatgatggacgaagacgaagccggcaaggctggactgtcccctctcggccgctatctgggctttgccgtggccggatgcgagcctgacgaaatgggcatcggcccggtctttgccgtgccgcgcctgctcgaacgtcatggattgaaggtggatgatatcgacctctgggagctcaacgaggccttcgccagccaggtgatctattgccgcgaccgcctgggcattgacgacaccaaactcaacgtcaatggcggttcgatctcgatcgggcatccgttcggcatgaccggcgctcgcatgaccggccacctcctgcttgaaggcaagaggcgcggtgccaagctcggcgtcgtgaccatgtgcgtgggcggcggtcagggcgcagcaggcctgtttgaaattttctga

SEQ ID NO: 3118 - protein, 391 aa, Hoeflea phototrophica DFL-43
MTRAVIVSTARTAIGKAARGAFNQTHGVTMAGFATRHAIERAGIDPSLIEDSIWGTGYPENVTGGNLGRQAVIRAELPVTVAGTTVNRFCASGLQAIAMGGQMIAGEGARAVLVGGVESISLNQPTPRHSRDTWIEEHKPDLYMTMIDTADIVAARYGISRQAQDELALQSQQRTAAAQAAGLFSDEIVSMTVTKAVKDKETGAVSQVETTISADECNRPSTAIEGLAGLTPVMGGDKFVTAGNASQLSDGAAALVMMDEDEAGKAGLSPLGRYLGFAVAGCEPDEMGIGPVFAVPRLLERHGLKVDDIDLWELNEAFASQVIYCRDRLGIDDTKLNVNGGSISIGHPFGMTGARMTGHLLLEGKRRGAKLGVVTMCVGGGQGAAGLFEIF

SEQ ID NO: 3119 - DNA, 1182 bp, Bacillus selenitireducens MLS10
  CDS (1)..(1182): transl_table=11
ttgaaagaagctgttatcgtttcaggtgcaaggacacctgtaggaaaagcgaaaaaaggaacgcttgctcacgtgagaccggacgatctcggagcattgaccatcaaggaaacgctgaaacgtgccaacgattttgacccgtcccgcattgaggacgtgatcatcggttgtgctatgccggaggcggaacagggcatgaacatggcccgaaatatctccgcactggcgggaatcccggaacaggtaccggcgattaccgttaatcgctactgttcatcagggctgcagagcattgcctacgcggcagagcggatcatgctcggtaaagcttctgccatcatcgcaggcggagcggaatccatgacgatgatcccgatgggcggacatgtcattgcgcccaacccgacgctcgttgatcaggcgccggagtattacatggggatggggaatacggccgaagaagtggccgaacgctatggcgtaagccgcgaagatcaggatgcctttgccgttgagagtcataaacgtgcggcgaatgccatcaaagaaggtaagtttaaagatgagattgttccggtaccggtgacgcaccgttatgtggatgacaatcataaactggtagagaaagaagttctgtttgataccgacgaaggcgtgcggacagatacgaccatggaaggccttgcgaaactgagaccggcttttaatcaggctggcggtactgttacggcagggaatgcatcacagatgagtgacggcgctgcgtcggtacttgtcatggacaaagaaaccgccgaaaaggaaggccttcagccaatggccaaattcctcgcttatgaagtggcgggtgttgcacctgatgtgatggggatcggccctgttgaagcgattccaaaggcgctcaaatccgcaggtcttgatttcggtgacatcggtctgtatgaattgaatgaagcttttgcatcccagtcgctgcaagttattcgtgaactcggcctcgacccggagaaagtcaacgtcaacggtggagccattgcactcggtcatccgctcggctgcacaggcaccaagcttactttgagccttcttcatgaaatgaagcgaagaggcgaaaagtacggagttgtgacgatgtgtatcggcggcggtatgggcgcagcaggcgtgtttgaactgatgtaa

SEQ ID NO: 3120 - protein, 393 aa, Bacillus selenitireducens MLS10
MKEAVIVSGARTPVGKAKKGTLAHVRPDDLGALTIKETLKRANDFDPSRIEDVIIGCAMPEAEQGMNMARNISALAGIPEQVPAITVNRYCSSGLQSIAYAAERIMLGKASAIIAGGAESMTMIPMGGHVIAPNPTLVDQAPEYYMGMGNTAEEVAERYGVSREDQDAFAVESHKRAANAIKEGKFKDEIVPVPVTHRYVDDNHKLVEKEVLFDTDEGVRTDTTMEGLAKLRPAFNQAGGTVTAGNASQMSDGAASVLVMDKETAEKEGLQPMAKFLAYEVAGVAPDVMGIGPVEAIPKALKSAGLDFGDIGLYELNEAFASQSLQVIRELGLDPEKVNVNGGAIALGHPLGCTGTKLTLSLLHEMKRRGEKYGVVTMCIGGGMGAAGVFELM

SEQ ID NO: 3121 - DNA, 1173 bp, Bacillus cereus AH187
  CDS (1)..(1173): transl_table=11
atgagagaagctgtcattgttgcgggagcaagaacaccaattggaaaagcaaagaggggttcattaaaaacagttcgtcctgacgatctaggggcgttagtagtaaaggaaacgttaaagcgtgcgaattatgaaggaccaatcgatgatttaattttcggttgtgcgatgccagaagcagagcaaggtttaaatatggctcgtaatatcggcggattagcaggactttcttacgatgttccagctattacaattaaccgttactgttcttcaggtttacaaagtatcgcttacggagcagagcgcattatgcttggtcactcggaagcggtattatcaggcggagcggaatcaatgagtttagttccgatgatgggacacgtcgttcgtccgaatagtcgccttgtagaagcggctccagaatattatatgggtatgggacatacagcagagcaagttgctgtgaaatatggaatttctcgtgaagagcaagatgcatttgcagtaagaagtcatcaacgcgctgcgaaagcattagctgcagggaactttgctgatgaaacagtacctgtagatgtaacgttacgtactgttggagcaaataacaaactgcaagaagaaacaatcactttcacgcaagacgaaggtgtaagagctgaaacgacgctagatattttaggtaaattacgtccagcatttaacgttcgcggttctgtaacagctggtaactcttcacaaatgagtgacggcgcagcatctgtactattaatggatcgtgaaaaagcagtgagcgatggcatgaaaccacttgcgaaattccgttcatttgcagtagctggcgtaccaccagaagtaatgggaattggcccaatcgctgcaattccaaaagcgttaaaactagctggcttagagctatctgatattggcttattcgaactaaatgaagcattcgcttctcaatcgatccaagttattcgtgaacttggtttagatgaagaaaaagtaaacgtaaatggcggtgcaatcgcacttggacatccacttggctgtacaggagcaaaactaacactatctcttattcacgaaatgaaacgccgcaacgaacaattcggtatcgtaacaatgtgtatcggcggcggaatgggagcagcgggagtgtttgaattactataa

SEQ ID NO: 3122 - protein, 390 aa, Bacillus cereus AH187
MREAVIVAGARTPIGKAKRGSLKTVRPDDLGALVVKETLKRANYEGPIDDLIFGCAMPEAEQGLNMARNIGGLAGLSYDVPAITINRYCSSGLQSIAYGAERIMLGHSEAVLSGGAESMSLVPMMGHVVRPNSRLVEAAPEYYMGMGHTAEQVAVKYGISREEQDAFAVRSHQRAAKALAAGNFADETVPVDVTLRTVGANNKLQEETITFTQDEGVRAETTLDILGKLRPAFNVRGSVTAGNSSQMSDGAASVLLMDREKAVSDGMKPLAKFRSFAVAGVPPEVMGIGPIAAIPKALKLAGLELSDIGLFELNEAFASQSIQVIRELGLDEEKVNVNGGAIALGHPLGCTGAKLTLSLIHEMKRRNEQFGIVTMCIGGGMGAAGVFELL

SEQ ID NO: 3123 - DNA, 1173 bp, Anaeromyxobacter dehalogenans 2CP-1
  CDS (1)..(1173): transl_table=11
atgagcgcagcctacgtcctcgcagcggtgcggacccccgggtgcaaggcgaagaaggggaagctgaaggacgtccgcccggacgacctggccgccgtcgccatccgcgcgctgctggcgcggaccggcgtcgacccggggcaggtggaggacgtgatcctcgggtgcgcgttccccgagggcgagcagggcatgaacctcgggcgcgtcgcggcgctccgggccgggctgccggtgggcgtgccgggccagacggtgaatcgcttctgcgcctcggggctgcagaccatcgccaccgccgccgagcggatcatggccggccaggccgactgcatcgtggcgggcggggccgagagcatgagcctcgtgcccatgggcggctcgcacttcagcgcgaacccggcgctggtcgcctcctggccggagtcgttcgcggccatgggcatcaccgccgagctggtggcggcgcgcgaccaggtgagccgcgaggaccaggacgcgttcgcggtgcagagccacgcgcgcgccgcccgggcgcaggcggagggtctgttcgccgacgagctcgtccccgtcgaggtggagcaggtcacgctcgagaagggaaagccggcgcgccgcaccgagcaggtcacggccgacgacggcgtgcgcccgggcacgagcctggaggcgctcgcaaagctgaagccggcgttcaagatcgacggcaccgtcaccgccggcaacgcgtcccagaccaccgacggcgccgcggccgcgctggtggtctccgaggcgttcctcacccgcaccggcctcgcgccgctggcgcgcttcgtctcctacgcggtgcgcggcgtgccgccggagatcatgggcatcggcccggtcgaggccatcccggcggcgctgaagcgcgccggcctgcgcgtcgaggacgtcgggcagatcgagctgaacgaggcgttcgcggcgcagtcgctcgcctgcgtgcgcgcgctcgggctcgatccggagaaggtgaaccccaccggcggcgccatcgcgctcgggcacccgctcggctgcaccggcgcgaagctcaccgccacgctgctgcacggcatgcggcggaccggcgcgcggcacggcatcgtgtcgatgtgcgtgggcggcggaatgggcgcggcggcggtgttcgagcgcgcctga

SEQ ID NO: 3124 - protein, 390 aa, Anaeromyxobacter dehalogenans 2CP-1
MSAAYVLAAVRTPGCKAKKGKLKDVRPDDLAAVAIRALLARTGVDPGQVEDVILGCAFPEGEQGMNLGRVAALRAGLPVGVPGQTVNRFCASGLQTIATAAERIMAGQADCIVAGGAESMSLVPMGGSHFSANPALVASWPESFAAMGITAELVAARDQVSREDQDAFAVQSHARAARAQAEGLFADELVPVEVEQVTLEKGKPARRTEQVTADDGVRPGTSLEALAKLKPAFKIDGTVTAGNASQTTDGAAAALVVSEAFLTRTGLAPLARFVSYAVRGVPPEIMGIGPVEAIPAALKRAGLRVEDVGQIELNEAFAAQSLACVRALGLDPEKVNPTGGAIALGHPLGCTGAKLTATLLHGMRRTGARHGIVSMCVGGGMGAAAVFERA

SEQ ID NO: 3125 - DNA, 1185 bp, Paenibacillus larvae subsp. larvae BRL-230010
  CDS (1)..(1185): transl_table=11
atgagagaagccgttatcgtgtctttagcaagaacagcggtagggaaggcgaagaaaggaagcctgtcccaaacccgcgcggaagatatgggtaaggtagtgttggaggaagtcgttcggagagcccctggcttgcagaaaggggatgtggaagacattatcattggctgcgccatgccggaaggggaacaggggctcaatttcgcccgtactatgtccctgtatgcgggattccctgtcacagtgcctgcgcttaccgtgaaccggttttgctcttccggtttacaggccatcgcttttgctgccgaacgcgttatgctcggtcatgccgatgtgatgatcgccgggggtgtggaaagcatgagccatgtgcccatgaccgggttcaagatagcccctcatcccgtcctggtagaaaaaatgccggaagtatacatgtcaatggggcatactgcggaacaagtggccaaccgttttggcattagcagggaagatcaggacacctttgccttacgaagccatcaaaaagcggcggctgctatagaagcaggccgttttaaggaagagattgttccgctgcttacaacacttagcggaatggacgaaaacggcaaagtatggagcaaggaaattgtttttgatacggatgaaggagtgcgcaaaaataccagcatggaggtgcttggccgcctgaaaccatccttctctctgaagggaagcgttacagcgggaaattcctcccagacaagtgatggtgcggcggctgccgtattgatgagcagggagaaggccgaagagcttggtctaaaaccgctggctgctttccgctcctttgctctcggtggcgtggacccggccattatgggagtcggtcccattgaagcaatcccgaaagcacttcgcctggcaggggtaagtctggaggacatcaagcttttcgagctgaatgaagcttttgcctcccagtgccttcaggttatccgggaattgaagctgaacgaggatctggtcaacgtcaatggaggcgcgattgcgctgggtcatccgctaggctgtacaggggcgaaattgacggtcagcctcgtccatgagctgcgccgccggggaggcggactgggcgtcgtatcgatgtgtatcggcggtggcatgggagcagcaggtgttttagaagtgttttcggaataa

SEQ ID NO: 3126 - protein, 394 aa, Paenibacillus larvae subsp. larvae BRL-230010
MREAVIVSLARTAVGKAKKGSLSQTRAEDMGKVVLEEVVRRAPGLQKGDVEDIIIGCAMPEGEQGLNFARTMSLYAGFPVTVPALTVNRFCSSGLQAIAFAAERVMLGHADVMIAGGVESMSHVPMTGFKIAPHPVLVEKMPEVYMSMGHTAEQVANRFGISREDQDTFALRSHQKAAAAIEAGRFKEEIVPLLTTLSGMDENGKVWSKEIVFDTDEGVRKNTSMEVLGRLKPSFSLKGSVTAGNSSQTSDGAAAAVLMSREKAEELGLKPLAAFRSFALGGVDPAIMGVGPIEAIPKALRLAGVSLEDIKLFELNEAFASQCLQVIRELKLNEDLVNVNGGAIALGHPLGCTGAKLTVSLVHELRRRGGGLGVVSMCIGGGMGAAGVLEVFSE

SEQ ID NO: 3127 - DNA, 1200 bp, Burkholderia ubonensis Bu
  CDS (1)..(1200): transl_table=11
atgagcaaacaattgcaagacgcatacatcgtcgccgcgagccgcacgccgatcggcaaggccccacgcggtgtcttcaagaacacgcgccccgacgagctgctggttcatgcgatcaagacggcggtcgcgcaggtgcccggcttcgacacgaagctgatcgaggacgcgatcatcggctgcgcgattccggaagccgagcagggcctgaacgtcgcgcggatgggcgcgctgctcgcgggcctgccgcagacggtcggcggcgtgacggtcaaccgcttctgcgcatcgggcatcaccgcgctcgcgatggcggcggaccgcatccgcgtcggcgaatcggacgcgctgctcgcgggcggctgcgaatcgatgagcatggtgccgatgatgggcaacaagccgtcgatgtcgccgcacatcttcgatcgcagcgaggacttcggcatcgcgtacgggatgggcctgaccgccgagcgcgtcgccgagcagtggaaggtgagccgcgaggaccaggacgcgttctcggtcgaatcgcaccgcaaggcgctcgccgcgcagcaggccggcgagttcggcgacgagatcgcaccgtacacgatcaccgaacgcttcccgaacctcgcgacgggcgagatcgacgtgaagacgcgcgagatcgcgctcgacgaaggcccgcgcgcggacacgtcgctcgaaggcctcgcgaagctgcgcacggtgttcgcgaacaaagggtcggtcacggccggcaacagctcgcagacgtcggacggcgcgggcgcgctgctcgtcgtgtcggagaaggtgctcaagcagttcaacctgacgccgctcgcgcgcttcgtgagcttcgcggtgcgcggcgtgccgccggaaatcatgggcatcggcccgaaggaagcgattccggccgcgctgaaggccgcgggcctgaagcaggacgatctcgactggatcgagctgaacgaagcgttcgccgcgcaatcgctggcggtgatccgcgacctcggcctcgacccgtcgaaggtcaacccggtgggcggcgcgatcgcgctcggccacccgctcggcgcgaccggcgcgatccgcgccgcgaccgtcgtgcacggcctgcgccgccgcaacctgaagtacgggatggtgacgatgtgcgtcggcaccggcatgggcgccgcgggcatcatcgaacgcctgtaa

SEQ ID NO: 3128 - protein, 399 aa, Burkholderia ubonensis Bu
MSKQLQDAYIVAASRTPIGKAPRGVFKNTRPDELLVHAIKTAVAQVPGFDTKLIEDAIIGCAIPEAEQGLNVARMGALLAGLPQTVGGVTVNRFCASGITALAMAADRIRVGESDALLAGGCESMSMVPMMGNKPSMSPHIFDRSEDFGIAYGMGLTAERVAEQWKVSREDQDAFSVESHRKALAAQQAGEFGDEIAPYTITERFPNLATGEIDVKTREIALDEGPRADTSLEGLAKLRTVFANKGSVTAGNSSQTSDGAGALLVVSEKVLKQFNLTPLARFVSFAVRGVPPEIMGIGPKEAIPAALKAAGLKQDDLDWIELNEAFAAQSLAVIRDLGLDPSKVNPVGGAIALGHPLGATGAIRAATVVHGLRRRNLKYGMVTMCVGTGMGAAGIIERL

SEQ ID NO: 3129 - DNA, 1173 bp, Bacillus cereus B4264
  CDS (1)..(1173): transl_table=11
atgagagaagctgtcattgttgcgggagcaagaacaccaattggaaaagcaaagaggggttcattaaaaacagttcgtcctgacgatctaggggcgttagtagtaaaggaaacgttaaagcgtgcgaattatgaaggaccaatcgatgatttaattttcggttgtgcgatgccagaagcagagcaaggtttaaatatggctcgtaatatcggcggattagcaggactttcttacgatgttccagctattacgattaaccgttactgttcttcaggtttacaaagtatcgcttacggagcagagcgtattatgcttggtcactctgaagctgtattatcaggcggagcagaatcaatgagtttagttccaatgatgggacacgttgttcgtccgaatagtcgccttgtagaagcggctccagaatattatatgggtatgggacatacagcagagcaagttgctgtgaaatatggaatttctcgtgaagagcaagatgcatttgcagtaagaagtcatcaacgtgctgcgaaagcattagctgcaggaaactttgctgatgaaacagtatctgtagatgtaacgttacgtactgttggatcaaataacaaactgcaagaagaaacaatcactttcgcacaagacgaaggtgtaagagcagaaacaacgctagacattttaggtaaattacgtccagcatttaacgttcgcggttctgtaacagctggtaactcttcacaaatgagtgacggtgcagcatctgtactattaatggatcgcgaaaaagcagtgagcgatggcatgaagccacttgcgaaattccgttcatttgcagtagctggcgtaccaccagaagtaatgggaatcggcccaatcgctgcaattccaaaagcgttaaaactagctggcttagagctatctgatattggcttatttgaactaaatgaagcattcgcttctcaatcaattcaagttattcgtgaacttggtttagatgaagaaaaagtaaacgtaaacggtggtgcaatcgcacttggacatccacttggctgtacaggagcaaaactaacactatctcttattcacgaaatgaaacgccgcaacgaacaattcggtatcgtaacaatgtgtatcggcggcggaatgggagcagcgggagtatttgaattactttaa

SEQ ID NO: 3130 - protein, 390 aa, Bacillus cereus B4264
MREAVIVAGARTPIGKAKRGSLKTVRPDDLGALVVKETLKRANYEGPIDDLIFGCAMPEAEQGLNMARNIGGLAGLSYDVPAITINRYCSSGLQSIAYGAERIMLGHSEAVLSGGAESMSLVPMMGHVVRPNSRLVEAAPEYYMGMGHTAEQVAVKYGISREEQDAFAVRSHQRAAKALAAGNFADETVSVDVTLRTVGSNNKLQEETITFAQDEGVRAETTLDILGKLRPAFNVRGSVTAGNSSQMSDGAASVLLMDREKAVSDGMKPLAKFRSFAVAGVPPEVMGIGPIAAIPKALKLAGLELSDIGLFELNEAFASQSIQVIRELGLDEEKVNVNGGAIALGHPLGCTGAKLTLSLIHEMKRRNEQFGIVTMCIGGGMGAAGVFELL

SEQ ID NO: 3131 - DNA, 1173 bp, Bacillus cereus G9842
  CDS (1)..(1173): transl_table=11
atgagagaagctgtcattgttgcgggagcaagaacaccaattggaaaagcaaagaggggttcattaaaaacagttcgtcctgacgatctaggggcattagtagtaaaggaaacattaaagcgtgcgaattatgaaggaccaatcgatgatttaattttcggttgtgcgatgccagaagcagagcaaggtttaaatatggctcgtaatatcggcggattagcaggactttcttacgatgttccagctattacgattaaccgctactgttcttcaggtttacaaagtatcgcttacggagcagagcgtattatgcttggtcactctgaagctgtattatcaggcggggcagaatcaatgagtttagttccaatgatgggacacgttgttcgtccgaatagtcgccttgtagaagcagctccagaatattatatgggtatgggacatacagcagagcaagttgctgtgaaatatggaatttctcgtgaagagcaagatgcatttgcagtaagaagtcatcaacgcgctgcgaaagcattagcggcaggtaacttcgctgatgaaacagtatctgtagatgtgacgttacgtactgttggatcaaacaataaactgcaagaagaaacaatcattttcgcacaagacgaaggtgtgagagcagaaacgtcgctagacattttaggtaaattacgtccagcatttaacgttcgcggttctgtaacagctggtaactcttcacaaatgagtgacggtgcagcatctgtactattaatggatcgtgaaaaagcagtgagcgatggcatgaagccgcttgcgaaattccgttcatttgcagtagctggcgtaccaccagaagtaatgggaatcggcccaatcgctgcaattccaaaagcgttaaaactagctggcttagagctatctgatattggcttattcgaactaaacgaagcatttgcttctcaatcgatccaagttattcgtgaacttggtttagatgaagaaaaagtaaacgtaaacggtggtgcaatcgcacttggacatccacttggctgtacaggagcaaaactaacactatctcttattcacgaaatgaaacgccgcaacgaacaattcggtatcgtaacaatgtgtattggcggcggaatgggagcagcgggagtgtttgaattactataa

SEQ ID NO: 3132 - protein, 390 aa, Bacillus cereus G9842
MREAVIVAGARTPIGKAKRGSLKTVRPDDLGALVVKETLKRANYEGPIDDLIFGCAMPEAEQGLNMARNIGGLAGLSYDVPAITINRYCSSGLQSIAYGAERIMLGHSEAVLSGGAESMSLVPMMGHVVRPNSRLVEAAPEYYMGMGHTAEQVAVKYGISREEQDAFAVRSHQRAAKALAAGNFADETVSVDVTLRTVGSNNKLQEETIIFAQDEGVRAETSLDILGKLRPAFNVRGSVTAGNSSQMSDGAASVLLMDREKAVSDGMKPLAKFRSFAVAGVPPEVMGIGPIAAIPKALKLAGLELSDIGLFELNEAFASQSIQVIRELGLDEEKVNVNGGAIALGHPLGCTGAKLTLSLIHEMKRRNEQFGIVTMCIGGGMGAAGVFELL

SEQ ID NO: 3133 - DNA, 1200 bp, Thauera sp. MZ1T
  CDS (1)..(1200): transl_table=11
atgagcaaacagatccaggacgcctacatcgtcgccgcggtgcgcacccccgtcgccaagcgcaacggtgccttccgcgccgtgcgccccgacgacttgctggccagggtgctgcgcgaggtggtcgccaaggtgcccagtctagacaggaccgagatcggcgacgtcgtcaccggctgcgcgatgcccgaggccgagcagggcatgaacgtggcacgcatcggcctgctgctggccgggctgcccgacagcgtgccgggcatcaccatcaaccgcttctgcgcctccggcctgcaggccgtggccgatgccgccagccgcatccgcctcggcgaggcggacgtgatgatcgccgccggcaccgagagcatgagcgcgatgccgcagatcatgggcaacaaggtcagcctcaaccccgagatcttcgcgcgtgccgagaacctctccatcgcctacggcatgggcctcaccgccgagaaggtcgcgcagcagtggaaggtgagccgcgaggaccaggatgcgttcgccgtcgagtcgcaccggcgcgcctgcgccgccatcgctgccggccagttcgcggacgagatcctgccctatgcggtgaagtcctatgccccgggtgtcgacggcacggtgcgcatcaccgagcgcctggtcgagcacgacgagggcccgcgtccggacgccgctgccgacaggctcggcaagctcaagccggtgttcgccgcacgcggctcggtgaccgcgggcaacagctcgcagatgtccgacggcgccgcggcggtgctgctgatgagcgagaccgcgttaaagcgctacgacgtgaccccgatcgcgcgcttttccagcttcgcggtcgccggcgtgccgcccgaggtcatggggatcggccccgtcgaggccatcccgcgtgcgcttgcgcgtgccggcgtggcgctggccgacatcggctggaccgagctcaacgaggccttcgccgcgcaggcgctggcggtgatgcgccagctcgggatggatccggcgaaggtcaacccgctcggtggggcgatcgccctcggccacccgctcggtgccaccggcgcgatccgcaccgccaccctgatggcggcgatgcagcgcgaccccggcctgcgctacggcatgatcagcatgtgcatcggcaccggcatgggtgcggcgggggtgttcgagcgcgtgtga

SEQ ID NO: 3134 - protein, 399 aa, Thauera sp. MZ1T
MSKQIQDAYIVAAVRTPVAKRNGAFRAVRPDDLLARVLREVVAKVPSLDRTEIGDVVTGCAMPEAEQGMNVARIGLLLAGLPDSVPGITINRFCASGLQAVADAASRIRLGEADVMIAAGTESMSAMPQIMGNKVSLNPEIFARAENLSIAYGMGLTAEKVAQQWKVSREDQDAFAVESHRRACAAIAAGQFADEILPYAVKSYAPGVDGTVRITERLVEHDEGPRPDAAADRLGKLKPVFAARGSVTAGNSSQMSDGAAAVLLMSETALKRYDVTPIARFSSFAVAGVPPEVMGIGPVEAIPRALARAGVALADIGWTELNEAFAAQALAVMRQLGMDPAKVNPLGGAIALGHPLGATGAIRTATLMAAMQRDPGLRYGMISMCIGTGMGAAGVFERV

SEQ ID NO: 3135 - DNA, 1212 bp, Paenibacillus sp. JDR-2
  CDS (1)..(1212): transl_table=11
atgggagcagcgggcaaatttgcggaccatgaccgcgatgccgttatcgtatccgcggtacgaaccgcggtgggcaaggcgaagaagggaagtctcgcggagacgagggcagaggaccttggacgggccgtgttgaccgcggctgttggccgggttccggggcttgatgcggttgacgtcgaggatgtcattatcggctgtgccatgccggagggcgagcaagggctgaatatggcgcggattatttcgctctattcgggcttcccggttacaacgccggccgtcacgattaaccggttctgcgcttcgggtctgcaggcgatcgcttacgcggctgaacgcatacgtctcggcgatgccgacatcctcgtcgcaggcggcgtggaaagcatgagccatgtgccgatgaccggctttaagctggctccgcatccgggcattgtggatgctatgccggaggtgtacatgggcatgggtcacaccgccgaggaagtggcacgccgctataacgttacccgcgcggcgcaggatgcgtttgccgcgtccagccatcgcaaagcggcggctgcgattcaggaaggccgcttcaaagacgagatcgtgccggtgacggcaacgaggtccgatgtgaacgaatacggccggccggtggagcggaccttcaccttcgacaccgatgaaggcgtgcgcgcggatacgacgccggagacgcttgcgccgctgaagccgtcttttgcccgggaaggtacggttacggccggcaactcctcgcagatgagcgacggcgcggccgcggttgttgtgatgagccgcgccaaggcgaaggagcttgggctgacgcctcttgccgcattccgtacctaccgggttgcaggagtagcgccgaaagtgatgggcattggacctatcgaggctattccaaaagcgcttaaagccgctaacctaacggttggcgatattgatgttttagagctgaatgaggcttttgccgcccaatgcgtgccgattatcgagcagcttggcatcgaccctgaacgcgtgaacgtaaacggcggggcgattgcgcttggccatccgcttggctgtacggggacgaagctgtcggtatcgcttattcacgaattgaaaaggcgcggcggaggaatcggagtagtcacgatgtgtgtcggcggaggtatgggagccgcaggggtgtttgaggtatacgcgtag

SEQ ID NO: 3136 - protein, 403 aa, Paenibacillus sp. JDR-2
MGAAGKFADHDRDAVIVSAVRTAVGKAKKGSLAETRAEDLGRAVLTAAVGRVPGLDAVDVEDVIIGCAMPEGEQGLNMARIISLYSGFPVTTPAVTINRFCASGLQAIAYAAERIRLGDADILVAGGVESMSHVPMTGFKLAPHPGIVDAMPEVYMGMGHTAEEVARRYNVTRAAQDAFAASSHRKAAAAIQEGRFKDEIVPVTATRSDVNEYGRPVERTFTFDTDEGVRADTTPETLAPLKPSFAREGTVTAGNSSQMSDGAAAVVVMSRAKAKELGLTPLAAFRTYRVAGVAPKVMGIGPIEAIPKALKAANLTVGDIDVLELNEAFAAQCVPIIEQLGIDPERVNVNGGAIALGHPLGCTGTKLSVSLIHELKRRGGGIGVVTMCVGGGMGAAGVFEVYA

SEQ ID NO: 3137 - DNA, 1173 bp, Geobacillus sp. WCH70
  CDS (1)..(1173): transl_table=11
gtgagagaagcggtgattgtagctggggcgcgcacgccggtcggaaaggcgaaaaaagggacgctcgcccatgtacgtccagatgatttaggcgcgctcgttgtaaaggaaacgttgaaacgcgcggggaattatgaaggaaatatcgatgaccttattattgggtgtgcgatgccggaagcggagcaaggattaaacattgcgagaaacatcggggcgcttgcagggcttccatacacggttcctgccattacgattaatcgttattgctcgtccggtttgcaagcgattgcttacgctgcggagcgaatcatgcttggccattcggatacggtcattgctggcggtgtggaatcgatgagccttgtcccaatgatggggcatgtgatccgtccaaatgcgaaactggcagaagaagctccagagtattatatgtcaatgggacatacagccgaacaagtggcgatgaagtatggggtaagccgtgaagaccaagacgcgtttgctgtacgaagccatcagcgtgccgcaaaagcgattcgggaaggcaaatttaaggatgaaattgtcccggtagaagtaaccgttcgaaaagtagaaaataataaactagtcgagaaaacaatacttttcgaagaggacgaaggggtacgcccagatacgaatatggaaactttagcaaaacttcgtccggcattttcagtcaacggaacggtaacagctgggaacgcttcacaaatgagcgatggggctgctgcggtaatggtgatggaccgtgaaaaagcagaatctctagggttaaaaccgcttggaaaattccgttcgttcgctgttgccggtgtgccgccggaagtgatgggaatcggtccggttgctgcggttccgaaagcgctaaaacttgcggggttagaactttccgatattggattaatcgaactaaatgaagcgtttgcgtctcaatcgatccaagtgattcgcgagcttggactagatgaggaaaaagtgaatgtaaacggaggagcgattgcgcttggccatccgcttggttgtacaggtgcaaaattgacgctgtcgctgctttatgaaatgcgccgtcgcaatgtgcagttcggaattgtcacgatgtgtatcggcggcggtatgggcgcagcaggagtatttgaattaatttaa

SEQ ID NO: 3138 - protein, 390 aa, Geobacillus sp. WCH70
MREAVIVAGARTPVGKAKKGTLAHVRPDDLGALVVKETLKRAGNYEGNIDDLIIGCAMPEAEQGLNIARNIGALAGLPYTVPAITINRYCSSGLQAIAYAAERIMLGHSDTVIAGGVESMSLVPMMGHVIRPNAKLAEEAPEYYMSMGHTAEQVAMKYGVSREDQDAFAVRSHQRAAKAIREGKFKDEIVPVEVTVRKVENNKLVEKTILFEEDEGVRPDTNMETLAKLRPAFSVNGTVTAGNASQMSDGAAAVMVMDREKAESLGLKPLGKFRSFAVAGVPPEVMGIGPVAAVPKALKLAGLELSDIGLIELNEAFASQSIQVIRELGLDEEKVNVNGGAIALGHPLGCTGAKLTLSLLYEMRRRNVQFGIVTMCIGGGMGAAGVFELI

SEQ ID NO: 3139 - DNA, 1191 bp, Geobacillus sp. Y412MC10
  CDS (1)..(1191): transl_table=11
atgagagaagcagtcatagtatcccttgctcgcaccccggtggggaaggcgaagaagggcagttttgcccagacgcgcgtagaggatctcggcaaagccgtactggaagccgtcattgagcgtgcgccgggcctgaaaaaagaggacgtcgaggacattatcctcggctgcgcgatgccggaaggcgagcagggccttaacgttgcgcggattatttccttgtatgcgggttatccggtcacggtgccggccttgaccgtcaatcgcttctgttcgtccggacttcaggcgatcgcttttgctgcggaacgcattatgctcggccatgccgaggtcatcgtcgccggcggcgtcgagagcatgagccatgtgccgatgaccggcttcaagccggcaccgcatccgacgatcgtcgaagagatgtcggaggtttacatcggcatgggccatacggcggaagaggtagcgcgccgcttcggcatcacccgcgaggcgcaggatgccttcgcggccagcagccaccgcaaggccgcagccgctatctccgaaggcaagttccgggacgagatcgtaccggtgaacgtaacgctggctgccgccgatgagcagggcaaagtgcgcagcaaaaccttagccatcgatacggatgaaggagttcgtccggacacaacaccggatgtgctggccagactgaagccggcctttgccctcggcggctcggttaccgcaggcaacgcatcgcagacgagcgacggcgcggcggcggtagccgtcatgagccgcgagaaagcggaggagctgggccttaccccgctggctaccttcaaatcgtttgccctggcaggcgtggagccggagataatgggcgtcggccccgtcgaagcgattccgaaggcactacgcatggcgggcattgagctggatcaggtggatgtgttcgagattaacgaagcgttcgcttcgcaatgcctccacatcatccgcgcgctggggatcgacgagagcaaggtcaacgtcaacggcggcgccattgcgcttggccatccgctcggctgcaccggcgccaagctgaccgtcagcctcgtctccgagctcgcccgccgcggcggcggctacggcgtcgtgagcatgtgcatcggcggcggtatgggcgccgcgggggtgttcgaggtgcacgcagccggggcgtaa

SEQ ID NO: 3140 - protein, 396 aa, Geobacillus sp. Y412MC10
MREAVIVSLARTPVGKAKKGSFAQTRVEDLGKAVLEAVIERAPGLKKEDVEDIILGCAMPEGEQGLNVARIISLYAGYPVTVPALTVNRFCSSGLQAIAFAAERIMLGHAEVIVAGGVESMSHVPMTGFKPAPHPTIVEEMSEVYIGMGHTAEEVARRFGITREAQDAFAASSHRKAAAAISEGKFRDEIVPVNVTLAAADEQGKVRSKTLAIDTDEGVRPDTTPDVLARLKPAFALGGSVTAGNASQTSDGAAAVAVMSREKAEELGLTPLATFKSFALAGVEPEIMGVGPVEAIPKALRMAGIELDQVDVFEINEAFASQCLHIIRALGIDESKVNVNGGAIALGHPLGCTGAKLTVSLVSELARRGGGYGVVSMCIGGGMGAAGVFEVHAAGA

SEQ ID NO: 3141 - DNA, 1176 bp, Bacillus pumilus ATCC 7061
  CDS (1)..(1176): transl_table=11
atgagagaagcagtcattgtcgctggcgcgagaacaccagtagggaaggcgaaaaaaggatcgttaaaacatgttcgacctgacgatatgggcgcgttgtgtgtaaaagaaacattaaagcgtgctggtgattacgacggacagatagatgatttgatcatcggatgtgcaacaccagaagcagagcaggggttaaatgtggctcggaatattggggcgttagcaggacttccgtatacagtacctgccatcaccatcaaccgctactgctcatctggtcttcagtcaatcgcttatgcaggtgagcggattatgctcggtcaggcagaaacgatcttagctggaggagtcgaatcgatgtcacaggtgccgatgatgggtcattccattcgtccgaatgctcaattggcagaacaagcgcctgaatactatatgagcatggggcacacggcagagcaggtggcgcaaaagtatcaggtcacacgtcaagatcaggacgcctttgcggtaagaagtcatcaaaaggcagccaaagcattacaggaaggaaaattttcagatgaaattgtctccgttgatgtaacagagcggcgggtaggggagcaatatcaattagaagaacatcaatttaagttttcacaggatgaaggcgtgagagcagggacaacggaagagattctttctactttgcgtccggctttctcgacaaaaggcacggtgaccgcaggaaactcttcacaaacaagtgacggtgctgcgtgtgtgatgatgatggatcgtgagaaagcatcctcactttcccttcagccgctcgccaagtttcgggcgtttgctgttggcggtgtaccgcctgaggtgatgggaatcggtccaattgaagccattccgcgtgcgctgaaaatcgctggacttgagctgaaggatatcgggctgtttgaattaaacgaagcgtttgcctctcaggccattcaagttattcgtcatttagggattgatgaagagaaagtgaatgtcaatggcggggcaatcgcgctaggacatccgctcggctgtacaggaacaaaactgacactgtcactcattcatgaaatgaagcggcgaaacgagcaatttggcatcgtcacaatgtgtatcggcgggggcatgggagcagcaggaatttttgaattgatctaa

SEQ ID NO: 3142 - protein, 391 aa, Bacillus pumilus ATCC 7061
MREAVIVAGARTPVGKAKKGSLKHVRPDDMGALCVKETLKRAGDYDGQIDDLIIGCATPEAEQGLNVARNIGALAGLPYTVPAITINRYCSSGLQSIAYAGERIMLGQAETILAGGVESMSQVPMMGHSIRPNAQLAEQAPEYYMSMGHTAEQVAQKYQVTRQDQDAFAVRSHQKAAKALQEGKFSDEIVSVDVTERRVGEQYQLEEHQFKFSQDEGVRAGTTEEILSTLRPAFSTKGTVTAGNSSQTSDGAACVMMMDREKASSLSLQPLAKFRAFAVGGVPPEVMGIGPIEAIPRALKIAGLELKDIGLFELNEAFASQAIQVIRHLGIDEEKVNVNGGAIALGHPLGCTGTKLTLSLIHEMKRRNEQFGIVTMCIGGGMGAAGIFELI

SEQ ID NO: 3143 - DNA, 1173 bp, Bacillus cereus 03BB108
  CDS (1)..(1173): transl_table=11
atgagagaagctgtcattgttgcgggagcaagaacaccaattggaaaagcaaagaggggttcattaaaaacagttcgtcctgacgatttaggggcgttagtagtaaaagaaacgttaaagcgtgcgaattatgaaggaccaatcgatgatttaattttcggttgtgcaatgccagaagcagagcaaggtttaaatatggctcgtaatatcggcggattagcaggactttcttacgatgttccagctattacgattaaccgttactgttcttcagggttacaaagtatcgcttacggagcagagcgtattatgcttggtcactcggaagctgtattatcaggcggagcggaatcaatgagtttagttccaatgatgggacacgttgttcgtccaaatagtcgccttgtagaagcagctccagaatattatatgggtatgggacatacagcggagcaagttgctgtgaaatatggaatttctcgtgaagagcaagatgcatttgcagtaagaagtcatcaacgtgctgcgaaagcattagctgcaggaaactttgctgatgaaacagtatctgtagatgtaacgttacgtactgttggagcaaataacaaactgcaagaagaaacaattacttttgcgcaagacgaaggtgtaagagcagagacgacgctagatattttaggtaaattacgtccagcatttaacgttcgcggttctgtaacagctggtaactcttcacaaatgagtgacggcgcagcatctgtactattaatggatcgtgaaaaagcagtgagcgatggcatgaaaccacttgcgaaattccgttcatttgcagtagctggcgtaccaccagaagtaatgggaatcggcccaatcgctgccattccaaaagcgttaaaactagctggcttagagctatctgatattggcttatttgaactaaatgaagcattcgcttctcaatcgatccaagttattcgtgaacttggtttagatgaagaaaaagtaaacgtaaacggcggtgcaatcgcacttggacatccacttggctgtacaggagcaaaactaacactatctcttattcacgaaatgaaacgccgcaacgaacaattcggtatcgtaacaatgtgtatcggcggtggaatgggagcagcaggagtgtttgaattactataa

SEQ ID NO: 3144 - protein, 390 aa, Bacillus cereus 03BB108
MREAVIVAGARTPIGKAKRGSLKTVRPDDLGALVVKETLKRANYEGPIDDLIFGCAMPEAEQGLNMARNIGGLAGLSYDVPAITINRYCSSGLQSIAYGAERIMLGHSEAVLSGGAESMSLVPMMGHVVRPNSRLVEAAPEYYMGMGHTAEQVAVKYGISREEQDAFAVRSHQRAAKALAAGNFADETVSVDVTLRTVGANNKLQEETITFAQDEGVRAETTLDILGKLRPAFNVRGSVTAGNSSQMSDGAASVLLMDREKAVSDGMKPLAKFRSFAVAGVPPEVMGIGPIAAIPKALKLAGLELSDIGLFELNEAFASQSIQVIRELGLDEEKVNVNGGAIALGHPLGCTGAKLTLSLIHEMKRRNEQFGIVTMCIGGGMGAAGVFELL

SEQ ID NO: 3145 - DNA, 1179 bp, Bacillus coahuilensis m4-4
  CDS (1)..(1179): transl_table=11
atgcgtgaagcggttatcgtcgctggtgctagaacaccagtaggcaaatcaaaaaagggttcattagcgaacgtacgcccagatgatttaggtgcattagttgtaaaagaaacattgaagcgagctggaaattatgaaggaaatattgatgatttaattataggctgtgcgatgccagaagctgagcaaggacttaatgtagcgagaaatatcggtggattagctgggttgcctcataacgttccagccatcacggttaatcgttactgttcttcaggattacaatccattgcatatgctgcagaaaaaattatgcttggacattccaatacagcgattgcaggtggcgtagaaagtatgagtttggttcccatgatgggtcacgtggttcgtccgaactccacactagcagagtcggctccacaatattatatgagcatgggtcatactgcagagcaagtggcgaatgaatacggtgtgtctcgtgaagaccaagatgctttcgcggtacgcagtcatgaaaaagcagcaagagcgatacaagaaggaaagtttaaagatgaaatcgtaccagtagaagtaacagctcgctctgttaacagcaagaatagattagtagaaaagcagtttacattcgatacggatgaaggggtacgccctggcacaactatcgatgtcttaggtaagcttcgacctgcatttgctgcaagaggttctgtcactgccggaaactcttcccaaacaagtgacggagcggcagctgttatggtcatggatcgtgaaaaagcagattccttaggactgcaatctctagtcaagtttcgctcttttgcggttgcgggtgtacgccctgaagtcatgggaatcggtcctgtcgaagccattcctagagcattaaaaatggcaggcctagagctcaatgacattggactatttgagttgaatgaagcatttgcttctcaatctcttcaagtcatccgtcatcttggacttgatgaagaaagagtcaatgtcaatggcggtgccattgcattaggtcatccacttggttgtacgggcgcaaaattaactctgtccttaatccatgaaatgaagcgtcgtaatgagcaattcggtatcgtcacgatgtgtattggtggcggtatgggagctgctggggtatttgaattaatttcataa

SEQ ID NO: 3146 - protein, 392 aa, Bacillus coahuilensis m4-4
MREAVIVAGARTPVGKSKKGSLANVRPDDLGALVVKETLKRAGNYEGNIDDLIIGCAMPEAEQGLNVARNIGGLAGLPHNVPAITVNRYCSSGLQSIAYAAEKIMLGHSNTAIAGGVESMSLVPMMGHVVRPNSTLAESAPQYYMSMGHTAEQVANEYGVSREDQDAFAVRSHEKAARAIQEGKFKDEIVPVEVTARSVNSKNRLVEKQFTFDTDEGVRPGTTIDVLGKLRPAFAARGSVTAGNSSQTSDGAAAVMVMDREKADSLGLQSLVKFRSFAVAGVRPEVMGIGPVEAIPRALKMAGLELNDIGLFELNEAFASQSLQVIRHLGLDEERVNVNGGAIALGHPLGCTGAKLTLSLIHEMKRRNEQFGIVTMCIGGGMGAAGVFELIS

SEQ ID NO: 3147 - DNA, 1173 bp, Bacillus cereus AH1134
  CDS (1)..(1173): transl_table=11
atgagagaagctgtcattgttgcgggagcaagaacaccaattggaaaagcaaagaggggttcattaaaaacagttcgtcctgacgatttaggggcgttagtagtaaaggaaacgttaaagcgtgcgaattatgaaggaccaatcgatgatttaattttcggttgtgcgatgccagaagcagagcaaggtttaaatatggctcgtaatatcggcggattagcaggactttcttacgatgttccagctattacgattaaccgttactgttcttcaggtttacaaagtatcgcttacggagctgagcgtattatgcttggtcactctgaagctgtattatcaggcggagcagaatcaatgagtttagttccaatgatgggacacgttgttcgtccgaatagtcgccttgtagaagcggctccagaatattatatgggtatgggacatacagcagagcaagttgctgtgaaatatggaatttctcgtgaagagcaagatgcatttgcagtaagaagtcatcaacgtgctgcgaaagcattagcggcaggaaactttgttgatgaaacagtacctgtagatgtgacgttacgctcggttggatcaaacaataaacttcaagaagaaacaatcactttcgcacaagacgaaggtgtaagagcagagacaacgctagacattttagggaaattacgtccagcatttaacgttcgcggttctgtaacagctggtaactcttcacaaatgagtgacggtgcagcatctgtactattaatggatcgcgaaaaagcagtgagcgatggcatgaagccacttgcgaaattccgttcatttgcagtagctggcgtaccaccagaagtaatgggaatcggcccaatcgctgcaattccgaaagcgttaaaactagctggcttagagttatctgatattggcttattcgaactaaatgaagcatttgcttctcaatcgatccaagttattcgtgaacttggtttagatgaagaaaaagtaaacgtaaacggtggtgcaatcgcacttggacatccacttggctgtacaggagcaaaactaacactatctcttattcacgaaatgaaacgtcgcaacgaacaattcggtatcgtaacaatgtgtatcggcggcggaatgggagcagcgggagtatttgaattactttaa

SEQ ID NO: 3148 - protein, 390 aa, Bacillus cereus AH1134
MREAVIVAGARTPIGKAKRGSLKTVRPDDLGALVVKETLKRANYEGPIDDLIFGCAMPEAEQGLNMARNIGGLAGLSYDVPAITINRYCSSGLQSIAYGAERIMLGHSEAVLSGGAESMSLVPMMGHVVRPNSRLVEAAPEYYMGMGHTAEQVAVKYGISREEQDAFAVRSHQRAAKALAAGNFVDETVPVDVTLRSVGSNNKLQEETITFAQDEGVRAETTLDILGKLRPAFNVRGSVTAGNSSQMSDGAASVLLMDREKAVSDGMKPLAKFRSFAVAGVPPEVMGIGPIAAIPKALKLAGLELSDIGLFELNEAFASQSIQVIRELGLDEEKVNVNGGAIALGHPLGCTGAKLTLSLIHEMKRRNEQFGIVTMCIGGGMGAAGVFELL

SEQ ID NO: 3149 - DNA, 1311 bp, Aspergillus clavatus
  CDS (1)..(1311)
atggcgattcaaacaacaaccgggctggctactcgcctggcaaccaaacgtgttgcattccccgcatctcggcagtggcagcgtcagttcagtgctgctcgtcctagcttgaaagagattcaggaagcgtacattctcagtggtgctcgtacgcctactgctaagttcaacggatcgtttgtctcggtctccgcccctcagttgggtgctgttgccatcaagtccgcagtgagcaaatccggcgtccctgtcgagaaaattaccgatgtgtacatgggcaatgtgctccagggagcagtgggccaggcgcccgctcgtcaagcctccatgttcgctggactgtctccgaccgtggaatccatgactgtcaacaaagtctgcgcctccggcctcaaagctgtcgcactcgccgctcagaatatccagctcggtcttgcagaggctcaggttgccggaggcatggagaacatgtcccgtgtgccctactatatgtctcggtccagccagttgccacctttcggcgaaatcaagctacaggacggtctgattcaggatggcctgtgggatgtctacaaccagttccacatgggcatctgcgccgaaacaactgccaagaaatatggcatcacccgtgaggatcaagaccaatacgccatccagtcgtaccagcgggcacaggccgcctggaaggagaacaaattcgctgaggagatcgctccggtcaccgtgaagggcaaaaagggagaaacagttatcgaacgggatgagggttacgagaacctgcgcatcgacaagatggcgactttgaagccagcattcttgagagatggcaccggcacggtgaccgctgcaaatgcttccaccatgaatgacggtgcctcggctcttgtcttgggtagcaaggctattgcgcgtgagttcggacagggtaaccgggctcttgctcgcattgtctcgagcgcagacgccgccattgatcctgtcgattttcctgtggctccatccaaggctgttcccattgccctcgagcgggctggcatcgcgaaggaccaggtcgcagtttgggagttcaacgaggcctttgctgctgtgatcaaagccaatgaaaagatcctcggtctcgaaaacgctcgagttaatcctcttggaggagctatctctctgggacacgctcttggtagctctggctctcgtattcttgtcacccttctccaccaactgcagccaggtgaatatggtgtggccgcgatctgtaacggtggtggtgctgcaaccgccatggtcattcagaagctggaccgggtggactaa

SEQ ID NO: 3150 - protein, 436 aa, Aspergillus clavatus
MAIQTTTGLATRLATKRVAFPASRQWQRQFSAARPSLKEIQEAYILSGARTPTAKFNGSFVSVSAPQLGAVAIKSAVSKSGVPVEKITDVYMGNVLQGAVGQAPARQASMFAGLSPTVESMTVNKVCASGLKAVALAAQNIQLGLAEAQVAGGMENMSRVPYYMSRSSQLPPFGEIKLQDGLIQDGLWDVYNQFHMGICAETTAKKYGITREDQDQYAIQSYQRAQAAWKENKFAEEIAPVTVKGKKGETVIERDEGYENLRIDKMATLKPAFLRDGTGTVTAANASTMNDGASALVLGSKAIAREFGQGNRALARIVSSADAAIDPVDFPVAPSKAVPIALERAGIAKDQVAVWEFNEAFAAVIKANEKILGLENARVNPLGGAISLGHALGSSGSRILVTLLHQLQPGEYGVAAICNGGGAATAMVIQKLDRVD

SEQ ID NO: 3151 - DNA, 1197 bp, Herbaspirillum seropedicae
  CDS (1)..(1197): transl_table=11
atgagcaaacaactgcaagacgcctacatcgtcgccgccacccgcacccccatcggcaaggcgccgcgtggcatgttcaagaacacccgcccggatgacctgctggtgcgcgccatccagtccgccgtggcgcaggtgccgggcctggaccccaagctgatcgaggacgccatcgtcggctgctccttccccgaaggcgcacagggcctgaacatggcgcgcaatgccgtgctgctggccggcctgcccaacaccatcggcggcgtcaccatcaaccgctactgcgcctccggcatcaccgccatcgccatggccgccgaccgcatccgcgtgggggaggccgatgtcatgatcgccgccggtgccgaatcgatgtcgatggtgccgatgatgggctttcatccttcgatcaacatcaatgccttcaaggatgagaacgtcggcatggcctatggcatgggcctgaccgccgagaaggtggcgcagcagtggaaggtctcgcgcgaagcgcaggacgagttctcgctggcctcgcaccagaaggccatcgccgcccaggaggccggtgaattcgccgatgagatgacttccttcgagatcgtcgagcgcttccccaatctggccaccggcgagatcgacgtcaagacccgcaccgtcagcctggacgaaggcccgcgcgccgattccaacctggccgcgctggccaagctcaagcccgtcttcgccgccaagggcagcgtgaccgccggcaacagctcgcagacctcggacggcgccggcgcgttgatcatcgtctcggaaaagatcctcaagcaattcaacctcaccccgctggcccgcttcgtctccttcgccgtgcgcggcgtgccgccggagatcatgggcatcggtccgaaggaagcgattcctgcggccctgaaggccggtggcctgacccaggaccagatcgactggatcgaactgaacgaagccttcgcagcccaagcgctggcggtcatcggcgacctgggcctggacccgagcaaggtcaaccccatgggcggtgcgattgcgctgggtcacccgctgggggccaccggtgcgatccgtgccgctaccaccatccatgcactgcgccgcaagaacctgaagtacggcatggtgaccatgtgcgtgggcaccggcatgggcgcagcggggatcttcgagcgcgtctga

SEQ ID NO: 3152 - protein, 398 aa, Herbaspirillum seropedicae
MSKQLQDAYIVAATRTPIGKAPRGMFKNTRPDDLLVRAIQSAVAQVPGLDPKLIEDAIVGCSFPEGAQGLNMARNAVLLAGLPNTIGGVTINRYCASGITAIAMAADRIRVGEADVMIAAGAESMSMVPMMGFHPSININAFKDENVGMAYGMGLTAEKVAQQWKVSREAQDEFSLASHQKAIAAQEAGEFADEMTSFEIVERFPNLATGEIDVKTRTVSLDEGPRADSNLAALAKLKPVFAAKGSVTAGNSSQTSDGAGALIIVSEKILKQFNLTPLARFVSFAVRGVPPEIMGIGPKEAIPAALKAGGLTQDQIDWIELNEAFAAQALAVIGDLGLDPSKVNPMGGAIALGHPLGATGAIRAATTIHALRRKNLKYGMVTMCVGTGMGAAGIFERV

SEQ ID NO: 3153 - DNA, 1206 bp, Oryza sativa subsp. indica
  CDS (1)..(1206)
atggcttcggacaacattggctcgagagatgtatgtgttgttggggttgcacgcacccctatgggtggtttcctaggtgccctgtcttccttgtcagctaccaaacttggttccatagcaattgaagctgctctgaagagggcaaatgttgatccagcccttgtgcaagaggtcttctttggtaatgtgttgagtgctaatttggggcaagctcctgcaagacaagctgctttaggtgcagggataccaaacacagttgtttgcagcgcagttaacaaagtttgcgcatctggcatgaaagcgacaatgtttgcagcacagtcaattctattgggcatcaatgatattgttgtagccggtggcatggaaagcatgtctaatgctccaaaatacattgctgaagctagaaaaggatctcgttttggacatgacactcttgttgatggcatgcttaaagatggcctttgggatgtatacggtgattttgccatgggaaattgtgctgagctttgtgctgacaatcatgctctgacaagggaagaccaggatgcctatgctattcaaagcaatgagcgtggaattgctgctcggaacagtggtgcttttgcatgggagattgttccgattgaagttcctgttgggagagggaaaccaccggtacttgttgacaaagatgagggcctggacaagtttgacccagtgaaactgaagaagctccgtcctagtttcaaggagaatggtggtactgttactgctgggaatgcttctagtataagtgacggtgctgccgcattagtattggtgagtgggcagaaggcacaagaacttggactgcaagttattgcacgaatcaaaggatttgcagatgcagctcaagctcctgaattatttaccactagcccggcacttgccatacctaaggctcttgctaatgctggcttggagtcttctcgtgttgattactatgaaattaatgaagccttttcagctgttgcacttgcaaatcaaaagcttcttggaattccttcagaaaaaattaatgtacatggaggagctgtgtctttaggacatcctcttggatgcagtggtgctcgaattttggtcaccctgcttggtgttcttagggagaaaggtggcaaaatcggagttgctggtgtttgcaatggcggaggcggagcatctgctctcgttctcgagcttgcataa

SEQ ID NO: 3154 - protein, 401 aa, Oryza sativa subsp. indica
MASDNIGSRDVCVVGVARTPMGGFLGALSSLSATKLGSIAIEAALKRANVDPALVQEVFFGNVLSANLGQAPARQAALGAGIPNTVVCSAVNKVCASGMKATMFAAQSILLGINDIVVAGGMESMSNAPKYIAEARKGSRFGHDTLVDGMLKDGLWDVYGDFAMGNCAELCADNHALTREDQDAYAIQSNERGIAARNSGAFAWEIVPIEVPVGRGKPPVLVDKDEGLDKFDPVKLKKLRPSFKENGGTVTAGNASSISDGAAALVLVSGQKAQELGLQVIARIKGFADAAQAPELFTTSPALAIPKALANAGLESSRVDYYEINEAFSAVALANQKLLGIPSEKINVHGGAVSLGHPLGCSGARILVTLLGVLREKGGKIGVAGVCNGGGGASALVLELA

SEQ ID NO: 3155 - DNA, 1176 bp, Pseudomonas putida
  CDS (1)..(1176): transl_table=11
atgagcctgaatccaagagacgtggtgattgtcgacttcggtcgcacgccaatgggccgctccgagggtggcatgcaccgcaatacccgcgccgaagacatgtcggcgcacctgatcagcaagctgctggaacgcaacgacaaggtcgacccgaaagaggtcgaggacgtgatctggggctgcgtcaaccagaccctggagcagggctggaacatcgcccgcatggcctcgctgatgacccagatcccgcacacttccgcagcccagaccgtcagccgcctgtgtggctcgtcgatgagcgcgctgcacacggctgcccaggcgatcatgaccggcaacggtgatgtgttcgtggtcggtggcgtggagcacatgggccacgtcagcatgatgcacggcgtcgaccccaacccgcacctgtccttgcacgccgccaaggcttccgggatgatggggctgactgcggaaatgctcggcaagatgcacggcatcacccgtgagcagcaggacctgttcggcctgcgttcgcaccagctggcccacaaggccacggtcgaaggcaagttcaaggacgagatcatcccgatgcagggctacgacgagaacggcttcctgaaggtgttcgatttcgacgaaaccattcgcccggaaaccgccctcgaaggcctggcatcgctcaagcctgcgttcaacccgaaaggcggcaccgttactgccggtacctcgtcgcagatcaccgacggcgcctcgtgcatgatcgtgatgtctggccagcgcgccatggacctgggcatccagccattggcggtgattcgttcgatggcggtggccggtgtcgacccggcaatcacgggctatggcccggtgccgtcgactcagaaagccctcaagcgtgccggcctgaccatggccgataccgacttcatcgagctcaatgaagccttcgccgcacaggccctgccagtgctgaaagacttgaaagtgctcgacaagatggatgagaaggttaacctgcacggcggcgccattgctttgggccacccgttcggttgctccggggctcgtatttcgggcaccctgctcaacgtcatgaagcagaatggcggtaccctgggggtggcgaccatgtgcgtcggcttcggccaaggtatcaccactgtcttcgaacgcgtctga

SEQ ID NO: 3156 - protein, 391 aa, Pseudomonas putida
MSLNPRDVVIVDFGRTPMGRSEGGMHRNTRAEDMSAHLISKLLERNDKVDPKEVEDVIWGCVNQTLEQGWNIARMASLMTQIPHTSAAQTVSRLCGSSMSALHTAAQAIMTGNGDVFVVGGVEHMGHVSMMHGVDPNPHLSLHAAKASGMMGLTAEMLGKMHGITREQQDLFGLRSHQLAHKATVEGKFKDEIIPMQGYDENGFLKVFDFDETIRPETALEGLASLKPAFNPKGGTVTAGTSSQITDGASCMIVMSGQRAMDLGIQPLAVIRSMAVAGVDPAITGYGPVPSTQKALKRAGLTMADTDFIELNEAFAAQALPVLKDLKVLDKMDEKVNLHGGAIALGHPFGCSGARISGTLLNVMKQNGGTLGVATMCVGFGQGITTVFERV

SEQ ID NO: 3157 - DNA, 1386 bp, Vitis vinifera
  CDS (1)..(1386)
atggagaaagccatcaacagacagagagttctgcttcagcatctctccccttcctcttctgcagccgaggatgaatcttctctatccgcatcggtttgtgtggctggggatagtgctgcataccagaggacatcagtttttggagatgatgttgtgatagtggcggcatatcgaactgccttatgcaagtcaaaacgaggaggcttcaaggatacttatcctgatgatctgctggcacctgttttgagggcactgatagagaaaaccaatctgaacccaaatgaagttggggacattgttgttggtacagtattggcgccaggctcccaaagagcaagtgaatgcaggatggctgcattctatgctggtttccctgaaactgtgcctgtcagaactgtgaacaggcaatgttcatctggtcttcaggcagttgctgatgtagctgctgcaattaaagctgggttttatgacattggcattggggcagggttggaatccatgacagcaaatccaatggcttgggaagggtcaatcaaccctaaggtaaaggaatttgtgcaagcccaagattgtcttctccccatgggtattacttcagaaaatgtcgcacatcgttttggtgtaacaaggcaggagcaggaccaggctgcagttgagtctcataagcgggctgctgctgcaactgctactgggaaatttaaggatgaaataatcccagtatccaccaagattgttgaccctaaaactggagatgagaaacctgtcacaatctctgtggatgatggaataagacctaacgcaataatgtcagatcttgcaaagctgaagcctgtatttaagaaaaatgggacaaccacagcagggaattctagccaagtgagtgacggtgctggagctgttctcctcatgaagagaagtgttgcaatgcgtaaagggttacctattcttggtgtattcaggacctttgctgctgttggtgtggatcctgccgtcatgggtattggtccagctgttgcaattccagctgcagtcaaatctgctggcctcgaacttgatgatattgatctttttgaaataaatgaggcatttgcatcccaatttgtatattgccgtaaaaagctggatcttgatccagagaagatcaatgtcaatggaggtgcaatggccattggacatcctttgggtgcaacaggtgcccgctgtgttggtactctattgcatgagatgaagcgccgtggcaaagactgtcgctttggagtggtgtcgatgtgcataggtacgggaatgggagcggcagctgtttttgaaagaggtgactgtgttgatgagcttcgcaatgctcggacggctgaaaacaataatctcttatctaaagatgctcaatag

SEQ ID NO: 3158 - protein, 461 aa, Vitis vinifera
MEKAINRQRVLLQHLSPSSSAAEDESSLSASVCVAGDSAAYQRTSVFGDDVVIVAAYRTALCKSKRGGFKDTYPDDLLAPVLRALIEKTNLNPNEVGDIVVGTVLAPGSQRASECRMAAFYAGFPETVPVRTVNRQCSSGLQAVADVAAAIKAGFYDIGIGAGLESMTANPMAWEGSINPKVKEFVQAQDCLLPMGITSENVAHRFGVTRQEQDQAAVESHKRAAAATATGKFKDEIIPVSTKIVDPKTGDEKPVTISVDDGIRPNAIMSDLAKLKPVFKKNGTTTAGNSSQVSDGAGAVLLMKRSVAMRKGLPILGVFRTFAAVGVDPAVMGIGPAVAIPAAVKSAGLELDDIDLFEINEAFASQFVYCRKKLDLDPEKINVNGGAMAIGHPLGATGARCVGTLLHEMKRRGKDCRFGVVSMCIGTGMGAAAVFERGDCVDELRNARTAENNNLLSKDAQ

SEQ ID NO: 3159 - DNA, 1173 bp, Vitis vinifera
  CDS (1)..(1173)
atgtcaaacagtgcctgtcgtaccgccatttgcaaagccaaacgtgggggtttcaaggatacccttcccgatgatatacttgcccctgttctgaaggcattgatagagaagacaaatgtggacccaagtgaggtaggggacatcgttgttggtacagttttggcaccaggttcacaaagagcaattgagtgtagaatggcagccttttatgcaggctttcctgacactgtaccaatcagaactgtcaataggcaatgttcatctggtcttcaagcggttgttgatgtagttgcagccataagagcaggattgtatgacattggaattggggctggattagaatccatgacaacagataacattgctggagttaccacagttaacccaaaagtagatatttttgcacaagcccgagattgtcttcttcccatgggtcttacttctgaaaatgttgcaaaacgttatggggtgacaaggcaagagcaagatcaggctgctgtcgaatctcataggcgtgcagctgctgcaagtgcagctggtaaattcaaagaagaaataattccagtttctactaagattgtggatccaaaaactggagaggtgaagcctgttataatttctgtggatgacggcattcggcctgatacaaatatgaaatcactagcaaagctgaagcctgcatttgcaaaggatgggtccacaactgctgggaatgctagccaggtgagtgatggtgctggaggagccctcctcatgaagagaagtctggctatgaagaggggtcttcctatcctggggttgttcaggagttatgctgctgtgggtgtggagcctggtgtcatgggtgtaggtccagctgttgcaatcccaattgctgcaaaaaatgctggtcttgaggttgctgacattgacctgtttgaaataaatgaggcatttgcatcccaatatgtatactgctgtaagaaactggatcttgatcctaaaaaggtcaatgttaatggaggtgctttggctcttgggcatcccctgggtgctacaggtgctcgctgtgtttcaacactgttgtatgagatgaagcgccgtggcaaggactgccggtatggtgtgatttccatgtgcataggctcgggcatgggggctgctgccgttttcgaaagaggcgattcttactga

SEQ ID NO: 3160 - protein, 390 aa, Vitis vinifera
MSNSACRTAICKAKRGGFKDTLPDDILAPVLKALIEKTNVDPSEVGDIVVGTVLAPGSQRAIECRMAAFYAGFPDTVPIRTVNRQCSSGLQAVVDVVAAIRAGLYDIGIGAGLESMTTDNIAGVTTVNPKVDIFAQARDCLLPMGLTSENVAKRYGVTRQEQDQAAVESHRRAAAASAAGKFKEEIIPVSTKIVDPKTGEVKPVIISVDDGIRPDTNMKSLAKLKPAFAKDGSTTAGNASQVSDGAGGALLMKRSLAMKRGLPILGLFRSYAAVGVEPGVMGVGPAVAIPIAAKNAGLEVADIDLFEINEAFASQYVYCCKKLDLDPKKVNVNGGALALGHPLGATGARCVSTLLYEMKRRGKDCRYGVISMCIGSGMGAAAVFERGDSY

SEQ ID NO: 3161 - DNA, 1257 bp, Penicillium chrysogenum (strain ATCC 28089 / DSM 1075 / Wisconsin 54-1255)
  CDS (1)..(1257)
atggccgcagatcgtttaagctcgctcctgagccacctcaagcccggcgccaccaacggcctcgctgctattacacagaagaaccctgacgatgtggtcatcaccctagcaatccgcacaccgctgaccaaggcgcgtaagggcgggttcaaggacacagaattggactacatgatctacgccctgctgaaggagaccctggccaagtcacagattgaccctgctctaatcgaggatgtctgtctcggaaacgtcaacgaagtcaaagccgcctacatggtccgcgccgcagctcttgccgccggcatcccccacacagccggtgcctcatcagtgaaccgcttctgctcatccgggctgaaggctgtgcaggatatcgcgaaccagatccagctgggcgccatcgacgttggtgtcgctcttggcgcggagctgatgtccgcctctggcgaccggctggacaggccgttcaacgaggaagtcctgcgcaaccaggaggccgccgactgcatgcagcccatgggacaaacttctgagaacgtcggaaaggacttcgatatcccccgcgaacagcaggaccgatatgccgccgagtccttccgccgtgctgaggctgctcagaacaatggctggctcgatgacgagattgcccccatcgctgtcaaggttaaggaccccaagactggcgaggttaaggaagtcactctgtcccgtgacgatggtatccgtcccggtactactttcgagtcgctttccaagattcgtcctgctttccctcagttcggtgataagtccactggtggaaactccagccaggttaccgatggtgccgcttctgttcttctcatgcgccgctccaaggctatcgagttgaaccagcctatccttgctaagttctgtggcgctaccgttgccggtgtgccccctcgcgtgatgggtatcggcccaactgctgctattcctaagctgctgagcaagttccagcttgacaagaatgatatcgatatctacgagatcaacgaggctttcgcctctatggcggtctactgtgttaagaaccttggtcttgatcacgccaaggtcaaccctcgtggcggtgctattgcccttggtcacccgctcggcgcaacaggtgcgcgccagatcgcgaccattctgagtgaggctcgccggacaaagagtaagattctggtcacttctatgtgtattggaactggacagggtatggctggtctcttcgtcaacgagcaactgtaa

SEQ ID NO: 3162 - protein, 418 aa, Penicillium chrysogenum (strain ATCC 28089 / DSM 1075 / Wisconsin 54-1255)
MAADRLSSLLSHLKPGATNGLAAITQKNPDDVVITLAIRTPLTKARKGGFKDTELDYMIYALLKETLAKSQIDPALIEDVCLGNVNEVKAAYMVRAAALAAGIPHTAGASSVNRFCSSGLKAVQDIANQIQLGAIDVGVALGAELMSASGDRLDRPFNEEVLRNQEAADCMQPMGQTSENVGKDFDIPREQQDRYAAESFRRAEAAQNNGWLDDEIAPIAVKVKDPKTGEVKEVTLSRDDGIRPGTTFESLSKIRPAFPQFGDKSTGGNSSQVTDGAASVLLMRRSKAIELNQPILAKFCGATVAGVPPRVMGIGPTAAIPKLLSKFQLDKNDIDIYEINEAFASMAVYCVKNLGLDHAKVNPRGGAIALGHPLGATGARQIATILSEARRTKSKILVTSMCIGTGQGMAGLFVNEQL

SEQ ID NO: 3163 - DNA, 1257 bp, Penicillium chrysogenum (strain ATCC 28089 / DSM 1075 / Wisconsin 54-1255)
  CDS (1)..(1257)
atgtcttcaccacaacaacgtctgaactccgtcgccaaccagctggctcctggctcggcccgccaaaagattctagccaagaacccagatgacgtggtcatcacttacttggcccggacgccgctcaccaaagcccgcaaaggtggattgaaggataccaccgtggatgatctcctcatctcacttctcacgaccgttcgcgagaagtccaaccttgaccccaacctcgttgaagatgtctgtgttggcaatgtcctctgccccggctccgcatatgtcgcccgttccgccgtgctggcagcaggctaccccgtaacagcagctgcctccatcgccaaccgattctgctcgtccggtctactggccgtgcaaaacatcgccaaccaaatcatcgcaggatccatcgatgtcggtgtggccgtgggagccgagagcatgagcaagaacgccgacggcggcgcccccgaaatgtccgagcgcatcaccaagcacccgatcgcatcgcagaactcccaacccatgggccaaacatcggagaatgtggcgaaccagttcaacatctcgcgcgagcaacatgacagattcgctgccaacagtttccagaaagctgagcgcgcccagaaggccggctggctggaggacgagatcgtccccgtcaggactcaaattaaggaccccaagaccggcgaggtcaaggatattgtcgtggtccgtgacgacggcatccgctacggtactacccccgagtccctcggcaaggtccgcgctgccttcccccagtgggcccctagcgctaccaccggcggtaacgccagtcaaattactgatggtgctgctgcgctggttctgatgaagcgctcgcgcgcccagcagcttggccaacccatcgttgccaagttctgtggcgctaccgtttctggtctggaacccagaataatgggtattggcccatcccttgccattcccaaaatcctgagcaagttcaacttgagcaaggatgacattgatatttttgagattaacgaggccttttcttcaatgggtgtgtactgcgtcaacaagctgggcttggatgaatccaaggtgaacccgcgtggtggtgctattgcttttggtcaccctctgggcgccactggcgcacgccaggttgtcactgctctgtctgagctacgtcgacaggataagcgagtcgccgtgacttcgatgtgcgtgggcactggcatgggtatggccggtatctttgtttctgagcattag

SEQ ID NO: 3164 - protein, 418 aa, Penicillium chrysogenum (strain ATCC 28089 / DSM 1075 / Wisconsin 54-1255)
MSSPQQRLNSVANQLAPGSARQKILAKNPDDVVITYLARTPLTKARKGGLKDTTVDDLLISLLTTVREKSNLDPNLVEDVCVGNVLCPGSAYVARSAVLAAGYPVTAAASIANRFCSSGLLAVQNIANQIIAGSIDVGVAVGAESMSKNADGGAPEMSERITKHPIASQNSQPMGQTSENVANQFNISREQHDRFAANSFQKAERAQKAGWLEDEIVPVRTQIKDPKTGEVKDIVVVRDDGIRYGTTPESLGKVRAAFPQWAPSATTGGNASQITDGAAALVLMKRSRAQQLGQPIVAKFCGATVSGLEPRIMGIGPSLAIPKILSKFNLSKDDIDIFEINEAFSSMGVYCVNKLGLDESKVNPRGGAIAFGHPLGATGARQVVTALSELRRQDKRVAVTSMCVGTGMGMAGIFVSEH

SEQ ID NO: 3165 - DNA, 1242 bp, Penicillium chrysogenum (strain ATCC 28089 / DSM 1075 / Wisconsin 54-1255)
  CDS (1)..(1242)
atggcttctccaattccccgcggactccgccaagtgctccagaagtcctccaatgacattgtcatcctgtcctctctgcgcacgcccgtcacccgcgccaagaagggcggtttcaaggatgcctacccagaagagctactcgccagcgtgttgcaggcaacactgaaggcaaacccgaacttagacccggcccagatcgacgatgtgctgatcggctccgtcctacaagaactaggcggcgccaaagcgggtcgcatgggccagatccacgccggcttccctcactctgtgcccttcaacacgatcaaccgtcagtgctcatccggcctggcagcgatcacaaccattgccaacggcattcgggccggcgccatcaacgtcggcgtcggtggcggcatggaatccatgacccgcaactacggctcccgcgccatccccacagtcctctggcccgagctgaaggagtcctattcccaggacgcccgcgactgcatcatgcccatgggcattacctcggagaatgtcgcatcgcgatacggcgtctcccgcgcagaccaggatgccttcgccgtcgagtcccacgcaaaggcgtctgccgcccagaaggcaggccgcttcgactccgagatcgtctcggtcactaccaagacccttgaccccgagaaccccgatgcccccgccagggacgtgacagtctctcaggacgacggtatccgccacggcctgtccatcgagaaggtgggcgcgctgaagcccgctttctcgcctactggcgccagcaccgccggtaacagttcgcaagttagcgacggtgctgccgctactttgttgatgcgtcgctccaccgccgaggagcttggtctgtctggttcaattaaggcgcgctgggtcgcgtctgccgtcgccggctgtgcccccgacgagatgggcgttggccctgctgttgccatccctaagctcctacagactgttggtgtcgaggttcccgaggtcggtgtttgggagatcaatgaggctttcgcctcgcaggctctctacagcgttcgcaagcttggcatcgaccaggctaaggttaaccctaatggtggtgctattgctatcggtcatcctctcggtgctactggtgctcgccaattggctacactgctgcctgagttggagcgcagtggtcaggagatcggtgttattagcatgtgcattggtacgggtatgggtatggcgggcatgtttgtccgcgagtaa

SEQ ID NO: 3166 - protein, 413 aa, Penicillium chrysogenum (strain ATCC 28089 / DSM 1075 / Wisconsin 54-1255)
MASPIPRGLRQVLQKSSNDIVILSSLRTPVTRAKKGGFKDAYPEELLASVLQATLKANPNLDPAQIDDVLIGSVLQELGGAKAGRMGQIHAGFPHSVPFNTINRQCSSGLAAITTIANGIRAGAINVGVGGGMESMTRNYGSRAIPTVLWPELKESYSQDARDCIMPMGITSENVASRYGVSRADQDAFAVESHAKASAAQKAGRFDSEIVSVTTKTLDPENPDAPARDVTVSQDDGIRHGLSIEKVGALKPAFSPTGASTAGNSSQVSDGAAATLLMRRSTAEELGLSGSIKARWVASAVAGCAPDEMGVGPAVAIPKLLQTVGVEVPEVGVWEINEAFASQALYSVRKLGIDQAKVNPNGGAIAIGHPLGATGARQLATLLPELERSGQEIGVISMCIGTGMGMAGMFVRE

SEQ ID NO: 3167 - DNA, 1260 bp, Penicillium chrysogenum (strain ATCC 28089 / DSM 1075 / Wisconsin 54-1255)
  CDS (1)..(1260)
atgtctaacgcccagcaacgccttagccaggtttcctcccacttcggccccggtggcaagaagggagccgccgctattaccgaaaagcaccccgatgacattgtcgtgacatgtgccctccgcacagccctcaccaagggtggtaagggtggcttcaaggataccgctggcgctgacctgcttgctggtgtcttcaaggctgttctgaacaagagcggcgttgaccccagctctgtccaggacattgccgtcggctccgtccttgcccccggtggtggtgctactgagttccgtgccgctgctctcgtggctggcttccccgagagcaccgccgtgaagagcttgaaccgtcagtgctctagcggtctccaggctatcgccgatattgccaatgccattcagtctggcatgatcgatgtcggcatcggtgccggtgttgagagcatgtcctctcagtacggacccggtgccgtgaccgagttctccgacctcctcgagagccaccccgagtccgcaaactgcaaggtccccatgggtgtgctgtccgagaacatggccaaagaccgtggcgtgacccgtgcttcccaagactccttcgccgctcaatcataccagaaggctgttgccgcccagaaggccggtctcttcaacgaagagatcgcccctcttgacgtgaagtggaccgaccctaagaccggcgaggagaagaccatcaccgtgaaggccgatgacggcgtccgccagggtatcaccgccgagtcgcttggcaagatcaagcccgcctttgccaaggacggctccatccacgccggtaacgcttcccagatctccgacggtgccgccgccgtcctcctcatgaagcggtccactgcggagcgtctgggccagaagatccttggcaagtatgtcactgccagcgtcgtcggcgtgaagcccctgctcatgggcgtcggcccttggaaggctatccccgttgcgctggagaaggccggcatcaccaaggatgatgtcgacatttatgagatcaacgaggctttcgcttcccagtgtgtctggtgtgttaatgaactcggcatccctgccgagaaggttaaccccaagggtggtgctattgctttcggtcaccctcttggctgcactggtgcccgtcaggtcagcactttgtttactgagctcaagcgcacaaacaagaagattggtgtcaccagcatgtgcgtcggtaccggtatgggtatggccgctgtctgggtgtcggagtaa

SEQ ID NO: 3168 - protein, 419 aa, Penicillium chrysogenum (strain ATCC 28089 / DSM 1075 / Wisconsin 54-1255)
MSNAQQRLSQVSSHFGPGGKKGAAAITEKHPDDIVVTCALRTALTKGGKGGFKDTAGADLLAGVFKAVLNKSGVDPSSVQDIAVGSVLAPGGGATEFRAAALVAGFPESTAVKSLNRQCSSGLQAIADIANAIQSGMIDVGIGAGVESMSSQYGPGAVTEFSDLLESHPESANCKVPMGVLSENMAKDRGVTRASQDSFAAQSYQKAVAAQKAGLFNEEIAPLDVKWTDPKTGEEKTITVKADDGVRQGITAESLGKIKPAFAKDGSIHAGNASQISDGAAAVLLMKRSTAERLGQKILGKYVTASVVGVKPLLMGVGPWKAIPVALEKAGITKDDVDIYEINEAFASQCVWCVNELGIPAEKVNPKGGAIAFGHPLGCTGARQVSTLFTELKRTNKKIGVTSMCVGTGMGMAAVWVSE

SEQ ID NO: 3169 - DNA, 1242 bp, Penicillium marneffei (strain ATCC 18224 / CBS 334.59 / QM 7333)
  CDS (1)..(1242)
atggcatcacccatcccccgaggcctcaaacaggtcctccaaaaatcaccctccgacatagtcatcctctcttcagtgcgcacagcagtcacccgcgccaaaaagggcggtttcaaagacgcctaccccgaagaattactggcgcacgtcctcaaagcaaccttggccgcaaacccaaacctcgacccagcactcattgacgatgtagccgttggctccgtgctgcaagaactaggtggcgcaaaagctggtcgaatggcacagatccacgctggattcccgcattcagtttctttccatactattaatagacagtgctcctctggattggcggctattaccactattgcgaatggaatcagggctggtgcgattaatgtcggtgttggtggtggaatggagtctatgacgaggaattatggctcaagagccattccgactgtgctctggcctgagttgaaggaatcgcattcccaggatgcgcaggattgtattatgcctatgggtttgacatcggagaatgtcgcgagtcgatatggtgtttcgagagaggatcaggatgtgtttgcggctcattcgcataaaaaggcggccgcggctcaggctgctggtctgtttgatgaggagattatccccgttaccacgaagtcctatgatgccgagaacccagatgcgccgccgaaagatattaccgtgagcaaggatgatggtattcgacccaccatctcagctgagaagatggctacgctcaaacccgcattcaaggcggatggtaccagcacagctggaaatagttcgcaggttagcgatggtgcggctgcgacattgcttatgcgtcgttccacagctatggagctcggtctttcgtcttctatcaagggacgatgggtcgccagtgcggtcgccggctgtgcccccgatgagatgggcgttggacccgcatttgcgattcccaaactccttgctcagactggattggaagtctctgacatcggtatttgggaactcaatgaagctttcgcttcgcaggcgttgtattgcgttcgcaagttgggtattgacgaggccagggtcaaccccaagggtggcgcgatcgctattggtcatccgctcggtgctacgggtgccaggcaggtggctacattgttgcctgagctggccaggacgggtcaggatattggtgttgttagtatgtgtattggaaccggtatgggtatggctggtatgtttgtgcgggaatag

SEQ ID NO: 3170 - protein, 413 aa, Penicillium marneffei (strain ATCC 18224 / CBS 334.59 / QM 7333)
MASPIPRGLKQVLQKSPSDIVILSSVRTAVTRAKKGGFKDAYPEELLAHVLKATLAANPNLDPALIDDVAVGSVLQELGGAKAGRMAQIHAGFPHSVSFHTINRQCSSGLAAITTIANGIRAGAINVGVGGGMESMTRNYGSRAIPTVLWPELKESHSQDAQDCIMPMGLTSENVASRYGVSREDQDVFAAHSHKKAAAAQAAGLFDEEIIPVTTKSYDAENPDAPPKDITVSKDDGIRPTISAEKMATLKPAFKADGTSTAGNSSQVSDGAAATLLMRRSTAMELGLSSSIKGRWVASAVAGCAPDEMGVGPAFAIPKLLAQTGLEVSDIGIWELNEAFASQALYCVRKLGIDEARVNPKGGAIAIGHPLGATGARQVATLLPELARTGQDIGVVSMCIGTGMGMAGMFVRE

SEQ ID NO: 3171 - DNA, 1251 bp, Penicillium marneffei (strain ATCC 18224 / CBS 334.59 / QM 7333)
  CDS (1)..(1251)
atggccgtcgaccgtctctcctccctcctcaaccatttgaagcccggcaactctggcatcgcggcgattacaaccaaaaacccagaagatgtcgtggtcacacttgcaatccgcactcccttgaccaaaggcttcaagggaggcttcaaggacacatcgcttgattacatagtctattcggtgctgaaacagctcgttgagcggtcacagattgaccctgcgcttatcgaggacgtttgtttgggaaatgtcggcgacggacgagcagcatacctaggccgcggcgccgccctcgcagccggcatcccacataccgccggcgcctcaagcgtcaaccgcttctgcgcctccgggctcaaggcaatccacgacatcgccaaccagatccgcaccggcgccatcgaaatcggcgttgccgtcggcgctgagtccatgacctccggcggcgggccaatcgacacattccatgaagagatcctcaagaaccaagaagccgctgactgtctacaacctatgggtcagacatccgagaatgtcggtgacgattttggaatcacacgccagatgcaggatgagtattccgtggagtcgtttcgacgtgctgaagtggctcaaaaggcgggttggtttgatgatgagattgtgcctgttacgacgaaagtcacggatcccaagacgggagaagagaagacggtcacacttaccaaggatgagggtcctcggtacggaaccacgtatgagggattgagcaagattcgacctgctttccctcagtttggaaataagaccactggcggtaacgccagtcaggttaccgacggagccgccgcggtcctcctgatgcgccgctccaaagcaatcgaactcaaccagcccatcctcgccaaattctgcggcgccaccgtcgccggcgtgcccccacgagtaatgggcatcggtcccacggccgccatccccaagctccttaaacaattcaatctgaccgttcccgatatcgacatttgggaaataaacgaagcctttgcctcaatggcggtttattgtcttaagaatctaggcattgagcatgaaaaactcaatccccgcggaggagcgattgcgcttgggcatcctctaggagcgacaggggcgagacaggtcgttacgatgttgagtgaggcgaggaggacgaagaagaagattttggttaatagtatgtgtattggtacggggcaggggatggcgggactttgggttaatgagcaggtttga

SEQ ID NO: 3172 - protein, 416 aa, Penicillium marneffei (strain ATCC 18224 / CBS 334.59 / QM 7333)
MAVDRLSSLLNHLKPGNSGIAAITTKNPEDVVVTLAIRTPLTKGFKGGFKDTSLDYIVYSVLKQLVERSQIDPALIEDVCLGNVGDGRAAYLGRGAALAAGIPHTAGASSVNRFCASGLKAIHDIANQIRTGAIEIGVAVGAESMTSGGGPIDTFHEEILKNQEAADCLQPMGQTSENVGDDFGITRQMQDEYSVESFRRAEVAQKAGWFDDEIVPVTTKVTDPKTGEEKTVTLTKDEGPRYGTTYEGLSKIRPAFPQFGNKTTGGNASQVTDGAAAVLLMRRSKAIELNQPILAKFCGATVAGVPPRVMGIGPTAAIPKLLKQFNLTVPDIDIWEINEAFASMAVYCLKNLGIEHEKLNPRGGAIALGHPLGATGARQVVTMLSEARRTKKKILVNSMCIGTGQGMAGLWVNEQV

SEQ ID NO: 3173 - DNA, 1254 bp, Penicillium marneffei (strain ATCC 18224 / CBS 334.59 / QM 7333)
  CDS (1)..(1254)
atgtctcaagcacaacagcgcctctcccaggtctcctcgcacctctcttcccccaaagccgcctccaacatcctctccaaaaacccagatgacatcgtcgtgaccgccgccctgcgcacccccttcaccaagggcggaaaaggcggtttcaaagacaccgccgctgcggacttgctggtgggcgcattccaaggcctcatcaagcgcagcggcatcgatcccaaactcgttgaagatattgcggtcggatcggtgttgccccctggtggaggagccactgagttcagagctgcggcgctcgttgctggattccccgagtcaactgctgtgcggagcttgaataggcagtgttcgagcggattgcaggccgtgactgatattgcgaatgccatcagggccggccagattgaggttggtgttggtgcgggtgtggagagtatgagtttgcaatatggacccggcgcagtcacagaattctccgacctcctcgaaaaccacatgcaagccgcaaactgcaaagtgcccatgggcgtcctgtccgaaaacatggccaaagaccgcaacatctcgcgcaccgagcaagacgctttcgccgcctcatcgtaccaaaaggccatcaaagcccaaaaagcgggcctattcgatgaagaaatttaccccttgacggtgaaatggacagaccccaaaaccggcgatgagaagaccatcaccgtcaaggctgacgacggtgtccgagagggaatcacaccggagtctctggccaaaatcaagcctgcgtttgccaaggatggaagtatccatgccggtaacgcgtcgcaggtctccgacggcgctgccgcagtgttgctcatgaagcgctccacagccgagcgactgggtcaaaagatcattggcaagtttgtgacggccagcatcgtgggtgttgagcctctacttatgggtattggaccatggaaagctatccccgtcgcactcgaaaaggctggaatctccaaggatgatgtagacatttacgaaatcaacgaggctttcgcgtcgcaatgcgtctggtgcgtgaaggaattgggcttgcccttcgagaaggtgaaccccaagggtggcgcgattgcctttggccatccgttgggatgcaccggcgccagacaggttagtaccctgttcacggagctgaagaggacgaataagaagattggtgttacgagcatgtgtattggaacaggaatgggtatggctgctgtttgggttgctgaataa

SEQ ID NO: 3174 - protein, 417 aa, Penicillium marneffei (strain ATCC 18224 / CBS 334.59 / QM 7333)
MSQAQQRLSQVSSHLSSPKAASNILSKNPDDIVVTAALRTPFTKGGKGGFKDTAAADLLVGAFQGLIKRSGIDPKLVEDIAVGSVLPPGGGATEFRAAALVAGFPESTAVRSLNRQCSSGLQAVTDIANAIRAGQIEVGVGAGVESMSLQYGPGAVTEFSDLLENHMQAANCKVPMGVLSENMAKDRNISRTEQDAFAASSYQKAIKAQKAGLFDEEIYPLTVKWTDPKTGDEKTITVKADDGVREGITPESLAKIKPAFAKDGSIHAGNASQVSDGAAAVLLMKRSTAERLGQKIIGKFVTASIVGVEPLLMGIGPWKAIPVALEKAGISKDDVDIYEINEAFASQCVWCVKELGLPFEKVNPKGGAIAFGHPLGCTGARQVSTLFTELKRTNKKIGVTSMCIGTGMGMAAVWVAE

SEQ ID NO: 3175 - DNA, 1206 bp, Zea mays
  CDS (1)..(1206)
atggcatccaacggcatcgctcccagagatgtatgtgttgttggtgttgcacgcacccctttgggtggtttccttggtgccttgtcttccttgcccgcaacaaagcttggctctatagcaattgaagctgctctgaaaagagcaaatgtggatccagccctcgtgcaggaggtctttttcggaaacgtcttgagtgctaatttgggacaagctcctgcaaggcaagccgctctaggtgcagggataccaaacactgttgtttgcaccactgttaacaaagtctgcgcatctggcatgaaagctactatgttcgccgcacagtcaattcagctgggtatcaatgatattgttgtggcaggtggcatggaaagcatgtccaatgccccaaagtacattgctgaagctaggaaagggtctcgttttggacatgacacacttgttgatgccatgcttaaggatggactttgggatgtatacaatgactgtgccatgggaatgtgtgccgaactttgtgctgacaatcatgccctcacaagagaagaccaggatgcttttgctatccaaagcaaccagcgtggaattgctgctcgtgacagtgatgcttttgcatgggagattgttccgattgaagttcctgttgggagaggaaaaccacctgtacttattgagaaagatgaaagcctggataagtttgacccagcaaaactgaagaaacttcgcccaagtttcaaggagaatggtggtaccgttacagctggaaatgcttctagtataagtgatggggcggctgcattagttttggtgagtgggcagaaggctcaagagcttggcctgcaagtccttgcaaggatcagaggatatgcagatgcagctcaagctccggaactttttacaaccaccccagcacttgcgataccaaaggctatatcaaatgctggattagagtcatcccatgttgatttttttgagattaatgaagcattttctgctgtcgcacttgcaaatcaaaagcttcttgggattccttcagaaaagattaatgtccatggaggagctgtgtctctagggcatcctcttgggtgcagcggtgctcgcattttggtcacccttcttggtgtccttagggaaaagggcggcaagatcggtgttgctggtgtctgcaacggcggaggtggagcatcagctcttgttctcgaactcgcataa

SEQ ID NO: 3176 - protein, 401 aa, Zea mays
MASNGIAPRDVCVVGVARTPLGGFLGALSSLPATKLGSIAIEAALKRANVDPALVQEVFFGNVLSANLGQAPARQAALGAGIPNTVVCTTVNKVCASGMKATMFAAQSIQLGINDIVVAGGMESMSNAPKYIAEARKGSRFGHDTLVDAMLKDGLWDVYNDCAMGMCAELCADNHALTREDQDAFAIQSNQRGIAARDSDAFAWEIVPIEVPVGRGKPPVLIEKDESLDKFDPAKLKKLRPSFKENGGTVTAGNASSISDGAAALVLVSGQKAQELGLQVLARIRGYADAAQAPELFTTTPALAIPKAISNAGLESSHVDFFEINEAFSAVALANQKLLGIPSEKINVHGGAVSLGHPLGCSGARILVTLLGVLREKGGKIGVAGVCNGGGGASALVLELA

SEQ ID NO: 3177 - DNA, 1386 bp, Zea mays
  CDS (1)..(1386)
atggagaaggcgatcgatcggcagcgggtcctcctggcgcacctcctcccctccccctccgccgcctcctcgcagcctcaccttgcggcgtcggcgtgcgcggccggggacagcgccgcctaccagaggtcctcctccttcggggacgatgtcgtcgtcgtcgctgcctacaggacgccgatatgcaaggccaagcgaggaggcttcaaggacacctacccagaggacctcctcactgttgttctcaaggctgttctggacaacactagaatcaatccagctgacatcggtgacatcgtcgttgggacggtgctcggccctggttcccagcgtgcaaacgagtgcaggatggctgcgttgtttgctggcttccctgaaaccgtccctgttagaactgtcaaccgccagtgttcatctgggctacaggcagtagccgatgtcgcagctgctataaaggctggttactatgacatagggattggtgctggtttggaatccatgtccataaattccattgcttgggaaggacaagttaacccaaaaataagcgcattccagaaagcacaggattgtcttctgcccatgggaattacgtctgaaaatgttgcccatcgatatggtgtaaccaggcaagagcaagatcaggccgccgctgagtctcataggagagctgctgcagccacggcctctggaaaattcaaggatgagatcgtcccggtgccaacaaagatcgttgatcctaaaactggagaggagaaggaagttgtgatatcagttgatgatgggattaggccagggaccacagcatctggattggcgaaactgaaaccagtttttaaaaaggatggaactacaactgcaggcaattccagtcaagtgagtgatggtgctggagctgttcttctcatgaaaagatctgtggctctgaagaaagggctgcccattcttggtgttttcaggagctttgcggctgttggagtggatccagctgttatgggtgttggtcctgctgtggccattcctgctgctgtgaagtctgcaggccttgagattggcgacattgatctgtttgaactgaatgaggccttcgcctctcagtttgtctattgctgcaacaagttggggctggaccgttctaaagtaaatgtaaatggaggcgcgattgcccttggacaccctctgggtgcaacaggtgcccggtgtgtggctactcttctaaatgaaatgaagcgccggggcagagactgcagatttggtgttgtcaccatgtgtatcggatctggaatgggggcagcagctgtgttcgagcggggagacgcggtggatggactctccaacgtgagggacatgcaggcacataattttctgtctaaggatgcgaagtag

SEQ ID NO: 3178 - protein, 461 aa, Zea mays
MEKAIDRQRVLLAHLLPSPSAASSQPHLAASACAAGDSAAYQRSSSFGDDVVVVAAYRTPICKAKRGGFKDTYPEDLLTVVLKAVLDNTRINPADIGDIVVGTVLGPGSQRANECRMAALFAGFPETVPVRTVNRQCSSGLQAVADVAAAIKAGYYDIGIGAGLESMSINSIAWEGQVNPKISAFQKAQDCLLPMGITSENVAHRYGVTRQEQDQAAAESHRRAAAATASGKFKDEIVPVPTKIVDPKTGEEKEVVISVDDGIRPGTTASGLAKLKPVFKKDGTTTAGNSSQVSDGAGAVLLMKRSVALKKGLPILGVFRSFAAVGVDPAVMGVGPAVAIPAAVKSAGLEIGDIDLFELNEAFASQFVYCCNKLGLDRSKVNVNGGAIALGHPLGATGARCVATLLNEMKRRGRDCRFGVVTMCIGSGMGAAAVFERGDAVDGLSNVRDMQAHNFLSKDAK

SEQ ID NO: 3179 - DNA, 1185 bp, Staphylococcus aureus
  CDS (1)..(1185): transl_table=11
atgcaagaagcatacattgtagcttatgggcgttcagccgcagcgaaagcaaagcaaggcgcattattccacgaaagacctgatgatgtcgcagccaaagtattacaaggcgtattgaaacgtattgacggaaaattcaataagaatatgattgaagatgtcattgttggtacggcttttccagaaggattacaaggacaaaacattgcacgaacgattgcattgcgtacgggattatctgacacggtaccgggtcaaacagtgaatcgctactgctcatcaggattacaaactatcgcgattgcagccaatcaaattatggctggtcaaggagatatacttgtagctggtggcgttgaattgatgagtgccgtaccaatgggtggcaacgagcccacaaacaatccaaccttacaatatgatgatataggtgcgtcatatcctatgggtttaactgctgaaaatgtagcatcccaatttgacgtatcacgcgaagatcaagatgcttatgctgtcagaagtcatcaacgtgcctatgacgcacaacttgatggtcggttcaaagatgaaattattccaatacaagtaaactcagttgaatatacaaatgcaggaccaaaagtacacacaaatatctttgaccaagatgaatttatacgacctgacaccacgatagaggcattagccaagttacgtacagtatttaaagctgacggcactgtgactgcgggaacatctgccccactttctgatggcgcaggatttgtagttttaatgtctggagataaagtgaaagaactcggcgtgacacctattgcacgattcgttggttataaggcagtaggcgttgacccgaaaattatgggtattgggcctgcatatgcgattcctgaagtattgtcactcagcaatctatctgttgaagacattgatttgatcgaattgaacgaagcatttgcttctcaaacgattgcatctattaaagaagtaggtctagatatatcacgtacgaatgtgaatggtggcgctattgctttaggtcatccattaggtgctacaggagcaatgttaaccgcgcgtttacttaatgaaatgggtagacgtcccgatagtcgttacggcatggttacgatgtgtattggtgtcggtatgggtgcagctgctatatttgagtatgtgcgttag

SEQ ID NO: 3180 - protein, 394 aa, Staphylococcus aureus
MQEAYIVAYGRSAAAKAKQGALFHERPDDVAAKVLQGVLKRIDGKFNKNMIEDVIVGTAFPEGLQGQNIARTIALRTGLSDTVPGQTVNRYCSSGLQTIAIAANQIMAGQGDILVAGGVELMSAVPMGGNEPTNNPTLQYDDIGASYPMGLTAENVASQFDVSREDQDAYAVRSHQRAYDAQLDGRFKDEIIPIQVNSVEYTNAGPKVHTNIFDQDEFIRPDTTIEALAKLRTVFKADGTVTAGTSAPLSDGAGFVVLMSGDKVKELGVTPIARFVGYKAVGVDPKIMGIGPAYAIPEVLSLSNLSVEDIDLIELNEAFASQTIASIKEVGLDISRTNVNGGAIALGHPLGATGAMLTARLLNEMGRRPDSRYGMVTMCIGVGMGAAAIFEYVR

SEQ ID NO: 3181 - DNA, 1185 bp, Staphylococcus aureus
  CDS (1)..(1185): transl_table=11
atgcaagaagcatacattgtagcttatgggcgttcagccgcagcgaaagcaaagcaaggcgcattattccacgaaagacctgatgatgtcgcagccaaagtattacaaggcgtattgaaacgtattgacggaaaattcaataagaatatgattgaagatgtcattgttggtacggcttttccagaaggattacaaggacaaaacattgcacgaacgattgcattgcgtacgggattatctgacacggtaccgggtcaaacagtgaatcgctactgctcatcaggattacaaaccatcgcgattgcagccaatcaaattatggctggtcaaggagatatacttgtagctggtggcgttgaattgatgagtgccgtaccaatgggtggcaacgagcccacaaacaatcccaccttacaatatgatgatataggtgcgtcatatcctatgggtttaactgctgaaaatgtagcatcccaatttgacgtatcacgcgaagatcaagatgcttatgctgtcagaagtcatcaacgtgcctatgacgcacaacgtgatggtcggttcaaaaatgaaattattccaatacaagtaaactcagttgaatatacaaacgcaggaccaaaagtacacacaaatatctttgaccaagatgaatttatacgacctgacaccacgatggaggcattagccaaattacgtacagtatttaaagctgacggcactgtgactgcgggaacatctgccccactttctgatggtgcaggatttgtagttttaatgtctggagataaagtgaaagaactcggcgtgacacctattgcacgattcgttggttataaggcagtaggcgttgacccgaaaattatgggtattgggcctgcatatgcgattcctgaagtattgtcactcagcaatctatctgttgaagatattgatttgatcgaattgaacgaagcatttgcttctcaaacgattgcatctattaaagaagtaggtctagatatatcacgtacgaatgtgaatggtggcgctattgctttaggtcatccattaggtgctacaggcgcaatgttaaccgcgcgtttacttaatgaaatgggtagacgtcccgatagccgttacggcatggttacgatgtgtattggtgtcggtatgggtgcagctgctatatttgagtatgtgcgttag

SEQ ID NO: 3182 - protein, 394 aa, Staphylococcus aureus
MQEAYIVAYGRSAAAKAKQGALFHERPDDVAAKVLQGVLKRIDGKFNKNMIEDVIVGTAFPEGLQGQNIARTIALRTGLSDTVPGQTVNRYCSSGLQTIAIAANQIMAGQGDILVAGGVELMSAVPMGGNEPTNNPTLQYDDIGASYPMGLTAENVASQFDVSREDQDAYAVRSHQRAYDAQRDGRFKNEIIPIQVNSVEYTNAGPKVHTNIFDQDEFIRPDTTMEALAKLRTVFKADGTVTAGTSAPLSDGAGFVVLMSGDKVKELGVTPIARFVGYKAVGVDPKIMGIGPAYAIPEVLSLSNLSVEDIDLIELNEAFASQTIASIKEVGLDISRTNVNGGAIALGHPLGATGAMLTARLLNEMGRRPDSRYGMVTMCIGVGMGAAAIFEYVR

SEQ ID NO: 3183 - DNA, 1185 bp, Staphylococcus aureus
  CDS (1)..(1185): transl_table=11
atgcaagaagcatacattgtagcttatgggcgttcagccgcagcgaaagcaaagcaaggcgcattattccacgaaagacctgatgatgtcgcagccaaagtattacaaggcgtattgaaacgtattgacggaaaattcaataagaatatgattgaagatgtcattgttggtacggcttttccagaaggattacaaggacaaaacattgcacgaacgattgcattgcgtacgggattatctgacacggtaccgggtcaaacagtgaatcgctactgctcatcaggattacaaaccatcgcgattgcagccaatcaaattatggctggtcaaggagatatacttgtagctggtggcgttgaattgatgagtgccgtaccaatgggtggcaacgagcccacaaacaatcctaccttacaatatgatgatataggtgcgtcatatcctatgggtttaactgctgaaaatgtagcatcccaatttgacgtatcacgcgaagaccaagatgcttatgctgtcagaagtcatcaacgtgcctatgacgcacaacgtgatgatcggttcaaagatgaaattattccaatacaagtaaactcagttgaatatacaaacgcaggaccaaaagtacacacaaatatctttgaccaagatgaatttatacgacctgacaccacgatggaggcattagccaaattacgtacagtatttaaagctgacggcactgtgactgcaggaacatctgccccactttctgatggtgcaggatttgtagttttaatgtctggagataaagtgaaagaactcggcgtgacacctattgcacgattcgttggttataaggcagtaggtgttgacccgaaaattatgggtattgggcctgcatatgcgattcctgaagtattgtcactcagcaatctatctgttgaagatattgatttgattgaattgaacgaagcatttgcttctcaaacgattgaatctattaaagaagtaggtctagatatatcacgtacgaatgtgaatggtggcgctattgctttaggtcatccattaggtgctacaggcgcaatgttaaccgcgcgtttacttaatgaaatgggtagacgtcccgatagccgttacggcatggttacgatgtgtattggtgtcggtatggctgcagctgctatatttgagtatgtgcgttag

SEQ ID NO: 3184 - protein, 394 aa, Staphylococcus aureus
MQEAYIVAYGRSAAAKAKQGALFHERPDDVAAKVLQGVLKRIDGKFNKNMIEDVIVGTAFPEGLQGQNIARTIALRTGLSDTVPGQTVNRYCSSGLQTIAIAANQIMAGQGDILVAGGVELMSAVPMGGNEPTNNPTLQYDDIGASYPMGLTAENVASQFDVSREDQDAYAVRSHQRAYDAQRDDRFKDEIIPIQVNSVEYTNAGPKVHTNIFDQDEFIRPDTTMEALAKLRTVFKADGTVTAGTSAPLSDGAGFVVLMSGDKVKELGVTPIARFVGYKAVGVDPKIMGIGPAYAIPEVLSLSNLSVEDIDLIELNEAFASQTIESIKEVGLDISRTNVNGGAIALGHPLGATGAMLTARLLNEMGRRPDSRYGMVTMCIGVGMAAAAIFEYVR

SEQ ID NO: 3185 - DNA, 1200 bp, Burkholderia pseudomallei 576
  CDS (1)..(1200): transl_table=11
atgagcaaacagctgcaagacgcatacatcgtcgccgcaagccgcacgccgatcggcaaggcgccccgcggtgcattcaagaacacccgcccggacgagctgctcgtccacgcaatcaagtcggccatcgcgcaagtgccggaattcgacacgaagctgatcgaagacgcaatcgtcggctgtgcgatccccgaggccgagcaaggcctgaacgtcgcgcggatgggcgcgctgctcgccggcctgccgaacacggtcggcggcgtgacggtgaaccgcttctgcgcgtcgggcatcacagcgctcgcgatggcggcggaccgcatccgcgtcggcgaatcggacgcgcttctcgcagccggcgtcgaatcgatgagcatggtgccgatgatgggcaacaagccgtcgatgtcgccgcacatcttcgatcgcagcgaagacttcggcatcgcttacggcatgggcctgacggccgagcgcgtcgccgagcagtggaaggtgagccgcgaagaccaggacgcgttctcggtcgagtcgcatcgcaaggcgatcgccgcgcagcaggcgggcgagttcaaggacgagatcgcgccctatgcgatcgtcgagcgcttcccgaatctcgtgacgggcgaaatcgatacgaagacgcgcgagatcgcgctcgacgaaggcccgcgcgcggaaacgtcgctcgaagggctcgcgaagctgaagacggtgttcgcgaacaagggctcggtgacggccggcaacagctcgcagacctcggacggctcgggcgcgctgctcgtcgtgtcggagaaggtgctcaagcagttcaacctgacgccgctcgcgcgcttcgtcagcttcgccgtgcgcggcgtgccgccggaaatcatgggcatcggcccgaaggaagcgattcccgccgcgctgaaggcggcgggcctcaagcaggacgacatcgactggatcgagctgaacgaggcgttcgccgcgcagtcgctcgccgtgatccgcgatctcggcctcgacccgtcgaagatcaacccgctcggcggcgcgatcgcgctcggccacccgctcggcgcgacgggcgcgattcgcgcggcgacggtcgtgcacggcctgcgccgccgcaacctgaagtacgggatggtgacgatgtgcgtcggcaccggcatgggcgcggcgggcatcatcgagcgcctctga

SEQ ID NO: 3186 - protein, 399 aa, Burkholderia pseudomallei 576
MSKQLQDAYIVAASRTPIGKAPRGAFKNTRPDELLVHAIKSAIAQVPEFDTKLIEDAIVGCAIPEAEQGLNVARMGALLAGLPNTVGGVTVNRFCASGITALAMAADRIRVGESDALLAAGVESMSMVPMMGNKPSMSPHIFDRSEDFGIAYGMGLTAERVAEQWKVSREDQDAFSVESHRKAIAAQQAGEFKDEIAPYAIVERFPNLVTGEIDTKTREIALDEGPRAETSLEGLAKLKTVFANKGSVTAGNSSQTSDGSGALLVVSEKVLKQFNLTPLARFVSFAVRGVPPEIMGIGPKEAIPAALKAAGLKQDDIDWIELNEAFAAQSLAVIRDLGLDPSKINPLGGAIALGHPLGATGAIRAATVVHGLRRRNLKYGMVTMCVGTGMGAAGIIERL

SEQ ID NO: 3187 - DNA, 1185 bp, Alicyclobacillus acidocaldarius LAA1
  CDS (1)..(1185): transl_table=11
atgcgggaagctgtgattgtttcggttgcacgcacgccggtcggaaaggccaagcgcggtgtgtttcgccatacgcgggtggaggacctcgggcgcgccgcggtgcgtgccgcggtggagcgcgcggaggggctcgatcccgccgagatcgaggacgtcgtcatcggctgcgccatgccggaaggcgaacagggcctgaacgtggcgcgcatcatctccatgtacagcgggttgccggagaccgtgccggcgatgaccatcaaccgcttttgttcgtccggccttcaggccattgccatcgcggccgagcgcgtgatgctcgggcacgcggaggtcgcgctcgcgggcggcgtggaaaccatgagccacgtcccgatgagcggcttcaagccgtccccgcacccggacattttgcttcagatgcccgacatctacatctccatggggcacaccgcggagaacgtcgcgaagcgatttggggtgagccgcgaagatcaggatcgattcgcgtacgagagccatcagaaggcgtacgcggcgcagcaggcgggcaagtttgacgacgagatcgtcccggtagagacgaaggtgtgggacatcgacgaggagggacgcccgcacgagaagaccatccgggtcacgcaggatgagggcgtccggaaagacacgacgctcgaggccctggcgtcgctccggccggcgttctccgtcggcggcacggtcacggcaggaaattcatcccagatgagcgacggcgccgcggccgcggtggtcatgacggctgagaaggcgcagcagttggggctcaagccgctcgccacgttcaagagtttcgcggtcacgggatgcgatccggccatcatgggtatcggtccggtcggcgccatcccgaaggcgctgaagctggcggggctctcgctcgcggatatcgatctcttcgagatcaacgaggcttttgcgtcgcagtgcctgcaggtgatccggtcgctcgacatcgatccggccaaggtcaacgtcaacggcggcgcgatcgcgctggggcatccgctcggctgcacgggtgcgaagctgaccgccaccttgatccacgaactgcgccggcgcggcggcggctacggcgtcgtctcgatgtgtatcggcggcggcatgggcgctgccggcgtattcgaagttcacaaaccctga

SEQ ID NO: 3188 - protein, 394 aa, Alicyclobacillus acidocaldarius LAA1
MREAVIVSVARTPVGKAKRGVFRHTRVEDLGRAAVRAAVERAEGLDPAEIEDVVIGCAMPEGEQGLNVARIISMYSGLPETVPAMTINRFCSSGLQAIAIAAERVMLGHAEVALAGGVETMSHVPMSGFKPSPHPDILLQMPDIYISMGHTAENVAKRFGVSREDQDRFAYESHQKAYAAQQAGKFDDEIVPVETKVWDIDEEGRPHEKTIRVTQDEGVRKDTTLEALASLRPAFSVGGTVTAGNSSQMSDGAAAAVVMTAEKAQQLGLKPLATFKSFAVTGCDPAIMGIGPVGAIPKALKLAGLSLADIDLFEINEAFASQCLQVIRSLDIDPAKVNVNGGAIALGHPLGCTGAKLTATLIHELRRRGGGYGVVSMCIGGGMGAAGVFEVHKP

SEQ ID NO: 3189 - DNA, 1254 bp, Ixodes scapularis
  CDS (1)..(1254)
ttgcgggtgttaactcttctttgttatttgcagcttgcgacgttgatatcacggaaaatgtatagcaacggcaacggcactgctggtgcactgaatgaggttgtaattgcctcgtttgcaaggacacctattgggtcgttcaggagttctttggctgctgttcctgccacgcggctgggttctgttgctatcaagggagccatcgaaagggcagggatctctgtcgacgatgtccaggaggtgttcatgggcaacgtcatctctgctgccggaggccaggcacctgcgaggcaggctgccctcggggcaggcgtgtcgcagtcgacgccatgcacgaccatcaacaaggtgtgtgcctctggaatgaaggccatcatgctggcagcgcagagcctcatgtgcggagctcaggaggtgatggtggcaggaggcatggagagcatgtccaacgttccctactacctggcacggggcgagactccttatggcggagtgcagctgacggatggtatcgtctacgatggcctgactgatgcctacgacaggatccacatggtatgtttgttctttgtttcgtgctgtgctccggtttcaatgtatctgcatcttgttggtggcattaatacttgcttgtttgtttcacgacaggctggagttttcgccaaggagatagtgccagtcaccatatctgggaagcgtggcaaaccagacaccgtggtcagcgaggacgaggagtataagaaagccaacttcgagaaatttggctcggttccaaccgtgttcttgaaggacggaggaactatcacggcagccaatgccagcaccctgaacgatggtgctgctgcgtgtgtcctgatgaccaggcaagcagcaaacaggcttggagtgaagcccattgctcgaattgttggatttgcagacgctgcagtcgagccagtgcacttctctattgctcctgcctacgcaatgccaaaggttctgaagcagactggcgtgaagttggaggacatttccatgtttgagataaacgaggccttcagttccgtcgttctgtgcaacatgaagcacctgaagctagaccagtccaaagtcaatgtccacggtggtgctgtcagcctggggcaccccattggaatgtctggagcgaggatcgtgggccgcatggcagtgcagctccagcccggacagctgggcctcgccggcatctgcaatggcggtggtggcgcctctgccttgctgctcgagaagctgtaa

SEQ ID NO: 3190 - protein, 417 aa, Ixodes scapularis
LRVLTLLCYLQLATLISRKMYSNGNGTAGALNEVVIASFARTPIGSFRSSLAAVPATRLGSVAIKGAIERAGISVDDVQEVFMGNVISAAGGQAPARQAALGAGVSQSTPCTTINKVCASGMKAIMLAAQSLMCGAQEVMVAGGMESMSNVPYYLARGETPYGGVQLTDGIVYDGLTDAYDRIHMVCLFFVSCCAPVSMYLHLVGGINTCLFVSRQAGVFAKEIVPVTISGKRGKPDTVVSEDEEYKKANFEKFGSVPTVFLKDGGTITAANASTLNDGAAACVLMTRQAANRLGVKPIARIVGFADAAVEPVHFSIAPAYAMPKVLKQTGVKLEDISMFEINEAFSSVVLCNMKHLKLDQSKVNVHGGAVSLGHPIGMSGARIVGRMAVQLQPGQLGLAGICNGGGGASALLLEKL

SEQ ID NO: 3191 - DNA, 1191 bp, Ostrinia scapulalis
  CDS (1)..(1191)
atgtctgtagctgttaaaggtgtgttcatagtgggcgccaagcgcaccccgttcggcacctttgggggggtgttccgaaacacttcggccactgagttacagaccatcgctgccacggctgcgcttaaggaagccaatgtggctcccgaccaagttgacaccgtcactgtgggacaggtcatgtcgggcacgcaaacagacggcatctacacgccacgccacgccgcactgaaggccggcattcctcaggaaaagccggtgctcggcatcaaccgcctctgcggttctggcttccagtccgtcatcaatggcgcacaggacatcctcaccggcgccgctaaggtctctctcgccggcggtgtagaaaacatgtcccaggctcctttcgcggtccgaggcgttcgcttcggcacgacccttggtctgaactacgccttcgaggacacactatgggctggcctgacagactcctactgtggcctgcccatgggcatgacggctgagaagttgggagctcagtactctatcacgagggatgaggttgacaacttcgcgctgcagtctcaacagaggtggaagacttcaaacgacgccggcgtgttcaaggcggagatcgaaccagtgaccctgaccatcaagaggaagcaagtgagcgtggcggtagacgagcacccgcggccgcagactaccctcgagggcctgaagaagctgccgcctgtcttcaagaaggaagggctcgttaccgctggtactgcttctggtatcagcgacggcgcgggcgccattgttctagccagtgaagaagctgccaagggtctgaaaccgctcgctcggctggtgggctggtcagtcgtaggagttgaccccagcatcatgggcgtaggcccagtgcccgccatccagaacctgcttaaggctactaatatgacgctcaatgatgtcgaccttattgagatcaacgaggcgttctgcgcgcagaccctggcttgcgctaaagccctgaagctggacatgaacaagctgaacgtgaacggcggcgccaccgcgctcgggcacccgctcggcgcctcgggctcgcggatcaccgcgcacctcgtgcacgagctcagacggcgtggactgaagagagccatcggatcggcctgcatcggtggcggacagggcatcgctctcatggttgaagccgtctaa

SEQ ID NO: 3192 - protein, 396 aa, Ostrinia scapulalis
MSVAVKGVFIVGAKRTPFGTFGGVFRNTSATELQTIAATAALKEANVAPDQVDTVTVGQVMSGTQTDGIYTPRHAALKAGIPQEKPVLGINRLCGSGFQSVINGAQDILTGAAKVSLAGGVENMSQAPFAVRGVRFGTTLGLNYAFEDTLWAGLTDSYCGLPMGMTAEKLGAQYSITRDEVDNFALQSQQRWKTSNDAGVFKAEIEPVTLTIKRKQVSVAVDEHPRPQTTLEGLKKLPPVFKKEGLVTAGTASGISDGAGAIVLASEEAAKGLKPLARLVGWSVVGVDPSIMGVGPVPAIQNLLKATNMTLNDVDLIEINEAFCAQTLACAKALKLDMNKLNVNGGATALGHPLGASGSRITAHLVHELRRRGLKRAIGSACIGGGQGIALMVEAV

SEQ ID NO: 3193 - DNA, 1251 bp, Oryza sativa subsp. indica
  CDS (1)..(1251)
atggctcctcctccgcactcggactctgacctgctcaagccgagagacgtctgcatcgtgggcgtcgcccgcacgcccatcggcgccctgctcggctccctctcctccctccccgccaccaagctcggctccgtcgccatccaggccgctctcaggagagcaaatgtggagccggcgctcgtgcaggaggtcttcatggggaacgttctcagcgccaaccttggccaagccccggcgaggcaagccgccctaggcgccggcttgcccgacactgtgccctgcaccaccgtcaacaaagtttgctcctcggggatgaaggctgtcatgcttgcggcgcagactattcagcttgggatgcatgatgttgttgtcgctggtgggatggagagcatgtccaatgcccccaaatatgtcgcggcagcaagacgggggtcacggtttgggcacgacgtcctcatcgatgggatgctcaaggatgggctgtgggatgtgtataatgatttcccaatgggaatgtgtgccgagttgtgtgcggatcaacactccatttcaagggaggagcaggatctttatgctatccagagcaatgaacgtgcaatagcagctcgtgatagcggcgcattttcttgggaaattgctccggttgaaatttcttccggtagagggaaaccaccacttattgttgacaaggatgagagtcttgcaaagttcaattcagcgaagctgaggaaacttgggccgactttcaagaagaatggttctgtaactgccggcaattcttctagtataagtgatggtgctgctgcaatcgtgctagtcagtggacagaaagccaagagtcttggccttcaagttattgcaaggatcagagggtatgcggatgctgctcaggcacctgaattatttacaactactccagctcttgctattccaaaggctgtatcaaatgcgggtctccaaacttcgcaaatagattattatgagataaacgaagctttctccgtcgttgctttagccaaccagaagcttcttggtattccttcgggaaagcttaacctaagtggtggtggtgtttctctgggccatcctattggttgcagtggtgcgagaatcatagtcactttgctcgggattcttagacataaaaatggaaagattggggttgctggagtttgcaatggaggtggtggtgcttctgcccttgttgtggaactcatgcaaccatcactatttacacgttcctcgttgtga

SEQ ID NO: 3194 - protein, 416 aa, Oryza sativa subsp. indica
MAPPPHSDSDLLKPRDVCIVGVARTPIGALLGSLSSLPATKLGSVAIQAALRRANVEPALVQEVFMGNVLSANLGQAPARQAALGAGLPDTVPCTTVNKVCSSGMKAVMLAAQTIQLGMHDVVVAGGMESMSNAPKYVAAARRGSRFGHDVLIDGMLKDGLWDVYNDFPMGMCAELCADQHSISREEQDLYAIQSNERAIAARDSGAFSWEIAPVEISSGRGKPPLIVDKDESLAKFNSAKLRKLGPTFKKNGSVTAGNSSSISDGAAAIVLVSGQKAKSLGLQVIARIRGYADAAQAPELFTTTPALAIPKAVSNAGLQTSQIDYYEINEAFSVVALANQKLLGIPSGKLNLSGGGVSLGHPIGCSGARIIVTLLGILRHKNGKIGVAGVCNGGGGASALVVELMQPSLFTRSSL

SEQ ID NO: 3195 - DNA, 1386 bp, Oryza sativa subsp. indica
  CDS (1)..(1386)
atggagaaggcgatcaacaggcagagggtgcttctcgcccacctggagcccgccgcgagccccgccgccgccgcgccggccatcaccgcgagcgcgtgcgccgcgggggacagcgccgcgtaccaccgcggggcgtgcttcgcagacgacgtcgtcatcgtcgctgcctataggacagcaatttgcaagtccaagagaggtggtttcaaggatactcccgcagaggacctcttggttccagtattcaaggctttgatagataaaacgaagttgaacccaagtgaagttggtgatattgttgttggtactgttttagctcctgggtcccaaagggcaattgaatgcagaatggctgcattttatgctggattccctgataccgttcctcttatgactgtaaacaggcaatgttcgtctgggcttcaagcagttgcaaatgttgcttctaacattaaagcaggactttatgacattggtattgctgctggcctagagtccatgacagtgaaccaagttcgccttgatgggcaagtgaaccccaaagttgagctgttttctcaagcacgcgattgccttctcccaatgggcctcacgtccgagaatgttgcaaaacgatttggcataacacgaatggagcaagaccaggctgctgttgagtcccacaggaaggctgcggctgcagctgcttctggtaaattcaaggaagaaattgttccagttcacacgaagattgtggatccaaaaaatggtgaggaaaaggagatagtggtctcggcagatgatggaatccgaccaggcacttcattggcagtcctgtcaaaactcaaaccagcattctctaaagatggcaccactactgcaggaaacgctagccaagtaagcgatggtgctggagcagtcttactaatgagacgtgacattgctatgcaaaagggtcttccaatagttggcgtcttcaggagctttgcagcagttggagttgatccagctgtaatgggtgttggtcctgctgttgccatccctgcggcagtgaaagctgctggtcttcaaatagatgatgttgaccttttcgagattaatgaggcctttgcatcacagtacgtatactgctgcaagaagttgggacttgatcctgcaaaagttaacgttaacggaggtgcaatggctcttgggcatccattgggtgctacaggtgcacggtctgtcagtacccttctcaacgaaatgaagcgacggggcaaagactgtcgatttggtgtgatttccatgtgcataggttctggcatgggggctgctgctgtctttgagcgtggggatgcagtggatgagctcactaatgctcggtgcatcccgacccataaccggctttcgaaggacgccatgtaa

SEQ ID NO: 3196 - protein, 461 aa, Oryza sativa subsp. indica
MEKAINRQRVLLAHLEPAASPAAAAPAITASACAAGDSAAYHRGACFADDVVIVAAYRTAICKSKRGGFKDTPAEDLLVPVFKALIDKTKLNPSEVGDIVVGTVLAPGSQRAIECRMAAFYAGFPDTVPLMTVNRQCSSGLQAVANVASNIKAGLYDIGIAAGLESMTVNQVRLDGQVNPKVELFSQARDCLLPMGLTSENVAKRFGITRMEQDQAAVESHRKAAAAAASGKFKEEIVPVHTKIVDPKNGEEKEIVVSADDGIRPGTSLAVLSKLKPAFSKDGTTTAGNASQVSDGAGAVLLMRRDIAMQKGLPIVGVFRSFAAVGVDPAVMGVGPAVAIPAAVKAAGLQIDDVDLFEINEAFASQYVYCCKKLGLDPAKVNVNGGAMALGHPLGATGARSVSTLLNEMKRRGKDCRFGVISMCIGSGMGAAAVFERGDAVDELTNARCIPTHNRLSKDAM

SEQ ID NO: 3197 - DNA, 1389 bp, Picea sitchensis
  CDS (1)..(1389)
atggagatggaaaaggtgcgcatcagacagcaagtgttgttggaccatctgaggcctgctcatttccccaaggcttccaaggatctggtggcttcagtatgtgctgctggagacagtgctgcctatgaaagagctgctgagtttggtgatgatgttgtcattgttgcagcttatcgtacccctatatgcaaggctaaacgtggaggattcaaggatactcttgccgatgacttgctggctcctgttttgaaggcactgattgacaagactggacttaatcctgttgaagttggtgatattgtagtgggtactgttcttgcacctggctctcaacgtgccagtgagtgcaggatggctgctttttatgctggattcccagagactgtacctgtcaggactgtcaatagacaatgctcttcgggcctacaagcagttgcagatgttgcagctgcaattaaagctgggttttatgacattggcatcggtgcaggagtggagtcaatgagtgtcgctcctttggcgtttgaaggctctgtcaatccaaaggttgaaattttcagacaagcacaagattgtcttttacccatgggtatcacctcagaaaatgtggctgagcgctatggagtttcacgtcaagaccaggatcaagcagcggttgaatctcataggcgcgcagcagcagcaacggctgcagggaagttcaaagatgagatcatcccagttgaaactaagattgttgatcctaaaactggagatgagaagcccgtgacgatatctgttgatgatggcattcgtcctgatgcttctctttctgttttaggcaaactcaaacctgcatttaagaaggggggaagcaccaccgctggaaattcaagccaagtaagtgatggagctggtgctgtactgctaatgaagagggtggtggccatgcagaagggtttgcctattttgggtgtattcaggagtttcactgctgttggagttgacccagctgttatgggagttggccctgcggttgcgatcccagcggcggtgaaggcagctgggctagaaatcgatgatattgatctttttgagataaatgaggcatttgcctcgcaattcacctactgtagccagaaactggaactggaccctgaaaaagtaaatgttaatggaggagctattgcccttggtcatccccttggagcaacaggggctcgttgtgtagcaaccttactgcatgaaatgaaacggcgtggcaaagattgcaggtttggagttatctcaatgtgtataggcactgggatgggggcagcagctgtgtttgaacgtagcggtgctgtagaccagctttgtaatgctaggccaatcaaggatcatacctctctctcaagagatgcacaatag

SEQ ID NO: 3198 - protein, 462 aa, Picea sitchensis
MEMEKVRIRQQVLLDHLRPAHFPKASKDLVASVCAAGDSAAYERAAEFGDDVVIVAAYRTPICKAKRGGFKDTLADDLLAPVLKALIDKTGLNPVEVGDIVVGTVLAPGSQRASECRMAAFYAGFPETVPVRTVNRQCSSGLQAVADVAAAIKAGFYDIGIGAGVESMSVAPLAFEGSVNPKVEIFRQAQDCLLPMGITSENVAERYGVSRQDQDQAAVESHRRAAAATAAGKFKDEIIPVETKIVDPKTGDEKPVTISVDDGIRPDASLSVLGKLKPAFKKGGSTTAGNSSQVSDGAGAVLLMKRVVAMQKGLPILGVFRSFTAVGVDPAVMGVGPAVAIPAAVKAAGLEIDDIDLFEINEAFASQFTYCSQKLELDPEKVNVNGGAIALGHPLGATGARCVATLLHEMKRRGKDCRFGVISMCIGTGMGAAAVFERSGAVDQLCNARPIKDHTSLSRDAQ

SEQ ID NO: 3199 - DNA, 1389 bp, Picea sitchensis
  CDS (1)..(1389)
atggagatggaaaaggtgcgcatcagacagcaagtgtcgttggaccatctgaggcctgctcatttccccaaggcttccaaggatctagtggcttcagtatgtgctgctggagacagtgctgcctatgaaagagctgctgagtttggtgatgatgttgtcattgttgcagcttatcgtacccctatatgcaaggctaaacgtggaggattcaaggatactcttgccgatgacttgctggctcctgttttgaaggcactgattgacaagactggacttaatcctgttgaagttggtgatattgtagtgggtactgttcttgcacctggctctcaacgtgccattgagtgcaggatggctgctttttatgctggattcccagagactgtacctgtcaggactgtcaatagacaatgctcttcgggcctacaagcagttgcagatgttgcagctgcaattaaagctgggttttatgacattggcatcggtgcaggagtggagtcaatgagtgtcactcctttggcgtttgaaggctctgtcaatccaaaggttgaaattttcagacaagcacaagattgtcttttacctatgggtatcacctcagaaaatgtggctgagcgctatggagtttcacgtcaagaccaggatcaagcagcggttgaatctcataggcgcgcagcagcagcaacggctgcagggaagttcaaagatgagatcatcccagttgaaactaagattgttgatcctaaaactggagatgagaagcccgtgacgatatctgttgatgatggcattcgtcctgattcttctctttctgttttaggcaaactcaaacctgcatttaagaaggggggaagcaccactgctggaaattcaagccaagtaagtgatggagctggtgctgtactgctaatgaagagggtggtggccatgcagaagggtttgcctattttgggtgtattcaggagtttcactgctgttggagttgacccagctgttatgggagttggccctgcggttgcgatcccagcggcggtgaaggcagctgggctagaaatcgatgatattgatctttttgagataaatgaggcatttgcctcgcaattcacctactgtagccagaaactggaactggaccctgaaaaagtaaatgttaatggaggagctattgcccttggtcatccccttggagcaacaggggctctttgtgtagcaaccttactgcatgaaatgaaactgcgtggcaaagattgcaggtttggagttatctcaatgtgtataggcactgggatgggggcagcagctgtgtttgaacgtagcggtgctgtagaccagctttgtaatgctaggccaatcaaggatcatacctctctctcaagagatgcacaatag

SEQ ID NO: 3200 - protein, 462 aa, Picea sitchensis
MEMEKVRIRQQVSLDHLRPAHFPKASKDLVASVCAAGDSAAYERAAEFGDDVVIVAAYRTPICKAKRGGFKDTLADDLLAPVLKALIDKTGLNPVEVGDIVVGTVLAPGSQRAIECRMAAFYAGFPETVPVRTVNRQCSSGLQAVADVAAAIKAGFYDIGIGAGVESMSVTPLAFEGSVNPKVEIFRQAQDCLLPMGITSENVAERYGVSRQDQDQAAVESHRRAAAATAAGKFKDEIIPVETKIVDPKTGDEKPVTISVDDGIRPDSSLSVLGKLKPAFKKGGSTTAGNSSQVSDGAGAVLLMKRVVAMQKGLPILGVFRSFTAVGVDPAVMGVGPAVAIPAAVKAAGLEIDDIDLFEINEAFASQFTYCSQKLELDPEKVNVNGGAIALGHPLGATGALCVATLLHEMKLRGKDCRFGVISMCIGTGMGAAAVFERSGAVDQLCNARPIKDHTSLSRDAQ

SEQ ID NO: 3201 - DNA, 1254 bp, Talaromyces stipitatus (strain ATCC 10500 / CBS 375.48 / QM 6759 / NRRL 1006)
  CDS (1)..(1254)
atgtctcaagcacaacaacgcctttcacaggtttcctcgcacctatccggggccaaacccaccgacaacatcacatccaaaaaccccgacgacatcgtcgtaaccgccgcactccgcaccccattcaccaagggcggcaagggaggtttcaaagacaccgccgccgctgacctactggttggcgcattccagggtctcattagccgtagtggaattgacccaaaactcgtcgaggacatcgccgtaggatcagtgttacctcccggtggtggagcgactgaattcagggctgcggcgctcgttgcggggtttccggaatcgactgctgtgcggagtttgaataggcagtgttctagtggattgcaggctgtggttgatattgcgaatgcgatcagggcgggacagattgaggttggtgttggtgcgggtgtggagagtatgagtcttcaatatggacccggcgcagtaactgaattctccgaactcctcgaaaaccacatgcaagccgcaaactgcaaagtgcccatgggcgtactatcagaacaaatggccaaagaccgcaaaatctctcgcgcagaccaagacgctttcgccgcatcatcataccaaaaggctatcaaagctcaaaaggcggggctatttgacgaggaaattcatcctctaacagtgaaatggaccgacccaaagacaggggatgaaaagaccatcaccgtcaaggccgatgatggtgttcgcgagggaatcacagcggaatcactgtccaagatccgtcccgcgttcgccaaagatggaagtatccatgccggtaacgcgtcgcaggtctccgacggggcggcagcggtattactcatgaaacgctccacggccgaaaaactaggccaaaagatcatcggcaaattcgtcacggccagcgttgtcggtgtcgagcctttactcatgggtattggaccatggaaagcgatccccctcgcgctcgaaaaggctggaatctcaaaggaagatgtagatatttatgaaatcaacgaagcctttgcatcgcaatgcgtgtggtgtattaaggaacttggcttgccgtttgagaaggttaatcccaagggtggcgcgattgcgtttgggcatccgttgggttgtacaggggcgagacaggtgggcacgttgttcacggagttgaagaggacgaataagaagattggtgttacgagtatgtgtattgggacggggatggggatggctgctgtttgggttgctgagtag

SEQ ID NO: 3202 - protein, 417 aa, Talaromyces stipitatus (strain ATCC 10500 / CBS 375.48 / QM 6759 / NRRL 1006)
MSQAQQRLSQVSSHLSGAKPTDNITSKNPDDIVVTAALRTPFTKGGKGGFKDTAAADLLVGAFQGLISRSGIDPKLVEDIAVGSVLPPGGGATEFRAAALVAGFPESTAVRSLNRQCSSGLQAVVDIANAIRAGQIEVGVGAGVESMSLQYGPGAVTEFSELLENHMQAANCKVPMGVLSEQMAKDRKISRADQDAFAASSYQKAIKAQKAGLFDEEIHPLTVKWTDPKTGDEKTITVKADDGVREGITAESLSKIRPAFAKDGSIHAGNASQVSDGAAAVLLMKRSTAEKLGQKIIGKFVTASVVGVEPLLMGIGPWKAIPLALEKAGISKEDVDIYEINEAFASQCVWCIKELGLPFEKVNPKGGAIAFGHPLGCTGARQVGTLFTELKRTNKKIGVTSMCIGTGMGMAAVWVAE

SEQ ID NO: 3203 - DNA, 1473 bp, Talaromyces stipitatus (strain ATCC 10500 / CBS 375.48 / QM 6759 / NRRL 1006)
  CDS (1)..(1473)
atgaccgcacctattccccggggcctgaaacaggtcctccaaaaatccccctcagatatagtcatcctctcatctgtgcgcacagcagttacgcgcgccaaaaagggcggcttcaaagacgcctatcccgaagaactactcgcacatgtcctcaaagcaacattagcagcaaatccgaacctagacccaaaactcatcgatgatgtagccattggatctgtgttgcaagaactcggtggcgcgaaagctggtcgtatggcgcagattcatgctggatttccgcattctgttccgtttcatacgattaatagacagtgctcgtctgggttggcagctattacgactattgcgaatgggattcgggccggggctattgacgttggtgttggtggtgggatggagtcgatgactcgaaattatggatcaagggcgattccgactgttttgtggcctgagttgaaagaatcgccttctcaggatgcgagggattgtatcatgcctatgggcttgacatcagagaatgtcgctagtcgatatggtatctccagagcagaccaagatgcctttgccgctgactcgcataaaaaggccgccgcggcacaaacttctggtctgttcgatgatgagattgtctccgtccccacgaaattcttcgatgctgaacatccgggtgcacctccacgagatatcacagtcaccaaagatgacggtattcggccaaccatatccgttgaaaagatggccacactcaagcctgcattcaaagaaaacggcaccagtacagcgggaaatagttcgcaggtcagcgacggtgcagcagcggcacttctcatgcgtcgctcaacagctaccgagcttggtctctcatcctccattaaggggcgctgggtagccacagcagttgctggtgtagctcccgatgagatgggcgttggtccggcggtagcaattcccaagctcctcgctcagactggattgcaagtttcagatgttggaatatgggaactcaatgaagcctttgcttcacaggcattgtactgtgttcgcaaattgggtatcgacgaggctaaggttaatcccaaaggtggtgctattgccatcggtcatccgttgggtgctacgggtgctagacaggtggctacattgttgcctgagttggcaaggacagggcaggatattggcattgttagtatgtgtattggaacggggatggggatggctggattgttcgaacaagtcatcaagatgtctaaaaagaaagccaaattcagagttaacaaagaattcctacagacactgctcagtctcctagagctttccaatgctccctctagctgcaatgacgcagcagatgccgtgttcggcgcgatcgactttgaaaatgcagataacatcataaaagggaattcttcagaagtagggagccaaatcggtcttgctattatggatactaagcatcagaaaaacgtttag

SEQ ID NO: 3204 - protein, 490 aa, Talaromyces stipitatus (strain ATCC 10500 / CBS 375.48 / QM 6759 / NRRL 1006)
MTAPIPRGLKQVLQKSPSDIVILSSVRTAVTRAKKGGFKDAYPEELLAHVLKATLAANPNLDPKLIDDVAIGSVLQELGGAKAGRMAQIHAGFPHSVPFHTINRQCSSGLAAITTIANGIRAGAIDVGVGGGMESMTRNYGSRAIPTVLWPELKESPSQDARDCIMPMGLTSENVASRYGISRADQDAFAADSHKKAAAAQTSGLFDDEIVSVPTKFFDAEHPGAPPRDITVTKDDGIRPTISVEKMATLKPAFKENGTSTAGNSSQVSDGAAAALLMRRSTATELGLSSSIKGRWVATAVAGVAPDEMGVGPAVAIPKLLAQTGLQVSDVGIWELNEAFASQALYCVRKLGIDEAKVNPKGGAIAIGHPLGATGARQVATLLPELARTGQDIGIVSMCIGTGMGMAGLFEQVIKMSKKKAKFRVNKEFLQTLLSLLELSNAPSSCNDAADAVFGAIDFENADNIIKGNSSEVGSQIGLAIMDTKHQKNV

SEQ ID NO: 3205 - DNA, 1251 bp, Talaromyces stipitatus (strain ATCC 10500 / CBS 375.48 / QM 6759 / NRRL 1006)
  CDS (1)..(1251)
atggctgttgaccgcctctcatcgatcctgaaccacttgaagccaggtcactctggtatttcggcaattacaacgaaaaacccagacgatatcgtggttacattggcaatccgaactcccatgaccaaagccgccaagggaggtttcaaggacacatctcttgacttcatagtgtattcattgctgaaacagctcgttgaccggtcacagctggatcctgctcttatcgaggatgtttgtttgggaaatgtcggcgatggaagagcagcatacctaggacgtgccgctgccctcgcagccggcatcccacacacagcaggcgcctcatccgtcaaccgattctgctcctccggcctcaaagccatccacgacatcgcaaatcaaatccgcaccggcgcaatcgatatcggtgtcgcactcggcgccgaatccatgaccttcggtgaccgcggagtcgacactttccacgaagaaatcctcaagaagcaagaagcagccgactgtctacaacccatgggtcaaacgtcggaaaacgttggtgacgatttcggaatcacccgccagatgcaagatgagtattccgtggagtcgttccgacgtgctgaagttgcgcaaaaggctggttggttcgatgatgagatcgtgcctatcactaccaaggtcaaggatccgaaaactggggaggagaagactgtcactttgaccaaagatgagggaccgaggtatggaactacctatgaggcgttgagtaagattcggcctgctttcccgcagtttgggaataagactactggtggtaatgccagtcaagttaccgatggagccgccgcagtcctcctaatgcgccgctccaaagccatcgaactcaaccaacccatcctcgccaaattctgcggtgccacagtcgccggtgtccctccgcgagtaatgggtattggtcccacagccgcaatccccaaacttctcaaacaattcaacctcaacattgccgatattgatatcttcgaaatcaatgaagcttttgcttcgatggctgtctattgcctcaagaatttgggtattgagcatgagaaacttaacccccgtggaggcgcgattgcgctgggacatccgctaggtgcgacgggcgcgagacaggttgtaaccatgttgagtgaggcaaggaggacgaagaagaagattttgattaatagtatgtgtattggtacggggcagggcatggcgggactttgggttaatgagcagatttaa

SEQ ID NO: 3206 - protein, 416 aa, Talaromyces stipitatus (strain ATCC 10500 / CBS 375.48 / QM 6759 / NRRL 1006)
MAVDRLSSILNHLKPGHSGISAITTKNPDDIVVTLAIRTPMTKAAKGGFKDTSLDFIVYSLLKQLVDRSQLDPALIEDVCLGNVGDGRAAYLGRAAALAAGIPHTAGASSVNRFCSSGLKAIHDIANQIRTGAIDIGVALGAESMTFGDRGVDTFHEEILKKQEAADCLQPMGQTSENVGDDFGITRQMQDEYSVESFRRAEVAQKAGWFDDEIVPITTKVKDPKTGEEKTVTLTKDEGPRYGTTYEALSKIRPAFPQFGNKTTGGNASQVTDGAAAVLLMRRSKAIELNQPILAKFCGATVAGVPPRVMGIGPTAAIPKLLKQFNLNIADIDIFEINEAFASMAVYCLKNLGIEHEKLNPRGGAIALGHPLGATGARQVVTMLSEARRTKKKILINSMCIGTGQGMAGLWVNEQI

SEQ ID NO: 3207 - DNA, 1266 bp, Talaromyces stipitatus (strain ATCC 10500 / CBS 375.48 / QM 6759 / NRRL 1006)
  CDS (1)..(1266)
atgtcgtcggcttcgcaacgtctttctgctatcgccagccagattaccggcgggggcgagtctattgctagaaaacgggtgcttgcaaagaatgcagatgatattgtcattactcttgcagtccggacaccactcaccaaggccaaaaaaggtggtctgaaagatactaacctagacgacctgttaatttctctcttgactaccgttcgtgaaaagtcaaatcttgatcccaaccttgtcgaagatgtctgcgtcggtaacgtcctcaactccagcgcagcatatctggctcgctccgccgtcctcgcagccggcttccccgaaaccacagcagcatcaatagccagccgcttctgctcctctggtctcctggccgttcagcaaatcgcaaaccagatcattgccgggtctattgaagtcggtatcgccattggcgcagagtcaatgagcacaaaccctgatggcggtgcgcctaaattctcagataagattctgaaccatccacttgcatcccagaaccagcagcctatgggtcaaacttcggaaaatgtagctggacagttcggccttactcgcgcccagatggatgaattcgctgcttcgagtttccaaaaggccgaaaaggcgcagaaagccgggtggttcaaagacgaaatcgcccccgtcaagacgacaatcaaggatcccaagaccggcgaagtcaaagaaatcgtggtggacagtgacgacggcatccgttacggaacaacagccgaaagtctctccaagatccgctctgcctttcctcaatgggaacccagccataccaccggcggaaacgcctcgcaaatcacggacggcgctgctgcgctgattctgatgaagcgatctcgtgctcaacagcttggtcagccgattctcgctaaattcgttgcggcaactgtggccggtctcgagccacggattatgggtattggccccactgttgctattcccaagattctttcaaagaccggtttgaatgtggaggatgttgatatttttgaaatcaatgaggcgtttgcatctatgggagtatattgcgtacagaaactcaatctaccaccaagcaaagtcaatccccgcggtggagcaattgcctttggtcaccccctcggcgcaacaggtgctcgacaagtggtcactgcactgtccgagttacgaagatccaataagcgaattgcagtaacgtccatgtgtgtaggaacgggcatggctatggccggtgtctttgtctcggagcattga

SEQ ID NO: 3208 - protein, 421 aa, Talaromyces stipitatus (strain ATCC 10500 / CBS 375.48 / QM 6759 / NRRL 1006)
MSSASQRLSAIASQITGGGESIARKRVLAKNADDIVITLAVRTPLTKAKKGGLKDTNLDDLLISLLTTVREKSNLDPNLVEDVCVGNVLNSSAAYLARSAVLAAGFPETTAASIASRFCSSGLLAVQQIANQIIAGSIEVGIAIGAESMSTNPDGGAPKFSDKILNHPLASQNQQPMGQTSENVAGQFGLTRAQMDEFAASSFQKAEKAQKAGWFKDEIAPVKTTIKDPKTGEVKEIVVDSDDGIRYGTTAESLSKIRSAFPQWEPSHTTGGNASQITDGAAALILMKRSRAQQLGQPILAKFVAATVAGLEPRIMGIGPTVAIPKILSKTGLNVEDVDIFEINEAFASMGVYCVQKLNLPPSKVNPRGGAIAFGHPLGATGARQVVTALSELRRSNKRIAVTSMCVGTGMAMAGVFVSEH

SEQ ID NO: 3209 - DNA, 1200 bp, Burkholderia multivorans CGD2
  CDS (1)..(1200): transl_table=11
atgagcaaacaactgcaagacgcatacatcgtcgccgccagccgcacgccgatcggcaaggccccgcgcggcgtcttcaagaacacgcgtccggacgagctgctggtgcacgcgatcaagtcgacggtcgcgcaggtgccgggcttcgacacgaagctgatcgaggatgcgatcatcggttgcgcgattccggaagcggagcagggcctgaacgtcgcgcgcatgggcgcgctgctcgccggcctgccgcagacggtcggcggcgtcaccgtcaaccgcttctgcgcatcgggcatcacggcactggcgatggcggccgaccgcattcgcgtcggcgaatcggacgcgctgctcgccggcggctgcgaatcgatgagcatggtgccgatgatgggcaacaagccgtcgatgtcgccgcacatcttcgatcgcagcgaagacatcggcatcgcgtacgggatggggctgacggccgaacgtgtggccgaccagtggaaggtgagccgcgaagaccaggacgcgttctcggtcgagtcgcaccgcaaggcgctcgccgcacaacaggccggcgagttcgcggacgaaatcgcgccgtacacgatcaccgagcgcttcccgaatctcgcgagcggcgagatcgacgtgaagacgcgcgagatcgcgctcgacgaaggcccgcgtgccgatacgtcgctcgaaggcctcgcgaagctgcgtgcggtgttcgcgaacaagggctcggtcacggccggcaacagttcgcagacgtcggacggcgcgggcgcgctgctcgtcgtctccgagaaggtgctcaagcagttcaacctgacgccgctcgcgcgcttcgtgagcttcgcggtgcgcggcgtgccgccggaaatcatgggcatcgggccgaaggaagcgattccggccgcgctgaaggcggcgggcctgaagcaggacgatctcgactggatcgagctgaacgaggcatttgccgcgcagtcgctcgccgtgatccgcgatctcggcctcgatccgtcgaaggtgaacccgctcggcggcgcgatcgcgctcggccacccgctcggcgcgaccggcgcgattcgcgcggcgaccgtcgtgcacgggctgcgccgccgcaacctgaagtacgggatggtcacgatgtgcgtcggcaccggcatgggtgcggcgggcatcatcgaacgcctgtaa

SEQ ID NO: 3210 - protein, 399 aa, Burkholderia multivorans CGD2
MSKQLQDAYIVAASRTPIGKAPRGVFKNTRPDELLVHAIKSTVAQVPGFDTKLIEDAIIGCAIPEAEQGLNVARMGALLAGLPQTVGGVTVNRFCASGITALAMAADRIRVGESDALLAGGCESMSMVPMMGNKPSMSPHIFDRSEDIGIAYGMGLTAERVADQWKVSREDQDAFSVESHRKALAAQQAGEFADEIAPYTITERFPNLASGEIDVKTREIALDEGPRADTSLEGLAKLRAVFANKGSVTAGNSSQTSDGAGALLVVSEKVLKQFNLTPLARFVSFAVRGVPPEIMGIGPKEAIPAALKAAGLKQDDLDWIELNEAFAAQSLAVIRDLGLDPSKVNPLGGAIALGHPLGATGAIRAATVVHGLRRRNLKYGMVTMCVGTGMGAAGIIERL

SEQ ID NO: 3211 - DNA, 1383 bp, Ricinus communis
  CDS (1)..(1383)
atggacaaggcgataaacagacagaaaattcttctcgatcacctccgtccttcttcttcttcttctttacataattacgactcttctctttctgcatcagcttgttcagcaggcgatagcgctgcttatcagaggacttcagtttatggagatgatgttgtgattgtagcagcacatagaactgctttgtgcaagtccaagcgtggtggtttcaaggatacctttgcggatgatttacttgctcctgttttgaaggcattgatagagaaaactaaattgaacccaagtgaagttggggatattgttgtgggaacagtgttagcaccaggatctcaaagagcaagcgaatgcaggatggctgcattctatgccggctttcctgaaactgtgcctattaggacagttaacaggcaatgttcgtctgggcttcaggcagttgctgatgtagctgctgctatcaaagcaggattttatgacattgctggtgtggaatccatgacgattaatccaatgtcttgggatggagatgtcaatccaaaggtaaaggcatttgagcaagcccagaattgccttctgcccatgggtgtgacttcagaaaatgttgcacatcgttttggagtgactagacaggagcaggatcaggctgcagtggactctcataggaaggctgctgccgccactgctgctggaaaattcaaggatgaaattgttcctgttgctaccaagattgttgacccaaagactcgtgaggagaaacctatcacagtttctgttgatgatggtatacgccccaacacatcagtgtcagatcttggtaaactgaagcctgtatttaaaaaagatgggaccaccactgctgggaattctagccaagtaagtgatggagctggggctgtgttgctcatgaagagatgtgttgcaatgcataaagggctacccatccttggagtattcaggagttttgctgctgtcggtgtagatcctgccatcatgggcattggcccagctgttgcaattcctgctgcagtgaaggctgctggtctagaacttaacgacattgatcttttcgagataaatgaggcctttgcttcccagtttgtttattgccgaaagaaattggagctagatccagagaggattaatgtcaatgggggtgcaatggccattggacaccctctgggagcaacaggtgcccgatgcgtagctactctactgcatgagatgaagcgtcgtggtagagactgtcgttttggagtggtgtcaatgtgcataggcacaggaatgggagcagcagctgtttttgaaaggggagatgcttgtgatgacctctgcaatgcccggaaagtagaaaccagtaatctgctatctaaggatgctatgtaa

SEQ ID NO: 3212 - protein, 460 aa, Ricinus communis
MDKAINRQKILLDHLRPSSSSSLHNYDSSLSASACSAGDSAAYQRTSVYGDDVVIVAAHRTALCKSKRGGFKDTFADDLLAPVLKALIEKTKLNPSEVGDIVVGTVLAPGSQRASECRMAAFYAGFPETVPIRTVNRQCSSGLQAVADVAAAIKAGFYDIAGVESMTINPMSWDGDVNPKVKAFEQAQNCLLPMGVTSENVAHRFGVTRQEQDQAAVDSHRKAAAATAAGKFKDEIVPVATKIVDPKTREEKPITVSVDDGIRPNTSVSDLGKLKPVFKKDGTTTAGNSSQVSDGAGAVLLMKRCVAMHKGLPILGVFRSFAAVGVDPAIMGIGPAVAIPAAVKAAGLELNDIDLFEINEAFASQFVYCRKKLELDPERINVNGGAMAIGHPLGATGARCVATLLHEMKRRGRDCRFGVVSMCIGTGMGAAAVFERGDACDDLCNARKVETSNLLSKDAM

SEQ ID NO: 3213 - DNA, 1404 bp, Ricinus communis
  CDS (1)..(1404)
atggagaaagcagtgaacagacagaaaattcttcttggtcatttgcaacccagttcgcctttgtcttctctttctcagacccaagaatcagttcgtctctctacttcaatttgtgctgctggtgatagtactgcatatcatcgaacagctgctttcaatgatgatgttgtgatcgtggctgcttaccgtactgccatttgcaaatccaagcgacgtggtttcaaggatacccatcctgatgacctacttggctcagttttgaaggcactgatagagaaaaccaatgtgaatccaaatgaggtgggtgatatagttgtgggtacagttctagctcctgggtcagtaagggcaacagagtgcaggatggcagctttctttgctggttttcctgaaactgtgcccatcagaacagtcaacaggcaatgctcatctggcctgcaggcagttgctgatgttgctgcttctataaaagcaggattttatgacattggcattggagctggattggagtgcatgacactggacaacattcgcagtactccttcccaacctaacccaagagtggaaagctttacgcaagcccgagattgcctccttcctatgggcatcacttctgaaaatgttgcacagcgttatggtgtaacacgtctagagcaagaccaggctgctgttgaatctcataggaaagcagctgctgcaacagcatctggtaaattcagagatgaaatcatcccagtttctacaaagattgtggacccaaaaactggcgaagagaagactgtctcaattttggtggatgatggtattcgaccaaatacaaacatagcagatctgtccaagctaaagcctgcatttaaaaaggatgggtcaacaactgctggtaatgcaagccaggtgagtgatggagccggtgcagttctccttgcaaaaagaagtgtggctgtgcagaaggggctcccaatcctcggggtgttcaggagttttgccgctgttggtgtggatcctgctgtgatgggagttggcccagcttttgcaattccagctgcagtgaaagctgctggattagaacttgataatattgacctatttgaaattaatgaggcatttgcatcccaatatgtttactgttgcaagaaattggagcttgatccagaaaaagtaaacgtcaatggcggtgcaattgctcttggtcatcctttgggtgccacaggtgctcgttgtgttgcaactcttttgcatgagatgaagcgctgcgggaaggactgccgctttggagtaatctcaatgtgcataggtacaggtatgggggctgcagctgtttttgaaagaggagattgtgtggatgagctatgcaatgctcgacctgtcaatggtaacgaccttttatcaaaggatgctcactag

SEQ ID NO: 3214 - protein, 467 aa, Ricinus communis
MEKAVNRQKILLGHLQPSSPLSSLSQTQESVRLSTSICAAGDSTAYHRTAAFNDDVVIVAAYRTAICKSKRRGFKDTHPDDLLGSVLKALIEKTNVNPNEVGDIVVGTVLAPGSVRATECRMAAFFAGFPETVPIRTVNRQCSSGLQAVADVAASIKAGFYDIGIGAGLECMTLDNIRSTPSQPNPRVESFTQARDCLLPMGITSENVAQRYGVTRLEQDQAAVESHRKAAAATASGKFRDEIIPVSTKIVDPKTGEEKTVSILVDDGIRPNTNIADLSKLKPAFKKDGSTTAGNASQVSDGAGAVLLAKRSVAVQKGLPILGVFRSFAAVGVDPAVMGVGPAFAIPAAVKAAGLELDNIDLFEINEAFASQYVYCCKKLELDPEKVNVNGGAIALGHPLGATGARCVATLLHEMKRCGKDCRFGVISMCIGTGMGAAAVFERGDCVDELCNARPVNGNDLLSKDAH

SEQ ID NO: 3215 - DNA, 1209 bp, Ricinus communis
  CDS (1)..(1209)
atggctcctactgattctttaaagcctcgagatgtttgcatagtgggtgttgctcgtactcctatgggtggctttcttggttccctttcttctctttcagctacaaagcttggctcaattgctattcattgtgctcttgaaagggcaagagttgatccatcacttgtggaagaggttttctttggtaatgttcttagtgcaaatttaggacaagctcctgcaaggcaggctgccttaggtgctggtatacctaattcagtgatttgtactaccattaataaagtttgtgcatctgggatgaaagcgacaatgcttgctgcacagacaattcaagcaggcatcaatgatattgttgtggctggtgggatggaaagcatgtctaatgcccccaagtatcttgcagaagcaagaaatggttctcggcttggacatgatactataatagatggcatgctcaaggatggcctgtgggatgtttataatgactttggaatgggagtttgtgcagaactatgtgccgatcggcatacgataacaagagaagagcaggattcttatgccattcggagctttgagcgcggaatttctgcacaaaatgatggtcttttttcatgggaaatagttccagttgaagtttctggtggacgagggagattatcaaccatcattgataaggatgaaggcttaggaaagtttgatgctgcaaaactgaggaagcttagaccgagtttcaaagagaaggatggctctgttactgctggaaatgcttctagcataagtgatggtgcagctgcgttagttttggtgagtggagaaatggcaattaagcttgggttgcaagtgattgctagaataaaaggatatggtgatgctgctcaggcccctgagttatttacaactgcacctgctcttgcaatacccaaagctatttcaaatgctggtttggacaaatcccagattgattactatgaaataaatgaagcattttctgtggtggctcttgctaatcaaaagctacttggtcttaatcctgaaaaagtaaatgctcatggtggtgctgtatctttgggacatccattaggatgcagtggggctcgtatcttggtcacattgttaggggtacttagacataaaaatggtaagtatggggttgctggaatctgcaatggaggaggaggggcatctgcccttgttcttgagctcatgtaa

SEQ ID NO: 3216 - protein, 402 aa, Ricinus communis
MAPTDSLKPRDVCIVGVARTPMGGFLGSLSSLSATKLGSIAIHCALERARVDPSLVEEVFFGNVLSANLGQAPARQAALGAGIPNSVICTTINKVCASGMKATMLAAQTIQAGINDIVVAGGMESMSNAPKYLAEARNGSRLGHDTIIDGMLKDGLWDVYNDFGMGVCAELCADRHTITREEQDSYAIRSFERGISAQNDGLFSWEIVPVEVSGGRGRLSTIIDKDEGLGKFDAAKLRKLRPSFKEKDGSVTAGNASSISDGAAALVLVSGEMAIKLGLQVIARIKGYGDAAQAPELFTTAPALAIPKAISNAGLDKSQIDYYEINEAFSVVALANQKLLGLNPEKVNAHGGAVSLGHPLGCSGARILVTLLGVLRHKNGKYGVAGICNGGGGASALVLELM

SEQ ID NO: 3217 - DNA, 1233 bp, Candida dubliniensis (strain CD36 / CBS 7987 / NCPF 3949 / NRRL Y-17841)
  CDS (1)..(1233): transl_table=12
atgtcatctaaacaacaatacttgaaaaaaaatcctgacgatgtcgttgtcgttgcagcttatagaaccgctttaaccaaaggtggaagaggtggattcaaagatgttggatctgatttcattttgaaaaaattgactgaagaatttgttaagaaaactggagttgaccctaaaatcattcaagatgctgccattggtaatgttttaaatagaagagctggtgattttgaacatagaggggcattattatctgctggattaccttattcagttccatttgttgctcttaacagacaatgttcatcgggattaatggccatttctcaagttgccaacaaaatcaagactggtgaaatcgaatgtggtttagctggtggggttgaaagtatgacaaaaaattatggtccagaagctttgattgctattgaccctgcttatgaaaaagatccagaatttgttaaaaatggtattccaatgggtattactaatgaaaatgtttgtgccaaattcaatattccaagagatgttcaagatgaatttgctgctgaatcttatcaaaaagctgaaaaggctcaaaaagaaggtaaatttgatgatgaaattttaccaatcgaagttttccaagaagatgaagatgctgaagatgaagacgaagatgaagatgaagatgctgaaccaaaagaaaaattggttgttattagtaaagatgaaggtattagaccaggtgtgactaaagaaaaattggctaaaattaaaccagcttttaaagctgatggtgtatcttcagctggtaattcttcacaagtttccgatggtgctgctttggtattattgatgaaacgttcctttgctgaaaagaacggattcaaaccattggctaaatacatttcttgtggtgttgctggtgtcccaccagaaattatgggtattggtccagctgttgccattccaaaagttttgaaacaaactggattatcagtgagcgatattgatatttatgaaatcaacgaagcatttgctggtcaatgtttgtactcaattgaaagttgtaatattccaagagaaaaagtcaatcttaatgggggtgctattgccttaggtcatcctcttggttgtactggtgctagacaatatgctactattttgagattattaaaaccaggtcaatttggtgtgacttctatgtgtattggtactggtatgggtgctgcttctgttttggtcagagaataa

SEQ ID NO: 3218 - protein, 410 aa, Candida dubliniensis (strain CD36 / CBS 7987 / NCPF 3949 / NRRL Y-17841)
MSSKQQYLKKNPDDVVVVAAYRTALTKGGRGGFKDVGSDFILKKLTEEFVKKTGVDPKIIQDAAIGNVLNRRAGDFEHRGALLSAGLPYSVPFVALNRQCSSGLMAISQVANKIKTGEIECGLAGGVESMTKNYGPEALIAIDPAYEKDPEFVKNGIPMGITNENVCAKFNIPRDVQDEFAAESYQKAEKAQKEGKFDDEILPIEVFQEDEDAEDEDEDEDEDAEPKEKLVVISKDEGIRPGVTKEKLAKIKPAFKADGVSSAGNSSQVSDGAALVLLMKRSFAEKNGFKPLAKYISCGVAGVPPEIMGIGPAVAIPKVLKQTGLSVSDIDIYEINEAFAGQCLYSIESCNIPREKVNLNGGAIALGHPLGCTGARQYATILRLLKPGQFGVTSMCIGTGMGAASVLVRE

SEQ ID NO: 3219 - DNA, 1227 bp, Candida dubliniensis (strain CD36 / CBS 7987 / NCPF 3949 / NRRL Y-17841)
  CDS (1)..(1227): transl_table=12
atggatagattaaatcaattaagtggtcaattaaaaccaacttcaaaacaatcccttactcaaaagaacccagacgatgttgttattgttgcagcatatagaactgccattggtaaaggtttcaaaggatctttcaaatcagtgcaatctgaattcatcttgactgaattcttaaaggaatttattaaaaagactggtgtcgatgcatctttgattgaggatgttgctattggtaacgttttgaaccaagctgctggtgccaccgaacacagaggtgccagtttggctgcaggtattccttacactgctgcttttcttgccatcaacagattatgttcttctgggttaatggccatttctgacattgccaacaagattaaaactggtgaaatagaatgtggtcttgctggtggtattgaatcaatgtccaagaactatggtagtccaaaagttgttccaaagattgacccacacttggctgacgatgagcaaatgggtaaatgtttgattccaatgggtatcactaacgaaaatgttgctaatgaattcaacattccaagagaaaaacaagatgcatttgctgccaaatcatacagtaaagctgaaaaagctgtgtcctctggtgcattcaaggacgaaattttaccaatcagatccatcatcagatccccagacggttctgaaaaggaaatcattgttgataccgatgaaggtccaagaaagggagtcgacgccgcttccttgagcaaattaaaaccagcattcggtggtactactactgctggtaatgcctcacaaatttccgatggtgccgctggtgttttgttgatgaagagaagcttggctgaagctaagggctacccaattgttgccaagtacattgcttgttctactgttggtgttccaccagaaattatgggtgttggtccagcttatgccattcctgaaatgttgaagagaactgggttgaccgttgatgatgttgatgtgtttgaaatcaacgaagcttttgctgctcaatgtctctactctgctgagcaatgtaatgttccagaagaaaagttgaacataaacgggggtgccattgctttgggtcatcctcttggttgtactggtgctagacaatatgctacaattttgagattgttgaaaccaggtgaaattggattgacctctatgtgtatcggtagtggtatgggtgctgcctccatattgattaaggaatag

SEQ ID NO: 3220 - protein, 408 aa, Candida dubliniensis (strain CD36 / CBS 7987 / NCPF 3949 / NRRL Y-17841)
MDRLNQLSGQLKPTSKQSLTQKNPDDVVIVAAYRTAIGKGFKGSFKSVQSEFILTEFLKEFIKKTGVDASLIEDVAIGNVLNQAAGATEHRGASLAAGIPYTAAFLAINRLCSSGLMAISDIANKIKTGEIECGLAGGIESMSKNYGSPKVVPKIDPHLADDEQMGKCLIPMGITNENVANEFNIPREKQDAFAAKSYSKAEKAVSSGAFKDEILPIRSIIRSPDGSEKEIIVDTDEGPRKGVDAASLSKLKPAFGGTTTAGNASQISDGAAGVLLMKRSLAEAKGYPIVAKYIACSTVGVPPEIMGVGPAYAIPEMLKRTGLTVDDVDVFEINEAFAAQCLYSAEQCNVPEEKLNINGGAIALGHPLGCTGARQYATILRLLKPGEIGLTSMCIGSGMGAASILIKE

SEQ ID NO: 3221 - DNA, 1203 bp, Lutiella nitroferrum 2002
  CDS (1)..(1203): transl_table=11
atggttaaacaagtacaggaagcttacatcgtcgcggtaacgcgcaccccggtcggcaaggcgccacgcggcatgatgcgccacgtccgcccggacgacatgctggctcacgtcatctccggcgcgctggcccaggtgccgatgctggacccgaaccggatttccgactgcgtggtgggctgcgccttcccggaggccgagcagggtctgaacatggcgcgcatcggcgtgctgctggccggcctgccggacaccgtgggcggcatcaccgtcaaccgttactgctcgtccggcatcaatgcggtgcagatcgcggccgaccgtatccgcatgggtgaggccgacgtggtgatcgccgccggtgccgagtcgatgtcgatggtgccgatgatgggcaacaaggtgtcgctgaacccggccattttcgccaaggacgagaactacgccatcgcctacggcatggggctgaccgccgagaaagtggcgcagcagtggaaggtgtcgcgtgaggaccaggatgcctttgcggtggagtctcaccgccgcgccatcgcagcgattaacggcggcaagttcaagaacgaaattagcccgctggaagtgacctaccgtacgccgaacctggaaaccggcgaagtgatcagcaagacccgcgtgctggacaccgacgaaggcccgcgacgcgatacctcgccggaaggcctggccaagctgaaaacggtgttcgatgccaagggctcggtgacggcgggcaacagctcgcagatgtccgacggtgccggcgcggtgatcctggtatcggaaaaagtgctgaaggaattcaacctcaccccgctcggccgctacgtgacgtttgcggtcaagggcgtgccgccggccatcatggggatcggcccgaaagaagccattccggcggcttgccgccaggctggcatcgggcaggaggagctcaagtggatcgagctgaacgaggcgttcgccgcccaggcgctggcggtcatccgggatctcgagctggatacggcgcgtgtcaacccgcacggcggcgccatcgcgttgggccaccccctgggggcgaccggtgccatccggactgcgacgctggttcatggcatgcgtgaccaggggctgaaaggctacggcatggtgacgatgtgcatcgggaccggcatgggcgcggcgggtatcctggaagtgttctga

SEQ ID NO: 3222 - protein, 400 aa, Lutiella nitroferrum 2002
MVKQVQEAYIVAVTRTPVGKAPRGMMRHVRPDDMLAHVISGALAQVPMLDPNRISDCVVGCAFPEAEQGLNMARIGVLLAGLPDTVGGITVNRYCSSGINAVQIAADRIRMGEADVVIAAGAESMSMVPMMGNKVSLNPAIFAKDENYAIAYGMGLTAEKVAQQWKVSREDQDAFAVESHRRAIAAINGGKFKNEISPLEVTYRTPNLETGEVISKTRVLDTDEGPRRDTSPEGLAKLKTVFDAKGSVTAGNSSQMSDGAGAVILVSEKVLKEFNLTPLGRYVTFAVKGVPPAIMGIGPKEAIPAACRQAGIGQEELKWIELNEAFAAQALAVIRDLELDTARVNPHGGAIALGHPLGATGAIRTATLVHGMRDQGLKGYGMVTMCIGTGMGAAGILEVF

SEQ ID NO: 3223 - DNA, 1176 bp, Dethiobacter alkaliphilus AHT 1
  CDS (1)..(1176): transl_table=11
atgaaagaagcggtgattgtcgctgcggtccgcacaccggtgggcagagcaaagcgcggtgggctcaaagatacacggcccgatgatttggcagcactggttttgcaggaagtaatcaaacgctccggcgtgcctgcagagaaaatagatgacattatcctcggttgtgcatttccggaagcggaacaggggatgaatgtgggccggattgcggcacagattgcaaagcttcccgctgaagtttcagggatgacggtaaaccgtttctgttcttcaggcctggagagtattgcgctggctgcggcaaaaatcggcatgggaatggcagatgtggtaattgccggtggtgtggaaagtatgagcgccgtgcccatggggggcaacaaaatggcggccaaccccacactgatgaacgattacccacaggcatatatgaatatgggactgacggcagaaagggttgccgagcggtataatatcagccgggaagaccaggaccagtttgcagagcgtagtcacagcctggccgaagaagctattaagtccgggaagttcaatgatgaaattgttccggtcccggtgaaaaagaaatactttaacgccaagggtcggctggtggtggaagagggtacctttaccatggatgatggtgtcaggcccgggaccactgcagaaaaactagctaaactccgtcccgcctttatgcagggcggctctgtaacggcgggtaactcctcacagaccagtgacggggcagcagcggtgttggtaatgtccagagagaaggctgaagagctgggtgttaagcccattgccgtattccgcggttatgcggtgggcggtgtggaagcggatgtaatgggtattggtcccgttgccgccattcccaaggttttggcccaaaccggcctcacaaaagatgatctggatgttattgaattaaacgaagcctttgccgcacaggcgttagctgtggtgcgtaccctggagctggatccggagaaagttaatgttaacggcggagccattgctcttggccatccgctgggctgtaccggttccaagctgacggtgacactgttgtccgagatggagcgccgtaatgcgcgctacggactggtttccatgtgtatcggcggcggcatgggtgctgccggcatcattgaacgactataa

SEQ ID NO: 3224 - protein, 391 aa, Dethiobacter alkaliphilus AHT 1
MKEAVIVAAVRTPVGRAKRGGLKDTRPDDLAALVLQEVIKRSGVPAEKIDDIILGCAFPEAEQGMNVGRIAAQIAKLPAEVSGMTVNRFCSSGLESIALAAAKIGMGMADVVIAGGVESMSAVPMGGNKMAANPTLMNDYPQAYMNMGLTAERVAERYNISREDQDQFAERSHSLAEEAIKSGKFNDEIVPVPVKKKYFNAKGRLVVEEGTFTMDDGVRPGTTAEKLAKLRPAFMQGGSVTAGNSSQTSDGAAAVLVMSREKAEELGVKPIAVFRGYAVGGVEADVMGIGPVAAIPKVLAQTGLTKDDLDVIELNEAFAAQALAVVRTLELDPEKVNVNGGAIALGHPLGCTGSKLTVTLLSEMERRNARYGLVSMCIGGGMGAAGIIERL

SEQ ID NO: 3225 - DNA, 1717 bp, Picea sitchensis
  CDS (116)..(1504)
gatcattcaatctggagaggagtccagagatcaacagtgtcatttaatcatcctttcattgttacctccgcggagtttaattttagctgatatctgtctatcagctgcgacggaaatggagatggagaagctacgcatcagacagcaagtgttgttggaccatttgaggcctgctcgtttccccaaggcttccacagatctggtggcttcagtatgttctgctggagacagtgccgcctatgaaagagctgctgagtttggtgatgatgttgtcattgttgcagcttatcgtacccctatatgcaaggctaagcgtgggggatttaaggacactcttcccgatgacttgcttgctcctgttttgaaggcattgattgataagactggaataaatccaaatgaagttcgtgatattgttgtgggtactgttcttgctcctggctctcaacgtgctagtgagtgcaggatggcttctttttatgctggattcccagagactgtacctgtcaggactgtcaatagacaatgctcttcaggtctccaagcagttgcagatgttgcagctgcaattaaagccggcttttatgacattggcattggtgcaggattggagtcaatgactgcaaatcctatggcgtgggaaggctctgtcaatccaagggttgaaattttcaaacaagcacaagattgtcttttgcccatgggtatcacctctgaaaatgtggctgagcgctatggaatttcacgtcaagaccaggatcaagcagcggttgaatctcataggcgtgcagcagcagcaacagctgcagggaagttcaaagatgagatcatccctgttgaaactaagattgttgatcctaaaactggagatgagaagcccgtgaggatttctgttgatgatggcattcgtcctactgcttctctttctgatttagcgaaactgaaacctgcatttaagaagggtggaagcaccactgctggaaattcaagccaagtaagtgatggagctggtgctgtattgctgatgaagaggacagtggctatgcagaagggtttgcctattttgggtgtattcaggagttttactgctgttggggttgacccagctgttatgggagttggcccggctgttgcgatcccagcggcggtgaaggcagctgggctagaaattgatgatattgatctatttgagataaatgaggcatttgcctcgcaattcacatactgtagccagaaattggaactggatcccgaaaaagtaaatgttaatggaggagctcttgcccttggtcatccccttggagcaacaggggctcgctgtgtagcaaccttactgcatgaaatgaaacgccgtggaaaagactgcaggtttggagttatatcgatgtgtataggcactgggatgggggcagcagcagtatttgaacgtggcagtgctgtagatcagctgtgcaatgctcggccgatcaaggatcatacctcgctgtcaaaagatgcacaatagaaaacagtgttttcttagagtcttgaaggctcttcagctatctcttttttaatggactcatttcatgggttctggttaacgttttactgagacgggctttctggcctatggcctgtattgagattttatggcttatgacattttccatagcatggttttggggaagaaatataataatggtcattttttaaatattcaaaaaaaaaaaaaaaa

SEQ ID NO: 3226 - protein, 462 aa, Picea sitchensis
MEMEKLRIRQQVLLDHLRPARFPKASTDLVASVCSAGDSAAYERAAEFGDDVVIVAAYRTPICKAKRGGFKDTLPDDLLAPVLKALIDKTGINPNEVRDIVVGTVLAPGSQRASECRMASFYAGFPETVPVRTVNRQCSSGLQAVADVAAAIKAGFYDIGIGAGLESMTANPMAWEGSVNPRVEIFKQAQDCLLPMGITSENVAERYGISRQDQDQAAVESHRRAAAATAAGKFKDEIIPVETKIVDPKTGDEKPVRISVDDGIRPTASLSDLAKLKPAFKKGGSTTAGNSSQVSDGAGAVLLMKRTVAMQKGLPILGVFRSFTAVGVDPAVMGVGPAVAIPAAVKAAGLEIDDIDLFEINEAFASQFTYCSQKLELDPEKVNVNGGALALGHPLGATGARCVATLLHEMKRRGKDCRFGVISMCIGTGMGAAAVFERGSAVDQLCNARPIKDHTSLSKDAQ

SEQ ID NO: 3227 - DNA, 1206 bp, Lepeophtheirus salmonis (salmon louse)
  CDS (1)..(1206)
atgacagtaggaagagctctcgaaaaagccatttttgtggttggtgcaaagagaacggctttcggagcttttggaggtagtcttaaatcccagactccagtggatcttcagacgattgcaggaaaggcggccttggagtcgggtaaggtgaatcctgagagtgtggactccgtggtagtgggcaatgttctctcctgtgcctcatctgacgctccttacatcgctcgtcatgttggacttcgcttagggattcgggagcgtgtgcctgcactcaccgtgaatcgcctctgtggctcaggctttcaaagtattgtgaatggggtacaagaaatgatgatgggtgatgcgagtgtggttctcactggaggctctgacaacatgtctgcttgtccatttgcactccgggacgttcgttttgggcacaagttaggctcagacatgaaaatggaagatatgatgtgggcctcccttacagacgcacatatcaagtcaccaatgggtatcaccgctgaaaatctggctgttaaatataacattacacgtgctgaagtggatgcttatgcccttcgatctcaaactacgtgggccgctgctcacgaagctggcatttttaaacacgaaatcactcccattgaaatgaaaagtaggaaaggaacgatagtctttcaagtcgatgagaaccccaaacccaagacgacaattgagagcattaccaaacttcctcctgttttcaaaaaggatggagttacttgtgctgcaagtgcatctggtatatgtgatggtgctggagcagttgtccttgcttctgaagaagcagtcaaggctcacggatatgaaccacttgctcgaattgttggttatggaattactggatgtgatcccaacattatgggtattgggccagtgccttctattcgagcattatgtgataaaacgggtatctctcttgagcaagttgattatattgaaatcaatgaagcctttgctgcacaagttttggcttgtcaaaaagaacttggcattccagatgaaaaattcaatacctgtggaggtggtatttctattggccatcctctagcagcatctggatctcgtatttcagcacatcttgtccataaactgaaacataataacaagagatacggtataggatcagcttgtattggaggagggcaagggattgctattctctttgaaagcttataa

SEQ ID NO: 3228 - protein, 401 aa, Lepeophtheirus salmonis (salmon louse)
MTVGRALEKAIFVVGAKRTAFGAFGGSLKSQTPVDLQTIAGKAALESGKVNPESVDSVVVGNVLSCASSDAPYIARHVGLRLGIRERVPALTVNRLCGSGFQSIVNGVQEMMMGDASVVLTGGSDNMSACPFALRDVRFGHKLGSDMKMEDMMWASLTDAHIKSPMGITAENLAVKYNITRAEVDAYALRSQTTWAAAHEAGIFKHEITPIEMKSRKGTIVFQVDENPKPKTTIESITKLPPVFKKDGVTCAASASGICDGAGAVVLASEEAVKAHGYEPLARIVGYGITGCDPNIMGIGPVPSIRALCDKTGISLEQVDYIEINEAFAAQVLACQKELGIPDEKFNTCGGGISIGHPLAASGSRISAHLVHKLKHNNKRYGIGSACIGGGQGIAILFESL

SEQ ID NO: 3229 - DNA, 1348 bp, Caligus clemensi
  CDS (15)..(1220)
gagggacttgaatcatgactattgggaaggctttggagaagggaattttcgttgtcggggcgaagcgtacggcttttggtgcctttggtggaagcctcaaggctcataaccccgtggaccttcaaacatcagcaggtcgatctgccttggaatccggcggagtgagtccttcctctgtggactcggtcgtcgtgggtaacgtcctttcttcctcgtcgtccgacgccccttacatatcccgtcacgttggcctccgtctgggcatccccctcaaggtcccagcacttaccgtgaatcgactctgtggatctggattccaaagcatcatcagtggcgcgcaggaaatacttttgggcgatgcgtctgtggtcctcagcgggggatctgataacatgtccgcttgcccatttgcactgagggatgtccgcttcggtcataagctcggatccgagatgaaaatggaagacatgatgtgggcctccctcacggacgcacacatcaaatcccccatgggtatcactgcggagaacctcgccatgaaatacggtctctctcgctccgaagtggacgcctatgccctctcctcccagcagaaatggtccgcagcacaggcagctggtctcttcaaggatgaaatagcccccattgagataaaaacgcggaagggaatcaaagtctttgaagtggatgagcaccccaagccggatgtcaccatagaagccctatccaagctccccccggtctttaagaaggatggggtcacctctgcggccagtgcttcgggggtatgtgacggtgctggcgccgtcatcattgcttctgaagaagccgtcaaggccaatggatacacaccactggctcgcattgttggctatggtattacgggctgtgatccaacaatcatgggcattggacccgttgaagccattcggtccctcactgaagccactgggatatcactcggacaaatccaagaagtggaaatcaatgaagcctttgccgcacaagtcctggcctgccagaaggaactacaaatccctgacgaggtatttaatacctgtggaggcggcatctccattggacatcccctgggggcctcaggatcaaggatctctgctcatctggtgcacaagctgaagcttaaaaataataaatacggcattggatctgcttgcattgggggcggacagggcattgccatactcttcgaaagctgctaaatccattcacatcaataaccctttgttcattcatgacacggatagaataaataaaatgtctctcaaatatcaatgcaatcttcttttttagacaaacataatctcatactcatatttttaatgtttac

SEQ ID NO: 3230 - protein, 401 aa, Caligus clemensi
MTIGKALEKGIFVVGAKRTAFGAFGGSLKAHNPVDLQTSAGRSALESGGVSPSSVDSVVVGNVLSSSSSDAPYISRHVGLRLGIPLKVPALTVNRLCGSGFQSIISGAQEILLGDASVVLSGGSDNMSACPFALRDVRFGHKLGSEMKMEDMMWASLTDAHIKSPMGITAENLAMKYGLSRSEVDAYALSSQQKWSAAQAAGLFKDEIAPIEIKTRKGIKVFEVDEHPKPDVTIEALSKLPPVFKKDGVTSAASASGVCDGAGAVIIASEEAVKANGYTPLARIVGYGITGCDPTIMGIGPVEAIRSLTEATGISLGQIQEVEINEAFAAQVLACQKELQIPDEVFNTCGGGISIGHPLGASGSRISAHLVHKLKLKNNKYGIGSACIGGGQGIAILFESC

SEQ ID NO: 3231 - DNA, 1460 bp, Caligus clemensi
  CDS (74)..(1264)
ggtgggagtctgagtctattcatcagtcaaccaactactactactaccactaccaagaacgcaaacgttagccatgagcaaggaaattgtgattgtctctgctgtacgaacgccgatcggttcctttatgggtggatttgcggatcttcctgcagatgccttgggttccatcgtgatatcctctgcactagaacgctgcaaagtggaccccaaggatgtatccgaagtcatcatgggacaagtcctcacggctggtcaaggccagaaccctgctcgaaaggcctccatgaaagctggcatcccacatacaacgcctgcctatggaattagtttggtctgtggatctggcctgaaagccgtgatcgctggagcacaggccatcacctgtggtgattcggaggtcgttgtagcgggaggccaagagtctatgagtcaatcccaccattcacttcgtctccgtgggagctttgctcatgggaatgcaacatttaaggacaccatgctgatcgacggccttacagatatattcgagggctatcacatgggcatcactgcagagaacattgttgataaatataagctgagtcgagaggaacaggataggtttgccttggagtcacagatgcgggccaaggccgctttggaggggaatgtctttgagtccgagattgtccccgttagtattccacccaagaggaagtctggcaaccccactgtcatgcacaaagatgaattccctaagccagaaactactctagagtctttatcgaagcttcgtcccgtgttcatccccaacggagggactgtgacagcagggaacgcctcgggactcaacgatggggctgcagccgtggtccttacttccaaggaatacgctctgtcacaagaactccccatcctggcatcccttgtttcctatgccaaggtcggcgtggagccacatctcatgggaacagggcccattcccgccgttcgatccgctttgaaagaggctggatggacccgggaagaagtggacctctatgagttaaacgaagcctttgcctctcagtcgctggcttgtctacgagaccttgagttggaccccgccaaggtgaacgtaaacggtggagccatcgcgcttgggcatcccattggagcctcgggatgtcgagtccttgtcacattggttcattccatgaaacgccgaggcgtcaaaaagggtgtggtagcactctgcatcggaggaggaatgggaatcgccatttgcctccaggcaccttgaatccctcctagtcatacatgaatcaaaatacttttttatttaaattaaagtaacttttaagagatccaaaaaaatcttgtatatgttgtatatcaacgtaataattcgtttttgacaatccaatcactcgttttatcatttacttttttaaaccaagttcaatatttatttttgtaacaataaataatatttagtt

SEQ ID NO: 3232 - protein, 396 aa, Caligus clemensi
MSKEIVIVSAVRTPIGSFMGGFADLPADALGSIVISSALERCKVDPKDVSEVIMGQVLTAGQGQNPARKASMKAGIPHTTPAYGISLVCGSGLKAVIAGAQAITCGDSEVVVAGGQESMSQSHHSLRLRGSFAHGNATFKDTMLIDGLTDIFEGYHMGITAENIVDKYKLSREEQDRFALESQMRAKAALEGNVFESEIVPVSIPPKRKSGNPTVMHKDEFPKPETTLESLSKLRPVFIPNGGTVTAGNASGLNDGAAAVVLTSKEYALSQELPILASLVSYAKVGVEPHLMGTGPIPAVRSALKEAGWTREEVDLYELNEAFASQSLACLRDLELDPAKVNVNGGAIALGHPIGASGCRVLVTLVHSMKRRGVKKGVVALCIGGGMGIAICLQAP

SEQ ID NO: 3233 - DNA, 1389 bp, Caligus clemensi
  CDS (56)..(1261)
gggggaatgtaaatcagtcgacctcagctgcatttcttactttcctacttgaatcatgactattgggaaggctttggagaagggaattttcgttgtcggggcgaagcgtacggcttttggtgcctttggtggaagcctcaaggctcatagccccgtggaccttcaaacattagcaggtcgatctgccttggaatccggcggagtgagtccttcctctgtggactccgtcgtcgtgggtaacgtcctttcttcctcgtcgtccgacgccccttacatatcccgtcacgttggcctccgtctgggcatccccctcaaggtcccagcactcaccgtgaatcgactctgtggatctggattccaaagcatcatcagtggcgcgcaggaaatacttttgggcgatgcgtctgtggtcctcagcgggggatctgataacatgtccgcttgcccatttgcactgagggatgtccgcttcggtcataagctcggatccgagatgaaaatggaagacatgatgtgggcctccctcacggacgcacacatcaaatcccccatgggtatcaccgcggagaacctcgccatgaaatacggtctctctcgctccgaagtggacgcttatgctctcccctcccagcagaaatggtccgcagcacaggcagctggtctcttcaaggatgaaatcgcccccattgagataaaaacgcggaagggaatcaaagtctttgaagtggatgagcaccccaagccggatgtcaccatagaagccctatccaagctccccccggtctttaagaaggatggggtcacctctgcggccagtgcttcgggggtatgtgacggtgctggcgccgtcatcattgcttctgaagaagccgtcaaggccaatggatacacaccacttgctcgcattgttggctatggcattacgggctgtgatccaacaatcatgggtattggacccgtggaagccattcggtccctcactgaagccactgggatatcactcggacaaatccaagaagtggaaatcaatgaagcctttgccgcacaagtcctggcctgccagaaggaactacaaatccctgacgaggtctttaatacctgtggaggcggcatctccattggacatcccctgggagcctcaggatcaaggatctctgctcatctggtgcacaagctgaagcttaaaaataataaatacggcattggatctgcttgcattgggggcggacagggcattgccatactcttcgaaagctgctaaatccattcacatcaataaccctttgttcattcatgacacggatagaataaataaaatatctctcaaatatcaatgcaatcttcttttttagacaaacataatctcatactcatatttttaatgtttac

SEQ ID NO: 3234 - protein, 401 aa, Caligus clemensi
MTIGKALEKGIFVVGAKRTAFGAFGGSLKAHSPVDLQTLAGRSALESGGVSPSSVDSVVVGNVLSSSSSDAPYISRHVGLRLGIPLKVPALTVNRLCGSGFQSIISGAQEILLGDASVVLSGGSDNMSACPFALRDVRFGHKLGSEMKMEDMMWASLTDAHIKSPMGITAENLAMKYGLSRSEVDAYALPSQQKWSAAQAAGLFKDEIAPIEIKTRKGIKVFEVDEHPKPDVTIEALSKLPPVFKKDGVTSAASASGVCDGAGAVIIASEEAVKANGYTPLARIVGYGITGCDPTIMGIGPVEAIRSLTEATGISLGQIQEVEINEAFAAQVLACQKELQIPDEVFNTCGGGISIGHPLGASGSRISAHLVHKLKLKNNKYGIGSACIGGGQGIAILFESC

SEQ ID NO: 3235 - DNA, 1278 bp, Micromonas sp. RCC299
  CDS (1)..(1278)
atgtcctcctccgcggcccgccgcgtcgcccagctcaacgctcacctcacggatgcgcccgtcgaccagatccagcgcttccccaccgccgcgaggaaatctccggacgacatcgtcgtggtctccgcgctgcgcaccccgatcacgcgcgccaagaagggcggcctgaaggacacccccgccgacgacctcgtcgccaccctcctcaaggcgaccgtcgatcgcaccggcctcgacgtcaacgacgtcggcgacgtcgtcgtcggctccgtcctgggtaactcctcccagcgcgccaacgagtgccgcatcgccatgttcctcgcgggctttccccaggaggttcccgtgcgaacggtgaaccgccagtgctcgtctgggttgcaagcgtgcgccgacgtcgccgcggccatcaaggcgggatactacgacgtgggcatcgccgcgggcgtcgagacgatgacgtccaacccgatgaagtgggaggggggcatgaacccgcgcgtcgcgtcgtcctccgacgcgcagtcgtgcctcatcccgatgggggtcacgtcggaaaacgtcgccgagcgctgggaaatcacgcgagagcagcaggacaccctcgcggcgcgatcgcacgccagggccgccgccgcgcaacgcgacggacgcttcgactcgcagatcgtcccggttcgaacgcagtggagggacccgaagacgggcgaggtgtccagaatcgtcgtggacaaggacgacgggattcgagaggggacgacgacgacgacgctcgccaagttacccgcggttttcaaaaaaggcggctccacgacgcccgggaacgcgtcgcaggtgtccgacggcgcgggatgcgtcgtcctcgccaaacgctcgtacgcgctggccaaaggtttgccaatcatgggacggttcgtgtccttcgcggctgtcggggtggacccgaaggtgatgggcatcggccccgcggtggccatccccgtcgcgattgaaaaggctggtttacgatccgtcgccgacgtcgacctcttcgagctcaacgaggcgttcgcgtcgcaggcgacgtactgcgcgacgaagctcgggctggacgtcgagaaggtgaacgtcaacggcggcgccatcgcgctcgggcacccgttgggcgcgacgggcgctcgatgcgtcgcgacgctcatgcacgagatgcaacgccgcggcgcgcgcaacggcgtggtgagcatgtgcatcgggagtggcatgggcgccgcgggggtgttcgagctcgaggcgtga

SEQ ID NO: 3236 - protein, 425 aa, Micromonas sp. RCC299
MSSSAARRVAQLNAHLTDAPVDQIQRFPTAARKSPDDIVVVSALRTPITRAKKGGLKDTPADDLVATLLKATVDRTGLDVNDVGDVVVGSVLGNSSQRANECRIAMFLAGFPQEVPVRTVNRQCSSGLQACADVAAAIKAGYYDVGIAAGVETMTSNPMKWEGGMNPRVASSSDAQSCLIPMGVTSENVAERWEITREQQDTLAARSHARAAAAQRDGRFDSQIVPVRTQWRDPKTGEVSRIVVDKDDGIREGTTTTTLAKLPAVFKKGGSTTPGNASQVSDGAGCVVLAKRSYALAKGLPIMGRFVSFAAVGVDPKVMGIGPAVAIPVAIEKAGLRSVADVDLFELNEAFASQATYCATKLGLDVEKVNVNGGAIALGHPLGATGARCVATLMHEMQRRGARNGVVSMCIGSGMGAAGVFELEA

SEQ ID NO: 3237 - DNA, 1182 bp, Delftia acidovorans
  CDS (1)..(1182): transl_table=11
atggaagacatcgtcatcgtttccgctgtccgtactgccgttggcaagtttggcggcacccttgccaagatccccgccaccgaactgggctccatcgtgatccgcgaggcactgaaccgtgccaaggtcggcaccgatcaggtcggtgaagtcatcatgggccaggtgctggccgctggcgcaggccagaaccccgcacgccaggccatgatgaaggccggcgttgccaaggaaaccccggccctcaccatcaacgccgtctgcggctcgggcctgaaggccgtgatgctggcagcccaggccgtggccacgggcgacagcgagatcgtcgtggccggcggccaggagaacatgagcctgtcgccccacgtgctgccgggctcgcgcgacggccagcgcatgggcgactggaagatggccgacaccatgatcgtggacggcctgtgggacgtctacaaccagtaccacatgggcatcacggccgagaacgtggccaaggaaaagagcgtcagccgcgagcagcaggatgccctggccctggccagccagcaaaaggccacggccgcgcaggacgccggcaagttcgtggacgaaatcgttcccgtcagcattccccagcgcaagggcgatcccgtggtgttcgctgccgacgagtacatcaaccgcaagaccaatgccgacgccctggcaggcctgcgcccggccttcgacaaggccggctcggtgacggccggcaacgcctcgggcctgaacgacggcgcggccgccgtggtggtgatgagcgcctccaaggccaaggccctgggcctgacgccgctggcgcgcatcgtctcctacgccaccagcggcctggaccccgccaccatgggcctgggcccggtgttcgcctcgcgcaaggcgctggagcgtgcgggctggaccgcgcaggacgtggacctgttcgagctgaacgaagccttcgcggcccaggcctgtgcggtgaaccaggagctgggcatcgacccggccaaggtcaacgtcaacggcggcgccattgccatcggccaccccatcggcgcatcgggcgcccgcatcctggtgaccctgctgcacgagatgcagcgcagcggcgccaagaagggcctggccggcctgtgcatcggcggcggcatgggcgtggccatggcggtggagcgcgtttga

SEQ ID NO: 3238 - protein, 393 aa, Delftia acidovorans
MEDIVIVSAVRTAVGKFGGTLAKIPATELGSIVIREALNRAKVGTDQVGEVIMGQVLAAGAGQNPARQAMMKAGVAKETPALTINAVCGSGLKAVMLAAQAVATGDSEIVVAGGQENMSLSPHVLPGSRDGQRMGDWKMADTMIVDGLWDVYNQYHMGITAENVAKEKSVSREQQDALALASQQKATAAQDAGKFVDEIVPVSIPQRKGDPVVFAADEYINRKTNADALAGLRPAFDKAGSVTAGNASGLNDGAAAVVVMSASKAKALGLTPLARIVSYATSGLDPATMGLGPVFASRKALERAGWTAQDVDLFELNEAFAAQACAVNQELGIDPAKVNVNGGAIAIGHPIGASGARILVTLLHEMQRSGAKKGLAGLCIGGGMGVAMAVERV

SEQ ID NO: 3239 - DNA, 1179 bp, Clostridium thermosaccharolyticum
  CDS (1)..(1179): transl_table=11
atgaaagaagtagttattgcaagtggtgtaaggactgctgtcgggaaatttggtggcacgcttctaaatgtacctgcagtagatttaggtgctgtgaataataaaagaagcataaaaagagccaatgtgaaacctgaagatgttagtgaagtgataatgggaaatgtattgcaggcaggtcttgggcagaaccccgcaagacaagctgaaataaaagcgggcataccagtagaagttccggctatgactgtaaacatggtatgtggatcaggtcttagagctgtgacacttgctgctcaggcagttatgcttggtgatgctgacattgttgtagccggtggaatggaaaatatgtcaagagcaccatatatattaaatgatgctcgctttgggtacaggatgaacaatggccagcttgtagatgaaatggtatatgatggtttaacagatgtttttaaccaatatcacatgggaatcactgccgaaaatcttgctgaaaaatacggcatatcaagagaagagcaggatgaatttgcatatagaagccaaaaattagcgtcagaagcgatatcatcaggaagatttgaggatgagatagttcctgtgattgtgccgcagaaaaaaggtgaaccgatagaatttaaagttgatgaacatgtgagacctaatacgacaattgaagcacttgcaaaattaaaaccagcattccaaaaagatggaactgtaactgctggaaatgcatcaggaattaacgatgcagctgcagcagtagttgtgatgtcaaaagaaaaggcatgtgaacttggaataaagaccattgcaacgattaaatcatttggttatgcaggtgttgaccccagcatcacgggaattggtccagtatatgctacgagaaaggcattagaaaaagctaatctaactgtagatgatttagatttaattgaagcaaatgaagcatttgcagcacaatcactggctgttgcaaaagaattaaaatttaatatggacagagtgaatgtaaatggtggcgcaattgcgataggtcatccaatcggcgccagcggatgtagaattctagtgacgcttttatatgagatgcagaagaggaattcgcatactggacttgcaacattgtgcatcggcggaggaatgggaatagcaatggttgtcgaaagatag

SEQ ID NO: 3240 - protein, 392 aa, Clostridium thermosaccharolyticum
MKEVVIASGVRTAVGKFGGTLLNVPAVDLGAVNNKRSIKRANVKPEDVSEVIMGNVLQAGLGQNPARQAEIKAGIPVEVPAMTVNMVCGSGLRAVTLAAQAVMLGDADIVVAGGMENMSRAPYILNDARFGYRMNNGQLVDEMVYDGLTDVFNQYHMGITAENLAEKYGISREEQDEFAYRSQKLASEAISSGRFEDEIVPVIVPQKKGEPIEFKVDEHVRPNTTIEALAKLKPAFQKDGTVTAGNASGINDAAAAVVVMSKEKACELGIKTIATIKSFGYAGVDPSITGIGPVYATRKALEKANLTVDDLDLIEANEAFAAQSLAVAKELKFNMDRVNVNGGAIAIGHPIGASGCRILVTLLYEMQKRNSHTGLATLCIGGGMGIAMVVER

SEQ ID NO: 3241 - DNA, 1386 bp, Cucurbita cv. Kurokawa Amakuri
  CDS (1)..(1386)
atggagaaggcaatcaacaggcagagcattctgctacatcatctccggccttcatcttcggcttatagccatgaatcttcgctctctgcatcggtttgtgcagctggggatagtgcgtcgtatcaaagaacgtcggtgtttggagatgatgtcgtgatagttgcagcataccgcaccgccctttgcaaatcgaagcgtggcggcttcaaggatacttatcctgatgatctgctcgcccctgttttgaaggcattgattgagaaaactaatttgaatccaagtgaagttggggacattgttgttggttctgtgcttgcaccaggttctcagagagcgagtgaatgtaggatggctactttctatcccggcttccctgaaactgtgcctgttagaactgttaataggcaatgttcgtcggggctgcaggccgttgctgatgtagcagcagctataagagcaggattttatgatattggaattggagctgggttggagtcgatgactgttaatccaatggcttgggatggatctgtcaaccctagagtgaagtcaatggaaaatgcacaaaactgccttcttccgatgggagtaacctcagaaaatgttgcccagcgttttggggtgtcaagggaggagcaagataaggctgctgttgagtctcacaggaaggctgcagctgccactgctagtggcaaatttaaggatgaaattatccctgtttctaccaagattattgacccaaaaactggtgaagagagacccgttacgatctctgttgatgacgggattcgaccgaacacaactcaagcagatttggggaagctaaagcctgtgtttaagaaagatggaaccaccactgctggcaattctagtcaggtgagtgatggtgctggagctgttctccttatgaagagaagtgttgcaatgcaaaaaggactccctattctcggcgtcttcaggacttttactgctgtgggtgtggatcctgctatcatgggtgttggcccggctgttgcaattccagcggctgtcaaggctgctgggcttgaactgaatgatatcgatctttttgagataaatgaggcatttgcatcccaatttgtgtattgtcgtaacaagctggggcttgatccagaaaagatcaatgttaatggcggagcaattgccattggacatccactgggtacaacaggcgctcgctgcgttgctacattgttgcatgagatgaaacgccgtggcaaggactgtcgttttggagtgatatcaatgtgcataggcactggaatgggggctgcagctgtgtttgagaggggtgattgtgttgatgagctttgcaatgctaagaaagttgaaggaatcaatcttctgtccaaggatgctcggtag

SEQ ID NO: 3242 - protein, 461 aa, Cucurbita cv. Kurokawa Amakuri
MEKAINRQSILLHHLRPSSSAYSHESSLSASVCAAGDSASYQRTSVFGDDVVIVAAYRTALCKSKRGGFKDTYPDDLLAPVLKALIEKTNLNPSEVGDIVVGSVLAPGSQRASECRMATFYPGFPETVPVRTVNRQCSSGLQAVADVAAAIRAGFYDIGIGAGLESMTVNPMAWDGSVNPRVKSMENAQNCLLPMGVTSENVAQRFGVSREEQDKAAVESHRKAAAATASGKFKDEIIPVSTKIIDPKTGEERPVTISVDDGIRPNTTQADLGKLKPVFKKDGTTTAGNSSQVSDGAGAVLLMKRSVAMQKGLPILGVFRTFTAVGVDPAIMGVGPAVAIPAAVKAAGLELNDIDLFEINEAFASQFVYCRNKLGLDPEKINVNGGAIAIGHPLGTTGARCVATLLHEMKRRGKDCRFGVISMCIGTGMGAAAVFERGDCVDELCNAKKVEGINLLSKDAR

SEQ ID NO: 3243 - DNA, 1218 bp, Streptomyces fungicidicus
  CDS (1)..(1218): transl_table=11
atgcctcgtaccgtcagggacgtcgtcttcgtcgacggcgtccgtaccccgttcggcaaggcgggcccgaagggcatctaccacgagacccgcgccgacgacctggtcgtgaaggcgatccgggagctgctgcgccgcaaccccggtctcgacccgaagaagatcgacgaggtcgccgtcgccgcgaccacgcagatcggcgaccagggcctgaccatcggccgcacggccggcatcctcgcgggcctgcccacctcggtcccgggctactccatcgaccgcatgtgcgccggcgccctgaccgccgtcaccacggtcgccggctccgtcgccttcggcgcgtacgacgtcgccatcgcgggcggcgtcgagcacatgggccgccacccgatgggcgagggcgtcgaccccaacccgcgcttcgtctccgagaagctggtcgacgagtccgccctgttcatgggcatgaccgcggagaacctgcacgaccgctacccctcgatcaccaagcagcgcgccgacgagtacgccgtgcgctcccaggagaaggccgccaaggcctacgccaacggcaagatccaggccgacctggtcccggtctcggtgcgccgcaccaacgaggaggccggtgagaccggctggggcctggtcaccgccgacgagccgatgcgcccgggcaccaccctggagaacctggccggcctgaagacccccttccgcgtccacggccgggtcaccgccggcaacgcggccggtctgaacgacggcgccaccgcctcggtcatcgcgagcgaggacttcgcccgcgagaacggcctcccggtcaagatgcgcctggtctcctactccttcgccggcgtggagcccgaggtcatgggctacggcccgatcccggccacggagaaggccctcgcccaggcggggctgtccatctccgacatcggtctgttcgagatcaacgaggccttcgccgtccaggtgctggccttcctggagcactacggcatcgccgacgacgacgcgcgcgtcaaccagtacggcggcgccatcgcgttcggccacccgctggcctcctccggcgtccgtctgatgacgcagctggcccgccagttcgaggagcagccgcaggtccgttacggcctcaccaccatgtgcgtcggcttcggcatgggcgcgacggtcatctgggagaacccgcacttcgagggggacaagtga

SEQ ID NO: 3244 - protein, 405 aa, Streptomyces fungicidicus
MPRTVRDVVFVDGVRTPFGKAGPKGIYHETRADDLVVKAIRELLRRNPGLDPKKIDEVAVAATTQIGDQGLTIGRTAGILAGLPTSVPGYSIDRMCAGALTAVTTVAGSVAFGAYDVAIAGGVEHMGRHPMGEGVDPNPRFVSEKLVDESALFMGMTAENLHDRYPSITKQRADEYAVRSQEKAAKAYANGKIQADLVPVSVRRTNEEAGETGWGLVTADEPMRPGTTLENLAGLKTPFRVHGRVTAGNAAGLNDGATASVIASEDFARENGLPVKMRLVSYSFAGVEPEVMGYGPIPATEKALAQAGLSISDIGLFEINEAFAVQVLAFLEHYGIADDDARVNQYGGAIAFGHPLASSGVRLMTQLARQFEEQPQVRYGLTTMCVGFGMGATVIWENPHFEGDK

SEQ ID NO: 3245 - DNA, 1389 bp, Cucumis sativus
  CDS (1)..(1389)
atggagaaggcgatcaacaggcagagcattttgctacatcatctccggccttcttcttccgcttacacaaatgaatcttcgctctctgcatcggtttgtgcagctggggatagtgcttcgtatcaaaggacatcggtgtttggagatgatgtcgtgattgttgcagcgtaccgtactgccatttgcaaatcgaagcgtggtggcttcaaggatacttatcccgatgatctgctcgcccctgttttgaaggcattgatagagaaaactaatttgaatccaagtgaagttggggatattgttgttggttctgtacttgcaccaggctctcagagagctagtgaatgtaggatggcggctttctatgccggcttccctgaaactgtgcccgttagaactgttaataggcaatgttcgtcggggctgcaggccgttgctgatgtagctgcagctataagagcagggttttatgatattggaattggagctgggttggagtctatgactactaatccaatggcttgggaaggatctgtcaacccaagagtgaaatcaatagaaaatgcacagaactgccttcttccaatgggtgtaacctcagaaaatgttgcccagcgttttggggtgtcaagggagaagcaggatcaggctgctattgagtctcaccggaaggctgcagctgccactgctagtggaaaatttaaggatgaaattatcccagtttctactaagattattgaccctaaaactggtcaagaaaaaccggttacaatctctgtggatgatgggattcggcctaacacaactcaagcagatctggggaaattgaaggctgtgtttaagaaagatgggactaccactgcaggtaattccagccaggtgagtgatggtgctggagctgttctcctcatgaagagaagtgttgcaatgcgaaaagggctccccattcttggtgttttcaggaccttttctgctgtgggtgtggatcctgctatcatgggtgttggcccggctgtagcaattccagctgctgtcaaggctgctggacttgaactgaacgatattgatctttttgagataaatgaggcatttgcatcccaatttgtttattgtcgtaacaagttggggctagatccagaaaagattaatgtcaatgggggagcaatcgccattggacacccattgggtgcaacaggcgcccgctgtgtcgctacattgttgcatgagatgaaacgccgtggcaaagattgtcgttttggagtcatatcaatgtgcataggcacgggaatgggggcggcagctgtatttgagaggggtgattgtgttgacgaactttgcaatgctaagaaagttgaaggaggtgtcaatcttctgtccaaggatgctcgttag

SEQ ID NO: 3246 - protein, 462 aa, Cucumis sativus
MEKAINRQSILLHHLRPSSSAYTNESSLSASVCAAGDSASYQRTSVFGDDVVIVAAYRTAICKSKRGGFKDTYPDDLLAPVLKALIEKTNLNPSEVGDIVVGSVLAPGSQRASECRMAAFYAGFPETVPVRTVNRQCSSGLQAVADVAAAIRAGFYDIGIGAGLESMTTNPMAWEGSVNPRVKSIENAQNCLLPMGVTSENVAQRFGVSREKQDQAAIESHRKAAAATASGKFKDEIIPVSTKIIDPKTGQEKPVTISVDDGIRPNTTQADLGKLKAVFKKDGTTTAGNSSQVSDGAGAVLLMKRSVAMRKGLPILGVFRTFSAVGVDPAIMGVGPAVAIPAAVKAAGLELNDIDLFEINEAFASQFVYCRNKLGLDPEKINVNGGAIAIGHPLGATGARCVATLLHEMKRRGKDCRFGVISMCIGTGMGAAAVFERGDCVDELCNAKKVEGGVNLLSKDAR

SEQ ID NO: 3247 - DNA, 1245 bp, Arabidopsis thaliana
  CDS (1)..(1245)
atggctgcttttggagatgacattgtgattgtagcggcatatcgtaccgccatttgcaaagcgagacgtggaggtttcaaagacactcttcctgatgatcttcttgcttctgttcttaaggctgtagtggaaagaacatctttggatccaagtgaagttggtgatatcgttgttggtaccgtgatagcgcctggttctcagagagcaatggagtgtagagttgcagcttattttgctggttttcctgactccgtgccagttagaactgtcaatagacaatgctcatcaggactacaagcagttgctgatgttgctgcttccattagagctggttattacgacattggtattggtgctggagtggaatcaatgtcaactgatcatattcctggaggcggctttcatggctctaatccaagagcacaggatttcccaaaagcccgtgattgtttgcttccaatgggaattacttctgaaaacgttgcagaaaggttcggtgtcacaagagaagagcaagatatggctgcggtggagtctcacaaacgcgctgcagctgcaatcgcgtctggtaaactcaaggatgaaatcattcctgttgctactaagattgtggaccctgagactaaagcagagaaggcaatcgtcgtatctgttgatgacggtgtacgtccaaactcaaacatggcagatttggcaaagctgaagactgtctttaaacaggacggttccaccacagctggcaatgctagtcagatcagtgatggtgctggagcagtactgctaatgaagagaagtttggctatgaagaagggacttcccattcttggagtattcaggagttttgctgttactggtgtggaaccatctgtaatgggtattggtccagctgttgccattcccgctgcaactaagctcgcagggctcaacgtcagcgatattgatctattcgagatcaatgaggcatttgcatctcagtatgtgtactcttgcaagaagttagagctggatatggaaaaggtcaatgttaatggaggagccattgctattggccatcccctgggtgctacaggagctcgatgtgttgcgacattgttgcacgagatgaagcggagaggaaaagattgccgctttggagtaatctcaatgtgcataggcactggaatgggagctgcagctgtttttgagaggggagactctgttgataacttgtccaacgctcgtgtggctaacggggatagtcattag

SEQ ID NO: 3248 - protein, 414 aa, Arabidopsis thaliana
MAAFGDDIVIVAAYRTAICKARRGGFKDTLPDDLLASVLKAVVERTSLDPSEVGDIVVGTVIAPGSQRAMECRVAAYFAGFPDSVPVRTVNRQCSSGLQAVADVAASIRAGYYDIGIGAGVESMSTDHIPGGGFHGSNPRAQDFPKARDCLLPMGITSENVAERFGVTREEQDMAAVESHKRAAAAIASGKLKDEIIPVATKIVDPETKAEKAIVVSVDDGVRPNSNMADLAKLKTVFKQDGSTTAGNASQISDGAGAVLLMKRSLAMKKGLPILGVFRSFAVTGVEPSVMGIGPAVAIPAATKLAGLNVSDIDLFEINEAFASQYVYSCKKLELDMEKVNVNGGAIAIGHPLGATGARCVATLLHEMKRRGKDCRFGVISMCIGTGMGAAAVFERGDSVDNLSNARVANGDSH

SEQ ID NO: 3249 - DNA, 1197 bp, Aedes aegypti
  CDS (1)..(1197)
atgtcagctttgacaaagggtgtcttcatcgttgctgctaagcgtaccgctttcggaacatttggaggagcattcaagaacaccaatgccacccagttgcagacagtggccgccaaagccgcgttggatgttgccggcttgaagccagatcaagtagactcggtcaacatcgggcaggtgttggtgttgtcctctccagatggcgctttcttaccccggcatgtgtcgctgcactgtggaattccaattgatcgtcctgcgctcggtgtcaaccggttgtgcggatccggtttccaatcaatcgtgaatggcgcgcaggacattttgctaggcgcggctaaagtttcgctgaccggcggagtggacaacatgagccagacaccgtataccgttcgtggggctcgtttcggtattccactggggaccaacccggctctggaggacgctctgtgggttggactaagcgattcgttctgtaagctgcctatggctttgactgctgaaaacctggctgagaagtacaaaattccccgcgagaaagtcgacgagtttgcttaccgttcccagcaactgtggaagaaagccaacgacgcaggcgtcttcaagagcgaaatcacccccttcaagctgaaggtgaagggcaaggaggttgactttgccgttgatgaacatccacgcccgcagaccaccctggaaggattgaacaagctgccatctttgtttaagaagggtggtgccgtcacagctggaactgcatcgggtatttgcgatggagctgctgcagtcgttttggcctctgaggaagcagtaaagcaatacaatttgactccgttggcccgtttggtagcttacagtacggttggtgtcccaccggaaatcatgggaatcggtccagtcccagcgatccagaacgtgttgaaggtagccggtgtcaagcaggatgatgttgacctgtttgaaatcaacgaagcattcggcgtgcaggccatgtcttgtgtacaggagctcggaatcgatatgaacaaattcaacttgaatggtggagccattgccctgggacatcctcttggagcttccggatccagaattactggacacttggtgcatgagctgaagcgtaaaaatctgaagcgtgctgttggctccgcttgtattggaggcggtcagggtattgctttgctagttgagtctgtttag

SEQ ID NO: 3250 - protein, 398 aa, Aedes aegypti
MSALTKGVFIVAAKRTAFGTFGGAFKNTNATQLQTVAAKAALDVAGLKPDQVDSVNIGQVLVLSSPDGAFLPRHVSLHCGIPIDRPALGVNRLCGSGFQSIVNGAQDILLGAAKVSLTGGVDNMSQTPYTVRGARFGIPLGTNPALEDALWVGLSDSFCKLPMALTAENLAEKYKIPREKVDEFAYRSQQLWKKANDAGVFKSEITPFKLKVKGKEVDFAVDEHPRPQTTLEGLNKLPSLFKKGGAVTAGTASGICDGAAAVVLASEEAVKQYNLTPLARLVAYSTVGVPPEIMGIGPVPAIQNVLKVAGVKQDDVDLFEINEAFGVQAMSCVQELGIDMNKFNLNGGAIALGHPLGASGSRITGHLVHELKRKNLKRAVGSACIGGGQGIALLVESV

SEQ ID NO: 3251 - DNA, 1299 bp, Aspergillus oryzae
  CDS (1)..(1299)
atggcgatccaagcttcggctacgcgtctcttcaagagggcggctatccccgcatctcgccagtggcagcgacagttcagcgctgcagccccagcactcaaggagatccaggatgcctatatcctcagtgcttcacgaactccgactgctaagtttaatggatcgttcgcctccgtctctgcccccgagctgggcgccgttgccatcaagtctgctgtgaccaagtctggactccctgtcgagaagatcaccgatgtatacatgggaaatgtcctccaaggatcggtcggccaggcaccagctcgccaggcttctatcttcgctggtttgtcgccaacagtggaatccatgacagtaaacaaagtgtgcgcctcgggcctcaaggctgtagcacttgctgcacagaatatccagcttggcctggcagacgcccaagttgctggaggaatggagaatatgtctcgtgtcccttactacctcccacgttccagccagcttccaccgttcggagagatcaaactggaagatggtttaatcaaggatggtctgtgggatgtctataacaagtttcatatgggtatctgtgccgaaaccacagccaagaagtatgagatctcgagggaagaacaggatgaatatgcgattcagtcgtaccagcgggctcagaaggcctggaacgagaataagttcgccgatgagattgcccccgtcactgtcaagggtaagaagggtgagaccgttgtcgaacgtgacgaaggctatgagaatctgcgggttgataagatgaagaccttgaagcccgcattcttaagggacggcacaggcactgtcactgccggtaatgcttccaccatgaatgatggggcatcagctctggttctggctagcaaggacttggctcgcgagtttggccagggcaaccgggctcttgcgcgtatcgtgtcctccgcggatgcagctattgaccccgtggacttccctgtcgccccagctaaggcggttcccattgccctcgagcgagctggtatcaccaaggatcaggttgccgtctgggagtttaatgaggcatttgctgccgttatcaaagcaaacgagaagattcttggattgcagaacgcccgtgtcaaccctctgggaggagctatctctctgggacatgcactcggaagctcaggctcccgtatcctggtcactcttctccaccagctgcagcctggtgaatatggtgtggccgcgatttgcaatggtggtggcgccgctagtgccatggttgtccagaagttggaccgggttgattag

SEQ ID NO: 3252 - protein, 432 aa, Aspergillus oryzae
MAIQASATRLFKRAAIPASRQWQRQFSAAAPALKEIQDAYILSASRTPTAKFNGSFASVSAPELGAVAIKSAVTKSGLPVEKITDVYMGNVLQGSVGQAPARQASIFAGLSPTVESMTVNKVCASGLKAVALAAQNIQLGLADAQVAGGMENMSRVPYYLPRSSQLPPFGEIKLEDGLIKDGLWDVYNKFHMGICAETTAKKYEISREEQDEYAIQSYQRAQKAWNENKFADEIAPVTVKGKKGETVVERDEGYENLRVDKMKTLKPAFLRDGTGTVTAGNASTMNDGASALVLASKDLAREFGQGNRALARIVSSADAAIDPVDFPVAPAKAVPIALERAGITKDQVAVWEFNEAFAAVIKANEKILGLQNARVNPLGGAISLGHALGSSGSRILVTLLHQLQPGEYGVAAICNGGGAASAMVVQKLDRVD

SEQ ID NO: 3253 - DNA, 1389 bp, Brassica napus
  CDS (1)..(1389)
atggagaaagcgatggagagacaaagagttcttcttgaacatctccgtccttcttcttcttcctctcacagctttgaaggctctctctctgcttcagcttgcttggctggggacagtgctgcgtatcagaggacctctctctatggagatgatgtagtcattgttgcggcacataggactgcactatgcaagtcgaaacgtggcaatttcaaggatacttatccggatgatcttcttgcacctgttttgagggcattgatagagaagacgaatctgaacccaagtgatgttggtgacattgttgtcggtactgtttgggcaccgggatctcagagggccagcgagtgcaggatgtctgctttctacgccggtttccctgaaaccgttcccgttagaaccgtgaatagacaatgctcttctgggcttcaggctgttgctgatgtagccgccgccatcaaagctggattttatgatattggtattggggctggattggagtccatgaccactaatccaatggcatgggaagggtcagtcaacccagcggtgaagaagtttgagcaagcacagaactgtcttctccctatgggtgttacttcagaaaatgtggcacaacgatttggtgtctcaaggcaggagcaagatcaagctgctgttgactcgcacagaaaggcagctgctgctactgctgctggtaagttcaaggatgagatcattccggttaaaaccaagcttgttgacccaaagacaggagatgagaaacccattacagtttctgtggatgatgggatccgaccaaccacaacccttgctactcttgggaagctgaagccagtgtttaaaaaggatggaaccacaacagctggaaactccagccaagttagtgatggtgctggagcggttcttctcatgaggaggagtgttgctacgcagaaaggacttcccgttcttggtgtattcaggacatttgctgcagttggtgttgacccagcaatcatgggagttggtccagcagttgccattcctgctgcagttaaggctgctggtttagaactcgatgacattgacttgtttgagatcaacgaggcatttgcatctcagtttgtttattgccgtaacaagttgggactcgacgcagagaaaatcaatgtcaacggaggcgcaatggccataggacatcctttgggtgctacaggagcacgttgcgttgctactttgttgcatgagatgaaacgccgcggaaaagactgtcgatttggggtagtttcaatgtgcattgggacggggatgggtgcagcggctgtgtttgagagaggagatggagttgatgagcttcgcaacgcaaggaaagttgaatcgcatggccttttgtccaaggacgctcgttag

SEQ ID NO: 3254 - protein, 462 aa, Brassica napus
MEKAMERQRVLLEHLRPSSSSSHSFEGSLSASACLAGDSAAYQRTSLYGDDVVIVAAHRTALCKSKRGNFKDTYPDDLLAPVLRALIEKTNLNPSDVGDIVVGTVWAPGSQRASECRMSAFYAGFPETVPVRTVNRQCSSGLQAVADVAAAIKAGFYDIGIGAGLESMTTNPMAWEGSVNPAVKKFEQAQNCLLPMGVTSENVAQRFGVSRQEQDQAAVDSHRKAAAATAAGKFKDEIIPVKTKLVDPKTGDEKPITVSVDDGIRPTTTLATLGKLKPVFKKDGTTTAGNSSQVSDGAGAVLLMRRSVATQKGLPVLGVFRTFAAVGVDPAIMGVGPAVAIPAAVKAAGLELDDIDLFEINEAFASQFVYCRNKLGLDAEKINVNGGAMAIGHPLGATGARCVATLLHEMKRRGKDCRFGVVSMCIGTGMGAAAVFERGDGVDELRNARKVESHGLLSKDAR

SEQ ID NO: 3255 - DNA, 1179 bp, Acinetobacter sp
  CDS (1)..(1179)
atgaaagatgttgtgattgttgcagcaaaacgtactgcgattggtagctttttaggtagtcttgcatctttatctgcaccacagttggggcaaacagcaattcgtgcagttttagacagcgctaatgtaaaacctgaacaagttgatcaggtgattatgggcaacgtactcacgacaggcgtgggacaaaaccctgcacgtcaggcagcaattgctgctggtattccagtacaagtgcctgcatctacgctgaatgtcgtctgtggttcaggtttgcgtgcggtacatttggcagcacaagccattcaatgcgatgaagccgacattgtggtcgcaggtggtcaagaatctatgtcacaaagtgcgcactatatgcagctgcgtaatgggcaaaaaatgggtaatgcacaattggtggatagcatggtggctgatggtttaaccgatgcctataaccagtatcaaatgggtattaccgcagaaaatattgtagaaaaactgggtttaaaccgtgaagaacaagatcaacttgcattgacttcacaacaacgtgctgcggcagctcaggcagctggcaagtttaaagatgaaattgccgtagtcagcattccacaacgtaaaggtgagcctgttgtatttgctgaagatgaatacattaaagccaataccagccttgaaagcctcacaaaactacgcccagcctttaaaaaagatggtagcgtaaccgcaggtaatgcttcaggcattaatgatggtgcagcagcagtactgatgatgagtgcggacaaagcagcagaattaggtcttaagccattggcacgtattaaaggctatgccatgtctggtattgagcctgaaattatggggcttggtcctgtcgatgcagtaaagaaaaccctcaacaaagcaggctggagcttagatcaggttgatttgattgaagccaatgaagcatttgctgcacaggctttgggtgttgctaaagaattaggcttagacctggataaagtcaacgtcaatggcggtgcaattgcattgggtcacccaattggggcttcaggttgccgtattttggtgactttattacatgaaatgcagcgccgtgatgccaagaaaggcattgcaaccctctgtgttggcggtggtatgggtgttgcacttgcagttgaacgtgactaa

SEQ ID NO: 3256 - protein, 392 aa, Acinetobacter sp
MKDVVIVAAKRTAIGSFLGSLASLSAPQLGQTAIRAVLDSANVKPEQVDQVIMGNVLTTGVGQNPARQAAIAAGIPVQVPASTLNVVCGSGLRAVHLAAQAIQCDEADIVVAGGQESMSQSAHYMQLRNGQKMGNAQLVDSMVADGLTDAYNQYQMGITAENIVEKLGLNREEQDQLALTSQQRAAAAQAAGKFKDEIAVVSIPQRKGEPVVFAEDEYIKANTSLESLTKLRPAFKKDGSVTAGNASGINDGAAAVLMMSADKAAELGLKPLARIKGYAMSGIEPEIMGLGPVDAVKKTLNKAGWSLDQVDLIEANEAFAAQALGVAKELGLDLDKVNVNGGAIALGHPIGASGCRILVTLLHEMQRRDAKKGIATLCVGGGMGVALAVERD

SEQ ID NO: 3257 - DNA, 1185 bp, Staphylococcus aureus
  CDS (1)..(1185): transl_table=11
atgcaagaagcatacattgtagcttatgggcgttcagccgcagcgaaagcaaagcaaggcgcattattccacgaaagacctgatgatgtcgcagccaaagtattacaaggcgtattgaaacgtattgacggaaaattcaataagaatatgattgaagatgtcattgttggtacggcttttccagaaggattacaaggacaaaacattgcacgaacgattgcattgcgtacgggattatctgacactgtaccgggtcaaacagtgaatcgctactgctcatcaggattacaaaccatcgcgattgcagccaatcaaattatggctggtcaaggagatatacttgtagctggtggcgttgaattgatgagtgccgtaccaatgggtggcaacgagcccacaaacaatcctaccttacaatatgatgatataggtgcgtcatatcctatgggtttaactgctgaaaatgtagcatcccaatttgacgtatcacgcgaagatcaagatgcttatgctgtcagaagtcatcagcgtgcctatgacgcacaacgtgatggtcggttcaaagatgaaattattccaatacaagtaaactcagttgaatatacaaacacaggaccaaaagtacacacaaatatctttgaccaagatgaatttatacgacctgacaccacgatggaggtattagccaaattacgtacagtatttaaagctgacggcactgtgactgcaggaacatctgccccactttctgatggtgcaggatttgtagttttaatgtctggagataaagtgaaagaactcggcgtgacacctattgcacgattcgttggttataaggcagtaggcgttgacccgaaaattatgggtattgggcctgcatatgcgattcctgaagtattgtcactcagcaatctatctgttgaagacattgatttgatcgaattgaacgaagcatttgcttctcaaacgattgcatctattaaagaagtaggtctagatatatcacgtacgaatgtgaatggtggcgctattgctttaggtcatccattaggtgctacaggcgcaatgttaaccgcgcgtttacttaatgaaatgggtagacgtcccgatagccgttacggcatggttacgatgtgtattggtgtcggtatgggtgcagctgctatatttgagtatgtgcgttag

SEQ ID NO: 3258 - protein, 394 aa, Staphylococcus aureus
MQEAYIVAYGRSAAAKAKQGALFHERPDDVAAKVLQGVLKRIDGKFNKNMIEDVIVGTAFPEGLQGQNIARTIALRTGLSDTVPGQTVNRYCSSGLQTIAIAANQIMAGQGDILVAGGVELMSAVPMGGNEPTNNPTLQYDDIGASYPMGLTAENVASQFDVSREDQDAYAVRSHQRAYDAQRDGRFKDEIIPIQVNSVEYTNTGPKVHTNIFDQDEFIRPDTTMEVLAKLRTVFKADGTVTAGTSAPLSDGAGFVVLMSGDKVKELGVTPIARFVGYKAVGVDPKIMGIGPAYAIPEVLSLSNLSVEDIDLIELNEAFASQTIASIKEVGLDISRTNVNGGAIALGHPLGATGAMLTARLLNEMGRRPDSRYGMVTMCIGVGMGAAAIFEYVR

SEQ ID NO: 3259 - DNA, 1185 bp, Staphylococcus aureus
  CDS (1)..(1185): transl_table=11
atgcaagaagcatacattgtagcttatgggcgttcagccgcagcgaaagcaaagcaaggcgcattattccacgaaagacctgatgatgtcgcagccaaagtattacaaggcgtattgaaacgtattgatggaaaattcaataagaatatgattgaagatgtcattgttggtacggcttttccagaaggattacaaggacaaaacattgcacgaacgattgcattgcgtacgggtttatctgacacggtaccgggtcaaacagtgaatcgctactgctcatcaggattacaaaccatcgcgattgcagccaatcaaattatggctggtcaaggagatatacttgtagctggtggcgttgaattgatgattgccgtaccaatgggtggcaacgagcccacaaacaatccaaccttacaatatgatgatataggtgcgtcatatcctatgggtttaactgctgaaaatgtagcatcccaatttgacgtatcacgcgaagaccaagatgcttatgctgtcagaagtcatcaacgtgcctatgacgcacaacgtgatggtcggttcaaagatgaaattattccaatacaagtaaactcagttgaatatacaaacgcaggaccaaaagtacacacaaatatctttgaccaagatgaatttatacgacctgataccacgatggaggcattagccaaattacgtacagtatttaaagctgacggcactgtgactgcaggaacatctgccccactttctgatggtgcaggatttgtagttttaatgtctggagataaagtgaaagaactcggcgtgacacctattgcacgattcgttggttataaggcagtaggcgttgacccgaaaattatgggtattgggcctgcatatgcgattcctgaagtattgtcactcagcaatctatctgttgaagatattgatttgatcgaattgaacgaagcatttgcttctcaaacgattgcatctattaaagaagtaggtctagatatatcacgtacgaatgtgaatggtggcgctattgctttaggtcatccattaggtgctacaggcgcaatgttaaccgcgcgtttacttaatgaaatgggtagacgtcccgatagccgttacggcatggttacgatgtgtattggtgtcggtatgggtgcagctgctatatttgagtatgtgcgttag

SEQ ID NO: 3260 - protein, 394 aa, Staphylococcus aureus
MQEAYIVAYGRSAAAKAKQGALFHERPDDVAAKVLQGVLKRIDGKFNKNMIEDVIVGTAFPEGLQGQNIARTIALRTGLSDTVPGQTVNRYCSSGLQTIAIAANQIMAGQGDILVAGGVELMIAVPMGGNEPTNNPTLQYDDIGASYPMGLTAENVASQFDVSREDQDAYAVRSHQRAYDAQRDGRFKDEIIPIQVNSVEYTNAGPKVHTNIFDQDEFIRPDTTMEALAKLRTVFKADGTVTAGTSAPLSDGAGFVVLMSGDKVKELGVTPIARFVGYKAVGVDPKIMGIGPAYAIPEVLSLSNLSVEDIDLIELNEAFASQTIASIKEVGLDISRTNVNGGAIALGHPLGATGAMLTARLLNEMGRRPDSRYGMVTMCIGVGMGAAAIFEYVR

SEQ ID NO: 3261 - DNA, 1185 bp, Staphylococcus aureus
  CDS (1)..(1185): transl_table=11
atgcaagaagcatacattgtagcttatgggcgttcagccgcagcgaaagcaaagcaaggcgcattattccacgaaagacctgatgatgtcgcagccaaagtattacaaggcgtattgaaacgtattgacggaaaattcaataagaatatgattgaagatgtcattgttggtacggcttttccagaaggattacaaggacaaaacattgcacgaacgattgcattgcgtacgggattatctgacacggtaccgggtcaaacagtgaatcgctactgctcatcaggattacaaaccatcgcgattgcagccaatcaaattatggctggtcaaggagatatacttgtagctggtggcgttgaattgatgagtgccgtaccaatgggtggcaacgagcccacaaacaatcctaccttacaatatgatgatataggtgcgtcatatcctatgggtttaactgctgaaaatgtagcatcccaatttgacgtatcacgcgaagatcaagatgcttatgctgtcagaagtcatcaacgtgcctatgacgcacaacgtgatggtcggttcaaagatgaaattattccaatacaagtaaactcagttgaatatacaaacgcaggaccaaaagtacacacaaatatctttgaccaagatgaatttatacgacctgacaccacgatggaggcactagccaaattacgtacagtatttaaagctgacggcactgtgactgcaggaacatctgccccactttctgatggtgcaggatttgtagttttaatgtctggagataaagtgaaagaactcgacgtgacacctattgcacgattcgttggttataaggcagtaggcgttgacccgaaaattatgggtattgggcctgcatatgcgattcctgaagtattgtcactcagcaatctatctgttgaagatattgatttgatcgaattgaacgaagcatttgcttctcaaacgattgcatctattaaagaagtaggtctagatatatcacgtacgaatgtgaatggtggcgctattgctttaggtcatccattaggtgctacaggcgcaatgttaaccgcgcgtttacttaatgaaatgggtagacgtcccgatagccgttacggcatggttacgatgtgtattggtgtcggtatgggtgcagctgctatatttgagtatgtgcgttag

SEQ ID NO: 3262 - protein, 394 aa, Staphylococcus aureus
MQEAYIVAYGRSAAAKAKQGALFHERPDDVAAKVLQGVLKRIDGKFNKNMIEDVIVGTAFPEGLQGQNIARTIALRTGLSDTVPGQTVNRYCSSGLQTIAIAANQIMAGQGDILVAGGVELMSAVPMGGNEPTNNPTLQYDDIGASYPMGLTAENVASQFDVSREDQDAYAVRSHQRAYDAQRDGRFKDEIIPIQVNSVEYTNAGPKVHTNIFDQDEFIRPDTTMEALAKLRTVFKADGTVTAGTSAPLSDGAGFVVLMSGDKVKELDVTPIARFVGYKAVGVDPKIMGIGPAYAIPEVLSLSNLSVEDIDLIELNEAFASQTIASIKEVGLDISRTNVNGGAIALGHPLGATGAMLTARLLNEMGRRPDSRYGMVTMCIGVGMGAAAIFEYVR

SEQ ID NO: 3263 - DNA, 1185 bp, Staphylococcus aureus
  CDS (1)..(1185): transl_table=11
atgcaagaagcatacattgtagcttatgggcgttcagccgcagcgaaagcaaagcaaggcgcattattccacgaaagacctgatgatgtcgcagccaaagtattacaaggcgtattgaaacgtattgacggaaaattcaataagaatatgattgaagatgtcattgttggtacggcttttccagaaggattacaaggacaaaacattgcacgaacgattgcattgcgtacgggattatctgacacggtaccgggtcaaacagtgaatcgctactgctcatcaggattacaaaccatcgcgattgcagccaatcaaattatggctggtcaaggagatatacttgtagctggtggcgttgaattgatgagtgccgtaccaatgggtggcaacgagcccacaaacaatcctaccttacaatatgttgatataggtgcgtcatatcctatgggtttaactgctgaaaatgtagcatcccaatttgacgtatcacgcgaagatcaagatgcttatgctgtcagaagtcatcaacgtgcctatgacgcacaacgtgatggtcggttcaaagatgaaattattccaatacaagtaaactcagttgaatatacaaacacaggaccaaaagtacacacaaatatctttgaccaagatgaatttatacgacctgacaccacgatggaggcactagccaaattacgtacagtatttaaagctgacggcactgtgactgcaggaacatctgccccactttctgatggtgcaggatttgtagttttaatgtctggagataaagtgaaagaactcggcgtgacacctattgcacgattcgttggttataaggcagtaggcgttgacccgaaaattatgggtattgggcctgcatatgcgattcctgaagtattgtcactcagcaatctatctgttgaagacattgatttgatcgaattgaacgaagcatttgcttctcaaacgattgcatctattaaagaagtaggtctagatatatcacgtacgaatgtgaatggtggcgctattgctttaggtcatccattaggtgctacaggggcaatgttaaccgcgcgtttacttaatgaaatgggtagacgtcccgatagtcgttacggcatggttacgatgtgtattggtgtcggtatgggtgcagctgctatatttgagtatgtgcgttag

SEQ ID NO: 3264 - protein, 394 aa, Staphylococcus aureus
MQEAYIVAYGRSAAAKAKQGALFHERPDDVAAKVLQGVLKRIDGKFNKNMIEDVIVGTAFPEGLQGQNIARTIALRTGLSDTVPGQTVNRYCSSGLQTIAIAANQIMAGQGDILVAGGVELMSAVPMGGNEPTNNPTLQYVDIGASYPMGLTAENVASQFDVSREDQDAYAVRSHQRAYDAQRDGRFKDEIIPIQVNSVEYTNTGPKVHTNIFDQDEFIRPDTTMEALAKLRTVFKADGTVTAGTSAPLSDGAGFVVLMSGDKVKELGVTPIARFVGYKAVGVDPKIMGIGPAYAIPEVLSLSNLSVEDIDLIELNEAFASQTIASIKEVGLDISRTNVNGGAIALGHPLGATGAMLTARLLNEMGRRPDSRYGMVTMCIGVGMGAAAIFEYVR

SEQ ID NO: 3265 - DNA, 1209 bp, Candida albicans
  CDS (1)..(1209): transl_table=12
atggtcccacctgtttatattgtttctactgctagaactccaattggttcatttcaaggtacattatcatctttaacttattcagatttaggtgctcatgctgtcaaagctgctttgaacaaagtccctcaaatcaaaccagaagatgttgatgaaattgtatttggtggtgttttacaagccaatgttggtcaagctccagctagacaagttgccttgaaggcaggtttaactgataaaattgttgccagtactgttaacaaagtttgtgcttctggtttgaaagctattataattggtgctcaaaacattatttgtggcactagtgatattgttgttgttggtggtgctgaatccatgaccaacacgccatactacttgccaactgctagaaatggtgctagatttggtgattccactttaattgatggtattcaaaaagatggtttgttggatgtttacgaacaaaaattaatgggtgttgccgctgaaaaatgtgctgctgaccatggattcaccagagaacaacaagatgaatttgctatcaaatcatatcaaaaagctggtaatgcattaaagcaaggtaaattcaaccaagaaatcgctccagttactattaaaggtgttagaggtaaaccagatgttgttgttgaaaaagatgaagaaattgaaaaattcaatgaagccaaacttaagtcagctagagccgttttccaaaaagaaaatggtactgttactggtccaaatgcttctaagattaatgatggtgctgctgcattgattttagtttctgaagcaaaattgaaagaattgggtttaaaacctttagctaaaatcaatggttggggtgaagccgccagaaatccaattgatttcacaattgctccagctttagctgttccaaaagctgtcaagcacgctggtttgactcttgatcaagttgatttctttgaattgaatgaagccttttccgttgttggtttagccaatgctgaaatatgtcaaattccattagaaaaattgaatgcttatggtggtgctgttgccttgggtcatcctcttggttgttctggtgcaagaattgttgtcactttattgtctgtcttgattcaagaaggtggtaaaattggttgtgctggtgtttgtaacggtggtggtggtgcctcatctattgttattgaaaaagtcgatagtgactttaaattgtaa

SEQ ID NO: 3266 - protein, 402 aa, Candida albicans
MVPPVYIVSTARTPIGSFQGTLSSLTYSDLGAHAVKAALNKVPQIKPEDVDEIVFGGVLQANVGQAPARQVALKAGLTDKIVASTVNKVCASGLKAIIIGAQNIICGTSDIVVVGGAESMTNTPYYLPTARNGARFGDSTLIDGIQKDGLLDVYEQKLMGVAAEKCAADHGFTREQQDEFAIKSYQKAGNALKQGKFNQEIAPVTIKGVRGKPDVVVEKDEEIEKFNEAKLKSARAVFQKENGTVTGPNASKINDGAAALILVSEAKLKELGLKPLAKINGWGEAARNPIDFTIAPALAVPKAVKHAGLTLDQVDFFELNEAFSVVGLANAEICQIPLEKLNAYGGAVALGHPLGCSGARIVVTLLSVLIQEGGKIGCAGVCNGGGGASSIVIEKVDSDFKL

SEQ ID NO: 3267 - DNA, 1206 bp, Emericella nidulans
  CDS (1)..(1206)
atgtttcgttctgccttaaagaaaacccccaacgacatcgtcctcctctccgccgtccggtcacctataacccgcgccttcaaaggcggtttccgtgactcgcacccagaggacctcctaattccaatcctccaggcctcacttcagcgtgccaatatctccccagacagcgtcaatgacgtgctcatcggcaatgtccttgcagaactcggcttcgccaagacgggtcgtaccgcactcaatgccgcgggctttaatcctacaaagactacattccacaccgtcaatcgacagtgcagtagtagtctgcaggcgattacgcatattgcgcacgcgatcgcagtagggcagatcgaggtcgggattgccgggggcgtggagagcatgagcaggaattacaatccggctcggggcattccaagagacgtgagtccgttgttgaaagagtgtggagtgaaagaggcgaccgattgccttttgccgatgctggtgacgagtgagaatgttgcaaagaggtacggggtcggtaggacggagcaggatcagtttgcagcagagagccagagaaaggctgtggttgcgcaggaggagggtaggtttagcgagatcgtgccggttagggcaaggaggcttagctcggagacggagaatgagacgtttgagtttgtcgatagggatgatggggttaggcagggggtgactgttgagaagttggcggcgttgaagccggttctggaagggggtgcttctaccgccgggaactcctcccaaatttccgatggcgcttccataacgattcttgccagccgcgcctgggctgaatcccacggtctaaggcctattgcccgttttgccggaacccaggtggccggctgtgcccctgacgagatgggcatcgggcccatcgacgctatcaagaggctgtacaagcacagcggggtctcacagagcgatgtggatatttttgagctgaacgaggcgtttgcgagccagagtatccattgtatcagggagctaggcattgatatggccaaggtaaatccgaacggaggagcgattgcactgggccacccgatcggcgcgacaggggccagacagacggctacgttgttggcagagctggcgaggtcagataaggaggttggggtggtgagtatgtgtgctagtacgggaatgggggttgcaagtttgttcatccgggagtag

SEQ ID NO: 3268 - protein, 401 aa, Emericella nidulans
MFRSALKKTPNDIVLLSAVRSPITRAFKGGFRDSHPEDLLIPILQASLQRANISPDSVNDVLIGNVLAELGFAKTGRTALNAAGFNPTKTTFHTVNRQCSSSLQAITHIAHAIAVGQIEVGIAGGVESMSRNYNPARGIPRDVSPLLKECGVKEATDCLLPMLVTSENVAKRYGVGRTEQDQFAAESQRKAVVAQEEGRFSEIVPVRARRLSSETENETFEFVDRDDGVRQGVTVEKLAALKPVLEGGASTAGNSSQISDGASITILASRAWAESHGLRPIARFAGTQVAGCAPDEMGIGPIDAIKRLYKHSGVSQSDVDIFELNEAFASQSIHCIRELGIDMAKVNPNGGAIALGHPIGATGARQTATLLAELARSDKEVGVVSMCASTGMGVASLFIRE

SEQ ID NO: 3269 - DNA, 1206 bp, Corynebacterium glutamicum
  CDS (1)..(1206): transl_table=11
atgagcgatcgaaccgcatatcttgtctccggcaaaagaacaccagtgggccgctacggtggggcactctcctcagttcgccctgatgatctagcagccctcaccatcactgccgtcattgaagaatcaggcattgatccatcagtggtggatgaggtcattttaggaaatgccaacggtgctggcgaagaaaaccgcaacgttgcacgcctggcatggcttttggcgggatacccagacaccgttcctggaattaccgtgaacaggctttgcgcttctggaatgtctgccattgcgttggctactgcgatggtggaatcaggacaagctgatgtggtggttgccggtggtgtggaatctatgtcgagggcaccgtgggtgcaggaaaagccacgatcggctttcgctaagccgggtgagatttttgatacctcgattggttggcgtttcgtgaaccctattttccaggagcaggagaagaccacgttctccatgccggaaactgcggaagaagtcgctcgggttaagggcgtgtcacgtgaggaagctgatgtgtttgcagcgacctcgcaagctcgtgctttggctgcgatttcggctggacattttgattctgaaatcgtcccggttgaaatcactgatcgtaaaggcaacgtgaccgtggtgtcgcaagacgaaggtccacgtgaaggcaccactactcaggtgttggcaaagctgcggccggtggtgcgtgggggagaggtagttactgccggaaattcctcgtcgcttaatgatggagcgtccgccatcatcgtggctagcgctgaagctgtagagaaatacggtttgacggctcgtgcgaaggttgttggtgccagcaatgcaggtcttgccccagagatcatgggtatggggcctgtgccagctactaagaaacttctcaagcgcactggctggagcgtcgaagacctggacgctgtagagctcaacgaagcattcgcaactcagtcgcttgcctgcatgcgggaactcgaacttgatccagaaaaggtcaatgcgtggggcggtgccattgcgttgggccacccactgggttcttctggttccagaatcaccatcacactgcttaaccgcctggaaaaagaaggcggatccaagggcattgccaccatgtgtatcggagtcggtcagggctccgcgatcgctatcgaaagggtgtag

SEQ ID NO: 3270 - protein, 401 aa, Corynebacterium glutamicum
MSDRTAYLVSGKRTPVGRYGGALSSVRPDDLAALTITAVIEESGIDPSVVDEVILGNANGAGEENRNVARLAWLLAGYPDTVPGITVNRLCASGMSAIALATAMVESGQADVVVAGGVESMSRAPWVQEKPRSAFAKPGEIFDTSIGWRFVNPIFQEQEKTTFSMPETAEEVARVKGVSREEADVFAATSQARALAAISAGHFDSEIVPVEITDRKGNVTVVSQDEGPREGTTTQVLAKLRPVVRGGEVVTAGNSSSLNDGASAIIVASAEAVEKYGLTARAKVVGASNAGLAPEIMGMGPVPATKKLLKRTGWSVEDLDAVELNEAFATQSLACMRELELDPEKVNAWGGAIALGHPLGSSGSRITITLLNRLEKEGGSKGIATMCIGVGQGSAIAIERV

SEQ ID NO: 3271 - DNA, 1206 bp, Streptomyces nodosus
  CDS (1)..(1206): transl_table=11
atggtcgacagttatgtgtacgcagcggcgagaacgcccttcggccggttccggggggcgctctccgacgtccggcccgacgatctcgcggcgctggccgtctccggggtcctggccggcaccccgtccctggacccggcggcgatcggcgatgtggtctggggaaacgccaacggcgcgggtgaggacaaccggaacgtcggccggatggccgtcctgctggccgggctgccgacctcggtgcccgccaccaccgtcaaccggctctgcggctcctccctggacgcggcgatcatcgcttcgcgcgcgatcgagacgggcgatacggacatcgtcctcaccggtggtgtggagtcgatgacccgcgccccctgggtgctgcccaagccgtcgcgcggcttccccgcgggggacatgaccgccgtctccaccaccctgggctggcggctggtcaacgaacggatgcccgcggagtggacggtctcgctgggcgaggccaacgagatgctggccgaggagttcggcatctcccgggagcggcaggacgagttcgcggcccgctcgcaccacctggcggacgaggcatgggcgtcgggcttctacgacgacctggtggtgcccgtcgaggtgggcggcgacggcgggccgttctcccgcgacgaggggatcaggccgggatccacggcgcggaagctggccgggctcaaaccggccttccgacccgacggagtgatcaccgccggcaatgcctcgccgctcaacgacggggcgtccgccgtgctgctgggttcccgggaggcctcgtcgcgcatcggtctggcgccccaggcgcggatcgccggccgcggggtgtccgccctggaaccccggatgttcgggttcgcccccgtcgaggcggccgggcgggcgctgcgccgggcgggcatctcctggtccgatgtgtccgccgtggagctcaacgaggccttcgccgtgcagtcgctggcctgtgtggacgcctgggggatcgacccggggatcgtgaacgccaagggcggcgcgatcgcgatcggccaccccctgggcgcgtccggcggccggctgctcggcaccctcacggcccggctgcgcgagtcgggcggccggtggggcgtcgccgcgatctgtatcggagtgggacaggcgctggccgtcgtcctggagaacgtgacggaggaccgagcgtga

SEQ ID NO: 3272 - protein, 401 aa, Streptomyces nodosus
MVDSYVYAAARTPFGRFRGALSDVRPDDLAALAVSGVLAGTPSLDPAAIGDVVWGNANGAGEDNRNVGRMAVLLAGLPTSVPATTVNRLCGSSLDAAIIASRAIETGDTDIVLTGGVESMTRAPWVLPKPSRGFPAGDMTAVSTTLGWRLVNERMPAEWTVSLGEANEMLAEEFGISRERQDEFAARSHHLADEAWASGFYDDLVVPVEVGGDGGPFSRDEGIRPGSTARKLAGLKPAFRPDGVITAGNASPLNDGASAVLLGSREASSRIGLAPQARIAGRGVSALEPRMFGFAPVEAAGRALRRAGISWSDVSAVELNEAFAVQSLACVDAWGIDPGIVNAKGGAIAIGHPLGASGGRLLGTLTARLRESGGRWGVAAICIGVGQALAVVLENVTEDRA

SEQ ID NO: 3273 - DNA, 1245 bp, Nicotiana tabacum
  CDS (1)..(1245)
atggcaaagatggttaatgattccattaaacctcgagatgtatgcattgtgggtgttgctcgaacaccaatgggtggtttccttggttctctttcgtctttgtctgctacagagcttggttctgtagctatccgagctgctcttaagagagcaaatgtagacccgtcccttgttcaagaggtcttctttggaaatgttctcagtgcaaacttaggtcaagcccctgctagacaggctgccttaggagccgggattcctaattcagtgatttgcacgaccatcaacaaagtttgttcttcgggacttaaagcaacaatgattgcagctcagactatacaatcaggaagcaatgatatcgttgtgactggtggcatggaaagcatgtctaatgtaccgaaatacctagctcaagcaaggaaggggtcgcggctaggtcatgatactatagtagatggcatgctaaaagatggactctgggatgcctataatgatttcgggatgggcgtctgtgcagaactatgtgctgatcagtataaaatcacaagacaacagcaggattcttacgctattcaaagctttgagcgaggaattgctgcacaacgtagtggtgcatttgtgtgggaaatagttccggtagaaatttctggtggaagtggaagaccatctacatatgttgataaagatgaaggtttaataaagtttgatgcctccaaactaaaaaagcttagaccaagtttcaaggagaatggaggttctgtcactgcaggcaatgcttccattataagtgatggcgctgcagcattagttctggtgagtggacaaaaggcacttgaacttggattgcaagtaattggtaggatcagaggatttgcagatgcagctcaggcacctgagttatttacaacagctccagctcttgcaataccaaaagcaattaagaattctggccttgagtcatctcaaattgactattatgaaataaatgaagcgttctctgtggtggctcttgccaacaaaagactgctcaatctcaattccggaaagctaaatgcacatggtggagctgtgtcattgggacatcccttggggtgcagtggagctaggatcctggtatctcttttaggggtattgaagcacaagaatgggaagtttggtgttgcaggaatctgcaatgggggaggaggcgcatctgctcttgttgtagagctcatgcctataaggatggtggcacgttcatcgctttga

SEQ ID NO: 3274 - protein, 414 aa, Nicotiana tabacum
MAKMVNDSIKPRDVCIVGVARTPMGGFLGSLSSLSATELGSVAIRAALKRANVDPSLVQEVFFGNVLSANLGQAPARQAALGAGIPNSVICTTINKVCSSGLKATMIAAQTIQSGSNDIVVTGGMESMSNVPKYLAQARKGSRLGHDTIVDGMLKDGLWDAYNDFGMGVCAELCADQYKITRQQQDSYAIQSFERGIAAQRSGAFVWEIVPVEISGGSGRPSTYVDKDEGLIKFDASKLKKLRPSFKENGGSVTAGNASIISDGAAALVLVSGQKALELGLQVIGRIRGFADAAQAPELFTTAPALAIPKAIKNSGLESSQIDYYEINEAFSVVALANKRLLNLNSGKLNAHGGAVSLGHPLGCSGARILVSLLGVLKHKNGKFGVAGICNGGGGASALVVELMPIRMVARSSL

SEQ ID NO: 3275 - DNA, 1215 bp, Nicotiana tabacum
  CDS (1)..(1215)
atggctccagctgcagcagactccatcaagcctagagatgtttgcattgttggtgttgcccgtactccaatgggaggcttccttggttctctttcttcgctgtcagcgaccaaacttggatcaatagccattgagggtgctcttaagaaagctaatgttgatccatcactagtagaagaagtattctttgggaatgtcctcagtgcaaacctgggacaggctcctgctaggcaagcagcattaggtgcaggaatacccaatacagtagtttgtacagctgtgaacaaagtctgtgcatctgggttgaaagcaactatgcttgcagctcaaagtatccagttgggcatcaatgatgttgtggtggctggtggaatggaaagcatgtccaatgttccgaaatacattgcagaagcaaggaagggatctcgtcttggacatgatagtcttgttgacggaatgcttaaagatggtttgactgacgtatataaggattgtggtatgggagtttgtgcagaaatatgtgccgaaaatcataaaatcacaagagaggagcaggatgactatgcagttcaaagttttgaacgtggcatcgctgctcaggaagctggtgcttttgcatgggagattgtgccggttgaggtgcctgggggaagaggaaaaccatccattattgttgataaggatgacggtctaggaaagtttgatggtgcaaaattgagaaaactccgaccaagttttaaggaaaaggatggtactgtgactgctggtaacgcttctagcataagtgatggagctgctgcattggtcttagtaagtggagagaaggcgataaaacttggactaaatgtgattgcaaagatcagtggctatgctgacgctgctcaggcacctgaattattcacaactgcacctgctctagcaattccaaaagctatcaaaagtgctagcttagaggcttctcaaattgactactatgaaattaatgaagcttttgctgtggtatctcttgcaaatcaaaagctgcttggtcttaatccagaaaaagttaatgtacatggtggagctgtatctttggggcaccctcttggatgcagtggagctcgtatattggttacacttcttggggtattgagacagaaaaacggcaaatatggcgctgctggtgtttgcaatggcggaggaggtgcctcagcccttgtcctagagcttgtgtaa

SEQ ID NO: 3276 - protein, 404 aa, Nicotiana tabacum
MAPAAADSIKPRDVCIVGVARTPMGGFLGSLSSLSATKLGSIAIEGALKKANVDPSLVEEVFFGNVLSANLGQAPARQAALGAGIPNTVVCTAVNKVCASGLKATMLAAQSIQLGINDVVVAGGMESMSNVPKYIAEARKGSRLGHDSLVDGMLKDGLTDVYKDCGMGVCAEICAENHKITREEQDDYAVQSFERGIAAQEAGAFAWEIVPVEVPGGRGKPSIIVDKDDGLGKFDGAKLRKLRPSFKEKDGTVTAGNASSISDGAAALVLVSGEKAIKLGLNVIAKISGYADAAQAPELFTTAPALAIPKAIKSASLEASQIDYYEINEAFAVVSLANQKLLGLNPEKVNVHGGAVSLGHPLGCSGARILVTLLGVLRQKNGKYGAAGVCNGGGGASALVLELV

SEQ ID NO: 3277 - DNA, 1170 bp, Nocardia farcinica
  CDS (1)..(1170): transl_table=11
atgagagacgcggtcatcgtcgaagccgttcgcacgccgatcggcaagggcaagccgaacggagcgctgcaccaggtgcacgccgtcgacctgctcgcgcacagcctgcgcgaggtggtgcggcgcagcgggatcgacccggtgctgatcgacgacgtcatcggcggcgtggtcacccaggtcggggagcagggcgccaacatcacccggcgcgccgccctggccgccggatatcccgaatccgtgcccgccaccaccgtcgaccgccagtgcggcagcagccagcaggccattcacttcgcggcgcagggggtgctcgccggcgcctacgacgtggtggtcgccgcgggcgtggaatcgatgggccgcatcccgatgggcgccaacatcgcgggctcggccgacctcggcggcgtggcattcaccgaacggtaccccgaggggctggtgccgcagggcatcagcgccgaactcatcgccgccagatggggactgacccgcacccagctcgacgagttcgccctgtccagccacgacaaggccgcccgcgcgaccaagaacgggcagttcgcggccgagctcgcgcccctcgccgggctggagaccgacgagggcatccgggtgggcagcacgctcgagaccctggccgggctgcggcccgcctactacgaccccgcgatggccgaacggttcccgcagatcggctggcagatcaccgccgcgtcggccagccaggtcagcgacggcagcgcggcggtgctcatcatgaccggcgagcgcgccgcgcagctcgggctgacaccactggcccggctgcacagcttcgccgtcgccggtgacgatccgctgttgatgctcaccgccgtcatcccggcgacccggaaggtgttgcaacgggcgggcctccagctcgccgacatcgacctcgtcgagatcaacgaggcgttctcgccggtggtgctggcctgggcccaggagaccggagccgacctgtccaaggtcaacgtcaacggtggcgccatcgcgctcggccacccgctcggcgcctccggagcccggctgaccaccacgctcgtgcacgccatgcgcgagcgcggcgcccgctacggcctgcagacgatgtgtgaggcgggcggactcgccaacgccatgatcctcgaacggctctga

SEQ ID NO: 3278 - protein, 389 aa, Nocardia farcinica
MRDAVIVEAVRTPIGKGKPNGALHQVHAVDLLAHSLREVVRRSGIDPVLIDDVIGGVVTQVGEQGANITRRAALAAGYPESVPATTVDRQCGSSQQAIHFAAQGVLAGAYDVVVAAGVESMGRIPMGANIAGSADLGGVAFTERYPEGLVPQGISAELIAARWGLTRTQLDEFALSSHDKAARATKNGQFAAELAPLAGLETDEGIRVGSTLETLAGLRPAYYDPAMAERFPQIGWQITAASASQVSDGSAAVLIMTGERAAQLGLTPLARLHSFAVAGDDPLLMLTAVIPATRKVLQRAGLQLADIDLVEINEAFSPVVLAWAQETGADLSKVNVNGGAIALGHPLGASGARLTTTLVHAMRERGARYGLQTMCEAGGLANAMILERL

SEQ ID NO: 3279 - DNA, 1221 bp, Nocardia farcinica
  CDS (1)..(1221): transl_table=11
atgccagaggcagttatcgtttcgaccgcacgctctcccatcggtcgtgcccgcaagggctcgctggtcgacatgcgtcccgacgatctggcctcccagatcgtgcgcgccgcactggacaaggttcccgcgctcgaccccacccagatcgacgacctgatcctcggctgcggctcgcccgcgggtgagcagggcttcaacatcgcccgcaacgtcgcggtcatgctcggctacgacaccctgcccggcaccaccgtgcaccgctactgtgcctcgtcgctgcagtcgacccggatggccttccacgccatcaaggcgggcgagggccacgccttcatctccgcgggcgtggagacggtgtcgcgctacgtgcacggctcggccgacagctggccgaacacccagaacccgatcttcgccgacgcgcaggcgcgcacggcgaaggccgccgagggcggcgcgggcatctggcacgacccgcgcgaggacggcctgctgcccgacgtctacatcgcgatgggccagaccgccgagaacgtcgccagcttcaccggcatcacccgcgaggaccaggaccgctggggcgtgcgttcgcagaaccgcgcggaggaggccatcaacaacggcttcttcgagcgcgagatcaccccggtcacgctgcccgacggcacggtcgtcagcaaggacgacgggccgcgcgccggcgtcacctacgaggccgtctcccagctcaagccggtcttccggccggacggcaccgtcaccgcgggcaactgctgcccgctcaacgacggtgcggccgcgctggtgatcatgagcgacgtgcgcgccaaggagctgggcctgaccccgctggcccgcatcgtgtccaccggcgtgtccggcctgtcgccggagatcatgggcctcggcccgatcgagtcggtcaagaacgcgctggcgctggcgaacatgagcgtcgacgacatcgacctgttcgagatcaacgaggccttcgcggtgcaggtgctcggctcggcccgcgagctgaagatcgacgaggacaagctcaacgtctccggcggcgcgatcgcgctcggccacccgttcggcatgaccggcgcccgcatcaccgcgacgctgatcaacaacctgcagacctacgacaagcagttcggcgtcgagacgatgtgcgtcggcggcggccagggcatggcgatggtgctcgagcgcctgagctga

SEQ ID NO: 3280 - protein, 406 aa, Nocardia farcinica
MPEAVIVSTARSPIGRARKGSLVDMRPDDLASQIVRAALDKVPALDPTQIDDLILGCGSPAGEQGFNIARNVAVMLGYDTLPGTTVHRYCASSLQSTRMAFHAIKAGEGHAFISAGVETVSRYVHGSADSWPNTQNPIFADAQARTAKAAEGGAGIWHDPREDGLLPDVYIAMGQTAENVASFTGITREDQDRWGVRSQNRAEEAINNGFFEREITPVTLPDGTVVSKDDGPRAGVTYEAVSQLKPVFRPDGTVTAGNCCPLNDGAAALVIMSDVRAKELGLTPLARIVSTGVSGLSPEIMGLGPIESVKNALALANMSVDDIDLFEINEAFAVQVLGSARELKIDEDKLNVSGGAIALGHPFGMTGARITATLINNLQTYDKQFGVETMCVGGGQGMAMVLERLS

SEQ ID NO: 3281 - DNA, 1293 bp, Nocardia farcinica
  CDS (1)..(1293): transl_table=11
atggcttccaccgcctctcggcgcgccgtgatcgtggcgggtgcgcgcaccccgttcgtgcgcgccttcaccgacttcacgaagatggactcgatcgcgctcgccgacgccgccgtgcgcggcctgctcgagcgcaccgcactgcccggcgaccaggtgcaggcgatcgtctggggcggggtgatcctgcccagcgccgcgcccaacatcgcgcgcgagatcgccctggacctgaagctcgaccccggctgcgaggggcacaccgtcacgcgggcgtgcgcgtccggactccaggccgtcaccaccgcggccgccgccatcgaacgcggcgaatacgacgtgatgatcgccggcggcagcgattccacctccaacgccgagatcaagctgccgcagaagctggtgcacgccggggcgccgatcgcgctcggcaagcccaagctcaaggactatctgtcggcggccgcgcagctggcgccgttcaccgacatcctgccgagcaggccgcgcatcgccgaacgcaccaccggcgaggtgatgggggagtccgccgagaagatggcccgcatccacggcatcggccgcgccgaacaggacgagttcgccgcgcgctcgcaccatcgggccgccgccgcgatcgaatccggccgcttcgacgacgaggtgctgcgggtgcgcacccccgacggcgccgagatcagccgcgacgggctggtgcgcgccgataccagcgtcgagaagctggcccggttgaagccggtcttcgccgagggcggcaccgtcaccgcgggcaatgccagccccctcaccgacggcgcctcggcggtgctgctgatgagcgaggaacgtgcccgcgccctcggctaccgcccgttggccgccttccggtcctggagctatgtcagcgtcgatcccaccgaccaggtgctcatcggccccgcgatctcgatgccccgggccttggacgcagcgggcatgacgctggccgacgtggacctggtcgacatccacgaggcgttcgccgcgcagacgctgtcggtgctgagcgccctcgccagcgacgagtgggccaagacccgcctggaccgcgacaccgccgtcggcgaagtcgacatcgacaagctcaacgtgcacggcggctcggtctcgctgggccatccgttcggggcgaccggtgcgcggatggtcaccaccatggccaacgaactcgcccgctccgacaagcagaccgcactgctcggcatctgcgcggcgggcggcatcggcgcctcggcggtactggaacgcgtctga

SEQ ID NO: 3282 - protein, 430 aa, Nocardia farcinica
MASTASRRAVIVAGARTPFVRAFTDFTKMDSIALADAAVRGLLERTALPGDQVQAIVWGGVILPSAAPNIAREIALDLKLDPGCEGHTVTRACASGLQAVTTAAAAIERGEYDVMIAGGSDSTSNAEIKLPQKLVHAGAPIALGKPKLKDYLSAAAQLAPFTDILPSRPRIAERTTGEVMGESAEKMARIHGIGRAEQDEFAARSHHRAAAAIESGRFDDEVLRVRTPDGAEISRDGLVRADTSVEKLARLKPVFAEGGTVTAGNASPLTDGASAVLLMSEERARALGYRPLAAFRSWSYVSVDPTDQVLIGPAISMPRALDAAGMTLADVDLVDIHEAFAAQTLSVLSALASDEWAKTRLDRDTAVGEVDIDKLNVHGGSVSLGHPFGATGARMVTTMANELARSDKQTALLGICAAGGIGASAVLERV

SEQ ID NO: 3283 - DNA, 1170 bp, Nocardia farcinica
  CDS (1)..(1170): transl_table=11
atgaggtccgccgtcatcgtggacgtcgtccgcacaccgtccgggaagggcaaggccgggggcggcctgtcggaggtgcacccggcgacgctgctcgcgggcgtgctcgccgaactcgtcgcgcgcaacgacctcgaccccgccgtggtcgacgacgtgatcggcggctgcgtcacccagagcggcgagcaggcgctcaacatcacccgcaccgccgtgctggccgccggcttccccgagaccgtgcccgccaccacggtcgaccggcagtgcggctcgagccagcaggccgcgcacttcgccgcacagggcgtgatctccggcgcctacgacgtcgccatcgcctgcggcgtggagatgatgagccgcgcgccgatgttctccaacgcccaggacaaggacaccaaccgcggcccgctcgcgcaccgctacccggacgggttgatccagcagggcatcgccgccgaaatcctcgccgcccggtggaagttcgaccgcgccgcgctcgacgagttcgccgcccgctcgcaccggctggccgccgcgaccgcggccgcgggcggtttcgaccgcgagctggtcgccgcgggcgcactcaccgccgacgagaccatccgtccgggaaccacggtggaggggctggccgggttgcgtcccgccttcgccgacgacgcctatcaggcccgcttcccggagatcgactggtcgatcacccccggcaactcctcccccctcaccgacggcgcctccgccgcgctgatcatgaccgaggaggccgccgcgaaactcgggctgaccccgcgggcccggttccactccttcgccgtggtcggcgacgacccgctgctgatgctcaccgccgtcgtcccggccacccgcaaggtgctcgagcgcacgggcctcggcatcgaagacatcgacgcctacgaggtcaacgaggcgttcgcctcggtaccgctggtgtggcagcacgaactggccgccgacccggccaagctgaacccgcgcggcggcgcgatcgcactgggccatccgctcggcgcgtcgggcacccgcatcctggccaccctggtcaaccacctcgagcagagcggcggccggttcggcctgcagaccatgtgcgaggcgggcgggctggccaacgccacgatcatcgagcggctcggatga

SEQ ID NO: 3284 - protein, 389 aa, Nocardia farcinica
MRSAVIVDVVRTPSGKGKAGGGLSEVHPATLLAGVLAELVARNDLDPAVVDDVIGGCVTQSGEQALNITRTAVLAAGFPETVPATTVDRQCGSSQQAAHFAAQGVISGAYDVAIACGVEMMSRAPMFSNAQDKDTNRGPLAHRYPDGLIQQGIAAEILAARWKFDRAALDEFAARSHRLAAATAAAGGFDRELVAAGALTADETIRPGTTVEGLAGLRPAFADDAYQARFPEIDWSITPGNSSPLTDGASAALIMTEEAAAKLGLTPRARFHSFAVVGDDPLLMLTAVVPATRKVLERTGLGIEDIDAYEVNEAFASVPLVWQHELAADPAKLNPRGGAIALGHPLGASGTRILATLVNHLEQSGGRFGLQTMCEAGGLANATIIERLG

SEQ ID NO: 3285 - DNA, 1179 bp, Nocardia farcinica
  CDS (1)..(1179): transl_table=11
atgagcggcgcgttcgtctacgacggtgtccgcacgccgttcgggcgatacgggggcggtctggccggcacccgtcccgacgatctggccgcccacgtgctgcgcgcgctggccgcacggaccggcctcgacccagacaccgtcgacgaggtggtgctcggcgcggccaaccaggccggtgaggacaaccgcaacgtcgccaggatggcggcgctgctggccgactggccgaccgacgtgcccgcgaccaccgtcaaccggctgtgcgggtccggcatggacgcgatcatccaggcctcccgcaccatcgagaccggcgacgcggagctggtggtggcgggcggcgtggagtcgatgagccgggcgccgtgggtactgcccaagccggacaaggcgtttccggccgcgaacgcgaccgctcactccaccacgctgggctggcgcctggtgaatccggccatgcccgcccggtggacggtgtcgctgggggagagcaccgagatcctcgccgagcgctacggtatcggtcgcgccgaacaggacgagttcgccgcccgcagccatcagctggccgcgcgcgcctgggacagcggcttctacgacgaccacgtggtcgcggtgcccggcagcgaactcgtgcgcgacgaatccctgcgccccgccaccaccgtcgagaccctcgcccggctgaagcccgccttccgccccgacggcacggtcaccgcgggcaacgcctcaccgctcaacgacggcgccgcggcgctgctgctcggcgacgaatccgccgccgcccgactcggccgcgaaccgctggcgcgggtggccggacgtggggcggccggggtcgaccccgacgtgttcggcatcggcccggtgcgcgcggccgagatcgcgttgcgccgcgccggcatcgactggggggatctggccgcggtggaactcaacgaggccttcgcggcgcagtcgctggcctgcctggccgactggcccgaactcgatcccgcgatcgtcaacgtcaacggcggcgccatcgcgctcggccacccgctcggcgcctccggtggccgcgtcgtcacccagctgatccatcaactgcgccgcgccggcggccggtggggactggcggccctgtgcatcggcgtcggccagggcctcgcggtggtcgtcgaagcggtgtga

SEQ ID NO: 3286 - protein, 392 aa, Nocardia farcinica
MSGAFVYDGVRTPFGRYGGGLAGTRPDDLAAHVLRALAARTGLDPDTVDEVVLGAANQAGEDNRNVARMAALLADWPTDVPATTVNRLCGSGMDAIIQASRTIETGDAELVVAGGVESMSRAPWVLPKPDKAFPAANATAHSTTLGWRLVNPAMPARWTVSLGESTEILAERYGIGRAEQDEFAARSHQLAARAWDSGFYDDHVVAVPGSELVRDESLRPATTVETLARLKPAFRPDGTVTAGNASPLNDGAAALLLGDESAAARLGREPLARVAGRGAAGVDPDVFGIGPVRAAEIALRRAGIDWGDLAAVELNEAFAAQSLACLADWPELDPAIVNVNGGAIALGHPLGASGGRVVTQLIHQLRRAGGRWGLAALCIGVGQGLAVVVEAV

SEQ ID NO: 3287 - DNA, 1221 bp, Nocardia farcinica
  CDS (1)..(1221): transl_table=11
atgccggaagctgtgatcgtcgccgctgcccgttccccgatcgggcgggcgggcaagggctcgctgaaggagatgcgtcccgacgacctgaccgtgcagatggtgcgggccgcgctggcccaggtgcccgccctggacccggcccaggtcgaggaccttctgctcggctgcgggcagcccgcgggcgaatcgggcttcaacatggcccgcacggtcgcggtgctggccgggctggacacggttcccgggaccaccgtgaaccgctactgttcctccagcttgcagaccacccggatggcgctgcacgccatcaaggcgggcgagggtgaggtgttcatctccgcgggcgtggagacggtgagccggctcggcaagggcagcgccgacgggtggcccgacacccagaatccggtcttcgccgacgccgtcgcccgcacggccgaacgagcgagcgggggcgccgccgactgggccgacccgcgcgcgcagggtctcctgcccgacgtctacatcgcgatgggccagaccgcggagaacgtcgcgcagttcaccggcatcactcgcgccgaacaggacgcgttcggtgtccgttcgcagaacctcgccgagaaggccatcgccgacggcttctgggccaccgacatcaccccggtcacgctgccggacggcaccgtggtcagtgccgacgacggcccgcgcgcgggcgtcaccctcgaggcggtgagccagttgaagccggtgttccggcccgacggcaccgtcaccgcgggcaactgctgcgcgctcaacgacggcgcggcggcgctggtcatcatgtccgacaccaaggccagggatctgggcatcaccccgctcgcgcgcatcgtcagcaccggcgtctccgcgctgtccccggagatcatgggcctgggcccgatcgaggcgtccaagcaggcgctgggccgggccggtctcaccatcgacgacatcgacctggtcgagatcaacgaggcgttcgccgtgcaggtgctcggctcggcccgcgaactcggtatcccggaagacaagctgaacgtcaacggcggcgcgatcgcggtgggccacccgttcggcatgaccggcgcccgcatcaccagcaccctgatcaactcgctgcgcttccacgacaagcagttcgggttggagaccatgtgtgtcggcggcggccagggcatggccatggtgctggagcggctgtcgtga

SEQ ID NO: 3288 - protein, 406 aa, Nocardia farcinica
MPEAVIVAAARSPIGRAGKGSLKEMRPDDLTVQMVRAALAQVPALDPAQVEDLLLGCGQPAGESGFNMARTVAVLAGLDTVPGTTVNRYCSSSLQTTRMALHAIKAGEGEVFISAGVETVSRLGKGSADGWPDTQNPVFADAVARTAERASGGAADWADPRAQGLLPDVYIAMGQTAENVAQFTGITRAEQDAFGVRSQNLAEKAIADGFWATDITPVTLPDGTVVSADDGPRAGVTLEAVSQLKPVFRPDGTVTAGNCCALNDGAAALVIMSDTKARDLGITPLARIVSTGVSALSPEIMGLGPIEASKQALGRAGLTIDDIDLVEINEAFAVQVLGSARELGIPEDKLNVNGGAIAVGHPFGMTGARITSTLINSLRFHDKQFGLETMCVGGGQGMAMVLERLS

SEQ ID NO: 3289 - DNA, 1224 bp, Nocardia farcinica
  CDS (1)..(1224): transl_table=11
atgatgggcgaagtcttcctcgtggacggggcgcgcacgccgcagggccgctacggcggcgcgctggcgagcgtgcgccccgacgacctggccgccacggtggtggccgaggcggtgcgccgggccggggtgcccgcggacgcggtcgacgaggtggtgctgggggcggcgaaccaggcgggcgaggacaaccgcaacgtcgccaggatggcggtcctgctggccggcctgccggacgcggtgccgggctacaccgtcaaccggctctgcgccagcggactgaccgcggtcgccaccgccgccaacgccattcgcggcggtgaggccgacatcgtggtggcgggcggcgtggaatccatgacccgcgccccgtgggtgatggccaagcccggcacgccgtgggcgcgcccgggcgaggtcgccgacaccgcgctgggctggcggttcaccaaccccgccttcaccgccgccgaccgggccgtgcccaccgacgcgggcccgcgggccaggaagatcaccctgtcgatgggggagaccgcggaggaagtggcggcgctggaagggatctcgcgcgccgagtccgacgcgttcgcgctgcgcagccaacagcgggccgccgcggccgtggcggcgggccggttccggcgcgagatcgtcgcggtgcgggccgggaacacgctcgtcgagaccgacgaggtgccgcgcccggacaccaccgccgagaagctggcggccctgcgcccggtgttccggcccgacggcatcgtcaccgcgggctcgtcctcaccgctgtcggacggcgcggccgcgctggtgctcgccggcgccgaggcggtgcggcggcacgggctgacggtccgcgcgcgcatcgtcgcgagcgcgtccgcgggcgttgccccgaacgtgatgggcctcggcccggtgcccgccacccgcaagacactcgaccgggccggctggtcgcaggccgacctgggcgcggtggagctcaacgaggcgttcgccgcgcagtcgctcggtgtgatccggcagctgaagctcgacgaggagatcgtcaacgccgacggtggcgcgatcgcgctgggccatccgctgggctgctccggcgcccgcatcctgctcaccctggtcggccggatggaacgggaaggcgtccggcgcggcctggccaccctgtgcgtcggtgtcgggcagggcgtcgcgatggcgatcgaggcggcatga

SEQ ID NO: 3290 - protein, 407 aa, Nocardia farcinica
MMGEVFLVDGARTPQGRYGGALASVRPDDLAATVVAEAVRRAGVPADAVDEVVLGAANQAGEDNRNVARMAVLLAGLPDAVPGYTVNRLCASGLTAVATAANAIRGGEADIVVAGGVESMTRAPWVMAKPGTPWARPGEVADTALGWRFTNPAFTAADRAVPTDAGPRARKITLSMGETAEEVAALEGISRAESDAFALRSQQRAAAAVAAGRFRREIVAVRAGNTLVETDEVPRPDTTAEKLAALRPVFRPDGIVTAGSSSPLSDGAAALVLAGAEAVRRHGLTVRARIVASASAGVAPNVMGLGPVPATRKTLDRAGWSQADLGAVELNEAFAAQSLGVIRQLKLDEEIVNADGGAIALGHPLGCSGARILLTLVGRMEREGVRRGLATLCVGVGQGVAMAIEAA

SEQ ID NO: 3291 - DNA, 1179 bp, Nocardia farcinica
  CDS (1)..(1179): transl_table=11
atgaccacatccgtcatcgtttccggtgcgcgcaccccggtcggtcgcctgctcggcggactgaaggacttctcgggctcggacctgggcgggttcgccatcaaggcggcgctcgagaagggcggcgtcgctccggagcaggtcgagtacgtgatcatgggccaggtgctcaccgcgggcgcgggccagatcccggccaggcaggccgccgtcgccgcgggcatcccgatggacgtgcccgcgctgacgctgaacaaggtgtgcctgtcgggcatcaacgcgatcgcgctggccgatcagctcatccgcgccggcgagcacgagatcgtcgtggccggcggccaggagtcgatgagccaggcgccgcacctgctggagaagagccgtgagggcttcaagtacggcgacgtgacgctgcgcgaccacatggcctacgacggcctgcacgacatcttcaccgatcaggccatgggcctgctcaccgagcagggcaacgaccggcagccgatcagccgcgaagaccaggacgccttcgccgccgcctcgcaccagcgcgccgcggcggcctggaagaacggtgtcttcgacgacgaggtggtgccggtcgcggtgccgcagcgcaagggcgacccggtgctcgtgaccaccgacgagggcattcgcgccgacaccacggtggagtcgctggccaagctgcgcccggccttccgcgaggacggcaccatcaccgccgggtcggcctcgcagatctccgacggcgccgccgcggtggtcgtgatgagcaaggcgaaggcgcaggcgctcgggctgagctggatcgccgagatcggcgccgccggcgtggtggcgggcccggattcgaccctgcaggaccagccggccaacgccatcgcgaaagcctgtgccaagcagggcatctcgccggccgacctggatctggtcgagatcaacgaggccttcgccgcggtgggtatcgcctccacccgcaagctgggcatcgacccggccaaggtgaacgtcaacggtggcgccatcgccatcgggcatccgctcggcatgtccggtgcgcgcatcctgctgcacctggcgctggagctgaagcggcgcggcggcggcatcggcgcggcggcgctgtgcggcggtggtgggcagggcgacgcgctcatcgtcaaggtctga

SEQ ID NO: 3292 - protein, 392 aa, Nocardia farcinica
MTTSVIVSGARTPVGRLLGGLKDFSGSDLGGFAIKAALEKGGVAPEQVEYVIMGQVLTAGAGQIPARQAAVAAGIPMDVPALTLNKVCLSGINAIALADQLIRAGEHEIVVAGGQESMSQAPHLLEKSREGFKYGDVTLRDHMAYDGLHDIFTDQAMGLLTEQGNDRQPISREDQDAFAAASHQRAAAAWKNGVFDDEVVPVAVPQRKGDPVLVTTDEGIRADTTVESLAKLRPAFREDGTITAGSASQISDGAAAVVVMSKAKAQALGLSWIAEIGAAGVVAGPDSTLQDQPANAIAKACAKQGISPADLDLVEINEAFAAVGIASTRKLGIDPAKVNVNGGAIAIGHPLGMSGARILLHLALELKRRGGGIGAAALCGGGGQGDALIVKV

SEQ ID NO: 3293 - DNA, 1164 bp, Nocardia farcinica
  CDS (1)..(1164): transl_table=11
atgggcacacccgtcatcgtcgaggccgctcgcaccccgatcggcaagcgcggcggctggctcgccggcctgcacgccgccgaactgctcggcctcgctcaacgcggactgctcgaacgcgcccacctggatccggccctggtcgagcaggtcgtcggcggctgcgtcacccaggcaggcgagcagtccaacaacatcaccagggtcgcgtggctgcacgcgggcctgccctggcaggtcggcgccaccaccatcgacgcccagtgcggctcggcccagcaggccaaccacctgatcgccggcctgatcgccgccgacgccatcgacatcggcatggcgtgcggcgtcgaggcgatgagccgggttccgctgggcgccaacgtcggcgagaacgccggcccgcgccgcccggcgtcgtggagcatcgatctgccgaatcagttcgaggccgccgagcggatcgccaagcggcgcggcatcacccgcgacgacgtcgacgagttcggcctgcgctcccagcgcctggccgcccaggcctgggcggagggtcgtttcgagcgcgagatcatccccgtcaccgcccccgccgtcgacaaggagggcaccctcaccggcgagaagctcgacgtcacgcgcgaccaggggctgcgcgagaccaccaaggagggcctggccaagctgaagccggtgctggagggcggcgtgcacaccgcggggagctcctcgcagatctccgacggcgcggccgcggtactgctgatggacgagaaggccgccgagcgaacgggtttgcggccgcgggcgcgtatccgcacccaggtgctggtcggcggcgagccggagttccacctggacggacccgtgcaggcctgctcgcgcctgctggagcgctcgggtatgagcatcggcgacatcgacctgttcgagatcaacgaggccttcgcctcggtggcgctgtcgtgggcgtcggtgcacaagccggacatggatcgggtcaacgtcaacggtggcgcgatcgccctcggccaccccgtcggctccaccggatcgcgcctcatcacaaccgctttgcacgagctggagcggaccggcggcgccacggcgatgatcctgatgtgcgccggtggagccatggccaccggtaccatcatcgaacggatctag

SEQ ID NO: 3294 - protein, 387 aa, Nocardia farcinica
MGTPVIVEAARTPIGKRGGWLAGLHAAELLGLAQRGLLERAHLDPALVEQVVGGCVTQAGEQSNNITRVAWLHAGLPWQVGATTIDAQCGSAQQANHLIAGLIAADAIDIGMACGVEAMSRVPLGANVGENAGPRRPASWSIDLPNQFEAAERIAKRRGITRDDVDEFGLRSQRLAAQAWAEGRFEREIIPVTAPAVDKEGTLTGEKLDVTRDQGLRETTKEGLAKLKPVLEGGVHTAGSSSQISDGAAAVLLMDEKAAERTGLRPRARIRTQVLVGGEPEFHLDGPVQACSRLLERSGMSIGDIDLFEINEAFASVALSWASVHKPDMDRVNVNGGAIALGHPVGSTGSRLITTALHELERTGGATAMILMCAGGAMATGTIIERI

SEQ ID NO: 3295 - DNA, 1191 bp, Nocardia farcinica
  CDS (1)..(1191): transl_table=11
atgtctgcaccttcggcccgccgcccctacgccccgttgcgtgacgcctacgtcgtcgacgcggtgcgcacccccgtcggcaagcgcggcggtgccctggccggcgtgcacccggccgacctcggcgcggccgcgctgcgcggcctgttcgatcgcaactccatcgacccgatcaacgtcgacgacgtgatcgtcggctgcgtcgacaacgtcggcccgcaggccggcaacatcggccgcaccatgtggctggccgcgggctacccggaggaggtgcccggagtcaccgtcgaccgccagtgcggctccagccagcaggccatcaacttcggcgcgcaagccatcatgagcggcaccgccgaagtgatcgtcgcgggcggcgtgcagaacatgagcgccatcccgatctcggcggccatgctcgcgggcaaggaatacggcttcgactccccgttcgtcggcgcccagggctgggaccaccgctacggcaccgaagaggtctcgcagttccgcggcgcccagctgatcgccgagaagtggaacatcagccgccgcgacatggaggaatgggcgctgcgcagccacgaacgcgcccgcgacgccatcaagaacggccgcttcgacaacgagatcgtccccgtcggcgacttctggatcgaccagggcccgcgcgagaccagcctggagaagatggcctccctgcccccgctcgccgagggcagcccgctcaccgcggcggtggccagccagatctccgacggcgccagcgcgaccctgctcgcctcggaatgggcggtgcaggagtacgggctgaagccccgcgcccgcatccaccacgtcagcgcgcgtggtgcggacccgatcttcatgctcaccgcgccgatcccggcgaccaagtgggcattggaaaagaccgggctgaccatcgacgacatcgacgtcgtggagatcaacgaggcgttcgcgccggtggtgctggcctggatcaaggagaccggggcggatccggagaaggtgaacgtcaacggcggcgcgatcgccctgggccacccgctcggcgcgaccggcgcgaagctgttcgccaccctgctcaacgagctcgagcgtcgcaacgggcgttacgggctgctcaccatctgcgagggcggcggcacggcgaatgcgaccatcatcgagcgcctggatcgctga

SEQ ID NO: 3296 - protein, 396 aa, Nocardia farcinica
MSAPSARRPYAPLRDAYVVDAVRTPVGKRGGALAGVHPADLGAAALRGLFDRNSIDPINVDDVIVGCVDNVGPQAGNIGRTMWLAAGYPEEVPGVTVDRQCGSSQQAINFGAQAIMSGTAEVIVAGGVQNMSAIPISAAMLAGKEYGFDSPFVGAQGWDHRYGTEEVSQFRGAQLIAEKWNISRRDMEEWALRSHERARDAIKNGRFDNEIVPVGDFWIDQGPRETSLEKMASLPPLAEGSPLTAAVASQISDGASATLLASEWAVQEYGLKPRARIHHVSARGADPIFMLTAPIPATKWALEKTGLTIDDIDVVEINEAFAPVVLAWIKETGADPEKVNVNGGAIALGHPLGATGAKLFATLLNELERRNGRYGLLTICEGGGTANATIIERLDR

SEQ ID NO: 3297 - DNA, 1179 bp, Yarrowia lipolytica
  CDS (1)..(1179)
atggagcccgtctacattgtttctactgctcgaacccccattggttcttttctgagctcgctgagcggccagacctacgtggatctgggagcccatgccgtgaaggccgcactcgccaagaccgacatcaagcccgaccaggtcgacgagatcatcttcggtaacgttctctccgccggcgtcggacaggcccctgctcgacaggttgccctcaaggctggtctccctgacaccattgtcgctaccaccgtcaacaaggtctgtgcctccggtatgaaggccatcatccagggtgcccaggccatcatgaccggatctgccgacattgtcattgctggcggtgccgagtccatgtccaacgtgccccactacgtgcaggcccgtgtcgctaacaagtacggcaacggctctctggtcgacggtatccagcgagacggtctgtttgacgcctacgatggccaggccatgggtgtggccgctgaggtctgtgctgacacccactccatctcccgagaggagcaggacgagtttgccattggctcttacaagaagacccaggctgcctatgccgccggcaagtttaaggacgagattgcccccattgagctgcccggcttccgaggcaagcctggtgtcgttgtctccgaggacgaggagtacaagaacctcaacgaggacaagctcaagtctgcccgaactgtttttaagaaggacggtaccgtgactgcccccaacgcctcccctatcaacgacggtggagctgccgtcattctggcctctgctgccaaggtcaaggagcttggtcttaagcccctgctcaagattgtctcttggggcgaggctgccaacgagcccgtcaagttcaccactgctcccgctctggccgtccccgttgccctcaagcgagctggtctcgaggccaaggacattgacttttacgagttcaacgaggccttctctgttgttggtatcgccaacaccaagctgcttggtctggactccagcaaggtcaacgtctacggaggtgctgttgccattggtcaccctctgggctgctctggtgcccgagtcattgtcactctcaactctgttctgcaccaggaaggcggcaagtacggatgtgctgccatctgcaacggtggtggtggcgcttcctctatcattgttgagaagtgttag

SEQ ID NO: 3298 - protein, 392 aa, Yarrowia lipolytica
MEPVYIVSTARTPIGSFLSSLSGQTYVDLGAHAVKAALAKTDIKPDQVDEIIFGNVLSAGVGQAPARQVALKAGLPDTIVATTVNKVCASGMKAIIQGAQAIMTGSADIVIAGGAESMSNVPHYVQARVANKYGNGSLVDGIQRDGLFDAYDGQAMGVAAEVCADTHSISREEQDEFAIGSYKKTQAAYAAGKFKDEIAPIELPGFRGKPGVVVSEDEEYKNLNEDKLKSARTVFKKDGTVTAPNASPINDGGAAVILASAAKVKELGLKPLLKIVSWGEAANEPVKFTTAPALAVPVALKRAGLEAKDIDFYEFNEAFSVVGIANTKLLGLDSSKVNVYGGAVAIGHPLGCSGARVIVTLNSVLHQEGGKYGCAAICNGGGGASSIIVEKC

SEQ ID NO: 3299 - DNA, 1179 bp, Erwinia carotovora subsp. atroseptica
  CDS (1)..(1179): transl_table=11
atgaacgactccattgttattgttaatgccaagcgcaccgcgattggtaaattcgcaggcagtctggccaacacatcggctatcgacatggcatctgccaccatccgtgactgcctgtcgacgctgccggacacgctggcgattgatgaagtgattctcggcaacgtgctgcaagccggtctggggcaaaaccccgcgcatcaggccagcaaggctgctgggctgccttttgaaacaccctcgctcaccatcagtaaggtgtgtggttccggcctgaaggccgttgtgatgggcgcacagtctattctgtccggcgataatcaggtctgcgtgaccggcgggatggaaaacatgagcgccgcgccttacctgctggaaaaagcgcgccacggttaccgcatgggagacggcaagctcgttgacatcatgattaaggatggtctgtggtgtgcgtttaacgattaccacatgggtaccacggcggaaaatatcgccgagcgctaccagctcacgcgagaagaacaggatcaggtggcgctggcatcacagcagaaagccgtcgccgcgattgaggctggccgcttcaaagccgaaataaccccgctgtcactgcgtagcaaaaaagagacgcggattttcgatcgggatgaattccctcgcgccgacaccacgctggcatcgctggccgcgttacgtccggcgttttccgctaacggcaccgtcaccgcaggcaatgcgtccggcattaacgatgccgccgcgacgctggtgttaatgcgtgaatccgaagcgaaaaaacagggtattaccccgctggcgcggatccgcagttgggcgtctgctggagtaccgagtgaagtgatggggctggggccgattccggcgacgcagaaagcactgctcaaggctgggctgacgatcggtgatattgacctgattgaagcaaatgaagcttttgccgcacagtttctagcggtacagcgcgatcttcatctcgatccagagaaagtgaacgtcaacggcggtgcgattgcgttgggccaccctatcggcgcgagcggtgcgcgtattctcgtcacgctggtacatgcgctgcacagctataacaaaacgctgggattggcgacgctgtgcatcggcggtgggcaaggtatcgcgatgatcgtcgaacgcgtttaa

SEQ ID NO: 3300 - protein, 392 aa, Erwinia carotovora subsp. atroseptica
MNDSIVIVNAKRTAIGKFAGSLANTSAIDMASATIRDCLSTLPDTLAIDEVILGNVLQAGLGQNPAHQASKAAGLPFETPSLTISKVCGSGLKAVVMGAQSILSGDNQVCVTGGMENMSAAPYLLEKARHGYRMGDGKLVDIMIKDGLWCAFNDYHMGTTAENIAERYQLTREEQDQVALASQQKAVAAIEAGRFKAEITPLSLRSKKETRIFDRDEFPRADTTLASLAALRPAFSANGTVTAGNASGINDAAATLVLMRESEAKKQGITPLARIRSWASAGVPSEVMGLGPIPATQKALLKAGLTIGDIDLIEANEAFAAQFLAVQRDLHLDPEKVNVNGGAIALGHPIGASGARILVTLVHALHSYNKTLGLATLCIGGGQGIAMIVERV

SEQ ID NO: 3301 - DNA, 1200 bp, Streptomyces sp. (strain CL190)
  CDS (1)..(1200): transl_table=11
atggcatctgcaacgaacagttcggtgatcgtcgccggggcgcgtacgcccatgggacgactgctgggctctctcaagtccttctccggagccgacctcggcggcttcgcgatcaaggccgccctcgaccgtgcggggatcggtggcgaccaggtgcagtacgtgatcatgggccaggtgctccaggccggggcggggcagatcccggcccgccaggcggccgtcaaggccggcattcccatgaacgtcccggcgctcaccatcaacaaggtgtgcctgtccggcctcgacgccatcgcgctggccgaccagctcatccgcgcgggcgagttcgacatcgtggtcgcgggcggccaggagtccatgaccaacgccccccacctgctgcccaagtcccgagagggctacaagtacggggcgatcgagatgctcgacgccatggcgtacgacggtctgaccgacccctgggagaacatccccatgggccagtccaccgagaagcacaacacccgcctcggcatcggccgcgaggtgcaggacgagatcgccgccctgtcccaccagcgggccgccgccgcgcagaagaacggcctgttcgaggccgagatcacgcccatcgagatcccgcagcgcaagggcgagcccgttgtcttcagcaaggacgagggcatccgcgccgagacgaccgccgagtcgctcggcaagctgcgccccgccttcaccaaggacggcaccatcaccgccggcaccgcctcgcagatctccgacggcgccgccgcggtggtcgtgatgagcaaggccaaggcgctggagctgggcctggactggatcgccgagatcggcgcccacggcaatgtggcgggcccggacaactctttgcagtcgcagccgtccaacgcgatcctgcacgccctgaagaaggagggcctggaggtcgaggacctcgacctgatcgagatcaacgaggcgttcgccgccgtcgcccaccagtcaatgaaggacctgggcgtgtccacggaaaaggtgaacgtcaacggtggcgcgatcgcgctgggccaccccatcggcatgtccggcgcccgcctggtgctgcacctggcgctggagctgaagcggcgcggcggcggcgtcggcgcggccgcgctgtgcggcggcggcggccagggcgacgcgctgatcgtgcgggtccccaaggcctga

SEQ ID NO: 3302 - protein, 399 aa, Streptomyces sp. (strain CL190)
MASATNSSVIVAGARTPMGRLLGSLKSFSGADLGGFAIKAALDRAGIGGDQVQYVIMGQVLQAGAGQIPARQAAVKAGIPMNVPALTINKVCLSGLDAIALADQLIRAGEFDIVVAGGQESMTNAPHLLPKSREGYKYGAIEMLDAMAYDGLTDPWENIPMGQSTEKHNTRLGIGREVQDEIAALSHQRAAAAQKNGLFEAEITPIEIPQRKGEPVVFSKDEGIRAETTAESLGKLRPAFTKDGTITAGTASQISDGAAAVVVMSKAKALELGLDWIAEIGAHGNVAGPDNSLQSQPSNAILHALKKEGLEVEDLDLIEINEAFAAVAHQSMKDLGVSTEKVNVNGGAIALGHPIGMSGARLVLHLALELKRRGGGVGAAALCGGGGQGDALIVRVPKA

SEQ ID NO: 3303 - DNA, 1182 bp, Bacillus thuringiensis subsp. konkukian
  CDS (1)..(1182): transl_table=11
atgagtaaaacagttattttaagtgctgcaagaacaccggttggaaaatttggaggatctttaaaagatgtaaaagcaacagaacttggaggaatcgcaattaaagcagcgcttgaaagagcgaatgtttcagctagtgatgttgaggaagttatattcggaacggttattcaaggtgggcagggacaaattccatcgcgccaagcggcacgggctgctggaatcccttgggaagtgcagacggaaacagtcaataaagtttgtgcatcagggcttcgtgcggttactttagcggatcaaattattcgtactggcgaccaatcactaattgtagctggcggtatggagtcgatgagtaacagtccttacattttacgaggagcaagatggggatacagaatgggtaacaacgaagtcattgatttaaacgttgctgacggtttaacatgtgcattttcaggtatacacatgggtgtttatggcggagaagttgcgaaggaggatggaatttctcgcgaagcgcaagatgaatgggcatatcgtagccatcagcgtgcggtttcagcacataaagaaggacgttttgaagaggaaatcgtgccagtaacgattccacaaagaaaaggggatcctattgtcgttgcaaaggatgaggcgccgcgtgaagatacaacaattgaaaagctagcaaaattaaaacctgtatttgataagacagcgacggtaacagctggtaatgcaccagggctaaacgatggtggcgctgcacttgtattaatgagcgaagagagagcgaagcaagaaggaagaaagccgttagcgacaattttggcacatacagcaattgcagtggagtctaaagatttcccgagaacgccaggttatgcaattaacgcattgcttgaaaaaacaggcaagacaattgaagacattgatttattcgagattaatgaagcatttgcagcggtagcaattgcaagtacagaaatcgcaggaattgacccagaaaaattgaatgtaaatggcggcgcagtggcgatgggacatccgattggagcaagcggagcgcgcattatcgttacattaatccatgcacttaagcaacgcggcggtggaattggaattgcttcgatttgtagtggtggcggtcaaggcgatgcagtgatgattgaagttcactaa

SEQ ID NO: 3304 - protein, 393 aa, Bacillus thuringiensis subsp. konkukian
MSKTVILSAARTPVGKFGGSLKDVKATELGGIAIKAALERANVSASDVEEVIFGTVIQGGQGQIPSRQAARAAGIPWEVQTETVNKVCASGLRAVTLADQIIRTGDQSLIVAGGMESMSNSPYILRGARWGYRMGNNEVIDLNVADGLTCAFSGIHMGVYGGEVAKEDGISREAQDEWAYRSHQRAVSAHKEGRFEEEIVPVTIPQRKGDPIVVAKDEAPREDTTIEKLAKLKPVFDKTATVTAGNAPGLNDGGAALVLMSEERAKQEGRKPLATILAHTAIAVESKDFPRTPGYAINALLEKTGKTIEDIDLFEINEAFAAVAIASTEIAGIDPEKLNVNGGAVAMGHPIGASGARIIVTLIHALKQRGGGIGIASICSGGGQGDAVMIEVH

SEQ ID NO: 3305 - DNA, 1176 bp, Bacillus thuringiensis subsp. konkukian
  CDS (1)..(1176): transl_table=11
atgcataatgttgttattacagctgcagttcgttcgccaattggaacttttgggggagcgctaaaaaatgtaacgccagtagaattagctgttcctgtacttcaggaagctgtaaaacgaggcggggtagaaccacacgaagtggatgaagtgattttaggtcattgtattcaaagaactgatgaagcaaatacggcgagaacggctgcattagcggcaggatttcctgacacagttacgggctatacaatccaacgccaatgttcttcaggtatgcaagcaattatgtcggctgcaatgcaaattcaattaggtgtaagtgaagttgttgttgcaggtggagtagaagcaatgagttcaagcccctatgcattgaaacaacaccgctggggacaacgcctacaacacggagaaattcgtgatacggtgtgggaagtgttagaagatccgattcatcatattatgatgggggaaacagcggaaaatttagttgaacaatatgaaattacaagagaggaacaagatgaagttgcgcttcgcagtcatacattggcactgaaggcaatcgagtctggatactttgacgatcaaattgttcctattacaataaaagaacgtagaaaagaagtagtattttcgaaggatgaacatccacgtgctgatattacagcagaaaaattagctgggttaaaaccagctttccgtaaagatggatctgtaacggcagggaatgcatctggcctgaatgacggaagcgcggttctagtattaatgagcgaagaaaaagcgaaagaaaaaggcttacaaccgttagctagaattgttggatattcagtagctggagtagatccaaaaattatggggattggaccagcaccagcaattcgtaaaggattagaaaaagtagattggtcattagaagatgcagatttacttgaaattaatgaagctttcgctgcacaatatttagctgtagagaaagaattaggtttagatcgtgaaaaagtgaatgtaaacggtagtggtgtaggacttggacatccaatcggttgtacaggagctcgtatcactgtaagtttaattcatgaattgaaaagacgcgggttagaaaaaggaattgcctctctatgcgtcggcggcggtattggggtagcattatttatagaagcactataa

SEQ ID NO: 3306 - protein, 391 aa, Bacillus thuringiensis subsp. konkukian
MHNVVITAAVRSPIGTFGGALKNVTPVELAVPVLQEAVKRGGVEPHEVDEVILGHCIQRTDEANTARTAALAAGFPDTVTGYTIQRQCSSGMQAIMSAAMQIQLGVSEVVVAGGVEAMSSSPYALKQHRWGQRLQHGEIRDTVWEVLEDPIHHIMMGETAENLVEQYEITREEQDEVALRSHTLALKAIESGYFDDQIVPITIKERRKEVVFSKDEHPRADITAEKLAGLKPAFRKDGSVTAGNASGLNDGSAVLVLMSEEKAKEKGLQPLARIVGYSVAGVDPKIMGIGPAPAIRKGLEKVDWSLEDADLLEINEAFAAQYLAVEKELGLDREKVNVNGSGVGLGHPIGCTGARITVSLIHELKRRGLEKGIASLCVGGGIGVALFIEAL

SEQ ID NO: 3307 - DNA, 1092 bp, Bacillus thuringiensis subsp. konkukian
  CDS (1)..(1092): transl_table=11
atgaatagagcagttattgtagaagcgaaaaggacacctattggtaagaagaatgggatgttaaaagactatgaagttcagcaattagcagcaccgcttcttacatttttaagtaaaggaatggagagagcgatagacgatgtcatattagggaatgttgttgggccaggagggaatgttgcgagattatctgctttagaagcagggcttggtcatcatattccgggtgtaacgattgaccgacaatgtggtgccggattggaagcgattcgcaccgcatgtcatttcattcaaggcgggggcggtaagtgttatatcgccggaggagtagagagtacaagtacgtcaccttttcaaaatagagcacgattttcaccagaaacaataggcgatcctgatatgggagtagcggctgaatatgttgcagaaagttataacatcacgagagaaatgcaagacgagtatgcatgcctcagttataaacgaacactgcaagcattagcgaaaggatatatacatgaggaaatattgtcttttaatggattgctagatgaatccattaagccagaaatgaattatgaacgaatcattaaaagaacaaaacctgcatttttacacaatggtacagtaacggcaggtaattcgtgcggtgtaaatgatggagcatgtgccgttcttgtaatggaagagggacaagcccgaaaattaggatacaagcctgtacttcgtttcgttcgtagtgttgtagttggagtggatccaaatcttccggggactggtccgatatttgcggtgaacacattattagacgaaatgaatgtgaaagtagaggacatcgattattttgaaataaatgaagcattcgcctcaaaagttgtagcttgtgcaaaggagttacaaattccgtatgaaaaattaaatgtaaatggtggggcaattgcgctcggtcatccgtacggtgcatctggggctatgcttgtaacgcgcttgttttatcaggcgaaacgagagcgtatgaaatacggaatcgcgacgttaggaatagggggcgggataggtcttgcactattatttgagaaagtagaagactag

SEQ ID NO: 3308 - protein, 363 aa, Bacillus thuringiensis subsp. konkukian
MNRAVIVEAKRTPIGKKNGMLKDYEVQQLAAPLLTFLSKGMERAIDDVILGNVVGPGGNVARLSALEAGLGHHIPGVTIDRQCGAGLEAIRTACHFIQGGGGKCYIAGGVESTSTSPFQNRARFSPETIGDPDMGVAAEYVAESYNITREMQDEYACLSYKRTLQALAKGYIHEEILSFNGLLDESIKPEMNYERIIKRTKPAFLHNGTVTAGNSCGVNDGACAVLVMEEGQARKLGYKPVLRFVRSVVVGVDPNLPGTGPIFAVNTLLDEMNVKVEDIDYFEINEAFASKVVACAKELQIPYEKLNVNGGAIALGHPYGASGAMLVTRLFYQAKRERMKYGIATLGIGGGIGLALLFEKVED

SEQ ID NO: 3309 - DNA, 1350 bp, Helianthus annuus
  CDS (1)..(1350)
atggaaagagcaatcgagaggcaaagagtcctgttagagcaccttcgtccctcttctacttcttcatccttggaaaatctctccgtgtcggtctgtgcagctggtgatagtgctgcttaccaaaggaactctgtttttggggatgatgtagtcattgtagctgcctaccggtctccactctgcaaagcaaagagaggtgggcttaaggatacatatcctgatgatatccttgcacccgttttgaaggcattaatagagaaaacaaatattaatccagctgaagttggagacattgttgtcgggtcagttttgggagcaggctcccaaagagcaagtgagtgcaggatggctgctttctatgctggatttcctgaaacggtgccagttaggaccgtcaacagacagtgttcctcaggtcttcaggcagttgctgatgtagctgcagctattaaagctggattttatgatattggtattggtgctgggttggaatctatgaccgccaatcctatggcttgggaaggatcagtgaaccccaaagtgaaaactatggcacaggctcaagattgtctacttccgatgggcattacatcggaaaatgttgcgcaaaagttcagcataacaaggcaggaacaagatcaggctgcagttgggtcccataggaaggctgctgctgcaactgctgctggtagattcaaggatgaaatcattccaatcaaaactaagattgttgacccgaaaactggagacgaaaagcctgttaccatttctgttgacgatgggatccgcccaggaacaagtttggcagatctcgcaaaactaaaacccgtatttaggaaagacgggtcaaccactgctggaacttccagccaagtgagtgacggtgctggagctgttcttttgatgaagagaagtatcgctctgcagaagggattaccgattctcggtgtattcaggacttttgctgctgttggtgtaccgccatcaataatgggtatcggccctgctgttgcaattccagctgcagttaaggctgctgggcttcaaattgacgatattgaccttttcgagatcaatgaggcatttgcatcacagtttgtatattgccaaaaaaagctagaaatcgacccacaaaagatcaatgtcaacggaggtgcaatggctattggacaccctttgggtgcaacaggggcgcgttgtgttgctactctactgcatgagatgaaacgtcgtggcagagactgccgatttggtgttgtgtcaatgtgcatcggcacgggtatgggtgcggcagctgtttttgagaggggtgacgcgtgtgatgagctgtgcaatgctaaagctaaatag

SEQ ID NO: 3310 - protein, 449 aa, Helianthus annuus
MERAIERQRVLLEHLRPSSTSSSLENLSVSVCAAGDSAAYQRNSVFGDDVVIVAAYRSPLCKAKRGGLKDTYPDDILAPVLKALIEKTNINPAEVGDIVVGSVLGAGSQRASECRMAAFYAGFPETVPVRTVNRQCSSGLQAVADVAAAIKAGFYDIGIGAGLESMTANPMAWEGSVNPKVKTMAQAQDCLLPMGITSENVAQKFSITRQEQDQAAVGSHRKAAAATAAGRFKDEIIPIKTKIVDPKTGDEKPVTISVDDGIRPGTSLADLAKLKPVFRKDGSTTAGTSSQVSDGAGAVLLMKRSIALQKGLPILGVFRTFAAVGVPPSIMGIGPAVAIPAAVKAAGLQIDDIDLFEINEAFASQFVYCQKKLEIDPQKINVNGGAMAIGHPLGATGARCVATLLHEMKRRGRDCRFGVVSMCIGTGMGAAAVFERGDACDELCNAKAK

SEQ ID NO: 3311 - DNA, 1293 bp, Neurospora crassa
  CDS (1)..(1293)
atggttcttagccacgccaggacagccgctggctcggcttcgcgcacttcccgtgtcgcttgcgctcgtcttttttccacccagtctgctctccgccagcagattcaggatgcctacattctcagtggtgtgaggacaccaacggccaagttcaatggctcttacaccaccgttcctgctcccaagctcggtgccgttgccatcaaggaggccgtcaagaggtcgggtatccccgttgagaagatcaccgatgtctacatgggaaacgtcctccaggggtctgttggccaggcacctgcacgccaggccgctatctttgctggcctttcccccaacgtagaggccattaccatcaacaaggtgtgcgcttccggtctcaaagctgttgtgttcgcggcgcaaaacatccagcttggcctagcggaggcccaggtcgctggtggtatggagaacatgacaaggacgccgtactacgttccacgcgctagcggcatgccccccttcggtcacatcaagatggaggatggcattatcaaggatgggctgaccgacgtctacaacgagttccacatgggcaactgcgccgagaacactgccaagaagttccaaatctctcgtgaacagcaggacgagtatgccatccagtcgtacaagcgcgcccaggaggcttgggcttccgggaagtttgctgaggaagttgtcccggtcaccgttccgggcaagaagggtgacaagatcatcgaggtggatgaaggctacaacgacatcaagctggacaaagttgccaccctcaagcctgccttcgtccgcgatggcaccggtaccgtgacggccgccaacgcctccaccctcaacgatggcgccagtgctttggttctcggcaataagtcgctcgcgcaagagttcggcaagggctcaagggtccttgcccgtatcgtcagttcagctgatgccgctatggatcccatcgacttccctattgcgccctctaaagcggttgagcttgcccttaagcgtgccggcattagcaaggaccaggttgccatttgggagtttaacgaggccttcgccgcggtcatcaaggccaacgagaagattctgggtctcgaaggcgctgtggtgaaccctcttggtggcgccattgcccttggccaccccttgggtagctctggatcccgcattctcgttaccttgcttcatcaactccagcctggccagtacggtgtagctgctatttgcaatggtggaggtgcggccactgcgatggtcgtccagaggatcgagtcggtataa

SEQ ID NO: 3312 - protein, 430 aa, Neurospora crassa
MVLSHARTAAGSASRTSRVACARLFSTQSALRQQIQDAYILSGVRTPTAKFNGSYTTVPAPKLGAVAIKEAVKRSGIPVEKITDVYMGNVLQGSVGQAPARQAAIFAGLSPNVEAITINKVCASGLKAVVFAAQNIQLGLAEAQVAGGMENMTRTPYYVPRASGMPPFGHIKMEDGIIKDGLTDVYNEFHMGNCAENTAKKFQISREQQDEYAIQSYKRAQEAWASGKFAEEVVPVTVPGKKGDKIIEVDEGYNDIKLDKVATLKPAFVRDGTGTVTAANASTLNDGASALVLGNKSLAQEFGKGSRVLARIVSSADAAMDPIDFPIAPSKAVELALKRAGISKDQVAIWEFNEAFAAVIKANEKILGLEGAVVNPLGGAIALGHPLGSSGSRILVTLLHQLQPGQYGVAAICNGGGAATAMVVQRIESV

SEQ ID NO: 3313 - DNA, 1182 bp, Bacillus anthracis
  CDS (1)..(1182): transl_table=11
atgagtaaaacagttattttaagtgctgcaagaacaccggtggggaaatttggaggatctttaaaagatgtaaaagcaacagaacttggaggaatcgcaattaaagcagcgcttgaaagagcgaatgtttcagctagtgatgttgaggaagttatattcggaacggttattcaaggtggacagggacaaattccatcacgccaagctgcaagggctgctggaatcccttgggaagtgcagacggaaactgtcaataaagtttgtgcatcagggcttcgtgcggtgactttagcggatcaaattattcgtactggcgatcaatcactaattgtagctggtggtatggagtcgatgagtaacagtccttacattttacgaggagcaagatggggatacagaatgggtaacaacgaagtcattgatttaaacgttgctgacggtttaacatgcgcattttcaggtatacacatgggtgtttatggcggagaagttgcgaaggaggatggaatttctcgcgaagcgcaagatgaatgggcatatcgtagccatcagcgtgcagtttcagcgcataaagaaggacgttttgaagaggaaatcgtgccagtaacgattccacaaagaaaaggcgatcctattgtcgttgcaaaggatgaggcgccgcgtgaagatacaacaattgaaaaactagcaaaattaaaacctgtatttgataagacagcgacggtgacagctggtaatgcaccagggctaaacgatggtggcgctgcacttgtattaatgagcgaagacagagcgaagcaagaaggaagaaagccgttagcgacaattttggcacatacagcaattgcagtggagtctaaagatttcccgaggacgccaggttatgcaattaacgcattgcttgaaaaaacaggaaagaaaattgaagacatcgatttatttgagattaatgaagcatttgcagcggtagcaattgcaagtacagaaatcgcaggaattgacccagaaaaattgaatgtaaatggcggcgcagtggcgatgggacatccgattggagcaagcggagcgcgcattatcgttacactaatccatgcacttaagcaacgcggcggtggaattggaattgcttcgatttgtagtggtggcggtcaaggcgatgcagtgatgattgaagttcactaa

SEQ ID NO: 3314 - protein, 393 aa, Bacillus anthracis
MSKTVILSAARTPVGKFGGSLKDVKATELGGIAIKAALERANVSASDVEEVIFGTVIQGGQGQIPSRQAARAAGIPWEVQTETVNKVCASGLRAVTLADQIIRTGDQSLIVAGGMESMSNSPYILRGARWGYRMGNNEVIDLNVADGLTCAFSGIHMGVYGGEVAKEDGISREAQDEWAYRSHQRAVSAHKEGRFEEEIVPVTIPQRKGDPIVVAKDEAPREDTTIEKLAKLKPVFDKTATVTAGNAPGLNDGGAALVLMSEDRAKQEGRKPLATILAHTAIAVESKDFPRTPGYAINALLEKTGKKIEDIDLFEINEAFAAVAIASTEIAGIDPEKLNVNGGAVAMGHPIGASGARIIVTLIHALKQRGGGIGIASICSGGGQGDAVMIEVH

SEQ ID NO: 3315 - DNA, 1092 bp, Bacillus anthracis
  CDS (1)..(1092): transl_table=11
atgaatagagcagttattgtagaagcgaaaaggacacctattggtaagaagaatgggatgttaaaagactatgaagttcagcaattagcagcaccgcttcttacatttttaagtaaaggaatggagagagcgatagacgatgtcatattagggaatgttgttgggccaggagggaatgttgcgagattatctgctttagaagcagggcttggtcatcatattccgggtgtaacgattgaccgacaatgtggtgccggattggaagcgattcgcaccgcatgtcatttcattcaaggcgggggcggtaagtgttatatcgccggaggagtagagagtacaagtacgtcaccttttcaaaatagggcgcgattttcaccagaaacaattggcgatcctaatatgggagtagcggctgagtatgttgcagaaagttataacatcacgagagaaatgcaagacgagtatgcatgcctcagttataaacgaacactgcaagcattagcaaaaggatatatacatgaggaaatattgtcttttaatggattgctagatgaatccattaagccagaaatgaattatgaacgaatcattaaaagaacaaaacctgcatttttacacaatggtacagtaacggcaggtaattcgtgcggtgtaaatgatggagcatgtgccgttcttgtaatggaagagggacaagcccgaaaattaggatacaagcctgtacttcgtttcgttcgtagtgctgtagttggagtggatcctaaccttccggggactggtccgatatttgcggtgaacaaattattaaacgaaaggaatatgaaagtagaggacatcgattattttgaaataaatgaagcatttgcctcaaaagttgtagcttgtgcaaaggagttacaaattcctttcggaaaattaaatgtaaatggtggggcaattgcgcttggtcatccgtacggtgcatctggggctatgcttgtaacgcgcttgttttatcaggcgaaacgagagcgtatgaaatatggaatcgcaacgttaggaatagggggcggggtaggtcttgcactattatttgagaaagtagaagactag

SEQ ID NO: 3316 - protein, 363 aa, Bacillus anthracis
MNRAVIVEAKRTPIGKKNGMLKDYEVQQLAAPLLTFLSKGMERAIDDVILGNVVGPGGNVARLSALEAGLGHHIPGVTIDRQCGAGLEAIRTACHFIQGGGGKCYIAGGVESTSTSPFQNRARFSPETIGDPNMGVAAEYVAESYNITREMQDEYACLSYKRTLQALAKGYIHEEILSFNGLLDESIKPEMNYERIIKRTKPAFLHNGTVTAGNSCGVNDGACAVLVMEEGQARKLGYKPVLRFVRSAVVGVDPNLPGTGPIFAVNKLLNERNMKVEDIDYFEINEAFASKVVACAKELQIPFGKLNVNGGAIALGHPYGASGAMLVTRLFYQAKRERMKYGIATLGIGGGVGLALLFEKVED

SEQ ID NO: 3317 - DNA, 1170 bp, Streptomyces avermitilis
  CDS (1)..(1170): transl_table=11
atgcgtgatgccgtcatcgtcgaagccgtacgcacccccatcggcaagggcaagccgaacggctcccttgcccacgtccaccccgtcgaactgctcgcgcacacgctgcgcaccctcgtcgagcgctccggagtcgacccggcactgatcgacgacgtcatcggcggcaccgtcgaccaggtcggcgagcaggccatgaacaccacccgctacgccgtcctgtcggcgggcttcccggagacggtgcccgcgaccacggtggaccgccagtgcggctcctcgcagcaggccgtgcacttcgcggcgcagggcgtcatgtccggggcgtacgacctggtggtcgcctgcggtgtcgagtccatgagccgcgtcccgatgtggtcgaacgtgccggccggccaggaccccttcgggcccggagtcgcccggcgctatcccgagggcctggtcccgcagggcatcagcgccgaactgatcgccgccaagtggtccatcacccgggaccagatggacgccttcgcggtgtcctcgcaccagaaggcggccgcggcctgggcgggcggtctgttcgacgccgaggtcacgccgctggagggggtgaggcgcgacgagtgcgtacggcccgccagcaccaccgagatcctcgccggactcaaacccgcctactacgacccgaacttcgccgagcgcttcccgggcatcgagtggaacgtcaccgcgggcaacgcgagccccgtcaacgacggcgcgtcggccgtgctcatcacctcgagcgagaccgcggcccgcctcgggctgcgcccgatcgcccgtctgcacagcttcgccgtcaccggctccgacccgctgctgatgctcacgggagtcgtcccggccaccgagaaggtgctccgcaaggcgggactcacgatcgacgacatcgacctcttcgaggtcaacgaggccttctccagtgtcgtcctggcctggcggcaggagacgggagccgacctgagccgggtgaacgtccacggtggcgcgatcgcgatcgggcacccgctgggtgcgagcggtacgcgtctgacgaccacgctggtgcacgccatgcgcgcgcgtggagcccgctacgccctccagacgatgtgcgaggcgggcgggctcgcgaacgcgatggtgctggagaccgtctga

SEQ ID NO: 3318 - protein, 389 aa, Streptomyces avermitilis
MRDAVIVEAVRTPIGKGKPNGSLAHVHPVELLAHTLRTLVERSGVDPALIDDVIGGTVDQVGEQAMNTTRYAVLSAGFPETVPATTVDRQCGSSQQAVHFAAQGVMSGAYDLVVACGVESMSRVPMWSNVPAGQDPFGPGVARRYPEGLVPQGISAELIAAKWSITRDQMDAFAVSSHQKAAAAWAGGLFDAEVTPLEGVRRDECVRPASTTEILAGLKPAYYDPNFAERFPGIEWNVTAGNASPVNDGASAVLITSSETAARLGLRPIARLHSFAVTGSDPLLMLTGVVPATEKVLRKAGLTIDDIDLFEVNEAFSSVVLAWRQETGADLSRVNVHGGAIAIGHPLGASGTRLTTTLVHAMRARGARYALQTMCEAGGLANAMVLETV

SEQ ID NO: 3319 - DNA, 1158 bp, Streptomyces avermitilis
  CDS (1)..(1158): transl_table=11
atggccgaggcctacatcgtcgaagcggtccgtacgcccgtcgggcggcgccggggagggctggccggggtgcacccggcggacctgggcgcgcacgcgctgacggcgctggtcgcacgctccggcatcgatcccgccgccgtcgaggacgtggtcttcggctgcctggacacggtcggaccgcaggccggcgacatcgcccgcacgtgctggctggccgccggactgcccgaggaggtgccgggcgtgacggtcgaccggcagtgcggatcctcccagcaggccgtgcacttcgcggcacaggccgtgctgtccggcacgcaggacctggtggtggcgggcggggtgcagaacatgtcgcagatacccatcgccttcgcctcccggcaggccgccgagccgctcgggctgacccaggggcccttcgcgggcagcgagggatggcgggcgcgctacggggacctgcccgtcaaccagttccacggcgccgaactgatcgccgcgaaatgggggatcacccggcgtgaccaggaggagttcgcgctgcgctcgcaccggcgggccgtccgcgcgagcgacgagggacgcttcgaccgggagaccgtggcgtacgggaaggtcacggccgacgaagggccgcgccgggacacctcgctggagaagatggccgcgctggcgcccgtgatcgagggcggcaccatcaccgccgcctgttcctcgcaggtctccgacggcgcggccgcgatgctgctggcctcggagcgggcgctgcgcgagcacgggctgaccccgcgtgcccgcgtccaccatctgtccgtgcggggcgaggacccgatccgtatgctgtcggcgccgattccggcgaccgcgcacgccctgaagaagaccgcgctggccatcgacgacatcgacctcgtcgagatcaacgaggccttcgcgccggtcgtgctggcctggctcaaggagacgggcgccgacccggagaaggtcaacgtcaacggcggcgcgatcgccctcggacatccgctcggcgccacgggcgtgcggctgatgaccacgctgctgcacgaactggagcgcaccggcggccggttcggcctccagacgatgtgcgagggcggcggccaggcgaacgtgacgatcatcgagcggctctga

SEQ ID NO: 3320 - protein, 385 aa, Streptomyces avermitilis
MAEAYIVEAVRTPVGRRRGGLAGVHPADLGAHALTALVARSGIDPAAVEDVVFGCLDTVGPQAGDIARTCWLAAGLPEEVPGVTVDRQCGSSQQAVHFAAQAVLSGTQDLVVAGGVQNMSQIPIAFASRQAAEPLGLTQGPFAGSEGWRARYGDLPVNQFHGAELIAAKWGITRRDQEEFALRSHRRAVRASDEGRFDRETVAYGKVTADEGPRRDTSLEKMAALAPVIEGGTITAACSSQVSDGAAAMLLASERALREHGLTPRARVHHLSVRGEDPIRMLSAPIPATAHALKKTALAIDDIDLVEINEAFAPVVLAWLKETGADPEKVNVNGGAIALGHPLGATGVRLMTTLLHELERTGGRFGLQTMCEGGGQANVTIIERL

SEQ ID NO: 3321 - DNA, 1170 bp, Streptomyces avermitilis
  CDS (1)..(1170): transl_table=11
atggccgcggaacccgtgatcgtcgaagccgtacgcacccccatcggcaagcgcggtggcgcgctcgcccatctgcaccccgcctatctcctgggcgagacctaccgtgaactcctcggccgcaccggcatccacgccgactgcgtcgagcagatcgtcggaggcacggtgacccacgcgggcgagcagtcgatgaaccccgcgcgcacggcctggctcaccatggggcttccgtacgagacggccgcgacgacggtcgactgtcagtgcgggtcctcgcagcaggcctcgcacatggtcgccaacatggtcgcggcgggagtgatcgacgtcgggatcagctgcggggtcgaggcgatgtcgcgggtgccgctcgggtccgggtccaagcacgggccggggaagccgttcccggacgagtggaacgtggatctgccgaatcagttcgaggcggcggagaggatcgcgcggaaccggggtctgacgcgggagaacgtcgactcgctcggactgatctcgcaggagcgggccggggccgcgtggtcggaggagcgcttcaagcgcgagacgttcgccgtgcaggtgcccacgacggaggaggaacagcgggccgggcagggcatgtggcggctggtcgaccgggacgaagggctgcgcgacacgtccatggaggcgctggccggactgaagccggtgatgccgacggcggtccacacggcgggcaactcgtcacagatctcggacggggccgccgcgatcatgtgggcgtccaaacggatggcgcgtgcgctgaagctgcggccacgggcgcggatcgtggcgcaggcactggtcggggcggacccgcacttccacctggacgggccgatcgacgccacgcgggcggtgctcgggaaggcgggcatgtcgctgaaggacatcgacctcgtcgagatcaacgaggcgttcgcctccgtggtgctgagctgggcgcaggtcttcgagcaggacctggggaaggtgaacgtgaacgggggcgcgatcgccctcgggcatccggtcggggccacgggggcgcggctcatcacgaccgcgctgcatgaactggagcggcgcgacaaggagttcgcgctgatcacgatgtgtgcgggcggcgcgctggccaccgggacgatcatccagcggttgtag

SEQ ID NO: 3322 - protein, 389 aa, Streptomyces avermitilis
MAAEPVIVEAVRTPIGKRGGALAHLHPAYLLGETYRELLGRTGIHADCVEQIVGGTVTHAGEQSMNPARTAWLTMGLPYETAATTVDCQCGSSQQASHMVANMVAAGVIDVGISCGVEAMSRVPLGSGSKHGPGKPFPDEWNVDLPNQFEAAERIARNRGLTRENVDSLGLISQERAGAAWSEERFKRETFAVQVPTTEEEQRAGQGMWRLVDRDEGLRDTSMEALAGLKPVMPTAVHTAGNSSQISDGAAAIMWASKRMARALKLRPRARIVAQALVGADPHFHLDGPIDATRAVLGKAGMSLKDIDLVEINEAFASVVLSWAQVFEQDLGKVNVNGGAIALGHPVGATGARLITTALHELERRDKEFALITMCAGGALATGTIIQRL

SEQ ID NO: 3323 - DNA, 1224 bp, Streptomyces avermitilis
  CDS (1)..(1224): transl_table=11
atgatgcccgaagccgtgatcgtctcgaccgcccgctcccccatcggccgcgctttcaagggctccctcaaggacctgcgcccggacgacctgaccgccacgatcatccaggccgccctcgccaaggtccccgagctggaccccaaggacatcgacgacctgatgctcggctgtggcctccccggcggtgagcagggccacaacctcggccgcatcgtcgccgtgcagatgggcatggaccacctcccgggctgcaccatcacccgttactgttcctcctcgctccagacgtcccgcatggccctgcacgccatcaaggccggcgagggcgacgtcttcatctccgcgggcgtcgaggcggtgtcccgcagcgtcaagggcaactccgacagcctgcccgacacccacaaccccctcttcgccgaggccgaggcccgcaccgccgccgtcgccgagagcgcgggcgcgtcctggcacgacccgcgcgaggacggtctgatcccggacgcgtacatctcgatgggccagaccgccgagaacctcgcccgcatcaagggcgtcacccgtcaggacatggacgagttcggcgtccgctcccagaacctcgccgaggaagccatcaagaacggcttctgggagcgcgagatcacgccggtcacgacccccgacggcacggtcgtcagcaaggacgacggcccgcgcgccggcgtcaccctggagggcgtgcagggcctcaagccggtcttccgccccgacggcctcgtcacggccggcaactgctgccccctcaacgacggcgccgccgccctcgtgatcatgtcggacacgaaggcccgcgagctcggtctcaccccgctcgcccgcatcgtctccaccggcgtcaccggcctctccccggagatcatgggcctcggcccggtcgaggcgtccaagcaggcgctccggcgcgcgggcctgaccatcgacgacatcgacctggtcgagatcaacgaggccttcgccgcccaggtgatcccgtcctaccgcgacctcggcatcgacctggacaagctgaacgtcaacggcggcgcgatcgccgtcggccaccccttcggcatgaccggcgcccgcatcaccggcacgctcatcaattccctccagttccacgacaagcagttcggtctggagacgatgtgcgtcggcggcggccagggcatggcgatggtcatcgagcgcctcagctga

SEQ ID NO: 3324 - protein, 407 aa, Streptomyces avermitilis
MMPEAVIVSTARSPIGRAFKGSLKDLRPDDLTATIIQAALAKVPELDPKDIDDLMLGCGLPGGEQGHNLGRIVAVQMGMDHLPGCTITRYCSSSLQTSRMALHAIKAGEGDVFISAGVEAVSRSVKGNSDSLPDTHNPLFAEAEARTAAVAESAGASWHDPREDGLIPDAYISMGQTAENLARIKGVTRQDMDEFGVRSQNLAEEAIKNGFWEREITPVTTPDGTVVSKDDGPRAGVTLEGVQGLKPVFRPDGLVTAGNCCPLNDGAAALVIMSDTKARELGLTPLARIVSTGVTGLSPEIMGLGPVEASKQALRRAGLTIDDIDLVEINEAFAAQVIPSYRDLGIDLDKLNVNGGAIAVGHPFGMTGARITGTLINSLQFHDKQFGLETMCVGGGQGMAMVIERLS

SEQ ID NO: 3325 - DNA, 1203 bp, Streptomyces avermitilis
  CDS (1)..(1203): transl_table=11
atgtctggaacgaacagcacgacctcggtgatcgtcgcgggtgcacgcaccccgatgggccgtttgctcggctcgctgaagtccttctccggagccgacctcggcggcttcgcgatcaagtccgccctcgaccgtgcggggatcggcggcgaccaggtgcagtacgtgatcatgggccaggtgctgcaggccggggcggggcagatcccggcacgccaggccgcggtcaaggcgggcattccgatgagcgtcccggcgctcacgatcaacaaggtgtgtctgtccgggctcgacgcgatcgcgctcgcggaccagctgatccgcgccggtgagttcgatgtcgtcgtcgccggtggtcaggagtccatgaccaacgccccgcatctgctgccgaagtcccgtgagggctacaagtacggcgcggtccagatgatcgacgccatggcgtacgacggtctgacggacgccttcgagaacatcgccatgggcgagtccacggagaagcacaacacgcggctcgggatcggccgcgcggaccaggacgccgtggccgccctgtcgcaccagcgggccgccgccgcgcagaagaacgggatcttcgaggccgagatcacgcccgtggagattccgcagcggcgcggtgagccggtggtcttcagccaggacgagggcatccgcggcgagacgacggccgagtcgctcggcaagctgcggcccgccttcaccaaggacggcacgatcacggccggttcctcctcgcagatctcggacggtgcggcggccgtggtcgtgatgagcaaggccaaggcgcaggagctcggcctggagtggatcgcggagatcggcgcccacgggaatgtggcgggaccggacaactctttgcagtcgcagccgtccaacgcgatccagcacgcgctgaagaaggagggtctcgcggtcgacgatcttgatctgatcgagatcaacgaagccttcgccgcggtcgcggtgcagtcgatgaaggacctcggggtgtccaccgaaaaggtgaacgtcaacgggggcgcgatcgccctgggacacccgatcggcatgtccggtgcccggctcgtgctgcacctggcgctggagctgaagcggcggggcggcggcgtgggcgcggcggcgctgtgcggtggcggcgggcagggtgacgcgctgatcgtgcgggtacccaaggtctga

SEQ ID NO: 3326 - protein, 400 aa, Streptomyces avermitilis
MSGTNSTTSVIVAGARTPMGRLLGSLKSFSGADLGGFAIKSALDRAGIGGDQVQYVIMGQVLQAGAGQIPARQAAVKAGIPMSVPALTINKVCLSGLDAIALADQLIRAGEFDVVVAGGQESMTNAPHLLPKSREGYKYGAVQMIDAMAYDGLTDAFENIAMGESTEKHNTRLGIGRADQDAVAALSHQRAAAAQKNGIFEAEITPVEIPQRRGEPVVFSQDEGIRGETTAESLGKLRPAFTKDGTITAGSSSQISDGAAAVVVMSKAKAQELGLEWIAEIGAHGNVAGPDNSLQSQPSNAIQHALKKEGLAVDDLDLIEINEAFAAVAVQSMKDLGVSTEKVNVNGGAIALGHPIGMSGARLVLHLALELKRRGGGVGAAALCGGGGQGDALIVRVPKV

SEQ ID NO: 3327 - DNA, 1227 bp, Streptomyces avermitilis
  CDS (1)..(1227): transl_table=11
atgcctcgtaccgtcagggatgtcgtcttcgtcgacggcgtccgcaccccgttcggcaaggcgggcccgaagggcatttaccacgagacccgcgccgacgacctcgtcgtgaaggcgatccgggagctgctgcgccgcaacccgggtctcgacccgaagaagatcgacgaggtcgccatcgccgcgaccacccagatcggcgaccagggtctgaccctcggccgcacggccggcatcctggccgggctcccccagtcggtccccggctactccatcgaccgcatgtgcgcgggcgcgctgaccgccgtcaccgccacggcgggctccatcgccttcggtgcgtacgacgccgtcatcgccggtggtgtcgagcacatgggccgtcacccgatgggcgagggcgtggacccgaacccgcggttcgtcagcgagaagctggtcgacgagtccgccctcttcatgggcatgaccgccgagaacctgcacgaccgctacccgcacatcaccaagcagcgcgccgacgagtacgccgtgcgctcgcaggagaaggccgccaaggcgtacgccaacggcaagatccagcaggatctggtgccggtctcggtgcgcaacaccaacgcggaggtcggtgagaccggctggggcctggtcaccgccgacgagccgatgcgcccgggtacgacgctggagaacctggccggcctcaagacccccttccgcgtccacggccgggtcaccgccggtaacgcggccggtctgaacgacggtgcgaccgcctcgatcatcgcgtccgaggacttcgcccgcgagcacaacctcccggtcaagatgcgcctggtctcctacgccttcgcgggcgtcgagccggaggtcatgggctacggcccgatcccggcgaccgagaaggccctcgccaaggccggcctgtcgatcgaggacatcaacctcttcgaggtcaacgaggccttcgccgtccaggtgctcgccttcctcgaccactacggcatcgccgacgacgacgcgcgcgtcaaccagtacggcggcgccatcgcgttcggtcacccgctggcctcctccggcgtgcgtctgatgacgcagctggcccgccagttcgaggagcagccggaggtccgttacggcctcaccaccatgtgcgtcggcttcggcatgggcgccacggtgatctgggagaacccgcaccacaaggacgccggaggcgacaagtga

SEQ ID NO: 3328 - protein, 408 aa, Streptomyces avermitilis
MPRTVRDVVFVDGVRTPFGKAGPKGIYHETRADDLVVKAIRELLRRNPGLDPKKIDEVAIAATTQIGDQGLTLGRTAGILAGLPQSVPGYSIDRMCAGALTAVTATAGSIAFGAYDAVIAGGVEHMGRHPMGEGVDPNPRFVSEKLVDESALFMGMTAENLHDRYPHITKQRADEYAVRSQEKAAKAYANGKIQQDLVPVSVRNTNAEVGETGWGLVTADEPMRPGTTLENLAGLKTPFRVHGRVTAGNAAGLNDGATASIIASEDFAREHNLPVKMRLVSYAFAGVEPEVMGYGPIPATEKALAKAGLSIEDINLFEVNEAFAVQVLAFLDHYGIADDDARVNQYGGAIAFGHPLASSGVRLMTQLARQFEEQPEVRYGLTTMCVGFGMGATVIWENPHHKDAGGDK

SEQ ID NO: 3329 - DNA, 1188 bp, Streptomyces avermitilis
  CDS (1)..(1188): transl_table=11
atgcgtcccgtccacttcgcggcagctcgccgcacccccatcggcaagctgcgcggcgccctgtccgtcgtgcggcccgacgacctcgcggcgacggtgatacgcggtctgatcgccgacctgcccgggctcgacccggcccgtatcgacgacgtgtactggggcgcggccaaccaggccggcgaggacaaccgcaatgtcgcccgcatggccgccctcctcgccgggctgcccgagtcggtgcccggcgccacggtcaaccggctctgtgcctccggtctggaggcggtgaccacggccgcccgcacgatcgccgccggcgaggccgacatcgtgctcgcgggcggctccgagtccatgagccgcgcccccttcgtgctgccccgcccggacgaggccctgccgcaccgcatcgagaccgtcgacacccggctcggctggcgcctggtcaacccggccatgaaggaactgcacggcctgctctccatgggtgagaccgccgaggaggtcgccgaacggtacgcggtcccgcgcgaacgccaggacgagttcgcgctgcgcagtcaccggcgcgccgcggacgcccgcaagaacgggtacttcgacgacgagctgctgcccgtcacccggcccgacggcgtggtcgtcgccgacgacgagtgcgtacgcgaggacacctcgtacgagaagctgtcccgtctcaagccggtgttccgccagggcggcaccgtcaccgccggcaatgcctcgccgatgaacgacggagcggccggactcctcctcgtcagcgaggaggccctgaacgagctgggtctggagtccctgggacagtacgtcgccggcgcctcggccggtgtccatcccgacgtcatgggtatcggccccgtgcccgcgaccgagaaggccctggctcgcgtcggctggacgatcggcgacatcgaagaggccgagttcaacgaggcgttcgccgcccaggccctcgcctgcgtggaccgcctcggcatcgacccggagctcgtcaaccccaccggcggcgccatcgccctcggtcacccgctcggctgctcgggcgcccgcatcctcaccacgctgctccaccgcatgcgccgcaccggcgcggcccgcggcctggccacgatgtgcgtcggggtcgggcagggcagtgcgatcctcgtcgaacgccactga

SEQ ID NO: 3330 - protein, 395 aa, Streptomyces avermitilis
MRPVHFAAARRTPIGKLRGALSVVRPDDLAATVIRGLIADLPGLDPARIDDVYWGAANQAGEDNRNVARMAALLAGLPESVPGATVNRLCASGLEAVTTAARTIAAGEADIVLAGGSESMSRAPFVLPRPDEALPHRIETVDTRLGWRLVNPAMKELHGLLSMGETAEEVAERYAVPRERQDEFALRSHRRAADARKNGYFDDELLPVTRPDGVVVADDECVREDTSYEKLSRLKPVFRQGGTVTAGNASPMNDGAAGLLLVSEEALNELGLESLGQYVAGASAGVHPDVMGIGPVPATEKALARVGWTIGDIEEAEFNEAFAAQALACVDRLGIDPELVNPTGGAIALGHPLGCSGARILTTLLHRMRRTGAARGLATMCVGVGQGSAILVERH

SEQ ID NO: 3331 - DNA, 1128 bp, Bradyrhizobium japonicum
  CDS (1)..(1128): transl_table=11
atgctcaacgccaccgagggcgccacgctgctcggccacgccatcggcgaagccgttgcccgcgccaaggtcgatccgaaggaggtcgaggacgtggtgatgggcgccgccctccagcagggcgcgaccggcggcaacatcgcgcgcaaggcgctgctccgcgccggcctgcccgtcaccgtcgccggcaccaccatcgaccggcagtgcgcctcgggcctccaggccatcgcgctcgccgcacgctcggtgatcttcgacggcgtcgagatcgcggtcggcggcggcggcgagtcgatcagcctcgtgcagaacgacaagatgaacggcttccacgcccaggacccggcgctgctcaagatcaagggcgaggtctacatgcccatgatcgacacggccgaaatcgtcgccaagcgctacggcatctcgcgcgagaagcaggacgaatattcgctggagagccagcgccgcaccgcggccgcgcagcagggcggcaagttcaaggacgagctcgcgccgatcaccacgcagatggcggtcaccgacaaggcgaccggcgcggtctcgttcaaggaggtgaccttgtcgcaggacgaaggcccgcgccccgagaccacggctgaaggtctcgccggcctcaagccggtgcgcggcgaaggcttttccgtcaccgccggcaacgccagccagctctcggatggcgccagcgccaccgtcatcatgagcgacaaggaagcctcaaagcgcggcctcaagccgctcggcatcttccgcggcttcgtctcggccggctgcgagccggacgagatgggcatcggcccggtcttcgccgtgccgcgcctgctgaagcgccacggcctcaccgtcgacgacatcggcctctgggagctcaacgaagccttcgcggtgcaggtgctgtattgccgcgacaagctcggcatcgaccccgagaagatcaacgtcaatggcggtgcgatcgcggtcggccatccctacggcatgtccggcgcgcgcctgaccggccacgccctgatcgaaggccgccgccgcaaggccaagtatgcggtcgtcaccatgtgcgtcggcggcggcatgggcgcggccgggttgttcgaggtgttgcagtaa

SEQ ID NO: 3332 - protein, 375 aa, Bradyrhizobium japonicum
MLNATEGATLLGHAIGEAVARAKVDPKEVEDVVMGAALQQGATGGNIARKALLRAGLPVTVAGTTIDRQCASGLQAIALAARSVIFDGVEIAVGGGGESISLVQNDKMNGFHAQDPALLKIKGEVYMPMIDTAEIVAKRYGISREKQDEYSLESQRRTAAAQQGGKFKDELAPITTQMAVTDKATGAVSFKEVTLSQDEGPRPETTAEGLAGLKPVRGEGFSVTAGNASQLSDGASATVIMSDKEASKRGLKPLGIFRGFVSAGCEPDEMGIGPVFAVPRLLKRHGLTVDDIGLWELNEAFAVQVLYCRDKLGIDPEKINVNGGAIAVGHPYGMSGARLTGHALIEGRRRKAKYAVVTMCVGGGMGAAGLFEVLQ

SEQ ID NO: 3333 - DNA, 1173 bp, Bradyrhizobium japonicum
  CDS (1)..(1173): transl_table=11
atggccgaggcttacatcgtcgccgctgcgcgtaccgcgggcgggcgcaaggggggccgcctcgccggctggcatccggccgatctcgccgcaaaagtgctggacgagctggtcgatcgcgccaagatcgacccggccttggtcgaggacgtgatcatgggctgcgtgatgcaggtcggcgaacagtccaacaatgtcgcgcgcaatgcgatcatggcctcgaagctgccggagagcgtgccgggcacctcgatcgaccgccagtgcggctcctcgcagcaggcgttgcacttcgcagcccaagccgtgatgtccggcacgatggacgtcgtgatcgcggccggcgtggaatcgatgacgcgcgtgccgatgggcctgtcatcgcagctcccggccaagaacggctttggcaattacaagagcccgggcatcgaggcgaggtatccgaacatcgtgttcagccagttcaccggcgccgagatgatggccgagaagtacggcttgtcgaagaatgagctcgacgaatactccttcaacagccaccagcgcgcgatcgcggcgacgcaagccggtcacttcaagaaggagatcgtgccgctcgagatcacccgcgccgacggctccaaggatacccaccacatcgacgagggcatccgcttcgacgccacgctcgaaggcatcaagggcgtcaaactgatcgccgagaacggcaagctttccgcggccagcgccagccagatctgcgacggcgcttccggcgtcatggtggtgaacgagcgcggcctgaagcagcttggcgtcaagccgcttgcgcgcatccatcacatgaccatgatgggcggcgatcccgtgatcatgctcgacgctccgctgcacgccaccaagcgcgcgctggagaaggccggcatgacgatcggcgacatcgacctgttcgaggtcaacgaggccttcgcgtcggtgccgaccgcctggctcaagaccaccggcgccgatccggagcgcctcaacgtcaatgggggggccatcgcgctcggccatccgctcggcggctccggcaccaagctgatgaccacgctgatccacgcgctgcaccagcgaggcaagcgctatggcctgcagaccatgtgcgaaggcggcggcatggccaatgtgacgatcgtggagcggctgtaa

SEQ ID NO: 3334 - protein, 390 aa, Bradyrhizobium japonicum
MAEAYIVAAARTAGGRKGGRLAGWHPADLAAKVLDELVDRAKIDPALVEDVIMGCVMQVGEQSNNVARNAIMASKLPESVPGTSIDRQCGSSQQALHFAAQAVMSGTMDVVIAAGVESMTRVPMGLSSQLPAKNGFGNYKSPGIEARYPNIVFSQFTGAEMMAEKYGLSKNELDEYSFNSHQRAIAATQAGHFKKEIVPLEITRADGSKDTHHIDEGIRFDATLEGIKGVKLIAENGKLSAASASQICDGASGVMVVNERGLKQLGVKPLARIHHMTMMGGDPVIMLDAPLHATKRALEKAGMTIGDIDLFEVNEAFASVPTAWLKTTGADPERLNVNGGAIALGHPLGGSGTKLMTTLIHALHQRGKRYGLQTMCEGGGMANVTIVERL

SEQ ID NO: 3335 - DNA, 1173 bp, Bradyrhizobium japonicum
  CDS (1)..(1173): transl_table=11
atgcgtgaagccgtcatcgtttcctatgcgcgcacgggtcttgcgaaatccggccgcggcgggttcaacatcacgccgccgatgtcgctcgcggcccacgccatccgccacgcggtcgatcgcgccggcgtcgacaaggactatgtcgaggactgctacctcggcaattgcgcccacggcgcgccgaacatcggccgccaggccgctctgctcgccggcctgccgaagaccaccgccggcgtctcggtgaaccgcttctgctcctcagggctccagaccatcgcgatggccgccaactcgatccgctccgacggcgccgactgcatcgtcgccggcggcgtcgagagcatctcggtgcccggcggtggcacgccgaaggaatcgatcgatccggaactgctcaaggtcgcgcccgacatcttcatggcgatgatcgacaccgccgacatcgtcgccgagcgttacaagctcagccgcgaataccaggacgagttctcgctggaatcgcagcgccgcatggccgcggcccagcaggcgaacaagttcaaggacgagatcgtcccgatgaagaccaagatgaaggtcgtcgacaagcagaccaaggcggagagcatcgtcgactacgtcgtcgaccgtgacgagtgcaaccggcccgagaccacgttggagggccttgccaagctcgagccggtgaagggccccggcaagttcgtcaccgccggcaatgccagccagctctcggacggcgccgccgccgtcgtgctgatggaagccaaggacgccgagaagcgcggcctcaagccgctcggccgcttcgtcgcctgggcgaccgccggctgcgagcccgacgagatgggcatcggtccggtgttcgcgatcccgaagctgctcaagcgcaccggcctcaagatcgacgacatcgatctgtgggagctcaacgaggccttcgccagccagtgcctgtattgccgcgaccagctcggcatcgatcccgccaagtacaacgtcaatggcggctcgatcgcgatcggccatcccttcggcatgaccggcgcacgtctcaccggccatctgctccaggaaggcgcgcgccgcaaggcgaagtggggcgtggtgacgatgtgcatcggcggcggccagggcggcgccggcctgttcgagatctacagctga

SEQ ID NO: 3336 - protein, 390 aa, Bradyrhizobium japonicum
MREAVIVSYARTGLAKSGRGGFNITPPMSLAAHAIRHAVDRAGVDKDYVEDCYLGNCAHGAPNIGRQAALLAGLPKTTAGVSVNRFCSSGLQTIAMAANSIRSDGADCIVAGGVESISVPGGGTPKESIDPELLKVAPDIFMAMIDTADIVAERYKLSREYQDEFSLESQRRMAAAQQANKFKDEIVPMKTKMKVVDKQTKAESIVDYVVDRDECNRPETTLEGLAKLEPVKGPGKFVTAGNASQLSDGAAAVVLMEAKDAEKRGLKPLGRFVAWATAGCEPDEMGIGPVFAIPKLLKRTGLKIDDIDLWELNEAFASQCLYCRDQLGIDPAKYNVNGGSIAIGHPFGMTGARLTGHLLQEGARRKAKWGVVTMCIGGGQGGAGLFEIYS

SEQ ID NO: 3337 - DNA, 1233 bp, Bradyrhizobium japonicum
  CDS (1)..(1233): transl_table=11
atggctgacgcgctgatcatcgatacctgccggacaccgcggggcgtcggcaaggccggcaagggagcgctctcgggcattcatccgcagcaactcggcgcaaccgtgctgcgcgcgctcgccgatcgcaccggcatcaataccgccgacgtcgacgacatcgtctggggctgcagcgcgcaggtcgcaacacaaagcggcgatctcggccggatgtcggcgctcgatgccggctacgacgtgcgcgccagcgcggtgacgctcgaccgcttctgcggaagcggcatcaccagcgtcaacatggcggcatcctcgatcatggcgggcgccgaagacctcgtcatcgccggcggctgcgagatgatgtcgatggagggacgccgcggcggcggtccgatgatgatggacggcggcaatctgcgcctgcgtgcgcggcatccgcagtcgcatcagggcgtctgcgccgatgcgatagcaaccatggaaggcatcacgcgacgggacgtcgatgcgctcgggctggagagccagaagcgcgccgcgcatgcgatcgcgaacgggcacttcaagaagagcctcgtgcccgttcatcgcgaggacggcagcctcgcgctcgaccacgaagagtatccgcggccgcagaccacgatggaaggcctcagcagcctgaagccggctttccccgccattgccgactatgcgctcgacgacaagggcacgacctatcgcggcctgatcctgcaaaaatatccggatctgaacatcgacttcgtgcaccatgccggcaactcctccggcgtcgtcgacggtgccgccgcgatcctcctggcctcgcccgcctacgccaaggcgcatggccttaaagcccgcgcccgcgtggtggcgatggcgaacatgggggactcgccgacgctgatgctgaatgcgccggtgccggcgacgcgcaaggtgctggcgaaggcgggcctctccatcgacgacatcgacctgttcgagatcaacgaggccttcgcggtggtcgcggaaaaatacatccgcgacctcaagctcgaccgcgcgaaggtcaacgtcaatggcggctcgatcgcgctcggccatccgatcggcgcgaccggctcgatcctgatcggcaccgtgctcgacgagctcgagcggcgcgacctgaagcgcggcctcgtcaccatgtgtgccgccggcggcatggcgcccgccatcattatcgagcgcgtctag

SEQ ID NO: 3338 - protein, 410 aa, Bradyrhizobium japonicum
MADALIIDTCRTPRGVGKAGKGALSGIHPQQLGATVLRALADRTGINTADVDDIVWGCSAQVATQSGDLGRMSALDAGYDVRASAVTLDRFCGSGITSVNMAASSIMAGAEDLVIAGGCEMMSMEGRRGGGPMMMDGGNLRLRARHPQSHQGVCADAIATMEGITRRDVDALGLESQKRAAHAIANGHFKKSLVPVHREDGSLALDHEEYPRPQTTMEGLSSLKPAFPAIADYALDDKGTTYRGLILQKYPDLNIDFVHHAGNSSGVVDGAAAILLASPAYAKAHGLKARARVVAMANMGDSPTLMLNAPVPATRKVLAKAGLSIDDIDLFEINEAFAVVAEKYIRDLKLDRAKVNVNGGSIALGHPIGATGSILIGTVLDELERRDLKRGLVTMCAAGGMAPAIIIERV

SEQ ID NO: 3339 - DNA, 1197 bp, Bradyrhizobium japonicum
  CDS (1)..(1197): transl_table=11
atggccgaagccgccgatcccgtcgtcatcgtctccgccgcccgtaccccgctcggccgcttcatgggcgaattgtcgccgctggccgcgcataagcttggatcgcatgtgatcggcgctgcgctggagcgcgccaagctcgcgcctgagaaggtcgatgaggtcttcatgggctgcgtgctgcccgcaggacaaggccaggccccggcacgccaggctgcccgtgcggccggcctgcccgatgcgaccggcgccaccacggtcaataaggtctgcggctccggcatgaaggcgaccatgctggcgcacgacatcatccgcgccggctccgccgagatcgtcgtctccggcggcatggagagcatgagcaacgcgccctatcttctcgccaaggcacgcggaggctatcgcgtcggccatgaccgcatcatcgaccacatgatgatggacgggctggaggacgcctacgagaccggccgatccatgggcgatttcggcgaggccacggcagaggcctaccagttcacccgcaaggaccaggacgcctatgcgatggagacgctcagccgcgcccgcagggcggtcgagggcggcgcgttcaaggccgagatcgcgccgatcacgctgaccgagaaggctggcccacgcgtcatcgccaatgacgagcatccgctgaaggtcgatccggccaagattcccggactgaagccggcgttccgcgccaatggcacgatcacgccggccgcctcctccgccaatgccgacggtgccgccgcgctggtgctgacgaagcggtcgctggccgatcggggcggccttccggcgcttgccgtgatcaagggccacgccacccacagccaggagccgcaatggttcaccacggcgccgatccctgcgatccgcaagctgctcgacaagatcggctggagcgccggtgacgtcgacctgttcgagatcaacgaggctttcgccgtggtggcgatggcggcgcagcgcgatctcggcattccccgcgacaagctgaacatcaacggcggcgcctgcgcgctcggccatccgattggcgccaccggcgcgcggctgatcgtgacgctgctgcattcgctcgaggcgcagaacctcaagcgcggcgtcgccgcgctctgcatcggtggcggcgaagccacggccatcgcggtggagcggctgacgcactag

SEQ ID NO: 3340 - protein, 398 aa, Bradyrhizobium japonicum
MAEAADPVVIVSAARTPLGRFMGELSPLAAHKLGSHVIGAALERAKLAPEKVDEVFMGCVLPAGQGQAPARQAARAAGLPDATGATTVNKVCGSGMKATMLAHDIIRAGSAEIVVSGGMESMSNAPYLLAKARGGYRVGHDRIIDHMMMDGLEDAYETGRSMGDFGEATAEAYQFTRKDQDAYAMETLSRARRAVEGGAFKAEIAPITLTEKAGPRVIANDEHPLKVDPAKIPGLKPAFRANGTITPAASSANADGAAALVLTKRSLADRGGLPALAVIKGHATHSQEPQWFTTAPIPAIRKLLDKIGWSAGDVDLFEINEAFAVVAMAAQRDLGIPRDKLNINGGACALGHPIGATGARLIVTLLHSLEAQNLKRGVAALCIGGGEATAIAVERLTH

SEQ ID NO: 3341 - DNA, 1173 bp, Bradyrhizobium japonicum
  CDS (1)..(1173): transl_table=11
atgacggatgtggtaattgtctccgcggcgcggacgccagtcggttccttcaacggggcgttcggcgcgctgtccgcacacgagctcggagctgtcgcaatcaaaggcgccctggatcgcgcgaaggtctcgcccgaggatgtcgatgaagtcatcctggggcaggtgctatccggtggtgaggggcagaaccccgcgcggcaggccgcgatggcggccggcattccgcaggagaaaacggcatggggcatgaaccagctctgcggctcgggcctgcggtcggtcgcgcttgggctgcagcagatcgccaatggtgatgccaggatcatcgtcgccggcggcatggagtccatgtcgatggcgccgcatctgtcgcatctgcggaacggcaccaagatgggcgacgtcaagttcgtcgactccatgctgaaggacggccttatggacgccttccgcggctatcacatgggcgtcacggcagagaacatcgcggccagatggcagatcacccgcgaggagcaggatgcgttcgcgaccagctcgcagaacaaggccgaggatgcgcagaagggcggccggttcaaggatgagatcgttccggtcaccgtcaagaccaggaagggcgacgtcgtcgtcgaccaggatgaatatatccgccccggcacgacgcaggagtcgctggccaagctgaagcccgctttcaacaaggaaggttcggtgacggcgggcaacgcttcgggcctcaacgacggcgcggccgctctggtgttgatgagcgcggacgaagccagcaagcgcggcctggcgcctcttgccaggatcgtctcgtgggccacggccggcgtcgatccggcggtgatgggttcggggccgattccggcctcgcgcaaggcgctggaaaaggctggctggagggtcaaagatctcgacctcgtcgaggccaacgaagcctttgcggcccaggccatcgccgtcaacaaggacatgggctgggatccgtcgatcgtgaacgtgaacggcggcgccatcgccatcggccatccgatcggtgcatccggcgcccgcgtgctgacgacgctgctgttcgagatgcagaagcggggtgcgaagaaggggcttgccacgttgtgcatcggcggcggcatgggtgtcgccctaacggtcgaacgctag

SEQ ID NO: 3342 - protein, 390 aa, Bradyrhizobium japonicum
MTDVVIVSAARTPVGSFNGAFGALSAHELGAVAIKGALDRAKVSPEDVDEVILGQVLSGGEGQNPARQAAMAAGIPQEKTAWGMNQLCGSGLRSVALGLQQIANGDARIIVAGGMESMSMAPHLSHLRNGTKMGDVKFVDSMLKDGLMDAFRGYHMGVTAENIAARWQITREEQDAFATSSQNKAEDAQKGGRFKDEIVPVTVKTRKGDVVVDQDEYIRPGTTQESLAKLKPAFNKEGSVTAGNASGLNDGAAALVLMSADEASKRGLAPLARIVSWATAGVDPAVMGSGPIPASRKALEKAGWRVKDLDLVEANEAFAAQAIAVNKDMGWDPSIVNVNGGAIAIGHPIGASGARVLTTLLFEMQKRGAKKGLATLCIGGGMGVALTVER

SEQ ID NO: 3343 - DNA, 1209 bp, Bradyrhizobium japonicum
  CDS (1)..(1209): transl_table=11
atgcgtgacgtctttatctgcgatgccgtgcggaccccgatcggccgtttcggcggctcgctcgccaaggtgcgtgccgacgacctcgccgccgcgccgatcaaggcgctgatggccaagcaccccaatctcgattgggcgcaggtggacgaggtgttcttcggctgcgccaaccaggccggcgaggacaaccgcaacgtcgcacgcatggcgttgctgctcgcaggcctccccgactcggttcccggccagaccctgaaccgcctgtgcgcctccggcctcgatgcagtcggtgccgccggccgcgccatccgctccggcgagatcgagctcgccattgccggcggcgtcgaatccatgacccgcgcgcccttcgtgatgggcaaggcgcaggaggccttctcccgctcggccgagatcttcgacaccaccatcggctggcgcttcatcaatccgctgctgaaggcgcagtacggcgtcgatgcgatgccggagaccggcgagaacgtcgccgaggaattccaggtctcgcgcgccgaccaggacgccttcgccatccgctcgcagcagcgcgcaggcgccgcgatcgcggccggctatttcgccgaagaaatcacgccgatcagcattcccggcggcaagaccggtccgatcacggtggacaaggacgagcatccgcgtcccgagaccacgctggaaggtctcgccaagctgaagccgatcgtgcgcaatcccggcacggtcaccgccggcaacgcatccggcgtcaacgacggcgcggctgcgatgatcctggcgtccgaagctgccgtgaagaagcatggcctgacgccgcgcgcccgcatcctcggcctcgcctcggccggcgtgccgccgcgcatcatgggcattggacccgtgcctgcgacccgcaagctgatggagcggctcggcaagaagatcagcgatttcgacctgatcgagctcaacgaggccttcgcctcgcagggcatcgcctgcatgcgccaactcggtgttgccgacgatgccgacttcgtcaatccgcatggcggcgccatcgcgctcggacatcccctcggcatgagcggcgcgcgcctggcgctcaccgccgtgcacggcatggagaagcgcggcggcaagctcgcgctcgccaccatgtgcgtcggcgtcggccagggcgttgccgtggcgatcgagaagctgaactga

SEQ ID NO: 3344 - protein, 402 aa, Bradyrhizobium japonicum
MRDVFICDAVRTPIGRFGGSLAKVRADDLAAAPIKALMAKHPNLDWAQVDEVFFGCANQAGEDNRNVARMALLLAGLPDSVPGQTLNRLCASGLDAVGAAGRAIRSGEIELAIAGGVESMTRAPFVMGKAQEAFSRSAEIFDTTIGWRFINPLLKAQYGVDAMPETGENVAEEFQVSRADQDAFAIRSQQRAGAAIAAGYFAEEITPISIPGGKTGPITVDKDEHPRPETTLEGLAKLKPIVRNPGTVTAGNASGVNDGAAAMILASEAAVKKHGLTPRARILGLASAGVPPRIMGIGPVPATRKLMERLGKKISDFDLIELNEAFASQGIACMRQLGVADDADFVNPHGGAIALGHPLGMSGARLALTAVHGMEKRGGKLALATMCVGVGQGVAVAIEKLN

SEQ ID NO: 3345 - DNA, 1185 bp, Bradyrhizobium japonicum
  CDS (1)..(1185): transl_table=11
atgcccatgtcagacgatgtcgtcatcgtcagcgccgcccgcaccccggtcggaagcttcaacggagcgttcgcgacccttcccgcccacgatctcggcgccgtcgccatcaaggccgcgctggagcgtggtggcatcgagcccggccgggtctccgaagtcatcatgggccagattctgaccgccgctcagggccagaacccggcccgccaggcctcgatcgccgccggcattccggtggagagcccggcctggggcgtcaaccagctctgtggctcgggtctgcgcacggtcgcactcggttaccaggcgctgctcaacggcgattccgagatcgtggtcgccggcggccaggaatcgatgagcatggctccgcacgcccagtatctgcgtggcggcgtcaagatgggcgcgctcgaattcatcgacaccatgatcaaggacggcctgtgggatgcctttaacggctaccacatgggcaacaccgccgagaacgttgcgcgccagtggcagatcacccgcgcccagcaggacgagttcgcggtcgcctcgcagcagaaggccgaggccgcgcagaaggccggcaagttcaacgacgaaatcgtccccgtcaccatcaagacccgcaagggcgacgtggtcgtcagcgccgacgaatacccgcgccatggcgcaacgctcgatgcgatggccaagctccgtcccgccttcgagaaggacggcacggtcaccgcaggctctgcttccggcatcaatgacggcgctgccgccgtggtgctgatgaccgccaagcaggctgccaaggaaggcaagaagccgctcgcgcgcatcgtgtcgtgggcccaggccggcgtcgatccgaagatcatgggctcgggcccgatcccggcctcgcgcgccgcgctgaagaaggccggctggaacgtcggcgacctcgacctgatcgaggccaacgaggccttcgcggcgcaggcttgcgccgtcaacaaggacctcggctgggacacctccaaggtcaacgtcaatggcggtgcgatcgcgatcggccacccggtcggcgcctccggcgcgcgcgtactggtgacgctgctgcacgagatgcagaagcgcgattccaagaagggccttgccacgctgtgcatcggcggcggcatgggtatcgcgatgtgtctggcgcgcgactga

SEQ ID NO: 3346 - protein, 394 aa, Bradyrhizobium japonicum
MPMSDDVVIVSAARTPVGSFNGAFATLPAHDLGAVAIKAALERGGIEPGRVSEVIMGQILTAAQGQNPARQASIAAGIPVESPAWGVNQLCGSGLRTVALGYQALLNGDSEIVVAGGQESMSMAPHAQYLRGGVKMGALEFIDTMIKDGLWDAFNGYHMGNTAENVARQWQITRAQQDEFAVASQQKAEAAQKAGKFNDEIVPVTIKTRKGDVVVSADEYPRHGATLDAMAKLRPAFEKDGTVTAGSASGINDGAAAVVLMTAKQAAKEGKKPLARIVSWAQAGVDPKIMGSGPIPASRAALKKAGWNVGDLDLIEANEAFAAQACAVNKDLGWDTSKVNVNGGAIAIGHPVGASGARVLVTLLHEMQKRDSKKGLATLCIGGGMGIAMCLARD

SEQ ID NO: 3347 - DNA, 1182 bp, Pseudomonas putida
  CDS (1)..(1182): transl_table=11
atgactgacgtagtgatcgtatcggccgcacgtaccgcggtcggcaaattcggcgggtcgctcgcgaagatcgcagcacccgaactgggcgcaaccgtgatccgcgcggtactcgagcgcgcgaacctgaaacccgagcaggtgagcgaagtgatcctcggccaggtgctcgccgccggctccggacagaatcccgcacgccagtcgctcatcaaggcggggctgccctcggccgttcccggcatgacgatcaacaaggtctgcggctcgggcctgaaggcggtgatgctggcggccaacgcgatcatcgcaggcgacgccgacatcgtgatcgccggtggccaggaaaacatgagcgccgcgccgcacgtgctgatgggctcgcgcgacggctttcgcatgggcgacgcgaagctgatcgactcgatgatcgtcgacggcctgtgggacgtgttcaaccagtaccacatgggcacgaccgccgagaacgtcgcgaaggaatacggcatctcgcgcgaggatcaggacaagttcgcggcgctctcgcagaacaaggccgaagccgcgcagaagtcgggccgcttcaacgaggagatcgtgtcggtcgacattccccagcgcaagggagaccccgtcaagttcgccaccgacgaattcgtgcgccacggcgtgacggccgaagcgctcgcgagcctgaagcccgccttctcgaaggaaggcacggtgacggccgccaacgcatcgggcctgaacgacggcgcggccgccgtgatcgtgatgtcggcgaagaaggccgaggcgctcggcctcacgccgctcgcgcgcatcaaggcctacgcgaacgcgggcgtcgatccgaaggtgatgggcatgggcccggtgccggcatcgaagcgctgtctggagcgcgcgggctggtcggtgggtgatctcgatctgatggagatcaacgaagcgttcgcggcgcaggcgctcgcggtgcacaagcagatgggctgggacacgtcgaagatcaacgtcaacggcggcgcgatcgcgatcgggcacccgatcggcgcgtccggttgccggatcctcgtcacgctgctgcacgaaatgcagaagcgcgatgcgaagaagggcctggcgtcgctgtgtatcggcggcggcatgggcgtggcgctggcggtcgagcgtccgtaa

SEQ ID NO: 3348 - protein, 393 aa, Pseudomonas putida
MTDVVIVSAARTAVGKFGGSLAKIAAPELGATVIRAVLERANLKPEQVSEVILGQVLAAGSGQNPARQSLIKAGLPSAVPGMTINKVCGSGLKAVMLAANAIIAGDADIVIAGGQENMSAAPHVLMGSRDGFRMGDAKLIDSMIVDGLWDVFNQYHMGTTAENVAKEYGISREDQDKFAALSQNKAEAAQKSGRFNEEIVSVDIPQRKGDPVKFATDEFVRHGVTAEALASLKPAFSKEGTVTAANASGLNDGAAAVIVMSAKKAEALGLTPLARIKAYANAGVDPKVMGMGPVPASKRCLERAGWSVGDLDLMEINEAFAAQALAVHKQMGWDTSKINVNGGAIAIGHPIGASGCRILVTLLHEMQKRDAKKGLASLCIGGGMGVALAVERP

SEQ ID NO: 3349 - DNA, 1164 bp, Azospirillum brasilense
  CDS (1)..(1164): transl_table=11
atgacctcggcgcctttgaccacgcccgccaatccggtcgtcatcgccggctacgcccgttcccccttcgccttcgccaacaagggcgagctggcgaaggtccgccccgacgacctgctggcccatgtcgtcgcggcgctggtcgagcgcacgggcgtcaacccgcaggacatcgaggatgtggtcgtcggctgcgccttccccgagggcgagcagggcatgaacatcgcccgcaccgtgtccttcctggcgaagctgccgctgaccgccggggccaccacgatcaaccgctactgcggctcctccatgcaggcgatccatcaggcggccggcgccatccagatgggggcgggcgaggtcttcctgtgcgggggcatcgaatcgatgagccgcgtcccgatgatgggttacaacccgctgccccatccgggcctgaaggaccattatccggaagcctactgctcgatgggcgtcacggcggagaacgtcgcccgccgctatgaaatttcccgcgccgaccaggaggcgatggccgccgagtcccacgccaaggccgccgcggcccagcaggccgggcgcctcgccgaggagatcgtcgccatccagaccgccgctggcctcgtggagcgcgacggctgcatccgccccggcaccagcggcgagacgctgagcggcctgaagcccgccttcctggccgacggctcggtcaccgccggcacctcctcccccctgacggacggcgcctcggcggtgctggtgacgacggaggcctacgccaaggccaacggtctgccgatcctcgcccgcatccgctcggtcgcggtggccggctgcgcgccggaggtgatggggctcggcccggtcccggcggcgcagaaggcgctggcgcgcgccggcctgtccatccgcgacatcgacgtgatcgaactgaacgaggccttcgccgcccaggccatcgcctgcatgcgcgacctcgacatcgacccggccaaggtgaatctggacggcggcgccatcgcgctcggccacccgctcggcgccaccggcgcccgcatcaccggcaaggccgcggccctgctgaagcgcgagggcaagcaattcgccctggccacccagtgcatcggcggcggccagggcatcgccacggttctggaagcggtctga

SEQ ID NO: 3350 - protein, 387 aa, Azospirillum brasilense
MTSAPLTTPANPVVIAGYARSPFAFANKGELAKVRPDDLLAHVVAALVERTGVNPQDIEDVVVGCAFPEGEQGMNIARTVSFLAKLPLTAGATTINRYCGSSMQAIHQAAGAIQMGAGEVFLCGGIESMSRVPMMGYNPLPHPGLKDHYPEAYCSMGVTAENVARRYEISRADQEAMAAESHAKAAAAQQAGRLAEEIVAIQTAAGLVERDGCIRPGTSGETLSGLKPAFLADGSVTAGTSSPLTDGASAVLVTTEAYAKANGLPILARIRSVAVAGCAPEVMGLGPVPAAQKALARAGLSIRDIDVIELNEAFAAQAIACMRDLDIDPAKVNLDGGAIALGHPLGATGARITGKAAALLKREGKQFALATQCIGGGQGIATVLEAV

SEQ ID NO: 3351 - DNA, 1194 bp, Rhizobium meliloti
  CDS (1)..(1194): transl_table=11
ttgaacgcctcgtctgaccccgctcgcaccccggtcgttatcgccgcgctgcggacgccggtcggccgcgtcaacggcagccttgctgcggtcgaaccggcacgccttgccgccttgctgatcgaaaggatcattgcggatacgggcatcgaccgggcagagatcgacgacgtgctcgtcggtaatgccgccaacagtgccggcaatctcgcgcgcctggccgcgctcgaggcaggattgcccgtcgcaattccgggcgtcaccgtcgaccgtcaatgcggttcggggctggaggcgattgtccttgcggcccggcagatccaggccggcgcggggcgcttctaccttgccgggggcaccgagagcgccagtcgcgcccatatccgccttcggcccccgctcacgcgcggcgaagagcctcagccggtcaagcgcgcgcggatggctcccgactcgatcggcgatccggatatgggcgttgcggcggagaacgtcgcgactgcctgcggcatctcgcgtgagcggcaggatcgttttgcgctcgaaagccaccgacgcgccgttgcggccgaagcggagggccggttctcgcgcgagatcgtgcccgtgccgacaccagaggggccgatcgcgagggacgaatgtcctcgcgcaaacgcctctgccgagacgctctcgcgactgaggccggttttcgttgccggcggcaccgtcaccgccggaaatgcctgcccggtcaatgacggcgcggcgatggtactgatgacgaacctcgcggaggcgcggaagctcggtacgcgcttcggcctcgctttcaccgatgctgcgacggccggcgtcgaaccgaagctgctcggcctcggccccgtccccgccatggcgaagcttcgcgcgcgcaatcccgcgctcgatgtggcccgcgtcgatttcatcgaattcaacgaggcctttgcctcgcaggttctcgggagcctcgaccagctcgatatcgcacccgaacgcgtcaatcgcgacggcggcgcgatcgcgctcggccacccctatggcgcttccggcgccattctcgtcgtccggctgttttcgcagatgttggcggcttcatccccggccgaggggctggccatgatgggcatcggcggcggcatggggatcgccgcccacttcagcagttgcagaccggatcaggcggcatag

SEQ ID NO: 3352 - protein, 397 aa, Rhizobium meliloti
MNASSDPARTPVVIAALRTPVGRVNGSLAAVEPARLAALLIERIIADTGIDRAEIDDVLVGNAANSAGNLARLAALEAGLPVAIPGVTVDRQCGSGLEAIVLAARQIQAGAGRFYLAGGTESASRAHIRLRPPLTRGEEPQPVKRARMAPDSIGDPDMGVAAENVATACGISRERQDRFALESHRRAVAAEAEGRFSREIVPVPTPEGPIARDECPRANASAETLSRLRPVFVAGGTVTAGNACPVNDGAAMVLMTNLAEARKLGTRFGLAFTDAATAGVEPKLLGLGPVPAMAKLRARNPALDVARVDFIEFNEAFASQVLGSLDQLDIAPERVNRDGGAIALGHPYGASGAILVVRLFSQMLAASSPAEGLAMMGIGGGMGIAAHFSSCRPDQAA

SEQ ID NO: 3353 - DNA, 1203 bp, Rhizobium meliloti
  CDS (1)..(1203): transl_table=11
atgcgcgaagcctatatctgcgactatatccgcaccccgatcggccgcttcggcggctcgctcgcttcggtgcgcgccgacgacctcggcgccataccgctgaaggcgctgatggaccgcaacaggtcggtcgactgggaagcggtcgatgacgtgatcttcggctgcgccaaccaggcgggcgaggacaaccgcaacatcgcacgcatgtcgctgctgcttgcggggctgcccgtcgccgttcccggcacgacgatcaaccggctctgcggatccggaatggacgcggtgattgcggccgcgcgggcgatcaaatgcggcgaggccgagctgatgatagccggcggcgtcgaatccatgtcgcgggcgcctttcgtgctgccgaaggccgagagcgcgttttcgcgcaacgccgaaatttacgacacgacgatcggctggcgcttcgtcaatccgctgatgaaggcgcaatatggcgtcgactcgatgccggagaccggcgagaacgtcgccgaagactataaggtttcgcgcgaggaccaggacgccttcgccctgcgcagccaggcaaaggccgcggccgcccaggcgaacggccgccttgcgagcgagatcgtcgccgtcaccatcccccaaaggaagggtggcccggtcgtcatcgaccgcgacgagcatccgcgcgccacgacgatcgaggcgctcgccgggctcaagacacccttccgggagggcggcaccgtcaccgccggcaacgcttcgggcgtcaacgacggcgctgcggcgctcatcatcgcctccgaggaggctgccagaaagcatgggctgcgacccatggcccgcatcctcgggggcgcttcggccggcgtgccgccgcgcatcatgggcatgggaccggtgcccgcctcgcagaggctcatgacgcggctcggcgcgacgcaagatcggttcgacgtcatcgagctcaacgaggcttttgccagccaggggcttgcggtcctgcgcgcgctgggaatcgccgacgacgatccccgcgtcaaccgcaacggcggcgccatcgcgctcggccatccgctcggcatgtcgggtgcgcgcatcaccggaacggcagcgctggagcttgccgaaacgggtggccgcacctcgctctccaccatgtgcatcggcgtcggccagggcatcgcggtggcgctggagcgggtgtaa

SEQ ID NO: 3354 - protein, 400 aa, Rhizobium meliloti
MREAYICDYIRTPIGRFGGSLASVRADDLGAIPLKALMDRNRSVDWEAVDDVIFGCANQAGEDNRNIARMSLLLAGLPVAVPGTTINRLCGSGMDAVIAAARAIKCGEAELMIAGGVESMSRAPFVLPKAESAFSRNAEIYDTTIGWRFVNPLMKAQYGVDSMPETGENVAEDYKVSREDQDAFALRSQAKAAAAQANGRLASEIVAVTIPQRKGGPVVIDRDEHPRATTIEALAGLKTPFREGGTVTAGNASGVNDGAAALIIASEEAARKHGLRPMARILGGASAGVPPRIMGMGPVPASQRLMTRLGATQDRFDVIELNEAFASQGLAVLRALGIADDDPRVNRNGGAIALGHPLGMSGARITGTAALELAETGGRTSLSTMCIGVGQGIAVALERV

SEQ ID NO: 3355 - DNA, 1191 bp, Rhizobium meliloti
  CDS (1)..(1191): transl_table=11
atgaacaagcaggatcctgtggtcatcgtcgggcaggcacgaaccccgcttggcagtttccaaggtgagttgaaggacctttccgccgccgacctcggcgcggccgcgattgtcgatgctctgaagcgcgccggacttgcgccggatgcggtcgatgaggtgatgttcggttgtgtcctgaccgcgggacagggacaggcgccagcccgtcaggcggcgctcggtgcgggtcttccgcccggcgtcggcgcgaccaccgtgaacaagatgtgtggttcgggcatgaaggcggcgatgctggcgcatgacctgatcaaggcggaatcggcctcgatcgtggttgcgggcggcatggaaagcatgaccaatgccccctatctgctcgaccgtgcgcggcagggctatcgcatcggacaccagaaggttctggaccacatgttcctcgatgggctggaggatgcctatgacaaggggcgcctgatgggcagctttgccgaggattgcgcggaagcctatcaattcacccgcagcgcccaggatgagtatgccattgcgtccctggagaaggcgcagaaggcaagcgccgacggcagctttgcggaggagatcgtccccttgagcatcgcctcgggcaagggggaacggaccgtcaacctggacgagcagccgcagaaggcgcggctcgacaaaattcctctgttgaaaccggcttttcgcgacggcggcacgatcacggccgcgaacgcctcttcgatttccgacggggcagcggcgctggtgctgatgcgccggtcggcggcggataaacagggcatcgggcctctggcggtgatctgcggtcatgccacccatgcggacgcccccagtctctttccgacggcgccgatcggagcgatcaaggcactctgccggcgcatcggctgggacattggtgaggtcgatctcttcgaaatcaacgaggcctttgccgtcgtgccgatggcggcaatgcgcgagctcggccttgatgcggagaaggtgaacgtccacggcggcgcctgcgcgttgggccatccaatcggcgcctcgggcgcccgggtgatcgtcacgctcgtcaatgcgctgcgccgccgtggccttagacgcggcatcgcgtccgtgtgcatcggcggcggcgaggcgactgcagtcgcggtggagatatcgggctga

SEQ ID NO: 3356 - protein, 396 aa, Rhizobium meliloti
MNKQDPVVIVGQARTPLGSFQGELKDLSAADLGAAAIVDALKRAGLAPDAVDEVMFGCVLTAGQGQAPARQAALGAGLPPGVGATTVNKMCGSGMKAAMLAHDLIKAESASIVVAGGMESMTNAPYLLDRARQGYRIGHQKVLDHMFLDGLEDAYDKGRLMGSFAEDCAEAYQFTRSAQDEYAIASLEKAQKASADGSFAEEIVPLSIASGKGERTVNLDEQPQKARLDKIPLLKPAFRDGGTITAANASSISDGAAALVLMRRSAADKQGIGPLAVICGHATHADAPSLFPTAPIGAIKALCRRIGWDIGEVDLFEINEAFAVVPMAAMRELGLDAEKVNVHGGACALGHPIGASGARVIVTLVNALRRRGLRRGIASVCIGGGEATAVAVEISG

SEQ ID NO: 3357 - DNA, 1200 bp, Streptomyces collinus
  CDS (1)..(1200): transl_table=11
  misc_feature (105)..(105): n is a, g, c or t
  misc_feature (1139)..(1139): n is a, g, c or t
atgtcttctgggacgaccagctcggtgatcgtcgcgggcgcccggacgcccatggggcggctgctgggctcgctgaagtccttctccggagccgacctgggcggnttcgcgatcaaggccgccctcgaccgtgcggggatcggcggcgaccaggtgcagtacgtgatcatgggccaggtcctgcaggccggcgcgggccagatcccggcccgccaggccgccgtcaaggccggcatccccatgaacgtcccggcgctcaccatcaacaaggtgtgcctctccggcctcgacgccatcgccctcgcggaccagctgatccgcgccggcgagttcgacatcgtcgtcgcgggcggccaggagtccatgaccaacgccccgcacctgctcccgaagtcccgcgagggctacaagtacggcgcggtcgagatgctcgacgcgatggcccacgacggcctgaccgactccttcgagggcgtcgccatgggcgagtccaccgagaagcacaacacccgcctcggcatcaagcgccccgagcaggacgagatcgccgcgctgtcccaccagcgggccgccgccgcccagaagaacggcctgttcgaggcggagatcaccccggtggagatcccgcagcgcaagggcgacccggtgctgttcagcaaggacgagggcatccgcggcgacaccaccgtggagtccctggccaagctccgcccggccttcgccaaggacggcacgatcaccgccggcacctcctcgcagatctccgacggcgccgccgcggtcgtcgtgatgagcaaggccaaggccgaggagctgggcctgacctggctcgccgagatcggcgcgcacggcaatgtggccggcccggacaactcgctgcagtcgcagccgtccaacgccatccagcacgccctcaagaaggagggcctggacgtctccgacctggacctcatcgagatcaacgaggccttcgccgccgtcgccgtgcagtcaatgaaggacctcggcgtgtccacggaaaaggtgaacgtcaacggcggcgccatcgcgctgggccacccgatcggtatgtccggcgcccggatcgtgctccacttggcgctggagctgaagcgccgcggcggcggggtcggcgcggncgcgctgtgcggtggcggcggccagggtgacgccctgatcgtgcgggtaccgaaggcctga

SEQ ID NO: 3358 - protein, 399 aa, Streptomyces collinus
  misc_feature (380)..(380): The Xaa at location 380 stands for Ala, Asp, Gly, or Val.
MSSGTTSSVIVAGARTPMGRLLGSLKSFSGADLGGFAIKAALDRAGIGGDQVQYVIMGQVLQAGAGQIPARQAAVKAGIPMNVPALTINKVCLSGLDAIALADQLIRAGEFDIVVAGGQESMTNAPHLLPKSREGYKYGAVEMLDAMAHDGLTDSFEGVAMGESTEKHNTRLGIKRPEQDEIAALSHQRAAAAQKNGLFEAEITPVEIPQRKGDPVLFSKDEGIRGDTTVESLAKLRPAFAKDGTITAGTSSQISDGAAAVVVMSKAKAEELGLTWLAEIGAHGNVAGPDNSLQSQPSNAIQHALKKEGLDVSDLDLIEINEAFAAVAVQSMKDLGVSTEKVNVNGGAIALGHPIGMSGARIVLHLALELKRRGGGVGAXALCGGGGQGDALIVRVPKA

SEQ ID NO: 3359 - DNA, 1188 bp, Serratia marcescens
  CDS (1)..(1188): transl_table=11
atgaatgtgcaacaacgtgaagtggtgatcgtggcggcgacgcgcacgccggtcggcagttttcacggcgcgctggcgccgctgacggcggtggaactgggcgcggcgggtgtgcaggggctgctggcgcaaagcggcgtgccgccgcagcagatcgatgaagtgatcctcggccaggtgctgaccgccggctgcgggcagaatccggcgcgccagactgcgctcaacgccgggctgcccgttacgacgccggcgctgaccatcaacaaggtgtgcggctccggtttgaaggcggtgcatctggcggcgcaggcgatccgcagcggcgacgccgaggcggtgatcgccggcggccaggaaagcatgagccagtcgccttacctgatggccggcgcgcgcgccggtctgcgcctcggtcacgcgcagatggtggacagcgtgatccacgacggcctgtgggacgcgttcaacgactaccacatgggcatcaccgccgagaacctggcggagaaatacgccatcagcagagaagaacaagacaggttcgcgctgcgttcgcagcagaaggcgcaggcggcgcagagggccgggcgtttcgcgcaggagatcacgccggtgacggtgccgcagccgaagggggaggcgctgagagttgagcgcgacgaacagccgcgcgacaccagcctggaggcgctggcgcggctgcgtccggcgtttcgcaaggagggctcggtgaccgccggcaacgcctcgtcgctcaacgacggcgccgccgtggtgttgctgatgagcgcggaaaaagccgctcgagtgcgcttgccggtgctggcgcgcattgccggttacgcctcgggcgtcgatccggcgatcatgggcatcggcccggcgccggccgcgcgccgctgcctggaaaaagccggttggcggctggaggaagtcgatctgatcgaagccaacgaagccttcgccgcgcaggcgctggcggtgggtaaagaactgggctgggaggcggagcgggtcaacgtcaacggcggagcgatcgcgctggggcatccgatcggcgcatccggctgtcgcattttggtgtcgctgctgtacgaaatgcagcgccgcggggtgaacaaggggctggcgatgctgtgcatcggccgaaaacagggggtggcgctggcggtagagcgcccgtaa

SEQ ID NO: 3360 - protein, 395 aa, Serratia marcescens
MNVQQREVVIVAATRTPVGSFHGALAPLTAVELGAAGVQGLLAQSGVPPQQIDEVILGQVLTAGCGQNPARQTALNAGLPVTTPALTINKVCGSGLKAVHLAAQAIRSGDAEAVIAGGQESMSQSPYLMAGARAGLRLGHAQMVDSVIHDGLWDAFNDYHMGITAENLAEKYAISREEQDRFALRSQQKAQAAQRAGRFAQEITPVTVPQPKGEALRVERDEQPRDTSLEALARLRPAFRKEGSVTAGNASSLNDGAAVVLLMSAEKAARVRLPVLARIAGYASGVDPAIMGIGPAPAARRCLEKAGWRLEEVDLIEANEAFAAQALAVGKELGWEAERVNVNGGAIALGHPIGASGCRILVSLLYEMQRRGVNKGLAMLCIGRKQGVALAVERP

SEQ ID NO: 3361 - DNA, 1224 bp, Laccaria bicolor
  CDS (1)..(1224)
atgtcaatccaacaagcttccacctcctccgcaaaagccgccattctccaaaagaacgacaacgacgtcgtcatagtctgtgcagtccgttccgccatcacaaagggcagaaaaggaggcttcaaagacaccaaacccgaactcatcctctcccacgtcctccgcgcagcatactccaaaatcagcctagaccccaagctcatcgaagatatcgcggtaggcaacgtactccctccgggaggaggcgcctccgccgcacgcatggcagccctccacgccggcatacccgtcgaaacctccatcaataccgtcaatcgccaatgttcgtcaggcctcaggcatcaaccagatcgcgaaccagattcgcgcagggcagatcgatattggtattggagccggcgtcgaatcaatgacacacggcttcggctccgcgcagccccgaagtatcgacgaagtctctccaaccaagacgcagaagactgtctcctccccatggggatcacttccgaaaacgttgcggccgactaccacatcccccgatccactcaagacgccttttccgctaaatccttccaaaaagccgcagcagctaacaaagcaggtaaattcaagtctgaaatcgtccccatcttggcaaaatggatagacccaaagacggaggaggttaaagaggtattggtgaatgaggatgatgggattagggagggggttacggctgaaagcttgcgaagattaaacctgcttttaagaaagatggctgcactcatgctggcaacgcatcccaagtctcagacggccgcagccgcaataatcctcgcccgccgctccgtcgccacacgcctcggcctcccaatcctaggcaaattcgtaaacgcgtcaactatcggcgtcccaccccgaatcatgggcgtcggccccgcctacgccatcccgcgcgttctcaaactgacaggcctgagtttggacgatgtggatttctttgagattaatgaggcgtttgcgagtcaggcgttgttttcgattgatacgttgaagattgcgcatgagaaggttaatttgaatgggggtgctattgctttggggcatcctttggggtgtactggtgcgagacaggtagctacgggcttgaatatcgcgaagcagacgggtggaagggtcttcgtgacgagtatgtgtattgggtctgggatggggatggctgctgttttcgttagtgagcagtaa

SEQ ID NO: 3362 - protein, 407 aa, Laccaria bicolor
MSIQQASTSSAKAAILQKNDNDVVIVCAVRSAITKGRKGGFKDTKPELILSHVLRAAYSKISLDPKLIEDIAVGNVLPPGGGASAARMAALHAGIPVETSINTVNRQCSSGLRHQPDREPDSRRADRYWYWSRRRINDTRLRLRAAPKYRRSLSNQDAEDCLLPMGITSENVAADYHIPRSTQDAFSAKSFQKAAAANKAGKFKSEIVPILAKWIDPKTEEVKEVLVNEDDGIREGVTAESLRRLNLLLRKMAALMLATHPKSQTAAAAIILARRSVATRLGLPILGKFVNASTIGVPPRIMGVGPAYAIPRVLKLTGLSLDDVDFFEINEAFASQALFSIDTLKIAHEKVNLNGGAIALGHPLGCTGARQVATGLNIAKQTGGRVFVTSMCIGSGMGMAAVFVSEQ

SEQ ID NO: 3363 - DNA, 1194 bp, Pseudomonas putida
  CDS (1)..(1194): transl_table=11
atgaccctcgccaatgatccgattgttatcgtcagcgccgtgcgcacgcccatgggcggcctgcaaggcgacctgaaaagcctgaccgcaccacaactgggcagtgcggccattcgtggtgccgtggaacgtgccggcatcgatgctgccagtgtcgagcaagtgctgttcggctgtgtgctgccggccgggctgggccaggcgccagcacgccaggccgcactgggggctgggctggacaagcacaccacctgcaccaccctgaacaagatgtgcggctcgggcatgcaggccgcgatcatggcccatgacctgctggtggccggcaccgcatacgtggtggtggcggggggcatggaaagcatgaccaacgccccgtacttgctggacaaggcccgtggcggctatcgcatgggccacggcaagatcatcgaccacatgttcatggacggcctggaagacgcctatgacaaaggccgcctgatgggcaccttcgccgaagactgcgcccaggccaatgcgtttagtcgcgaagcccaggaccagttcgctatcacctcgcttacccgtgcccaggacgcgatcagcagcggccgttttgccgccgagatcgtgccggtggaagttaccgagggcaaggaaaagcgcgtcatcaaagatgacgagcatccgcccaaggcgcgcctggacaagatcccgcagctcaagcccgccttccgtgaaggtggcacggtgaccgcagccaactccagctcaatttccgacggcgctgccgcgctggtactgatgcgtcgctccgaagccgaaaagcgcggccttgaagcactggcagtcatccatggccacgcggccttcgccgacaccccggcgctgttcccgaccgcgccgatcggcgccatcgacaagctgatgaaacgcaccggctggaacctggccgacgtcgacctgttcgagatcaacgaggcctttgccgtggtcaccctggcggccatgaaacaccttgacctgccccacgacaaggtcaacatccacggtggcgcctgcgcccttggccacccgatcggcgcttcgggcgcacgcatcctggtgaccctgctgtcggcccttcgccagaacaacctgcgccgcggcgtggcggccatctgcattggcggcggcgaggccacggccatggccgtcgaatgcctgtactga

SEQ ID NO: 3364 - protein, 397 aa, Pseudomonas putida
MTLANDPIVIVSAVRTPMGGLQGDLKSLTAPQLGSAAIRGAVERAGIDAASVEQVLFGCVLPAGLGQAPARQAALGAGLDKHTTCTTLNKMCGSGMQAAIMAHDLLVAGTAYVVVAGGMESMTNAPYLLDKARGGYRMGHGKIIDHMFMDGLEDAYDKGRLMGTFAEDCAQANAFSREAQDQFAITSLTRAQDAISSGRFAAEIVPVEVTEGKEKRVIKDDEHPPKARLDKIPQLKPAFREGGTVTAANSSSISDGAAALVLMRRSEAEKRGLEALAVIHGHAAFADTPALFPTAPIGAIDKLMKRTGWNLADVDLFEINEAFAVVTLAAMKHLDLPHDKVNIHGGACALGHPIGASGARILVTLLSALRQNNLRRGVAAICIGGGEATAMAVECLY

SEQ ID NO: 3365 - DNA, 1230 bp, Laccaria bicolor
  CDS (1)..(1230)
atgtcaatccaacaagcttccacctcctccgcaaaagccgccattctccaaaagaacgacaacgacgtcgtcatagtctgtgcagtccgttccgccatcacaaagggcagaaaaggaggcttcaaagacaccaaacccgaactcatcctctcccacgtcctccgcgcagcatactccaaaatcagcctagaccccaagctcatcgaagatatcgcggtaggcaacgtactccctccgggaggaggcgcctccgccgcacgcatggcagccctccacgccggcatacccgtcgaaacctccatcaataccgtcaatcgccaatgttcgtcaggcctcacggccatcaaccagatcgcgaaccagattcgcgcagggcagatcgatattggtattggagccggcgtcgaatcaatgacacacggcttcggctcccgcgcagcccccgaagtatccgacgaagtcctctccaaccaagacgcagaagactgtctcctccccatggggatcacttccgaaaacgttgcggccgactaccacatcccccgatccactcaagacgccttttccgctaaatccttccaaaaagccgcagcagctaacaaagcaggtaaattcaagtctgaaatcgtccccatcttggcaaaatggatagacccaaagacggaggaggttaaagaggtgttggtgaatgaggatgatgggattagggagggggttacggctgaaagccttgcgaagattaaacctgcttttaagaaagatggcgtcactcatgctggcaacgcatcccaagtctcagacggcgcagccgcaataatcctcgcccgccgctccgtcgccacacgcctcggcctcccaatcctaggcaaattcgtaaacgcgtcaactatcggcgtcccaccccgaatcatgggcgtcggccccgcctacgccatcccgcgcgttctcaaactgacaggcctgagtttggacgatgtggatttctttgagattaatgaggcgtttgcgagtcaggcgttgttttcgattgatacgttgaagattgcgcatgagaaggttaatttgaatgggggtgctattgctttggggcatcctttggggtgtactggtgcgagacaggtagctacgggcttgaatatcgcgaagcagacgggtggaagggtcttcgtgacgagtatgtgtattgggtctgggatggggatggctgctgttttcgttagtgagcagtaa

SEQ ID NO: 3366 - protein, 409 aa, Laccaria bicolor
MSIQQASTSSAKAAILQKNDNDVVIVCAVRSAITKGRKGGFKDTKPELILSHVLRAAYSKISLDPKLIEDIAVGNVLPPGGGASAARMAALHAGIPVETSINTVNRQCSSGLTAINQIANQIRAGQIDIGIGAGVESMTHGFGSRAAPEVSDEVLSNQDAEDCLLPMGITSENVAADYHIPRSTQDAFSAKSFQKAAAANKAGKFKSEIVPILAKWIDPKTEEVKEVLVNEDDGIREGVTAESLAKIKPAFKKDGVTHAGNASQVSDGAAAIILARRSVATRLGLPILGKFVNASTIGVPPRIMGVGPAYAIPRVLKLTGLSLDDVDFFEINEAFASQALFSIDTLKIAHEKVNLNGGAIALGHPLGCTGARQVATGLNIAKQTGGRVFVTSMCIGSGMGMAAVFVSEQ

SEQ ID NO: 3367 - DNA, 1221 bp, Streptomyces venezuelae
  CDS (1)..(1221): transl_table=11
atgcccgaagccgtgatcgtctcgaccgcccgctcgcccatcggccgggccttcaagggctccctcaaggacctgcggccggacgacctcaccgcgaccatcgtccaggccgcgctggccaaggtgccggagctcgacccgcgcgacatcgacgacctgatgctgggctgcggcctcccgggcggcgagcagggcaacaacctgggccgcatcgtggccgtgcagatgggcatggaccacctgccgggctgcacgatccaccgctactgctcctcctcgctgcagacctcccggatggcgctgcacgcgatcaaggcgggcgagggcgacgtcttcatctcggccggtgtcgagatggtgtcccgcttcgtgaagggcaactcggactccctgcccgacacgcacaacccgctcttcgccgacgccgaggcccgcacggccgccgtcgccgcctccgagggctccagctggcacgacccgcgcgaggacggcctcgtccccgacgcgtacatcgccatgggccagaccgccgagaacctggcccgctggaagggcatcacgcgccaggagatggacgagttcggcgtgcggtcgcagaacctcgccgagcaggccatcaagaacggcttctgggagcgggagatcacccccgtgacgctgccggacggcaccgtcgtctcgaccgacgacggcccgcgcgccggtgtcaccctggagggcgtctccggcctcaagccggtcttccgccccgacggcctggtcaccgccggcaactgctgcccgctgaaccacggcgccgccgcgctcgtgatcatgtcggacaccaaggcccgcgagctcggcctcacgccgctcgcccgcatcgtctccaccggcgtctccggcctctcccccgagatcatgggcctcggcccggtcgaggcctcgaagcaggccctccagcgcgccggcctgaccatcggcgacatcgacctggccgagatcaacgaggccttcgccgcccaggtcatcccgtcctaccaggagctcggcctggacctggacaaggtgaacgtcaacggtggcgccatcgccgtcggccaccccttcggcatgaccggcgcccggatcaccggcacgctgatcaacagcctccagttccacgacaagcagttcggcctggagaccatgtgcgtcggcggcggccagggcatggccatggtcatcgagcgcctctcctga

SEQ ID NO: 3368 - protein, 406 aa, Streptomyces venezuelae
MPEAVIVSTARSPIGRAFKGSLKDLRPDDLTATIVQAALAKVPELDPRDIDDLMLGCGLPGGEQGNNLGRIVAVQMGMDHLPGCTIHRYCSSSLQTSRMALHAIKAGEGDVFISAGVEMVSRFVKGNSDSLPDTHNPLFADAEARTAAVAASEGSSWHDPREDGLVPDAYIAMGQTAENLARWKGITRQEMDEFGVRSQNLAEQAIKNGFWEREITPVTLPDGTVVSTDDGPRAGVTLEGVSGLKPVFRPDGLVTAGNCCPLNHGAAALVIMSDTKARELGLTPLARIVSTGVSGLSPEIMGLGPVEASKQALQRAGLTIGDIDLAEINEAFAAQVIPSYQELGLDLDKVNVNGGAIAVGHPFGMTGARITGTLINSLQFHDKQFGLETMCVGGGQGMAMVIERLS

SEQ ID NO: 3369 - DNA, 1203 bp, Streptomyces sp. 2065
  CDS (1)..(1203): transl_table=11
atgaacccggtttacatcgtcgacgccgtccgcacccccatcggcaggtacagcggaggcctcgcctccgtccgccccgacgacctcgccgcccacgccctccgcgaactcctcgcccgcacccccgacttggacccctcccgcatcgaggacgtctacttcggcaacgcgaacggcgcaggcgaggagaaccgcaacgtcggccgcatggccgccctcctcgcgggcctgcccacctccgtgccgggcgtcacggtcaaccggctctgcgcctccggcctcgaagcggtcatccaggcggcccgcgccatcgcggtcggcgacgcctccatcgccgtcgcgggcggggtggagtcgatgacccgggcgccgtacgtgctgccgaagtcggaccggccgttccccgccgggcacaccgagctgtactcgaccacgctcggctggcgcatggtcaacccggcgatgaacccggagtggaccatcccgctcggcgagagcgcggagctgatcgccgacaagcacaagatcagccgcgagcagcaggacgagttcgcgctcgccagtcaccggaaggcggcggacgcgcaggccgccgggctcttcgacggcgagatcgcccccgtcgccatcccgcagcgcaagggcgacccggtcctcttcgccgccgacgagtccgtacgcgcggacgcctccctcgccgccatggccaagctcaagccgtccttccgccccgagaacggcacggtgaccgcgggcaacgcgtcccccctcaacgacggtgccgccgcgctcctcctggtcgacgaggaggggttgaaggccaccggccgccagcccctcgcccgtgtctccgcgaccggtgtctccgcgatcgacccgcagtacttcgggctcgcccccgtcgaagcggtcaaccgcgcactgaccaaggcaggcaagggatttgacgatctgtcagtcctcgaactgaacgaggcgttcgccgcgcaggtgctcggatgtgtcgccgagtggccggagttcgactccgcgatcctcaacccgcagggcggcgccatcgccctcggccacccgctcggcgcctccggtgcccggctcgcaggcaccgtcgcgcaccaactcgcccgcaagggcacgggagttggcgtcgccaccctctgcatcggcgtgggccagggcctggccctcgtcctcgaacggtag

SEQ ID NO: 3370 - protein, 400 aa, Streptomyces sp. 2065
MNPVYIVDAVRTPIGRYSGGLASVRPDDLAAHALRELLARTPDLDPSRIEDVYFGNANGAGEENRNVGRMAALLAGLPTSVPGVTVNRLCASGLEAVIQAARAIAVGDASIAVAGGVESMTRAPYVLPKSDRPFPAGHTELYSTTLGWRMVNPAMNPEWTIPLGESAELIADKHKISREQQDEFALASHRKAADAQAAGLFDGEIAPVAIPQRKGDPVLFAADESVRADASLAAMAKLKPSFRPENGTVTAGNASPLNDGAAALLLVDEEGLKATGRQPLARVSATGVSAIDPQYFGLAPVEAVNRALTKAGKGFDDLSVLELNEAFAAQVLGCVAEWPEFDSAILNPQGGAIALGHPLGASGARLAGTVAHQLARKGTGVGVATLCIGVGQGLALVLER

SEQ ID NO: 3371 - DNA, 1179 bp, Azohydromonas lata
  CDS (1)..(1179): transl_table=11
atgaccgacatcgtcatcgtcgccgcagcccgcaccgccgtgggcaagttcggcggctcgctggccaagatcccggcgcctgagctgggcgctgccgtgatcaaggccctgctggaaaaaaccggcgtgggcgccgaccagatcggtgaagtcatcatgggccaggtgctggccgccggcgcgggccagaacccggctcgccaggccatgatgaaggcgggcatcgccaaggaaacgccggcgctgaccatcaacgccgtgtgcggctccggcctgaaggccgtgatgctggcggcccaagccatcgcctggggcgacagcgagatcgtcatcgccggcggccaggaaaacatgtccgccagcccgcacgtgctgcaaggcagccgcgacggccagcgcatgggcgactggaagatggtcgacaccatgatcaacgacggcctgtgggacgtgtacaacaagtaccacatgggcatcacggccgagaacgtcgccaaggcgcacgacatcacccgtgagcagcaggacgccctggccctggccagccagcaaaaggccaccgccgcccaggaagccggcaagttcaaggacgagatcgttcccgtcgccattccgcagcgcaagggcgatccggtgatgttcgacaccgacgagttcatcaacaagaagaccaacgccgaagcgctggccggcctgcgtccggccttcgacaaggccggctcggtgaccgcgggcaacgcctccggcatcaacgacggcgccgccgccgtgatggtcatgtcggccgccaaggccgagcaactgggcctgaagccgctggcgcgcatcgccagcttcggcaccagcggcctggaccccgccaccatgggcatgggcccggtgccggccacgcgcaaggcgctggagcgcgccggctggcaagtcggcgacgtggacctgttcgagctgaacgaagccttcgccgcccaagcctgcgcggtgaacaaggagctgggcgtggacccggccaaggtcaacgtcaacggtggcgccatcgccatcggccaccccatcggcgcctccggctgccgcgtgctggtgacgctgctgcacgaaatgcagcgccgcgacgccaagaagggcgtggccgcgctgtgcatcggtggcggcatgggcgtgtcgctggccgtcgagcgctga

SEQ ID NO: 3372 - protein, 392 aa, Azohydromonas lata
MTDIVIVAAARTAVGKFGGSLAKIPAPELGAAVIKALLEKTGVGADQIGEVIMGQVLAAGAGQNPARQAMMKAGIAKETPALTINAVCGSGLKAVMLAAQAIAWGDSEIVIAGGQENMSASPHVLQGSRDGQRMGDWKMVDTMINDGLWDVYNKYHMGITAENVAKAHDITREQQDALALASQQKATAAQEAGKFKDEIVPVAIPQRKGDPVMFDTDEFINKKTNAEALAGLRPAFDKAGSVTAGNASGINDGAAAVMVMSAAKAEQLGLKPLARIASFGTSGLDPATMGMGPVPATRKALERAGWQVGDVDLFELNEAFAAQACAVNKELGVDPAKVNVNGGAIAIGHPIGASGCRVLVTLLHEMQRRDAKKGVAALCIGGGMGVSLAVER

SEQ ID NO: 3373 - DNA, 1185 bp, Escherichia coli (strain K12)
  CDS (1)..(1185): transl_table=11
atgaaaaattgtgtcatcgtcagtgcggtacgtactgctatcggtagttttaacggttcactcgcttccaccagcgccatcgacctgggggcgacagtaattaaagccgccattgaacgtgcaaaaatcgattcacaacacgttgatgaagtgattatgggtaacgtgttacaagccgggctggggcaaaatccggcgcgtcaggcactgttaaaaagcgggctggcagaaacggtgtgcggattcacggtcaataaagtatgtggttcgggtcttaaaagtgtggcgcttgccgcccaggccattcaggcaggtcaggcgcagagcattgtggcggggggtatggaaaatatgagtttagccccctacttactcgatgcaaaagcacgctctggttatcgtcttggagacggacaggtttatgacgtaatcctgcgcgatggcctgatgtgcgccacccatggttatcatatggggattaccgccgaaaacgtggctaaagagtacggaattacccgtgaaatgcaggatgaactggcgctacattcacagcgtaaagcggcagccgcaattgagtccggtgcttttacagccgaaatcgtcccggtaaatgttgtcactcgaaagaaaaccttcgtcttcagtcaagacgaattcccgaaagcgaattcaacggctgaagcgttaggtgcattgcgcccggccttcgataaagcaggaacagtcaccgctgggaacgcgtctggtattaacgacggtgctgccgctctggtgattatggaagaatctgcggcgctggcagcaggccttacccccctggctcgcattaaaagttatgccagcggtggcgtgccccccgcattgatgggtatggggccagtacctgccacgcaaaaagcgttacaactggcggggctgcaactggcggatattgatctcattgaggctaatgaagcatttgctgcacagttccttgccgttgggaaaaacctgggctttgattctgagaaagtgaatgtcaacggcggggccatcgcgctcgggcatcctatcggtgccagtggtgctcgtattctggtcacactattacatgccatgcaggcacgcgataaaacgctggggctggcaacactgtgcattggcggcggtcagggaattgcgatggtgattgaacggttgaattaa

SEQ ID NO: 3374 - protein, 394 aa, Escherichia coli (strain K12)
MKNCVIVSAVRTAIGSFNGSLASTSAIDLGATVIKAAIERAKIDSQHVDEVIMGNVLQAGLGQNPARQALLKSGLAETVCGFTVNKVCGSGLKSVALAAQAIQAGQAQSIVAGGMENMSLAPYLLDAKARSGYRLGDGQVYDVILRDGLMCATHGYHMGITAENVAKEYGITREMQDELALHSQRKAAAAIESGAFTAEIVPVNVVTRKKTFVFSQDEFPKANSTAEALGALRPAFDKAGTVTAGNASGINDGAAALVIMEESAALAAGLTPLARIKSYASGGVPPALMGMGPVPATQKALQLAGLQLADIDLIEANEAFAAQFLAVGKNLGFDSEKVNVNGGAIALGHPIGASGARILVTLLHAMQARDKTLGLATLCIGGGQGIAMVIERLN

SEQ ID NO: 3375 - DNA, 1164 bp, Escherichia coli (strain K12)
  CDS (1)..(1164): transl_table=11
atggaacaggttgtcattgtcgatgcaattcgcaccccgatgggccgttcgaagggcggtgcttttcgtaacgtgcgtgcagaagatctctccgctcatttaatgcgtagcctgctggcgcgtaacccggcgctggaagcggcggccctcgacgatatttactggggttgtgtgcagcagacgctggagcagggttttaatatcgcccgtaacgcggcgctgctggcagaagtaccacactctgtcccggcggttaccgttaatcgcttgtgtggttcatccatgcaggcactgcatgacgcagcacgaatgatcatgactggcgatgcgcaggcatgtctggttggcggcgtggagcatatgggccatgtgccgatgagtcacggcgtcgattttcaccccggcctgagccgcaatgtcgccaaagcggcgggcatgatgggcttaacggcagaaatgctggcgcgtatgcacggtatcagccgtgaaatgcaggatgcctttgccgcgcggtcacacgcccgcgcctgggccgccacgcagtcggccgcatttaaaaatgaaatcatcccgaccggtggtcacgatgccgacggcgtcctgaagcagtttaattacgacgaagtgattcgcccggaaaccaccgtggaagccctcgccacgctgcgtccggcgtttgatccagtaaacggtatggtaacggcgggcacatcttctgcactttccgatggcgcagctgccatgctggtgatgagtgaaagccgcgcccatgaattaggtcttaagccgcgcgctcgtgtgcgttcgatggcggtcgttggttgtgacccatcgattatgggttacggcccggttccggcctcgaaactggcgctgaaaaaagcggggctttctgccagcgatatcggcgtgtttgaaatgaacgaagcctttgccgcgcagatcctgccatgtattaaagatctgggactaattgagcagattgacgagaagatcaacctcaacggtggcgcgatcgcgctgggtcatccgctgggttgttccggtgcgcgtatcagcaccacgctgctgaatctgatggaacgcaaagacgttcagtttggtctggcgacgatgtgtatcggtctgggtcagggtattgcgacggtgtttgagcgggtttaa

SEQ ID NO: 3376 - protein, 387 aa, Escherichia coli (strain K12)
MEQVVIVDAIRTPMGRSKGGAFRNVRAEDLSAHLMRSLLARNPALEAAALDDIYWGCVQQTLEQGFNIARNAALLAEVPHSVPAVTVNRLCGSSMQALHDAARMIMTGDAQACLVGGVEHMGHVPMSHGVDFHPGLSRNVAKAAGMMGLTAEMLARMHGISREMQDAFAARSHARAWAATQSAAFKNEIIPTGGHDADGVLKQFNYDEVIRPETTVEALATLRPAFDPVNGMVTAGTSSALSDGAAAMLVMSESRAHELGLKPRARVRSMAVVGCDPSIMGYGPVPASKLALKKAGLSASDIGVFEMNEAFAAQILPCIKDLGLIEQIDEKINLNGGAIALGHPLGCSGARISTTLLNLMERKDVQFGLATMCIGLGQGIATVFERV

SEQ ID NO: 3377 - DNA, 1164 bp, Erwinia carotovora subsp. atroseptica
  CDS (1)..(1164): transl_table=11
atggaaaaggtagtgattgttgatgccgtacgcacgccgatggggcgatccaaaggcggagccttccgtcaggtgagagccgaagacctgtccgcacacctgatgcgtagcctattgagccgtaacacagcgttagatgcccgtgagatcgacgatatctattggggatgtgtacagcaggcactggaacaaggtttcaacgtggcccgtaacgccgctttgttagctgaaatcccggtgagcgtacccgcaacgacagttaacagactctgtggttcttctatgcaggcgctccacgatgccgcccgtgcgattatggttggcgacgcgaatgtctgtttaatcggcggcgttgagcatatggggcatgtgccgatgaatcatggcgtcgattttcatccggggctgagccgcactatagctaaagccgcaggaatgatggggctgacggccgaaatgctcgcgcgtatgcacaatattagccgtgagatgcaggatcaattcgccgcccgctcgcaccaacgggcctatcacgccacccaatcaggcgcatttcgtcatgaaatcgtccccacggcgggccatgatgcagacggtgcgctgcaacgtttcgattatgatgaagtgattcgcccggatactaccatcgatagtcttgccgctctcaaaccggcattcgatccggttaacggcacggtgacagctgggtcatcctctgctctatccgatggcgcatcggccatgttgatcatgagcgaatcccgcgcagcatcattaggcttacccgtgcgggcacgaattcgggccatggccgtggtgggttgcgatccctcaattatgggctatggcccggtcccggccaccaaactagcgttgaagcgagcaggcttgagtctggccgatatcggcatctttgaactgaatgaggcattcgctgcccaaacgctaccctgcattaaagatctgggtctattggaacagctcgatgaaaaggtcaatctcaacggcggggccatcgcgctgggccatccactcggctgttcgggggcacgcatctccaccacattgattaatctgatggaaagccgcgacgctcagtttggagtagcgacgatgtgcatcggcttaggacaaggtattgcgacagtatttgaacgagcctga

SEQ ID NO: 3378 - protein, 387 aa, Erwinia carotovora subsp. atroseptica
MEKVVIVDAVRTPMGRSKGGAFRQVRAEDLSAHLMRSLLSRNTALDAREIDDIYWGCVQQALEQGFNVARNAALLAEIPVSVPATTVNRLCGSSMQALHDAARAIMVGDANVCLIGGVEHMGHVPMNHGVDFHPGLSRTIAKAAGMMGLTAEMLARMHNISREMQDQFAARSHQRAYHATQSGAFRHEIVPTAGHDADGALQRFDYDEVIRPDTTIDSLAALKPAFDPVNGTVTAGSSSALSDGASAMLIMSESRAASLGLPVRARIRAMAVVGCDPSIMGYGPVPATKLALKRAGLSLADIGIFELNEAFAAQTLPCIKDLGLLEQLDEKVNLNGGAIALGHPLGCSGARISTTLINLMESRDAQFGVATMCIGLGQGIATVFERA

SEQ ID NO: 3379 - DNA, 1176 bp, Pseudomonas oleovorans
  CDS (1)..(1176): transl_table=11
atgagcctgaatccaagagacgtggtgattgtcgacttcggtcgcacgccgatgggccgctccaagggtggcatgcaccgcaatacccgcgccgaagacatgtcggcgcacctgatcagcaagctgctggaacgcaacgacaaggtcgacccgaaagaagtcgaggacgtgatctggggctgcgtcaaccagaccctcgagcagggctggaacatcgcccgcatggcctcgctgatgacccagatcccgcacacctccgcggcgcagaccgtcagccgcctgtgcggctcgtcgatgagcgcgctgcacaccgccgcccaggcgatcatgaccggcaacggtgatgtattcgtggtcggtggcgtggagcacatgggccacgtcagcatgatgcatggcgtcgaccccaacccgcacctgtccttgcatgccgccaaggcttccgggatgatgggcctgaccgcggaaatgctcggcaagatgcacggcatcacccgtgagcagcaggacctgttcggcctgcgttcgcaccagctggcgcacaaggccacggtcgaaggcaagttcaaggacgaaatcatcccgatgcagggctatgacgagaacggcttcctgaaggtgttcgatttcgacgaaaccattcgcccggaaaccactctcgaaggcctggcgtcgctgaagccggcgttcaacccgaaaggcggtaccgtcactgccggtacctcgtcgcagatcaccgacggtgcgtcgtgcatggtcgtcatgtccggccagcgcgccatggacctgggtatccagccattggcggtcatccgttccatggcggtggctggtgtcgacccggcgatcatgggctacggcccggtgccatcgacccagaaagccctcaagcgtgctggcctgaccatggccgacatcgacttcatcgagctcaacgaagccttcgctgcacaggccctgccagtgctgaaagacttgaaagtactcgacaagatggatgagaaggttaacctgcacggcggcgccattgccttgggccacccgttcggttgctccggggcacggatttccggcaccctgctcaatgtcatgaagcagaatggcggtaccctgggggtggcgaccatgtgcgtcggcctcggccaaggtatcaccaccgtcttcgagcgcatctaa

SEQ ID NO: 3380 - protein, 391 aa, Pseudomonas oleovorans
MSLNPRDVVIVDFGRTPMGRSKGGMHRNTRAEDMSAHLISKLLERNDKVDPKEVEDVIWGCVNQTLEQGWNIARMASLMTQIPHTSAAQTVSRLCGSSMSALHTAAQAIMTGNGDVFVVGGVEHMGHVSMMHGVDPNPHLSLHAAKASGMMGLTAEMLGKMHGITREQQDLFGLRSHQLAHKATVEGKFKDEIIPMQGYDENGFLKVFDFDETIRPETTLEGLASLKPAFNPKGGTVTAGTSSQITDGASCMVVMSGQRAMDLGIQPLAVIRSMAVAGVDPAIMGYGPVPSTQKALKRAGLTMADIDFIELNEAFAAQALPVLKDLKVLDKMDEKVNLHGGAIALGHPFGCSGARISGTLLNVMKQNGGTLGVATMCVGLGQGITTVFERI

SEQ ID NO: 3381 - DNA, 1176 bp, Pseudomonas putida
  CDS (1)..(1176): transl_table=11
atgagcctgaatccaagagacgtggtgattgtcgacttcggtcgcacgccaatgggccgctccaagggtggcatgcaccgcaatacccgcgccgaggacatgtcggcgcacctgatcagcaagctgctggagcgtaacgacaaggtcgacccgaaggaagtcgaggacgtgatctggggctgcgtcaaccagaccctggagcaggggtggaacatcgcccgcatggcgtcgctgatgaccccgatcccgcacacttctgcagcgcagaccgtcagccgcctgtgcggctcgtcgatgagcgcactgcacaccgctgcccaggcgatcatgaccggtaacggcgatgtgttcgtgattggcggggtggagcacatgggccacgtcagcatgatgcacggcgtcgaccccaacccgcacctgtccttgcatgcagccaaggcttccgggatgatgggcctgactgcggaaatgctcggcaagatgcacggcatcacccgtgagcagcaagacctgttcggcgtgcgttcgcaccaattggcccacaaggccacggtcgaaggcaagttcaaggacgagatcatcccgatgcagggctatgacgagaacggcttcctgaaggtgttcgatttcgacgaaaccattcgcccggaaaccaccctcgaaggcctggcgtcgctcaagcccgcgtttaacccgaaaggcggtaccgtcactgccggtacctcgtcgcagatcaccgacggcgcttcgtgcatgatcgtcatgtccggccagcgtgcgatggacctgggtatccagccattggcggtgatccgttcgatggcggtggccggtgtcgatccggcgatcatgggttatggcccggtgccgtcgacccaaaaagccctcaagcgcgccgggctgaccatggccgacatcgacttcatcgagctcaacgaagcctttgctgcacaggccttgccagtgctgaaagacttgaaagtgctcgacaagatggatgagaaggttaacctgcacggcggcgccattgctttgggccacccgttcggttgctccggggcacgtatttcgggcaccctgctcaacgtcatgaagcagaatggcggtaccctgggggtggcgaccatgtgcgtcggcctcggtcaaggtatcaccactgtctttgaacgcgtctga

SEQ ID NO: 3382 - protein, 391 aa, Pseudomonas putida
MSLNPRDVVIVDFGRTPMGRSKGGMHRNTRAEDMSAHLISKLLERNDKVDPKEVEDVIWGCVNQTLEQGWNIARMASLMTPIPHTSAAQTVSRLCGSSMSALHTAAQAIMTGNGDVFVIGGVEHMGHVSMMHGVDPNPHLSLHAAKASGMMGLTAEMLGKMHGITREQQDLFGVRSHQLAHKATVEGKFKDEIIPMQGYDENGFLKVFDFDETIRPETTLEGLASLKPAFNPKGGTVTAGTSSQITDGASCMIVMSGQRAMDLGIQPLAVIRSMAVAGVDPAIMGYGPVPSTQKALKRAGLTMADIDFIELNEAFAAQALPVLKDLKVLDKMDEKVNLHGGAIALGHPFGCSGARISGTLLNVMKQNGGTLGVATMCVGLGQGITTVFERV

SEQ ID NO: 3383 - DNA, 1311 bp, Escherichia coli (strain K12)
  CDS (1)..(1311): transl_table=11
atgggtcaggttttaccgctggttacccgccagggcgatcgtatcgccattgttagcggtttacgtacgccttttgcccgtcaggcgacggcttttcatggcattcccgcggttgatttagggaagatggtggtaggcgaactgctggcacgcagcgagatccccgccgaagtgattgaacaactggtctttggtcaggtcgtacaaatgcctgaagcccccaacattgcgcgtgaaattgttctcggtacgggaatgaatgtacataccgatgcttacagcgtcagccgcgcttgcgctaccagtttccaggcagttgcaaacgtcgcagaaagcctgatggcgggaactattcgagcggggattgccggtggggcagattcctcttcggtattgccaattggcgtcagtaaaaaactggcgcgcgtgctggttgatgtcaacaaagctcgtaccatgagccagcgactgaaactcttctctcgcctgcgtttgcgcgacttaatgcccgtaccacctgcggtagcagaatattctaccggcttgcggatgggcgacaccgcagagcaaatggcgaaaacctacggcatcacccgagaacagcaagatgcattagcgcaccgttcgcatcagcgtgccgctcaggcatggtcagacggaaaactcaaagaagaggtgatgactgcctttatccctccttataaacaaccgcttgtcgaagacaacaatattcgcggtaattcctcgcttgccgattacgcaaagctgcgcccggcgtttgatcgcaaacacggaacggtaacggcggcaaacagtacgccgctgaccgatggcgcggcagcggtgatcctgatgactgaatcccgggcgaaagaattagggctggtgccgctggggtatctgcgcagctacgcatttactgcgattgatgtctggcaggacatgttgctcggtccagcctggtcaacaccgctggcgctggagcgtgccggtttgacgatgagcgatctgacattgatcgatatgcacgaagcctttgcagctcagacgctggcgaatattcagttgctgggtagtgaacgttttgctcgtgaagcactggggcgtgcacatgccactggcgaagtggacgatagcaaatttaacgtgcttggcggttcgattgcttacgggcatcccttcgcggcgaccggcgcgcggatgattacccagacattgcatgaacttcgccgtcgcggcggtggatttggtttagttaccgcctgtgctgccggtgggcttggcgcggcaatggttctggaggcggaataa

SEQ ID NO: 3384 - protein, 436 aa, Escherichia coli (strain K12)
MGQVLPLVTRQGDRIAIVSGLRTPFARQATAFHGIPAVDLGKMVVGELLARSEIPAEVIEQLVFGQVVQMPEAPNIAREIVLGTGMNVHTDAYSVSRACATSFQAVANVAESLMAGTIRAGIAGGADSSSVLPIGVSKKLARVLVDVNKARTMSQRLKLFSRLRLRDLMPVPPAVAEYSTGLRMGDTAEQMAKTYGITREQQDALAHRSHQRAAQAWSDGKLKEEVMTAFIPPYKQPLVEDNNIRGNSSLADYAKLRPAFDRKHGTVTAANSTPLTDGAAAVILMTESRAKELGLVPLGYLRSYAFTAIDVWQDMLLGPAWSTPLALERAGLTMSDLTLIDMHEAFAAQTLANIQLLGSERFAREALGRAHATGEVDDSKFNVLGGSIAYGHPFAATGARMITQTLHELRRRGGGFGLVTACAAGGLGAAMVLEAE

SEQ ID NO: 3385 - DNA, 1314 bp, Erwinia carotovora subsp. atroseptica
  CDS (1)..(1314): transl_table=11
atgagcgaggtattacctctgataacccgccgtggcgatcgcattgcgttcgtgagcggattacgcaccccatttgcccggcaggcaacggcctaccatggcgtacctgccatcgagttagggaagctcgtcaccagtgagttactggttcgaaccggtatcgatcctgagctgatcgagctactggtgtttgggcaggtggtccaaatgcctgaagcgccgaatatcgccagagagatcgtgcttggtacgggcatgagcgtgcataccgatgcgtatagtgtttcccgcgcttgtgccaccagctttcaggctgtcgctaatgtggcagaaagcattatggcgggtacggtggaagtcggtattgctgggggcgcggattcctcttctgtgctacccattggcgtcagtaaagcgctggccagaacgctggtggatatgaacaaggcccgaacgctgggccagaagttgaggctgttgagcggcctgcgtccgaaagacttgctcccggttgcgcccgccgtggcggagtattccactgggctgcgtatgggggatactgcggaacagatggcaaaaacctacggcatcacgcgtgaagaacaggatgaactggcacaccgctcgcacaagctggccgcacaggcctgggaatctggcgtgctgcgggatgaagtgatgacggcttacgtccccccttacgagaaggcgttgagtgaagataacaacgtgcgccatgactccgccatagagcagtattcgcgtttacgtccggcgttcgatcgccgacacggtacggtgacggcggcaaacagcacgccgctaacggatggcgcagcggcagtcttgatgatgagtgaatccaaggccaaaagtctggggcttacgccgttaggctatctacgcagttatgcattcagtgccatcggcgtgcagcgtgatatgttgttggggcctgcctatgcttccccgcttgcgctggcaagagcgggtgtggcgttggccgatctaacgctcattgatatgcacgaagcctttgctgcccagacgctggcaaatctgaagctgtttgccagcgatgaatttgctcggaatcaattgggcagaaatgccgcgctgggtgaggtggatcgcgctaagttcaacgtattgggtggctctattgcctatgggcatccttttgctgccactggcgcgaggatgattacccaaacgctgaatgaactgcgccgtcgcggtggcgggctgggattaaccaccgcctgcgcggcaggcgggctgggcgctgcaatggtactggaggtgacgccatga

SEQ ID NO: 3386 - protein, 437 aa, Erwinia carotovora subsp. atroseptica
MSEVLPLITRRGDRIAFVSGLRTPFARQATAYHGVPAIELGKLVTSELLVRTGIDPELIELLVFGQVVQMPEAPNIAREIVLGTGMSVHTDAYSVSRACATSFQAVANVAESIMAGTVEVGIAGGADSSSVLPIGVSKALARTLVDMNKARTLGQKLRLLSGLRPKDLLPVAPAVAEYSTGLRMGDTAEQMAKTYGITREEQDELAHRSHKLAAQAWESGVLRDEVMTAYVPPYEKALSEDNNVRHDSAIEQYSRLRPAFDRRHGTVTAANSTPLTDGAAAVLMMSESKAKSLGLTPLGYLRSYAFSAIGVQRDMLLGPAYASPLALARAGVALADLTLIDMHEAFAAQTLANLKLFASDEFARNQLGRNAALGEVDRAKFNVLGGSIAYGHPFAATGARMITQTLNELRRRGGGLGLTTACAAGGLGAAMVLEVTP

SEQ ID NO: 3387 - DNA, 1206 bp, Escherichia coli
  CDS (1)..(1206): transl_table=11
atgcgtgaagcctttatctgtgacggaattcgtacgccaattggccgctatggtggggcattatcaggtgttcgggctgacgatctggctgctatccctttgcgggagctgctggtgcgaaacccgcgtctcgatgcggagtgtatcgatgatgtgatcctcggctgtgctaatcaggcgggagaagacaaccgtaacgtagcccggatggcgacgttactggcggggctgccgcagagtgtttccggcacaaccattaaccgcttgtgtggttccgggctggacgcactggggttcgccgcacgggcgattaaagcgggcgatggcgatttgctgatcgctggtggcgtggagtcaatgtctcgggcaccgtttgttatgggcaaggcaaccagtgcattttctcgtcaggctgagatgtttgataccactattggctggcgatttgtgaacccgctcatggctcaacaatttggaactgacagcatgccggaaacggcagagaatgtagctgaactgttaaaaatatcgcgagaagatcaagatagttttgcgctacgcagtcagcaacgtacggcaaaagcgcaatcctcaggcattctggctgaggagattgttccggttgtgttgaaaaacaagaaaggcgttgtaacagaaatacaacatgatgagcatctgcgcccggaaacgacgctggaacagttacgtgggttaaaagcaccatttcgtgccaatggggtgattaccgcaggcaatgcctccggggtgaatgacggagccgctgcgttgattattgccagtgaacagatggcagcagcgcaaggactgacaccgcgggcgcgaatcgtagccatggcaaccgccggggtggaaccgcgcctgatggggcttggtccggtgcctgcaactcgccgggtgctggaacgcgcggggctgagtattcacgatatggacgtgattgaactgaacgaagcgttcgcggcccaggcgttgggtgtactacgcgaattggggctgcctgatgatgccccacatgttaaccccaacggaggcgctatcgccttaggccatccgttgggaatgagtggtgcccgcctggcactggctgccagccatgagctgcatcggcgtaacggtcgttacgcattgtgcaccatgtgcatcggtgtcggtcagggcatcgccatgattctggagcgtgtttga

SEQ ID NO: 3388 - protein, 401 aa, Escherichia coli
MREAFICDGIRTPIGRYGGALSGVRADDLAAIPLRELLVRNPRLDAECIDDVILGCANQAGEDNRNVARMATLLAGLPQSVSGTTINRLCGSGLDALGFAARAIKAGDGDLLIAGGVESMSRAPFVMGKATSAFSRQAEMFDTTIGWRFVNPLMAQQFGTDSMPETAENVAELLKISREDQDSFALRSQQRTAKAQSSGILAEEIVPVVLKNKKGVVTEIQHDEHLRPETTLEQLRGLKAPFRANGVITAGNASGVNDGAAALIIASEQMAAAQGLTPRARIVAMATAGVEPRLMGLGPVPATRRVLERAGLSIHDMDVIELNEAFAAQALGVLRELGLPDDAPHVNPNGGAIALGHPLGMSGARLALAASHELHRRNGRYALCTMCIGVGQGIAMILERV

SEQ ID NO: 3389 - DNA, 1203 bp, Pseudomonas putida
  CDS (1)..(1203): transl_table=11
atgcgcgacgtatttatctgtgacgccatccgcacccccatcggccgcttcggcggcgccttggcgggtgtgcgtgccgacgacctggctgccgtgccgctgaaagcgctgatcgagccgaaccctgcggtgcagtgggaccaggttgatgaagtgttcttcggctgcgccaaccaggccggtgaagacaaccgcaacgtggcgcgcatggcgctgctgctggccggcctgccggagagcatcccgggcgtcaccctgaaccgcctgtgcgcgtcgggcatggatgccatcggcactgccttccgcgccatcgccagcggcgaaatggagctggcgattgccggcggcgtcgagtcgatgtcgcgcgcaccgttcgtcatgggcaaggctgaaagcggctattcgcgcaacatgaagctggaagacaccaccatcggctggcgcttcatcaacccgctgatgaagagccagtacggtgtggactccatgccggaaactgccgacaacgtggccgacgactaccaggtttcgcgcgctgaccaggacgctttcgccctgcgcagccagcagaaggctgcagccgcccaggctgccggcttcttcgccgaagaaatcgtaccggtgcgcattgcccacaagaagggcgaaaccatcgtcgagcgtgacgagcacctgcgcccggaaaccacgctggaggcgctgaccaagctcaagccggtcaacggcccggacaagactgtcaccgccggcaacgcctcgggcgtgaatgacggtgctgcggcgctgatcctggcgtcggcggaagcggtgaagaaacacggcctgaccccgcgtgcccgggtactgggcatggccagcggcggtgttgcaccacgggtgatgggcatcggcccggtaccggcagtgcgcaagctgaccgagcgcctgggtgtggcggtgagtgattttgatgtgatcgagctcaacgaagcctttgccagccaagggctggcggtactgcgtgagctgggtgtggccgacgatgcgccgcaggtgaacccgaatggcggtgcaatcgccctgggccatccgctgggcatgagcggtgcgcgcctggtgctgactgcgctgcatcagctggagaaaagtggcgggcgcaagggcctggcaaccatgtgcgtgggtgtcggccaaggtctggcgctggccatcgagcgggtgtga

SEQ ID NO: 3390 - protein, 400 aa, Pseudomonas putida
MRDVFICDAIRTPIGRFGGALAGVRADDLAAVPLKALIEPNPAVQWDQVDEVFFGCANQAGEDNRNVARMALLLAGLPESIPGVTLNRLCASGMDAIGTAFRAIASGEMELAIAGGVESMSRAPFVMGKAESGYSRNMKLEDTTIGWRFINPLMKSQYGVDSMPETADNVADDYQVSRADQDAFALRSQQKAAAAQAAGFFAEEIVPVRIAHKKGETIVERDEHLRPETTLEALTKLKPVNGPDKTVTAGNASGVNDGAAALILASAEAVKKHGLTPRARVLGMASGGVAPRVMGIGPVPAVRKLTERLGVAVSDFDVIELNEAFASQGLAVLRELGVADDAPQVNPNGGAIALGHPLGMSGARLVLTALHQLEKSGGRKGLATMCVGVGQGLALAIERV

SEQ ID NO: 3391 - DNA, 1212 bp, Candida tropicalis
  CDS (1)..(1212): transl_table=12
atggctctcccaccagtctacatcgtctccacagcaagaaccccaattggttccttccaaggttcgttatcttccttgacctactccgatttgggtgcccacgctgttaaggcagccttagccaaagtcccacagatcaagccacaagacgttgacgagatcgtttttggtggcgtcttgcaagccaacgttggtcaggcaccagccagacaagtcgccttgaaggcaggcttgccagactccatcgtcgcctccaccattaacaaagtctgtgcctccggtatgaaggccgtcattatcggtgcccaaaacatcatctgtggcaccagtgatatcgtcgttgttggtggtgccgaatccatgtctaacactccatactacttgccaagcgccagaagcggggccagatacggtgacgccatcatggttgacggtgtccagaaggatggtttgttggatgtttacgaagaaaaattaatgggtgtcgctgctgaaaaatgtgccaaggaccacggattcagcagagaagaccaggacaactttgccatcaactcttacaagaaggctggtaaggctttgagtgaaggcaagttcaaatccgaaatcgctccagtcactatcaaaggattcagaggcaagccggatactgttattgaaaacgatgaagagattggcaaattcaacgaagaaagactcaagtctgccagaactgtcttccaaaaggaaaacggtaccgttactgctccaaacgcttctaagttgaacgatggtggtgctgccttagtcttggtttctgaagccaagttgaagcaattgggcttgaagccattggccaagatctccggttggggtgaagctgccagaactccattcgatttcacgattgccccagctttggctgttccaaaagctgtcaagcacgccggtttgaccgttgacagagtcgacttctttgaattgaacgaagccttctccgttgttggtttggccaacgctgaattggtcaacatcccattggaaaaattgaacgtctacggtggtgctgttgccatgggtcacccattgggttgcagtggtgctagaattattgtcactttgttgtccgtcttgacccaagaaggcggtagattcggtgttgctggtgtctgtaatggcggtggtggtgcgtctgctgtcgttattgaaaagattgacgccgacgccaagttgtaa

SEQ ID NO: 3392 - protein, 403 aa, Candida tropicalis
MALPPVYIVSTARTPIGSFQGSLSSLTYSDLGAHAVKAALAKVPQIKPQDVDEIVFGGVLQANVGQAPARQVALKAGLPDSIVASTINKVCASGMKAVIIGAQNIICGTSDIVVVGGAESMSNTPYYLPSARSGARYGDAIMVDGVQKDGLLDVYEEKLMGVAAEKCAKDHGFSREDQDNFAINSYKKAGKALSEGKFKSEIAPVTIKGFRGKPDTVIENDEEIGKFNEERLKSARTVFQKENGTVTAPNASKLNDGGAALVLVSEAKLKQLGLKPLAKISGWGEAARTPFDFTIAPALAVPKAVKHAGLTVDRVDFFELNEAFSVVGLANAELVNIPLEKLNVYGGAVAMGHPLGCSGARIIVTLLSVLTQEGGRFGVAGVCNGGGGASAVVIEKIDADAKL

SEQ ID NO: 3393 - DNA, 1212 bp, Candida tropicalis
  CDS (1)..(1212): transl_table=12
atgaccctcccaccagtctacatcgtctccacagcaagaactccaattggttccttccaaggttcgttatcttccttgacctactccgatttgggtgcccacgccgttaaggcagctttagccaaggtcccacagatcaagccacaggacgtcgacgagatcgtctttggtggtgtcttgcaagccaacgttggtcaggcaccagccagacaagtcgccttgaaggcaggcttgccagactctatcattgcctccaccattaacaaagtctgtgcctccggtatgaaggccgtcattatcggtgcccaaaacatcatctgtggaaccagtgacatcgtcgttgttggtggtgccgaatccatgtctaacactccatactacttgccaagcgccagaagcggggccagatacggtgacgccgtcatggttgatggtgtccagaaggatggtttgttggatgtctacgaagaaaaattgatgggtgttgctgctgaaaagtgtgccaaggaccacggattcagcagagaagaccaggacaactttgccatcaactcttacaagaaggctggcaaggctttgagtgaaggtaagttcaaatcagaaatcgccccagtcaccattaaaggattcagaggcaagccagatactgttattgaaaatgatgaagagattggcaaattcaacgaagacagactcaagtctgccagaactgtcttccaaaaggaaaacggtactgttactgctccaaacgcttctaaattgaacgatggtggtgctgccttggtcttggtttctgaagccaagttgaagcaattgggcttgaagccattggccaagatctctggttggggtgaagctgccagaactccattcgatttcaccattgccccagctttggctgttccaaaggctgtcaagcacgctggtttgaccgttgacagagtcgacttctttgaattgaacgaagccttctccgttgttggtttggccaacgctgaattggtcaagatcccattggaaaaattgaacgtctacggtggtgctgtcgccatgggtcacccattgggttgcagtggtgctagaattattgtcaccttgttgtccgtcttgacccaagaaggcggtagatttggtgctgctggtgtctgtaacggtggtggtggtgcctctgccatcgtcattgaaaagattgactccgatgccaagttgtaa

SEQ ID NO: 3394 - protein, 403 aa, Candida tropicalis
MTLPPVYIVSTARTPIGSFQGSLSSLTYSDLGAHAVKAALAKVPQIKPQDVDEIVFGGVLQANVGQAPARQVALKAGLPDSIIASTINKVCASGMKAVIIGAQNIICGTSDIVVVGGAESMSNTPYYLPSARSGARYGDAVMVDGVQKDGLLDVYEEKLMGVAAEKCAKDHGFSREDQDNFAINSYKKAGKALSEGKFKSEIAPVTIKGFRGKPDTVIENDEEIGKFNEDRLKSARTVFQKENGTVTAPNASKLNDGGAALVLVSEAKLKQLGLKPLAKISGWGEAARTPFDFTIAPALAVPKAVKHAGLTVDRVDFFELNEAFSVVGLANAELVKIPLEKLNVYGGAVAMGHPLGCSGARIIVTLLSVLTQEGGRFGAAGVCNGGGGASAIVIEKIDSDAKL

SEQ ID NO: 3395 - DNA, 1227 bp, Candida tropicalis
  CDS (1)..(1227): transl_table=12
atggatagattaaaccaattaagcggccaattaaagccaaacgccaaacaatccatcttgcaaaaaaacccagacgacgtcgttatcgttgctgcatacagaaccgccatcggtaaaggtttcaaaggttccttcagaagcgtccgctctgaattcatcttgactgagttcttgaaagaattcattaaaaagaccaacatcgacccatctttgattgaagatgtcgctatcggtaacgtcttgaaccaggccgccggtgccaccgaacacagaggtgcttgtttggctgccggtatcccatacaccgccgctttcatcgccgtcaacagattctgctcatccggtttgatggccatctccgacattgccaacaagatcaagactggtgaaatcgagtgtggtttggctggtggtgccgaatccatgtccaccaactaccgtgatcctagagttgccccaagaatcgacccacacttggctgacgacgcccaaatggaaaagtgtttgattcctatgggtatcaccaacgaaaacgttgctaaccaattcaacatctccagagaaagacaagacgagttcgccgccaagtcctacaacaaggctgccaaggctgttgccgctggtgctttcaagagcgaaatcttgccaatcagatccatcatcagaaactctgacggtaccgaaaaggaaatcattgtcgacactgacgaaggtccaagagaaggtgtcaccgctgaatccttgggcaagttgagaccagctttcgacggtaccaccactgccggtaacgcttcccaagtctctgacggtgctgccgccgtcttgttgatgaagagaagcttggctgaagccaagggatacccaatcattggtaagtacgtcctttgttccaccgccggtgttcctccagaaattatgggtgttggtccagcctacgctatcccagaagtcttgaagagaactggtttgactgttgacgacattgatgttttcgaaatcaacgaagcctttgctgctcaatgtctctactctgctgaacaagtcaatgtgcctgaagagaagttgaacatcaacggtggtgccattgccttgggccacccattgggtgaaaccggtgctcgtcaatacgccaccatcatcccattgttaaaaccaggtcaaattggattgacttcaatgtgtattggttctggtatgggttctgcttctattttggttagagaatag

SEQ ID NO: 3396 - protein, 408 aa, Candida tropicalis
MDRLNQLSGQLKPNAKQSILQKNPDDVVIVAAYRTAIGKGFKGSFRSVRSEFILTEFLKEFIKKTNIDPSLIEDVAIGNVLNQAAGATEHRGACLAAGIPYTAAFIAVNRFCSSGLMAISDIANKIKTGEIECGLAGGAESMSTNYRDPRVAPRIDPHLADDAQMEKCLIPMGITNENVANQFNISRERQDEFAAKSYNKAAKAVAAGAFKSEILPIRSIIRNSDGTEKEIIVDTDEGPREGVTAESLGKLRPAFDGTTTAGNASQVSDGAAAVLLMKRSLAEAKGYPIIGKYVLCSTAGVPPEIMGVGPAYAIPEVLKRTGLTVDDIDVFEINEAFAAQCLYSAEQVNVPEEKLNINGGAIALGHPLGETGARQYATIIPLLKPGQIGLTSMCIGSGMGSASILVRE

SEQ ID NO: 3397 - DNA, 1227 bp, Candida tropicalis
  CDS (1)..(1227): transl_table=12
atggatagattaaaccaattaagcggccaattaaagccaaacgctaaacaatccatcttgcaaaaaaacccagacgacgtcgttatcgttgctgcatacagaaccgccatcggtaagggtttcaaaggttccttcagaaacgtccactctgaattcatcttgactgagttcttgaaagaatttatcaaaaagaccaacatcgacccatctttgattgaagatgtcgctatcggtaacgtcttgaaccaggccgcaggtgccaccgaacacagaggtgcttgtttggctgccggtatcccatacaccgccgccttcatcgctgtcaacagattctgttcctccggtttgatggccatctccgacattgccaacaagatcaagactggtgaaatcgagtgtggtttggctggtggtgccgaatccatgtccaccaactaccgtgacccaagagttgccccaagaatcgacccacatttggctgacgacgcccaaatggaaaagtgtttgattcctatgggtatcaccaacgaaaacgttgctaaccaattcaacatctccagagaaagacaagacgagtttgccgccaagtcctacaacaaggctgccaaggcggttgcctctggtgctttcaagagtgaaatcttgccaatcagatccatcatcagaaactctgacggtaccgaaaaggaaatcattgtcgacactgacgaaggtccaagagaaggtgtcaccgctgaatctttgggcaagttgagaccagctttcgacggtaccaccactgcaggtaacgcttctcaagtctctgacggtgccgccgccgtcttgttgatgaagagaagcttggctgaagccaagggatacccaatcattggtaagtacgtcctttgttccaccgccggtgttccaccagaaatcatgggtgttggtccagccttcgctatcccagaagtcttgaagagaactggcttgactgttgacgacattgatgttttcgaaatcaacgaagcctttgccgctcaatgtctttactctgctgaacaagtcaatgtgcctgaagaaaagttgaacatcaacggtggtgccattgccttgggccatccattgggtgaaaccggtgctcgtcaatacgccaccatcatcccattgttaaagccaggtcaaattggattgacttcaatgtgtattggttctggtatgggttctgcttctattttggttagagaatag

SEQ ID NO: 3398 - protein, 408 aa, Candida tropicalis
MDRLNQLSGQLKPNAKQSILQKNPDDVVIVAAYRTAIGKGFKGSFRNVHSEFILTEFLKEFIKKTNIDPSLIEDVAIGNVLNQAAGATEHRGACLAAGIPYTAAFIAVNRFCSSGLMAISDIANKIKTGEIECGLAGGAESMSTNYRDPRVAPRIDPHLADDAQMEKCLIPMGITNENVANQFNISRERQDEFAAKSYNKAAKAVASGAFKSEILPIRSIIRNSDGTEKEIIVDTDEGPREGVTAESLGKLRPAFDGTTTAGNASQVSDGAAAVLLMKRSLAEAKGYPIIGKYVLCSTAGVPPEIMGVGPAFAIPEVLKRTGLTVDDIDVFEINEAFAAQCLYSAEQVNVPEEKLNINGGAIALGHPLGETGARQYATIIPLLKPGQIGLTSMCIGSGMGSASILVRE

SEQ ID NO: 3399 - DNA, 1182 bp, Rhizobium meliloti
  CDS (1)..(1182): transl_table=11
atgagcaatccctcgatcgtcatcgccagcgcggctcgcacggccgtcggctccttcaacggcgccttcggcaatactctcgcgcacgaactgggtgcggccgccatcaaggcggtgctggagcgggctggcgtcgaagcgggcgaggtggacgaggtgatcctcggtcaggtgctgccggcgggcgaggggcagaatcctgcgcggcaagcggcgatgaaggccggtctcccgcaggaaaagaccgcctggggcatgaaccagctttgcggctcgggcctgcgcgccgtagcgctcggcatgcagcagatcgcaaccggcgatgcgaaggtcatcgttgccggcggcatggagtcgatgtcgatggcgccgcattgcgcgcacctgcgcggcggcgtgaagatgggcgactacaagatgatcgacacgatgatcaaggacggcctgacggatgccttctacggctaccacatgggcatcaccgccgagaacgttgcgcggaaatggcagctgacgcgcgaggaacaggacgaattcgcgcttgcctcccagaacaaggcggaagcggcccagaaggccggccgtttcgccgacgagatcgtgcctttcgtcgtgaagacgcgcaagggcgacgtaaacgtggatcaggacgagtacatccgccacggtgccacgctggattcgatcgcaaagctccgcccggccttcgacaaggaaggtactgtgaccgcgggcaacgcttcgggtctcaacgacggtgccgccgcggcgctcttgatgaccgaggccgaggcggcccggcgcggcatccagccgcttgcccgcatcgtctcctgggccacggcaggcgtcgacccgcagatcatgggcaccggccccatccccgcatcgcgcaaggccctcgaaaaggccggctggtcggtcgccgatatcgagctcgtggaggcgaacgaggctttcgcggctcaggcctgcgccgtcaacaaggacctcggctgggatccttcgatcgtcaacgtcaatggcggagcgatcgccatcggccatccgatcggtgcctccggtgcccgcgtgctgaacacgcttcttttcgaaatgaagcggcgcggcgtctccaaggggcttgccaccctgtgcatcggcggcggcatgggcgtcgccatgtgcgtggaacgcctgtaa

SEQ ID NO: 3400 - protein, 393 aa, Rhizobium meliloti
MSNPSIVIASAARTAVGSFNGAFGNTLAHELGAAAIKAVLERAGVEAGEVDEVILGQVLPAGEGQNPARQAAMKAGLPQEKTAWGMNQLCGSGLRAVALGMQQIATGDAKVIVAGGMESMSMAPHCAHLRGGVKMGDYKMIDTMIKDGLTDAFYGYHMGITAENVARKWQLTREEQDEFALASQNKAEAAQKAGRFADEIVPFVVKTRKGDVNVDQDEYIRHGATLDSIAKLRPAFDKEGTVTAGNASGLNDGAAAALLMTEAEAARRGIQPLARIVSWATAGVDPQIMGTGPIPASRKALEKAGWSVADIELVEANEAFAAQACAVNKDLGWDPSIVNVNGGAIAIGHPIGASGARVLNTLLFEMKRRGVSKGLATLCIGGGMGVAMCVERL

SEQ ID NO: 3401 - DNA, 1197 bp, Saccharomyces bayanus
  CDS (1)..(1197)
atgtctcagaacgtttacattgtttcgactgccagaaccccaattggttcattccaaggctctctttcttccaagacagccgtagagttgggtgctgctgctttgaagggtgccttggctaaagttccagaattggatgcttccaaggactttgacgaaattatctttggtaatgtcctttccgccaatttgggtcaagccccagctagacaagtcgctttgaccgctgggttaggcaatcacattgttgctacgacagttaacaaagtgtgtgcttctgctatgaaggccatcattttgggtgctcaatccattaagtgtggtaatgctgacgtcgtcgtggccggtggctgtgaatctatgaccaacgctccatactacatgccagctgcccgtggtggtgctaagtttggccaaacggtccttattgacggtgtcgaaagagatgggctaaacgatgcatatgatggcttagccatgggtgttcacgcggaaaagtgtgctcgtgattgggatatcaccagagatcaacaagatagctttgccatcgaatcttaccaaaaatctcaacaatcccaaaaggaaggtaaatttgacaacgaaattgtaccagtaaccatcaagggattcagaggtaagccagatactcaagtgacaaacgacgaagaacctgctagattacacgttgaaaaattaaagtctgcaagaactgttttccaaagagaaaatggtaccgtcactgctgccaacgcttctccaatcaacgatggtgctgcagctatcattttagtctctgaaagagtcttgaaggaaaagaatttaaaacccttggctatcgtcaaaggttggggtgaagcagcccatttaccagcagatttcacatgggccccatctcttgcagttccaaaggctttgaaacatgctggtatcgaagatatcaactctgtagactactttgaattcaacgaggctttctccgtcgttggtttggttaacactaagattttaaagctagacccatctaaagttaatgtatacggtggtgcagtcgctttggggcatccattgggatgttcgggtgccagagtggtcgttactctactatctattctacaacaagagggaggtaagatcggtgttgctgccatttgtaatggtggtggtggtgcttcatctgtcgtcattgaaaagctatga

SEQ ID NO: 3402 - protein, 398 aa, Saccharomyces bayanus
MSQNVYIVSTARTPIGSFQGSLSSKTAVELGAAALKGALAKVPELDASKDFDEIIFGNVLSANLGQAPARQVALTAGLGNHIVATTVNKVCASAMKAIILGAQSIKCGNADVVVAGGCESMTNAPYYMPAARGGAKFGQTVLIDGVERDGLNDAYDGLAMGVHAEKCARDWDITRDQQDSFAIESYQKSQQSQKEGKFDNEIVPVTIKGFRGKPDTQVTNDEEPARLHVEKLKSARTVFQRENGTVTAANASPINDGAAAIILVSERVLKEKNLKPLAIVKGWGEAAHLPADFTWAPSLAVPKALKHAGIEDINSVDYFEFNEAFSVVGLVNTKILKLDPSKVNVYGGAVALGHPLGCSGARVVVTLLSILQQEGGKIGVAAICNGGGGASSVVIEKL

SEQ ID NO: 3403 - DNA, 1194 bp, Yarrowia lipolytica
  CDS (1)..(1194)
atgcgactcactctgccccgacttaacgccgcctacattgtaggagccgcccgaactcctgtcggcaagttcaacggagccctcaagtccgtgtctgccattgacctcggtatcaccgctgccaaggccgctgtccagcgatccaaggtccccgccgaccagattgacgagtttctgtttggccaggtgctgaccgccaactccggccaggcccccgcccgacaggtggttatcaagggtggtttccccgagtccgtcgaggccaccaccatcaacaaggtgtgctcttccggcctcaagaccgtggctctggctgcccaggccatcaaggccggcgaccgaaacgttatcgtggccggtggaatggagtccatgtccaacaccccctactactccggtcgaggtcttgttttcggcaaccagaagctcgaggactccatcgtcaaggacggtctctgggacccctacaacaacatccacatgggcaactgctgcgagaacaccaacaagcgagacggcatcacccgagagcagcaggacgagtacgccatcgagtcctaccgacgggccaacgagtccatcaagaacggcgccttcaaggatgagattgtccccgttgagatcaagacccgaaagggcaccgtgactgtctccgaggacgaggagcccaagggagccaacgccgagaagctcaagggcctcaagcctgtctttgacaagcagggctccgtcactgccggtaacgcctcccccatcaacgatggtgcttctgccgttgtcgttgcctctggcaccaaggccaaggagctcggtacccccgtgctcgccaagattgtctcttacgcagacgccgccaccgcccccattgactttaccattgctccctctctggccattcccgccgccctcaagaaggctggccttaccaaggacgacattgccctctgggagatcaacgaggccttctccggtgtcgctctcgccaacctcatgcgactcggaattgacaagtccaaggtcaacgtcaagggtggagctgttgctctcggccaccccattggtgcctccggtaaccgaatctttgtgactttggtcaacgccctcaaggagggcgagtacggagttgccgccatctgcaacggtggaggagcttccaccgccatcgtcatcaagaaggtctcttctgtcgagtag

SEQ ID NO: 3404 - protein, 397 aa, Yarrowia lipolytica
MRLTLPRLNAAYIVGAARTPVGKFNGALKSVSAIDLGITAAKAAVQRSKVPADQIDEFLFGQVLTANSGQAPARQVVIKGGFPESVEATTINKVCSSGLKTVALAAQAIKAGDRNVIVAGGMESMSNTPYYSGRGLVFGNQKLEDSIVKDGLWDPYNNIHMGNCCENTNKRDGITREQQDEYAIESYRRANESIKNGAFKDEIVPVEIKTRKGTVTVSEDEEPKGANAEKLKGLKPVFDKQGSVTAGNASPINDGASAVVVASGTKAKELGTPVLAKIVSYADAATAPIDFTIAPSLAIPAALKKAGLTKDDIALWEINEAFSGVALANLMRLGIDKSKVNVKGGAVALGHPIGASGNRIFVTLVNALKEGEYGVAAICNGGGASTAIVIKKVSSVE

SEQ ID NO: 3405 - DNA, 1182 bp, Bacillus subtilis
  CDS (1)..(1182): transl_table=11
atgaggaaaacagtcattgtaagtgctgcaagaactccatttggcaaattcggcggagttttgaaagaggtgaaagctgctgagcttgggggcattgtgatgaaggaggcgctgcaacaggctggagtctctggagatgatgtagaaggaaacgtcatgggcatggttgtccaggccggctcagggcagataccttcccgtcaagctgcccgtctggcgggaatgccttggagtgtgccgtcagaaacactgaataaagtctgtgcttccggccttcgcgctgtcactttatgtgatcaaatgattcgggcgcaggatgcggacatacttgttgcgggggggatggaaagcatgagcaatattccgtatgccgttcccgccgggcgctggggagcacggatgggggacggcgagcttagggacttaatggtgtatgacggattaacgtgcgcatttgacgaggtgcacatggctgttcacggaaatacagctgccaaggaatatgcaatctcacgaagagagcaggacgaatgggcgttgagaagtcatgcaagggcagctaaggccgccgatgaagggaagtttcaggatgaaattgttcccgtcaactggatcggtcgaaaaggaaaaccaaacgttgttgataaagatgaagcgattcgccgtgacacaagtctggatcagctcgcaaaacttgctccgatttatgcaagtgacggttctatcacagccggcaatgctcctggagtcaatgacggagccggcgcgttcgtgctgatgtctgaggaaaaagctgctgagcttggcaaacggcctctggctacaattcttggtttttcaactacgggaatgccagcgcacgagctggcggcagcgccagggtttgctattaacaagctcctgaaaaagaatggtttaactgtccaagatattgacttgtttgaagtaaatgaagcttttgcttcagttgttttgacatgtgaaaaaatcgtaggtttcgatcttgaaaaagtaaatgtgaatggcggtgcgatcgcgctcggccacccgatcggcgcgagcggtgcgagaattctcatgacgcttgtttatgaattaaagcgacggggagggggtctgggcgttgccgctatttgcagcggggcagcacagggagacgccgtcttagtgcaggttcattaa

SEQ ID NO: 3406 - protein, 393 aa, Bacillus subtilis
MRKTVIVSAARTPFGKFGGVLKEVKAAELGGIVMKEALQQAGVSGDDVEGNVMGMVVQAGSGQIPSRQAARLAGMPWSVPSETLNKVCASGLRAVTLCDQMIRAQDADILVAGGMESMSNIPYAVPAGRWGARMGDGELRDLMVYDGLTCAFDEVHMAVHGNTAAKEYAISRREQDEWALRSHARAAKAADEGKFQDEIVPVNWIGRKGKPNVVDKDEAIRRDTSLDQLAKLAPIYASDGSITAGNAPGVNDGAGAFVLMSEEKAAELGKRPLATILGFSTTGMPAHELAAAPGFAINKLLKKNGLTVQDIDLFEVNEAFASVVLTCEKIVGFDLEKVNVNGGAIALGHPIGASGARILMTLVYELKRRGGGLGVAAICSGAAQGDAVLVQVH

SEQ ID NO: 3407 - DNA, 1182 bp, Escherichia coli (strain K12)
  CDS (1)..(1182): transl_table=11
atgaaagacgttgtgattgtcggggcgttacggacacctatcggctgctttcgtggtgcgttagcgggtcattccgccgtggaacttggtagtctggtcgtgaaagcgttaatagaacgtaccggcgttcctgcatatgcggtggatgaagtaattcttggtcaggtgttgactgcaggggcagggcagaatccggcaaggcaatcggctattaaaggtggtctgcctaatagcgtttctgcaatcactattaatgacgtttgcggttccgggcttaaagcactgcatctggctactcaggcgatacagtgtggcgaggctgatattgtcatcgccggtggccaggaaaacatgagccgcgcaccacatgttctgactgatagccgcaccggtgcacagcttggcaatagccagttggttgacagtcttgtgcatgatgggttgtgggatgccttcaatgattatcatattggtgtcaccgccgaaaatctggctcgcgaatatggcatcagccgtcagttgcaggatgcttacgcacttagctcgcaacaaaaagcgcgagcggcgattgacgccggacgatttaaagatgagatcgtcccggtaatgacccaaagtaacgggcagacgttggttgttgataccgatgaacagccacgcactgacgccagcgcagaaggcttagcccgtttaaatccttcatttgatagtctcggttctgtgacagcgggtaatgcatcatccataaacgatggcgcagctgcggtaatgatgatgagcgaagccaaagcacgagcgttgaatttacccgtgctggcccgcattcgcgcatttgccagcgttggtgtagatccggcattgatgggaattgcgccggtgtatgcgacccgccgttgcctggagcgtgtaggctggcagttggctgaagtcgatcttatcgaggctaatgaagcgtttgctgcacaggcgctttcggttggcaagatgcttgagtgggatgagcgtcgggtcaatgtcaatggtggcgcgatcgcactcggtcacccgataggcgcttccggttgccgaatcctggtttctctggttcatgaaatggtgaaacgtaatgcccgcaaaggactggcaacgctttgtatcggcgggggccagggtgtggcattgaccattgaacgtgacgaatag

SEQ ID NO: 3408 - protein, 393 aa, Escherichia coli (strain K12)
MKDVVIVGALRTPIGCFRGALAGHSAVELGSLVVKALIERTGVPAYAVDEVILGQVLTAGAGQNPARQSAIKGGLPNSVSAITINDVCGSGLKALHLATQAIQCGEADIVIAGGQENMSRAPHVLTDSRTGAQLGNSQLVDSLVHDGLWDAFNDYHIGVTAENLAREYGISRQLQDAYALSSQQKARAAIDAGRFKDEIVPVMTQSNGQTLVVDTDEQPRTDASAEGLARLNPSFDSLGSVTAGNASSINDGAAAVMMMSEAKARALNLPVLARIRAFASVGVDPALMGIAPVYATRRCLERVGWQLAEVDLIEANEAFAAQALSVGKMLEWDERRVNVNGGAIALGHPIGASGCRILVSLVHEMVKRNARKGLATLCIGGGQGVALTIERDE

SEQ ID NO: 3409 - DNA, 1371 bp, Brassica napus
  CDS (1)..(1371)
atggagaaagccactgaaaggcagaagattttacttcgtcatctcaatccactttcttcttctcctcctccttataaacctacccttctctccgctgtgaactgtgctgctgagctttccccaatggctgcttttggagacgacgttgtgatcgttgcggcgtaccgcactgccatttgtaaagctaagcgtggagggttcaaagatactctcccagatgatcttctcgcttctgttctcaaggctgtggtggaaaggacgtctttggatccaagtgaagttggggatattgttgttggtaccgttatagctcctggctctcagagggccatggagtgtagagtagctgcattctttgctggctttcctgactctgtgccgattagaactgtcaacagacaatgctcatcaggactacaagcagttgctgatgttgctgcttccatcagagctggatattacgacattggtattggtgctggagtggagtcaatgtcaactgatcatattcctggaggcggatttaacaccacaaacccgagggcacaagagtttcctggagctcgtgactgcttgcttccaatgggcattacctctgaaaacgttgcagagagatacggtgtcacaagagaagagcaagacatggctgcggtggagtctcacaagcgtgctgcagctgcaaacgcctctggtaaactcaaggacgagatagttcctgttgctactaagattgttgacccggtgacaaaagcagagaagccaatcgttgtttctgttgatgatggtgtacgtccaaactcaaacatggctgatctggcaaagctgaagacagtctttaaacctaatggttcaaccacagcaggtaatgctagtcagattagtgatggtgctggagctgtactgctaatgaagaggagcttggccatgaagaagggacttcccattcttggagttttcaggagctttgctgttactggtgtggatccggctgtaatgggtatcggtccagcttacgccattcccgctgcagccaaccttgcaggactcaaagttagcgatatcgatctatttgagatcaatgaggcatttgcatctcagtatgtgtactgttgcaagaagctggagctggatgtggaaaaggtcaatgttaatggaggagccattgctattggccatcctcttggtgctacaggagctcgatgtgttgcgacattgttgcatgagatgaaacggagagggaaagactgccgctttggagtgatttcaatgtgcataggcactggtatgggagctgcagctgtgtttgagagaggagactctgttgatgacctgtccaatgcccgtgtggtggctaatgggagcggtcattag

SEQ ID NO: 3410 - protein, 456 aa, Brassica napus
MEKATERQKILLRHLNPLSSSPPPYKPTLLSAVNCAAELSPMAAFGDDVVIVAAYRTAICKAKRGGFKDTLPDDLLASVLKAVVERTSLDPSEVGDIVVGTVIAPGSQRAMECRVAAFFAGFPDSVPIRTVNRQCSSGLQAVADVAASIRAGYYDIGIGAGVESMSTDHIPGGGFNTTNPRAQEFPGARDCLLPMGITSENVAERYGVTREEQDMAAVESHKRAAAANASGKLKDEIVPVATKIVDPVTKAEKPIVVSVDDGVRPNSNMADLAKLKTVFKPNGSTTAGNASQISDGAGAVLLMKRSLAMKKGLPILGVFRSFAVTGVDPAVMGIGPAYAIPAAANLAGLKVSDIDLFEINEAFASQYVYCCKKLELDVEKVNVNGGAIAIGHPLGATGARCVATLLHEMKRRGKDCRFGVISMCIGTGMGAAAVFERGDSVDDLSNARVVANGSGH

SEQ ID NO: 3411 - DNA, 1212 bp, Brassica napus
  CDS (1)..(1212)
atggctcatacagcagattccgtcaatcccagagaagtttgcatcgtgggtgttgcacgaactccaatgggtggctttctcgggtctctctcgtctttgcccgccaccaagcttggatccgtagctattgcagctgccttgaagagggcaaatgttgacccgtctctcgtccaagaagttgtgtttggcaatgttcttagcgccaatttgggtcaggctcctgctcgtcaggctgctttaggtgcaggaatccctaactctgtcatctgtaccacagttaacaaggtttgtgcttcaggcatgaaagccgtaatgattgctgctcagagtattcaattggggatcaatgatgtagtcgtagcgggtggcatggaaagcatgtctaatacaccaaaatatttggctgaagcaaggaaaggatctcggtttggtaatgattctctagtagatggaatgctaaaggatggactatgggatgtctataatgactgtgggatgggaagctgtgcagagttatgcgctgagaaatttcagataacaagagagcaacaagatgactacgctgttcagagttttgaacgtggtattgctgcccaggaagctggcgccttcacatgggaaatcgtcccggttgaagtttctggaggaagaggtaggccatcaaccattgttgacaaggacgaaggtcttgggaagtttgatgctgcaaaattgaggaaactccgtccaagtttcaaggacaatggaggcactgttacagctggaaatgcgtctagcataagcgatggtgcagctgcacttgtcctagtgagtggagagaaggcgcttcagctaggacttaaagtactcgcaaaagttaaaggttatggtgatgcagctcaggaaccggagtttttcactactgctcctgctcttgcaataccgaaagctattgcagatgctggtttggaatcttctcaagtcgattactatgagatcaatgaagcatttgcagttgtggctctcgcaaatcaaaagctacttgggattactcgggagaaggtgaatgtaaacggaggagctgtctctttaggacatcctctagggtgcagtggggctcgtattctaatcacattgcttgggatactaaagaatagaaacggcaagtacggtgtgggaggagtgtgcaacggaggaggaggtgcttctgctcttgttcttgaacttgtttga

SEQ ID NO: 3412 - protein, 403 aa, Brassica napus
MAHTADSVNPREVCIVGVARTPMGGFLGSLSSLPATKLGSVAIAAALKRANVDPSLVQEVVFGNVLSANLGQAPARQAALGAGIPNSVICTTVNKVCASGMKAVMIAAQSIQLGINDVVVAGGMESMSNTPKYLAEARKGSRFGNDSLVDGMLKDGLWDVYNDCGMGSCAELCAEKFQITREQQDDYAVQSFERGIAAQEAGAFTWEIVPVEVSGGRGRPSTIVDKDEGLGKFDAAKLRKLRPSFKDNGGTVTAGNASSISDGAAALVLVSGEKALQLGLKVLAKVKGYGDAAQEPEFFTTAPALAIPKAIADAGLESSQVDYYEINEAFAVVALANQKLLGITREKVNVNGGAVSLGHPLGCSGARILITLLGILKNRNGKYGVGGVCNGGGGASALVLELV

SEQ ID NO: 3413 - DNA, 1248 bp, Brassica napus
  CDS (1)..(1248)
atggcttcatccgtctctgatcagtccgtacagcctcaagatgtttgtgttgtgggagtggcgagaacgcctatgggagacttcctaggctctctctcttctataactgccccaagactcggctccatagccattgaagccgcacttaagagtgcaaacgttgaaccggctcttgtggaagaggttttctttggtaatgtcttaaccgcaaatcttgggcaagcgccagcaagacaggctgcacttggtgctgggattccctattcagtgatctgcaccactgtcaacaaagtctgtgctgctggaatgaaagctgtaatgttagcggctcaaagtatccagctcggtttgaatgatgttgttgtggctggtgggatggagagcatgtcaaacgtcccaaagtacctcccaaacgcaagaaggggttcacgattaggacatgatactgttgttgacggtatgacgaaagatggactttgggatgtgtacaatgactttggaatgggagtttgtggagaaatatgcgctgaccagtaccgtattacaagagaagaacaggatgcttatgctatacagagctttgagcgtggtattgctgcacaaaacgctcggttgttctcttgggaaattgttccggttgaggtttcttctggaagagggaagccatctgttgttattgacaaggatgatggacttgggaagtttgatgctgccaagttaaagaagcttagaccaagcttcaaggaggatgggggatcagtcactgctggcaatgcatcaagtataagtgatggtgcggcagcgttagtgctagttagtggaaagaaggctcttgagcttggactgcatgttatagctaagattagaggatacgctgatgctgctcaggcacctgagttgttcacaaccacgccggcacttgctattcctaaagctataatgcgtgctggtttagatgcatctcaagttgattactatgaaattaacgaagctttctctgttgtagctctggccaatcagaaactgctgggattagatcctgcacggttgaatgcacatggcggggctgttgcattgggacatccactgggatgcagtggtgctcgtattttagtcacgttactgggtgtattgaaagcaaagaagggaaagtatggagtggcatcaatatgcaacggaggaggaggagcatcagcacttgttctcgagttcatgtcggagaagacaatagggtattcatcactctga

SEQ ID NO: 3414 - protein, 415 aa, Brassica napus
MASSVSDQSVQPQDVCVVGVARTPMGDFLGSLSSITAPRLGSIAIEAALKSANVEPALVEEVFFGNVLTANLGQAPARQAALGAGIPYSVICTTVNKVCAAGMKAVMLAAQSIQLGLNDVVVAGGMESMSNVPKYLPNARRGSRLGHDTVVDGMTKDGLWDVYNDFGMGVCGEICADQYRITREEQDAYAIQSFERGIAAQNARLFSWEIVPVEVSSGRGKPSVVIDKDDGLGKFDAAKLKKLRPSFKEDGGSVTAGNASSISDGAAALVLVSGKKALELGLHVIAKIRGYADAAQAPELFTTTPALAIPKAIMRAGLDASQVDYYEINEAFSVVALANQKLLGLDPARLNAHGGAVALGHPLGCSGARILVTLLGVLKAKKGKYGVASICNGGGGASALVLEFMSEKTIGYSSL

SEQ ID NO: 3415 - DNA, 1215 bp, Brassica napus
  CDS (1)..(1215)
atggcccattcagcagattcctccgtcaatcccagagatgtttgcatcgtgggtgttgcacgcactcctatgggtggctttctcggatctctctcctccttacccgccacaaagcttggatccgttgccatcacagctgctctgaagagagcaaatgttgacccgtctctggtccaagaagttgtgtttgggaatgttctcagtgctaatttgggtcaagctcccgctcgtcaagctgctttaggtgctgggatctctaactctgttatctgtaccactgtcaacaaggtttgtgcttcaggcatgaaagctgtgatgattgctgctcagagtatccagctggggatcaatgatgtagtcgtggcgggtggtatggaaagcatgtctaatacaccaaagtatcttgcagaagcaaggaaaggatctaggtttggtcatgattctctagtagatgggatgcttagggatggactgtgggatgtctataacgactgtgggatgggaagctgtgcagagttatgcgctgagaagtttgagataaccagggagcagcaagatgactacgctgttcagagctttgagcgtggtattgctgctcaagaagctggcgccttcacttgggagatcgtcccggttgaagtttctggaggaaggggtaggccatcaaccattgctgacaaggatgaaagtcttgggaagtttgatgctgcaaaactgaggaaactccgtccgagtttcaaggagaatggaggcacagttacagctggaaatgcctctagcataagtgatggtgcagctgctattgtcctagtgagtggagagaaggcgcttcagctaggacttcaagtacttgcaaaagttaaaggttatggtgatgcagctcaggagccagagtttttcactactgctcctgctctggcaataccaaaagctattgcacatgctggtttggaatcttctcaagttgattactatgagatcaatgaagcatttgcagttgtagcacttgcaaatcaaaagctacttgggattagtccggagaaggtgaatgtaaatggaggagccgtctccttaggacatcctctaggctgcagtggagcgcgtattctaatcacattgcttgggatactgaagaagagaaacggcaagtacggtgtgggaggagtgtgcaacggaggaggaggtgcttctgctcttgttcttgaagtcgtttga

SEQ ID NO: 3416 - protein, 404 aa, Brassica napus
MAHSADSSVNPRDVCIVGVARTPMGGFLGSLSSLPATKLGSVAITAALKRANVDPSLVQEVVFGNVLSANLGQAPARQAALGAGISNSVICTTVNKVCASGMKAVMIAAQSIQLGINDVVVAGGMESMSNTPKYLAEARKGSRFGHDSLVDGMLRDGLWDVYNDCGMGSCAELCAEKFEITREQQDDYAVQSFERGIAAQEAGAFTWEIVPVEVSGGRGRPSTIADKDESLGKFDAAKLRKLRPSFKENGGTVTAGNASSISDGAAAIVLVSGEKALQLGLQVLAKVKGYGDAAQEPEFFTTAPALAIPKAIAHAGLESSQVDYYEINEAFAVVALANQKLLGISPEKVNVNGGAVSLGHPLGCSGARILITLLGILKKRNGKYGVGGVCNGGGGASALVLEVV

SEQ ID NO: 3417 - DNA, 1206 bp, Triticum aestivum
  CDS (1)..(1206)
atgggttcagacaacatcggccccagagatgtctgcgttgtcggggtcgcgcgcacccctatgggtggtttcctcggcgccctgtcctccttgcctgccaccaaacttggctccatagctatcgaagctgctctgaaaagggcgaatgtggatccaccccttgtgcaggaggtcttcttcggcaatgtcctgagtgctaacttgggccaagctccagcgagacaagctgccttaggcgcagggataccaaacacggttgtttgcacgacggtcaacaaagtctgcgcgtctggcatgaaagcaacgatgtttgctgcacagtcgattcaactgggcagcaatgatattgtagtggcagggggcatggaaagcatgtcgaatgctccgaaatacatcgctgaagctagaaaaggttctcgtttcggacatgacagccttgttgacggtatgcttaaggatggcctttgggatgtatacggcgattgtgccatgggagtgtgtgctgagctttgtgctgacaatcatgctctgacaagggaagaccaagatgcttttgctattcaaagtaatgagcgtggaattgctgctcgtgatagtggcgcttttgcatgggagatcgttccggttgaagttcctgtcggcagaggaaaaccaccagtacttgttgaaaaagatgagagccttgacaggtttgacccagcgaaactgaggaagctccgcccaagtttcaaggagaaagctggcactgttactgctgggaacgcttctagtataagtgatggctctgccgcattagtattggtgagtgggcagaaggctcaagagcttgggctgcaagttcttgcaaggatcaaaggatttgccgatgcggctcaagctcccgaactatttaccaccaccccagcacttgccataccgaaggctctctcaaatgctggcttagaatcttcatctgttgatttttacgaaattaacgaagcctttgcggctgttgcacttgcaaatcagaagattctcggaattccttcagaaaagattaatgtacatggaggagcagtgtctttaggacaccctcttggatgcagcggtgctcgcattttggtcacccttattggtgtcctcagggagaagggtggcaaaatcggggtcgccggtgtctgcaacggcggaggcggagcatccgcacttgttctcgagctcgcgtag

SEQ ID NO: 3418 - protein, 401 aa, Triticum aestivum
MGSDNIGPRDVCVVGVARTPMGGFLGALSSLPATKLGSIAIEAALKRANVDPPLVQEVFFGNVLSANLGQAPARQAALGAGIPNTVVCTTVNKVCASGMKATMFAAQSIQLGSNDIVVAGGMESMSNAPKYIAEARKGSRFGHDSLVDGMLKDGLWDVYGDCAMGVCAELCADNHALTREDQDAFAIQSNERGIAARDSGAFAWEIVPVEVPVGRGKPPVLVEKDESLDRFDPAKLRKLRPSFKEKAGTVTAGNASSISDGSAALVLVSGQKAQELGLQVLARIKGFADAAQAPELFTTTPALAIPKALSNAGLESSSVDFYEINEAFAAVALANQKILGIPSEKINVHGGAVSLGHPLGCSGARILVTLIGVLREKGGKIGVAGVCNGGGGASALVLELA

SEQ ID NO: 3419 - DNA, 1206 bp, Zea mays
  CDS (1)..(1206)
atggcatccaacggcatcgctcccagagatgtatgtgttgttggcgttgcacgcacccctttgggtggtttccttggtgccttgtcttccttgcccgcaacaaagcttggctctatagcaattgaagctgctctgaaaagagcaaatgtggatccggccctcgtgcaggaggtctttttcggaaacgtcttgagtgctaatttgggacaagctcctgcaaggcaagccgctctgggtgcagggataccaaacactgttgtttgcaccactgttaacaaagtctgcgcatctggcatgaaagctactatgttcgccgcacagtcaattcagctgggtatcaatgatattgttgtggcaggtggcatggaaagcatgtccaacgccccaaagtacattgctgaagctaggaaagggtctcgttttggacatgacacacttgttgatgccatgcttaaggatggactttgggatgtatacaatgactgtgccatgggaatgtgtgccgaactttgtgctgacaatcatgccctcacaagagaagaccaggatgcttttgctatccaaagcaaccagcgtggaattactgctcgtgacagtggtgcttttgcatgggagattgttccgattgaagttcctgttgggagaggaaaaccacctgtactcattgagaaagatgaaagcctggataagtttgacccagcaaaactgaagaaacttcgcccaagtttcaaggagaatggtggtaccgttacagctggaaatgcttctagtataagtgatggggcggctgcattagttttggtgagtgggcagaaggctcaagagcttggcctgcaagtccttgcaaggatcagaggatatgcagatgcggctcaagctccggaactttttacaaccaccccagcacttgcgataccaaaggctatatcaaatgctggattagagtcatcccatgttgatttttttgagattaatgaagcattttctgctgtcgcacttgcaaatcaaaagcttcttgggattccttcagaaaagattaatgtccatggaggagctgtgtctctagggcatcctcttgggtgcagcggtgctcgcattttggtcacccttcttggtgtccttagggaaaagggcggcaagatcggtgttgctggtgtctgcaacggcggaggtggagcatcagctcttgttctcgaactcgcataa

SEQ ID NO: 3420 - protein, 401 aa, Zea mays
MASNGIAPRDVCVVGVARTPLGGFLGALSSLPATKLGSIAIEAALKRANVDPALVQEVFFGNVLSANLGQAPARQAALGAGIPNTVVCTTVNKVCASGMKATMFAAQSIQLGINDIVVAGGMESMSNAPKYIAEARKGSRFGHDTLVDAMLKDGLWDVYNDCAMGMCAELCADNHALTREDQDAFAIQSNQRGITARDSGAFAWEIVPIEVPVGRGKPPVLIEKDESLDKFDPAKLKKLRPSFKENGGTVTAGNASSISDGAAALVLVSGQKAQELGLQVLARIRGYADAAQAPELFTTTPALAIPKAISNAGLESSHVDFFEINEAFSAVALANQKLLGIPSEKINVHGGAVSLGHPLGCSGARILVTLLGVLREKGGKIGVAGVCNGGGGASALVLELA

SEQ ID NO: 3421 - DNA, 1212 bp, Brassica napus
  CDS (1)..(1212)
atggcccattcagcagattccgtcaatcccagagatgtttgcattgtgggtgttgcacgaactccaatgggtggctttctcggatctctctcgtctttacccgccacaaagcttggatccgtagctattgcagctgctttgaagagagcaaatgttgacccgtctctcgtccaagaagttgtgtttggcaatgttcttagtgccaatttgggtcaggctcctgctcgtcaggctgctttaggtgcagggatccctaactctgttatctgtacaacagttaacaaggtttgtgcttcaggcatgaaagcggtaatgattgctgctcagagtattcaattggggatcaatgatgtagtcgtagcgggtggcatggaaagcatgtctaatacaccaaaatatttggctgaagcaaggaaaggatctcggtttggtcatgattctctagtagatgggatgcttaaggatggactgtgggatgtctataacgactgtgggatgggaagctgtgcagagttatgcgctgagaagtttcagataactagggagcagcaagatgactacgctgttcagagtttggagcgtggcattgctgctcaagaagctggcgccttcacatgggaaatcgtcccggttgaagtttctggaggaagaggtaggccatcaaccattgttgacaaggacgaaggtcttgggaagtttgatgctgcaaaattgaggaaactccgtccaagtttcaaggagaatggaggcactgttacagctggaaatgcgtctagcataagcgatggtgcagctgcccttgtcctagtgagtggagagaaggcgcttcagctaggacttcaagtactcgcaaaagttaaaggttatggtgatgcagctcaggaaccagagtttttcactactgctcctgctcttgcaataccgaaagctattgcacatgctggtttggaatcttctcaagtcgattactatgagatcaatgaagcatttgcagttgtggctctcgcaaatcaaaagctacttgggattactccggagaaggtgaatgtaaatggaggagctgtctccttaggacatcctctaggctgtagtggagcccgtattctaatcacattacttgggatactgaagaagagaaacggaaagtacggtgtgggaggagtgtgcaacggaggaggaggtgcttctgctcttgttcttgaacttgtttga

SEQ ID NO: 3422 - protein, 403 aa, Brassica napus
MAHSADSVNPRDVCIVGVARTPMGGFLGSLSSLPATKLGSVAIAAALKRANVDPSLVQEVVFGNVLSANLGQAPARQAALGAGIPNSVICTTVNKVCASGMKAVMIAAQSIQLGINDVVVAGGMESMSNTPKYLAEARKGSRFGHDSLVDGMLKDGLWDVYNDCGMGSCAELCAEKFQITREQQDDYAVQSLERGIAAQEAGAFTWEIVPVEVSGGRGRPSTIVDKDEGLGKFDAAKLRKLRPSFKENGGTVTAGNASSISDGAAALVLVSGEKALQLGLQVLAKVKGYGDAAQEPEFFTTAPALAIPKAIAHAGLESSQVDYYEINEAFAVVALANQKLLGITPEKVNVNGGAVSLGHPLGCSGARILITLLGILKKRNGKYGVGGVCNGGGGASALVLELV

SEQ ID NO: 3423 - DNA, 1212 bp, Brassica napus
  CDS (1)..(1212)
atggcccattcagcagattccgtcaatcccagagatgtttgcatcgtgggtgttgcacgcactccaatgggtggctttctcggatctctctcgtccttacccgctacaaagcttggatccgttgctatcacagctgctctgaagagggcaaatgttgacccgtctctggtccaagaagttgtgttcggcaatgttcttagtgctaatttgggtcaagctcctgctcgtcaagctgctttaggtgcagggatccctaactctgttatctgtactacagtcaacaaggtgtgtgcttcaggcatgaaagcggtggtgattgctgctcagagtatccagttggggatcaatgatgtagtcgtcgcgggtggcatggaaagcatgtctaatacaccaaaatacctggcagaagccaggaaaggatctcggtttggtcatgattttctagtagatgggatgcttaaggatggactgtgggatgtctataacgactgtgggatgggaagttgtgccgagttatgcgctgagaagtttcagataactagggagcagcaagatgactacgctgttcagagttttgagcgtggtattgctgctcaagaagctggcgccttcacatgggagatcgtcccggttgaagtttctggaggaaggggtaggccatcaaccattgttgacaaggacgaaggtcttgggaagtttgatgctgcaaaattgaggaaactccgtccaagtttcaaggagaatggaggcactgttacagctggaaatgcctctagcataagcgatggtgcagctgcccttgtcctagtgagtggagagaaagcgcttcagctaggacttcaagtactcgcaaaaattaaaggttatggtgatgcagctcaggaaccagagtttttcactactgctcctgctcttgcgataccaaaagctattgcacatgctggtttggaatcttctcaagttgattactatgagatcaatgaagcatttgcagttgtagcacttgcaaatcaaaagctactagggattagtccggagaaggtgaatgtaaatggaggagctgtctccttaggacatcctctaggctgtagtggagcccgtattctaatcacattacttgggatactgaagaagagaaacgggaagtacggtgtgggaggagtgtgcaacggaggaggaggtgcttctgctcttgttcttgaacttgtttga

SEQ ID NO: 3424 - protein, 403 aa, Brassica napus
MAHSADSVNPRDVCIVGVARTPMGGFLGSLSSLPATKLGSVAITAALKRANVDPSLVQEVVFGNVLSANLGQAPARQAALGAGIPNSVICTTVNKVCASGMKAVVIAAQSIQLGINDVVVAGGMESMSNTPKYLAEARKGSRFGHDFLVDGMLKDGLWDVYNDCGMGSCAELCAEKFQITREQQDDYAVQSFERGIAAQEAGAFTWEIVPVEVSGGRGRPSTIVDKDEGLGKFDAAKLRKLRPSFKENGGTVTAGNASSISDGAAALVLVSGEKALQLGLQVLAKIKGYGDAAQEPEFFTTAPALAIPKAIAHAGLESSQVDYYEINEAFAVVALANQKLLGISPEKVNVNGGAVSLGHPLGCSGARILITLLGILKKRNGKYGVGGVCNGGGGASALVLELV

SEQ ID NO: 3425 - DNA, 1389 bp, Brassica napus
  CDS (1)..(1389)
atggagaaagcaatcgagagacaaagagttcttcttgaacatctccgtccttcttcttcttcctctcacagctttgaaggctctctctctgcttcagcttgcttggctggggacagtgctgcgtatcagaggacctctctctatggagatgatgtagtcattgttgcggcacataggactgcactatgcaagtcgaaacgtggcaatttcaaggatacttatccggatgatcttcttgcacctgttttgagggcattgatagagaagacgaatctgaacccaagtgatgttggtgacattgttgttggtactgttttggcaccgggatctcagagggccagcgagtgcaggatgtctgctttctacgccggtttccctgaaaccgttccggttagaaccgtgaataggcagtgctcttctgggcttcaggctgttgctgacgttgccgccgccatcaaagctggattttatgatattggtattggggctggattggagtccatgaccactaatccaatggcatgggaagggtcagtcaacccagcggtgaagaagtttgagcaagcacagaactgtcttctccctatgggtgttacttcagaaaatgtggcacaacgctttggtgtctcaaggcaggaccaagatcaagctgctgttgactcgcacagaaaggcagctgctgcaactgctgctggtaaattcaaggatgagatcattccagttaaaaccaagcttgctgacccaaagacaggtgatgagacaccaattacacgctctgttgatgatgggatccgaccaagcacaacccttgccactcttgggaagctgaagccagtatttaaaaacgatggcacaacaaccgctggaaactccagtcaagtaagtgatggtgcaggagccgttctcctcatgaggagaagtgttgctacgcaaaaaggacttcccgttcttggtgtattcaggacatttgctgcagttggtgttgatccagcaatcatgggtgtcggtccagcagttgccattcctgctgcagttaaggctgctggtttagaactcgatgacatcgacttgtttgagatcaacgaggcatttgcatctcagtttgtttattgccgtaacaagttgggacttgacgcagagaaaatcaatgtcaacggaggcgcaatggccataggacatcctttgggtgctacaggagcacgttgcgttgctactttgttgcatgagatgaaacgccgcggaaaagactgtcgatttggggtagtttcaatgtgcattgggacggggatgggtgcagcggctgtgtttgagagaggagatggagttgatgagcttcgcaacgcaaggaaagttgaatcgcatggccttttgtccaaggacgctcgctag

SEQ ID NO: 3426 - protein, 462 aa, Brassica napus
MEKAIERQRVLLEHLRPSSSSSHSFEGSLSASACLAGDSAAYQRTSLYGDDVVIVAAHRTALCKSKRGNFKDTYPDDLLAPVLRALIEKTNLNPSDVGDIVVGTVLAPGSQRASECRMSAFYAGFPETVPVRTVNRQCSSGLQAVADVAAAIKAGFYDIGIGAGLESMTTNPMAWEGSVNPAVKKFEQAQNCLLPMGVTSENVAQRFGVSRQDQDQAAVDSHRKAAAATAAGKFKDEIIPVKTKLADPKTGDETPITRSVDDGIRPSTTLATLGKLKPVFKNDGTTTAGNSSQVSDGAGAVLLMRRSVATQKGLPVLGVFRTFAAVGVDPAIMGVGPAVAIPAAVKAAGLELDDIDLFEINEAFASQFVYCRNKLGLDAEKINVNGGAMAIGHPLGATGARCVATLLHEMKRRGKDCRFGVVSMCIGTGMGAAAVFERGDGVDELRNARKVESHGLLSKDAR

SEQ ID NO: 3427 - DNA, 1266 bp, Brassica napus
  CDS (1)..(1266)
atggcttcatccgtctctgatcagtccgtacagcctcaagatgtttgtgttgtgggagtggcgagaacgcctatgggagacttcctaggctctctctcttctataactgccccaagactcggctccatagcgattgaagccgcacttaagagagcaaacgttgaaccggctcttgtggaagaggttttctttggcaatgtcttaaccgccaatcttgggcaagcgccagcaagacaggctgcacttggtgctgggattccctattcagtgatctgcaccactgtcaacaaagtctgtgctgctgggatgaaagccgtaatgttagcggctcaaagtatccagctcggtttgaatgatgttgttgtggctggtgggatggagagcatgtcaaacgtaccaaagtacctcccaaacgcaagaaggggttcacgattaggacatgatactgttgttgacggtatgacgaaagatggactttgggatgtgtacaatgactttggaatgggagtttgtggagaaatatgcgctgaccagtaccgtattacaagagaagaacaggatgcttatgctatacagagctttgagcgtggtattgctgcacaaaacgctcggttgttcgcttgggaaattgttccggttgaggtttcttctggaagagggaagccatctgttgttattgacaaggatgatggaattgggaagtttgatgctgccaagttaaagaagcttagaccaagcttcaaggaggatgggggatcagtcactgctggaaatgcatcaagtataagtgatggtgcggcagcgttagtgctagttagtggaaagaaggctattgaacttggattgaatgttatagctaagattagaggatatgctgatgctgctcaggcacctgagttgttcacaaccacgccggcacttgctattcctaaagctataatgcgtgctggtttagatgcatctcaagttgattactatgaaattaacgaagctttctctgttgtagctctggccaatcagaaactgctggggttagatcctgcacggttgaatgcacatggaggggctgttgcattgggacatccactgggatgcagtggtgctcgcattttagtcacattactgggtgtattgagagcaaagaagggaaagtatggagtggcatcaatatgcaacggaggaggaggagcatcagcacttgttctcgagttcatgtcggagaagacaatcgggtattcatcactctgtagcaagttgaagctatag

SEQ ID NO: 3428 - protein, 421 aa, Brassica napus
MASSVSDQSVQPQDVCVVGVARTPMGDFLGSLSSITAPRLGSIAIEAALKRANVEPALVEEVFFGNVLTANLGQAPARQAALGAGIPYSVICTTVNKVCAAGMKAVMLAAQSIQLGLNDVVVAGGMESMSNVPKYLPNARRGSRLGHDTVVDGMTKDGLWDVYNDFGMGVCGEICADQYRITREEQDAYAIQSFERGIAAQNARLFAWEIVPVEVSSGRGKPSVVIDKDDGIGKFDAAKLKKLRPSFKEDGGSVTAGNASSISDGAAALVLVSGKKAIELGLNVIAKIRGYADAAQAPELFTTTPALAIPKAIMRAGLDASQVDYYEINEAFSVVALANQKLLGLDPARLNAHGGAVALGHPLGCSGARILVTLLGVLRAKKGKYGVASICNGGGGASALVLEFMSEKTIGYSSLCSKLKL

SEQ ID NO: 3429 - DNA, 1212 bp, Brassica napus
  CDS (1)..(1212)
atggcccattcagcagattccgtcaatcccagagatgtttgcattgtgggtgttgcacgcactccaatgggtggctttctcggatctctctcgtctttacccgccacaaagcttggatccgtagctattacagctgctttgaagagagcaaatgttgacccgtctctcgtccaagaagttgtgtttggcaatgttcttagtgccaatttgggtcaggctcctgctcgtcaggctgctttaggtgcagggatccctaactctgttatctgtacaacagttaacaaggtttgtgcttcaggcatgaaagcggtaatgattgctgctcagagtattcaattggggatcaatgatgtagtcgtagcgggtggcatggaaagcatgtcgaatacaccaaaatatttggctgaagcaaggaaaggatctcggtttggtcatgattctctagtagatggaatgctaaaggatggactatgggatgtctataacgactgtgggatgggaagctgtgcagagttatgcgctgagaagtttcagataacaagggagcagcaagatgactacgctgttcagagttttgaacgtggtattgctgcccaggaagctggcgccttcacatgggaaatcgtcccggttgaagtttctggaggaaggggtaggccatcaaccattgttgacaaggacgaaggtcttgggaagtttgatgctgcaaaattgaggaaactccgtccaagtttcaaggacaatggaggcactgttacagctggaaatgcctctagcataagcgatggtgcagctgcccttgtcttagtgagtggagagaaagcgcttcagctaggacttcaagtactcgcaaaaattaaaggttatggtgatgcagctcaggaaccagagtttttcactactgctcctgctcttgcgataccaaaagctattgcacatgctggtttggaatcttctcaagttgattactatgagatcaatgaagcatttgcagttgtagcacttgcaaatcaaaagctactagggattggtccggagaaggtgaatgtaaatggaggagctgtctccttaggacatcctctaggctgtagtggagcccgtattctaatcacattacttgggatactgaagaagagaaacggaaagtacggtgtgggaggagtgtgcaacggaggaggaggtgcttctgctcttgttcttgaacttgtttga

SEQ ID NO: 3430 - protein, 403 aa, Brassica napus
MAHSADSVNPRDVCIVGVARTPMGGFLGSLSSLPATKLGSVAITAALKRANVDPSLVQEVVFGNVLSANLGQAPARQAALGAGIPNSVICTTVNKVCASGMKAVMIAAQSIQLGINDVVVAGGMESMSNTPKYLAEARKGSRFGHDSLVDGMLKDGLWDVYNDCGMGSCAELCAEKFQITREQQDDYAVQSFERGIAAQEAGAFTWEIVPVEVSGGRGRPSTIVDKDEGLGKFDAAKLRKLRPSFKDNGGTVTAGNASSISDGAAALVLVSGEKALQLGLQVLAKIKGYGDAAQEPEFFTTAPALAIPKAIAHAGLESSQVDYYEINEAFAVVALANQKLLGIGPEKVNVNGGAVSLGHPLGCSGARILITLLGILKKRNGKYGVGGVCNGGGGASALVLELV

SEQ ID NO: 3431 - DNA, 1215 bp, Brassica napus
  CDS (1)..(1215)
atggcccattcagcagattcctccgtcaatcccagagatgtttgcatcgtgggtgttgcacgcactcctatgggtggctttctcggatctctctcctccttacccgccacaaagcttggatccgttgccatcacagctgctctgaagagagcaaatgttgacccgtctctggtccaagaagttgtgtttgggaatgttctcagtgctaatttgggtcaagctcctgctcgtcaagctgctttaggtgctgggatccctaactctgttatctgtactactgtcaacaaggtttgtgcttcaggcatgaaagctgtgatgattgctgctcagagtatccagttggggatcaatgatgtagtcgtggcgggtggtatggaaagcatgtctaatacaccaaaatatcttgcagaagcaaggaaaggatctaggtttggtcatgattctctagtagatgggatgcttagggatggactgtgggatgtctataacgactgtgggatgggaagctgtgcagagttatgcgctgagaagtttgagataaccagggagcagcaagatgactacgctgttcagagttttgagcgtggtattgctgctcaagaagctggcgccttcacatgggagatcgtcccggttgaagtttctggaggaaggggtaggccatcaaccattgttgacaaggatgaaggtcttgggaagtttgatgctgcaaaactgagaaaactccgtccgagtttcaaggagaatggaggcactgttacagctggaaatgcctctagcataagtgatggtgcagctgcccttgtcttagtgagtggagagaaagcgcttcagctaggacttcaagtactcgcaaaaattaaaggttatggtgatgcagctcaggaaccagagtttttcactactgctcctgctcttgcgataccaaaagctattgcacatgctggtttggaatcttctcaagttgattactatgagatcaatgaagcatttgcagttgtagcacttgcaaatcaaaagctactagggattagtccggagaaggtgaatgtaaatggaggagctgtctccttaggacatcctctaggctgtagtggagcccgtattctaatcacattacttgggatactgaagaagagaaacggcaagtacggtgtgggaggagtgtgcaacggaggaggaggtgcttctgctcttgttcttgaacttgtttga

SEQ ID NO: 3432 - protein, 404 aa, Brassica napus
MAHSADSSVNPRDVCIVGVARTPMGGFLGSLSSLPATKLGSVAITAALKRANVDPSLVQEVVFGNVLSANLGQAPARQAALGAGIPNSVICTTVNKVCASGMKAVMIAAQSIQLGINDVVVAGGMESMSNTPKYLAEARKGSRFGHDSLVDGMLRDGLWDVYNDCGMGSCAELCAEKFEITREQQDDYAVQSFERGIAAQEAGAFTWEIVPVEVSGGRGRPSTIVDKDEGLGKFDAAKLRKLRPSFKENGGTVTAGNASSISDGAAALVLVSGEKALQLGLQVLAKIKGYGDAAQEPEFFTTAPALAIPKAIAHAGLESSQVDYYEINEAFAVVALANQKLLGISPEKVNVNGGAVSLGHPLGCSGARILITLLGILKKRNGKYGVGGVCNGGGGASALVLELV

SEQ ID NO: 3433 - DNA, 1230 bp, Glycine max
  CDS (1)..(1230)
atgtctacttgtgtaaaatcccgagatgtttgtattgttggtgttgcacggacgccaataggtggtttacttggcaccctatcatctctttctgccacagagttaggctcaattgctattaagactgctctcaagagagcaaatgttgatccatcactcgtgcaagaggtgttttttgggaatgttcttagtgccaatttagggcaggctcctgccagacaggctgcattaggtgcaggaattcctacatctgtaatctgcactactattaacaaggtctgtgcatcagggatgaaagctaccatgcttgcagcactcaccatacaattcggtctcaatgatgttgttgtggctggtggtatggaaagcatgtcaaatgcacctaagtacattgcagaggccaggaaaggatctcgatatggacacgataccatcattgatggtatggtcaaagatggcctttgggatgtctataataacttcggcatgggagtatgtgccgaactatgtgcagatcagcatgtcataacaagagatgagcaggattcttatgccattcgaagctttgagagaggaatatctgctcaaaatgctggtcattttgcttgggagatagttccggttgaagtttccactggaagagggagggcttccacaattgttgataaagatgaaggtctggggaagtttgatgctgcaaagttaaggaagcttagaccaagctttaaagaggttgggggttctgtgactgctggcaatgcttctagcataagtgatggtgctgctgcattagtgctagtgagtgaagagaaggcacgtgagcttggattgcatgtaattgcaaagataaaaggatatggggatgcagctaaggcgcctgaattatttacaactgctccttcccttgcaataccaaaagctatatcaaatgctggtcttgatgcttctcaaattgattattatgaaataaatgaagctttttcagttgtagctcttgcaaatcagaagcttcttgctcttaatcctgaaaaagttaacgtgtatggtggagctgtgtcattggggcatcccttgggttgcagtggagctcgcatcttagtcacattattaggggtattgagacagaagagagggaagtatggtgttgctgccatctgcaacgggggaggaggagcatctgctcttgttcttgagctcatgccggttgccgtgggacgttctttattatga

SEQ ID NO: 3434 - protein, 409 aa, Glycine max
MSTCVKSRDVCIVGVARTPIGGLLGTLSSLSATELGSIAIKTALKRANVDPSLVQEVFFGNVLSANLGQAPARQAALGAGIPTSVICTTINKVCASGMKATMLAALTIQFGLNDVVVAGGMESMSNAPKYIAEARKGSRYGHDTIIDGMVKDGLWDVYNNFGMGVCAELCADQHVITRDEQDSYAIRSFERGISAQNAGHFAWEIVPVEVSTGRGRASTIVDKDEGLGKFDAAKLRKLRPSFKEVGGSVTAGNASSISDGAAALVLVSEEKARELGLHVIAKIKGYGDAAKAPELFTTAPSLAIPKAISNAGLDASQIDYYEINEAFSVVALANQKLLALNPEKVNVYGGAVSLGHPLGCSGARILVTLLGVLRQKRGKYGVAAICNGGGGASALVLELMPVAVGRSLL

SEQ ID NO: 3435 - DNA, 1338 bp, Glycine max
  CDS (1)..(1338)
atggataaagcaattcaaagacagagagtcctgcttgatcatcttcaacccatttcttcaagttcaaatttttcttctcaaacccatcaatctacggatctctcagcttcattatgttttgccaagaattcttcgcacggtcaaataggtggatcagatgacgacgtggtgattgtagctgcatatcgtactgccatctgcaaagcaaagcgtgggggctttaaggatacccttccagatgacctgcttgccacagttctgaaggctgtaatagagaaaacaaatgtgaacccagcagaagttggagacattgttgtgggcactgtactggcacctggatcagatagaggaattgagtgcagaatggctgccttttatgcaggtttcccagagacagtgcctcttcgaactgtcaataggcaatgttcatctggacttcatgcggtttctgacgtagctgcttatataaaagctgggttctatgaaattgggattggggctggattggagtctatgacagtagatcgtgtgaataggcttcacaacattaacccaaaagtagaaacctttacagaagcccgggattgtcttcttccaatgggaattacttctgagaatgtagcgcagcgttatggtgtgacaaggctagagcaagatcaagctgctgtggagtctcataagcgtgctgcagctgcaacagcagctggtaagttcaaagaagaaatcattccagtttctacaaagtttgtggaccctaaaactggagtggagaagaaaattgttgtttctgtcgatgatggtatccggccaaacacaaatttagtggatttggcaaagctgaagcctgcattccagaaagatggaaccacaacagcagggaatgctagccaaattagtgacggtgcagcagctgttctcctcatgaagagaagagtggctgtgcaaaaggggcttcctatacttggaatcttcaggagttttgctgctgttggagtagatcctgcagtcatgggtgttggccctgctgttgctatcccagctgcagtgaaatccgtgggccttgaacttggcaacattgacttatttgaaatcaatgaggcatttgcatcacagtatgtttattgcctcaagaaattgggacttgatcccagaaaggtcaatgtcaatggtggtgccattgctcttggacatcctttgggtgttacaggtgcacgctgtgttgcaactttgttgaatgagatgaaacgtcgtggcaaggattgtcgctatggtgtaatctcaatgtgcatagggtcaggtatgggagctgctgctgtatttgaaaggggagacttttga

SEQ ID NO: 3436 - protein, 445 aa, Glycine max
MDKAIQRQRVLLDHLQPISSSSNFSSQTHQSTDLSASLCFAKNSSHGQIGGSDDDVVIVAAYRTAICKAKRGGFKDTLPDDLLATVLKAVIEKTNVNPAEVGDIVVGTVLAPGSDRGIECRMAAFYAGFPETVPLRTVNRQCSSGLHAVSDVAAYIKAGFYEIGIGAGLESMTVDRVNRLHNINPKVETFTEARDCLLPMGITSENVAQRYGVTRLEQDQAAVESHKRAAAATAAGKFKEEIIPVSTKFVDPKTGVEKKIVVSVDDGIRPNTNLVDLAKLKPAFQKDGTTTAGNASQISDGAAAVLLMKRRVAVQKGLPILGIFRSFAAVGVDPAVMGVGPAVAIPAAVKSVGLELGNIDLFEINEAFASQYVYCLKKLGLDPRKVNVNGGAIALGHPLGVTGARCVATLLNEMKRRGKDCRYGVISMCIGSGMGAAAVFERGDF

SEQ ID NO: 3437 - DNA, 1224 bp, Glycine max
  CDS (1)..(1224)
atggctccagtagcagcagcatcttcagattcaatcaagccaagagatgtttgcatcgttggtgttgcacgtacaccaatgggtggatttcttggtactctgtcatctctatctgccaccaagctaggctctatagctattgaagctgctcttaaaagggccaatgttgatccatcccttgtggaagaagtattttttgggaatgttcttagtgctaatttggggcaagctcctgcaagacaagctgctcttggagcaggaatatccaattcagttatctgcactaccgttaacaaagtttgtgcatcaggaatgaaagctgcaatgcttgctgcacagagtattcaattaggcacaaatgatgttgttgtggctggtggtatggaaagcatgtctaatgtacccaagtacctggctgaagcaaggaaaggatcacgccttggacatgattcacttgttgatgggatgttgaaagatggtttgtgggatgtctataaggatgttggcatgggagtgtgtgctgagctatgtgcagataaccatgcattaacaagagacgaccaggataactatgcaattcagagttttgaacgtggaattgctgcccaagaaagtggtgccttttcatgggaaattgctccagttgaagtctctggtggaagaggaagaccatcaacagttgttgataaggatgaaggcctaggaaagtttgatgctgccaagttacgcaaacttcggccaagtttcaaggagactggaggttctgttacagctggcaatgcttccagcataagtgatggtgctgctgcactagttttggtgagtggagagaaggcactgaagcttgggcttcaagttattgcaaaaatcactggatatgctgatgctgctcaggaaccagagttatttacaacggctccatcccttgccattcccaaagctattgccaaggcggggttggagacttcacaaattgatttttatgaaattaatgaagcctttgcggttgtggctctcgcaaatcagaaacttcttggacttaactcggaaaaagtaaacgtacatggtggagctgttgcactgggtcatcctcttggttgcagtggtgctcgcattctggtgacacttttgggggtactgaagcagaagaatgggaagtacggagttggtggcatttgcaatggaggaggtggtgcatctgcccttgttgttgagcttcagtaa

SEQ ID NO: 3438 - protein, 407 aa, Glycine max
MAPVAAASSDSIKPRDVCIVGVARTPMGGFLGTLSSLSATKLGSIAIEAALKRANVDPSLVEEVFFGNVLSANLGQAPARQAALGAGISNSVICTTVNKVCASGMKAAMLAAQSIQLGTNDVVVAGGMESMSNVPKYLAEARKGSRLGHDSLVDGMLKDGLWDVYKDVGMGVCAELCADNHALTRDDQDNYAIQSFERGIAAQESGAFSWEIAPVEVSGGRGRPSTVVDKDEGLGKFDAAKLRKLRPSFKETGGSVTAGNASSISDGAAALVLVSGEKALKLGLQVIAKITGYADAAQEPELFTTAPSLAIPKAIAKAGLETSQIDFYEINEAFAVVALANQKLLGLNSEKVNVHGGAVALGHPLGCSGARILVTLLGVLKQKNGKYGVGGICNGGGGASALVVELQ

SEQ ID NO: 3439 - DNA, 1338 bp, Glycine max
  CDS (1)..(1338)
atggataaagcaattcaaagacagagagtcctgcttgatcatcttcaacccatttcttcaagttcaaatttttcttctcaaacccatcaatctacggatctctcagcttcattatgttttgccaagaattcttcgcacggtcaaataggtggatcagatgacgacgtggtgattgtagctgcatatcgtactgccatctgcaaagcaaagcgtgggggctttaaggatacccttccagatgacctgcttgccacagttctgaaggctgtaatagagaaaacaaatgtgaacccagcagaagttggagacattgttgtgggcactgtactggcacctggatcagatagaggaattgagtgcagaatggctgccttttatgcaggtttcccagagacagtgcctcttcgaactgtcaataggcaatgttcatctggacttcaggcggtttctgacgtagctgcttatataaaagctgggttctatgaaattgggattggggctggattggagtctatgacagtagatcgtgtgaataggcttcgcaacattaacccaaaggtagaaacctttgcagaagcccgggattgtcttcttccaatgggaattacttctgagaatgtagcgcagcgttatggtgtgacaaggctagagcaagatcaagctgctgttgagtctcataagcgtgctgcagctgcaacagcagctggtaagttcaaagaagaaatcattccagtttctacaaagtttgtggaccctaaaactggagtggagaagaaaattgttgtttctgtcgatgatggtatccggccaaacacaaatttagtggatttggcaaagctgaagcctgcattccagaaagatggaaccacaacagcagggaatgctagccaaattagtgacggtgcagcagctgttctcctcatgaagagaagagtggctgtgcaaaaggggcttcctatacttggaatcttcaggagttttgctgctgttggagtagatcctgcagtcatgggtgttggccctgctgttgctatcccagctgcagtgaaatccgtgggccttgaacttggcaacattgacttatttgaaatcaatgaggcatttgcatcacagtatgtttattgcctcaagaaattgggacttgatcccagaaaggtcaatgtcaatggtggtgccattgctcttggacatcctttgggtgttacaggtgcacgctgtgttgcaactttgttgaatgagatgaaacgtcgtggcaaggattgtcgctatggtgtaatctcaatgtgcatagggtcaggtatgggagctgctgctgtatttgaaaggggagacttttga

SEQ ID NO: 3440 - protein, 445 aa, Glycine max
MDKAIQRQRVLLDHLQPISSSSNFSSQTHQSTDLSASLCFAKNSSHGQIGGSDDDVVIVAAYRTAICKAKRGGFKDTLPDDLLATVLKAVIEKTNVNPAEVGDIVVGTVLAPGSDRGIECRMAAFYAGFPETVPLRTVNRQCSSGLQAVSDVAAYIKAGFYEIGIGAGLESMTVDRVNRLRNINPKVETFAEARDCLLPMGITSENVAQRYGVTRLEQDQAAVESHKRAAAATAAGKFKEEIIPVSTKFVDPKTGVEKKIVVSVDDGIRPNTNLVDLAKLKPAFQKDGTTTAGNASQISDGAAAVLLMKRRVAVQKGLPILGIFRSFAAVGVDPAVMGVGPAVAIPAAVKSVGLELGNIDLFEINEAFASQYVYCLKKLGLDPRKVNVNGGAIALGHPLGVTGARCVATLLNEMKRRGKDCRYGVISMCIGSGMGAAAVFERGDF

SEQ ID NO: 3441 - DNA, 1260 bp, Hordeum vulgare
  CDS (1)..(1260)
atggcgccgcccccgagcgccagcagcgcccccgacggcggcctggatcccagggacgtgtgcgtcgtcggcgtcgcccgcacccccatcggcgccctgctcggctccctctcctccctcccggccaccaagctcggctccgtcgccatccagggtgcgctccggcgagccagcgtcgacccggcgctggtgcaggaggtcttcatgggcaacgtcctcagcgccaacctcggccaggcccccgccaggcaggccgcgctcggcgccggcctgcccaacaccgtcccctgcaccaccgtcaacaaagtctgctcctcagggatgaaggctgtcatgcttgcggtgcagtcgattcagctggggatcaacgacgtcgtggtggccggcggcatggagagcatgtccaacgcccccaaatatgctgcaacggcaagacgaggttcgcggtttgggcatgacgtcctggtcgacgggatgctcaaggacgggttgtgggatgtgtacaatgatttccatatggggatgtgcgctgagctctgtgcagatcagcactccattacaagggaggagcaggatgcttatgccgtccagagcaacgagcatggaatagcagctcgggacagcggcgcgtttgattgggaaattattccggttgaaattccttctggtagaggcaggccaccagttgttgttgacaaggatgagagtcttgcaaagtatgatccagtgaagctcaagaaacttggaccggcttttaagaagaatggctctgtaactgccggcaattcttctagtataagcgacggtgctgctgcagttgtgctagtcagtggggagaaagccaagagccttggccttcaagttcttgcaaggatcagagggtacgctgatgctgctcaggcacctgagctatttacaacaactccagctcttgctatcccaaaggctatatcaaattcaggtctccgagactcgcaaatagattattatgagataaatgaggctttctcggttgttgcagtggcgaatcagagacttcttggaatctctcctggaaaactgaatataagtggcggtgctgtttctctgggccatcctatcggttgcagtggtgcacgaattatagtcacgctgctcgggattcttagacagaaacatgggaagtttggggttgccggagtttgcaacggcgggggcggagcttcagccatcgttgtagagtccatgcagccttcatcgcgcctgcgttcgtcgctgtga

SEQ ID NO: 3442 - protein, 419 aa, Hordeum vulgare
MAPPPSASSAPDGGLDPRDVCVVGVARTPIGALLGSLSSLPATKLGSVAIQGALRRASVDPALVQEVFMGNVLSANLGQAPARQAALGAGLPNTVPCTTVNKVCSSGMKAVMLAVQSIQLGINDVVVAGGMESMSNAPKYAATARRGSRFGHDVLVDGMLKDGLWDVYNDFHMGMCAELCADQHSITREEQDAYAVQSNEHGIAARDSGAFDWEIIPVEIPSGRGRPPVVVDKDESLAKYDPVKLKKLGPAFKKNGSVTAGNSSSISDGAAAVVLVSGEKAKSLGLQVLARIRGYADAAQAPELFTTTPALAIPKAISNSGLRDSQIDYYEINEAFSVVAVANQRLLGISPGKLNISGGAVSLGHPIGCSGARIIVTLLGILRQKHGKFGVAGVCNGGGGASAIVVESMQPSSRLRSSL

SEQ ID NO: 3443 - DNA, 1197 bp, Hordeum vulgare
  CDS (1)..(1197)
atgggttcggaccccagagatgtatgtgttgttgggattgcacgcacccctatgggtagtttccttggtggtttgtcttccttgcctgctacgaaacttggctctatagcaattgaagctgctctgagaagggcaaatgtcgatccatcccttgtgcaggaggtcttctttggcaatgtcttgagtgctaacttggggcaagctcctgcaagacaagctgctttaggtgcagggataccaaatacggttgtttgcaccacagtcaacaaagtttgtgcatctggcatgaaagcgaccatgtttgctgcgcaatcaattcaactgggaatcaatgacattgttgtggcaggtgggatggaaagcatgtcaaatgctccgaaatacatcgctgaagccagaaaaggatctcgttttggacatgacagcctcgttgatggcatgcttaaggatggcctttgggatgtatacggtgattgtgccatgggagtgtgcgctgagctttgtgctgacaatcatgccctgacgagagaagaccaggatgcatatgctattcaaagtaatgagcgtggaattgctgctcgtgacagtggtgcttttgcatgggagattgttccgattgaagttcctgttggtagagggaaacctgcagtacttgttgacaaagatgagagtctagacaagtttgacgcagccaagctgaagaagttacgaccagcattcaaggaaaatgctggtactgttactgctggaaatgcttctagtataagtgatggcgctgcagcattagtattggtgagtgggaagaaggctcaagaacttggattgcaagtccttgcaaggatcaagggatttgctgacgcagcccaagctcctgaactatttaccactaccccagcacttgccataccgaaggctctcacgaatgctggcctagagtcctctcgtgttgatttttatgaaattaatgaagcattttcggctgttgcacttgcaaatcaaaagcttctcgggattccttcagaaaagataaatgtacatggaggagctgtatctttaggacacccacttgggtgcagtggtgctcgcattttggtcacccttcttggtgttcttagggagaagggtggcaagatcggagttgctggtgtctgcaacggcggtggcggtgcatctgcacttgttatagagctcgcgtaa

SEQ ID NO: 3444 - protein, 398 aa, Hordeum vulgare
MGSDPRDVCVVGIARTPMGSFLGGLSSLPATKLGSIAIEAALRRANVDPSLVQEVFFGNVLSANLGQAPARQAALGAGIPNTVVCTTVNKVCASGMKATMFAAQSIQLGINDIVVAGGMESMSNAPKYIAEARKGSRFGHDSLVDGMLKDGLWDVYGDCAMGVCAELCADNHALTREDQDAYAIQSNERGIAARDSGAFAWEIVPIEVPVGRGKPAVLVDKDESLDKFDAAKLKKLRPAFKENAGTVTAGNASSISDGAAALVLVSGKKAQELGLQVLARIKGFADAAQAPELFTTTPALAIPKALTNAGLESSRVDFYEINEAFSAVALANQKLLGIPSEKINVHGGAVSLGHPLGCSGARILVTLLGVLREKGGKIGVAGVCNGGGGASALVIELA

SEQ ID NO: 3445 - DNA, 1383 bp, Triticum aestivum
  CDS (1)..(1383)
atggagaaggcgatcgaccggcagcgcgtgctcctcgcgcacctcctcccctcctcctccgccgccccgtcccggatatccgcgtcggcgtgcgcggccggggacagcgccgcctaccagaggagctcctgcttcggggacgacgtcgtcatcgtcgccgcctaccggacgccgatatgcaaggccaagcgagggggcttcaaggacacgtacccggaggaccttcttactcctgtcctcaaggctgtcctggacaaaactggaatcaacccagctgaaatcggcgacgttgtggtcgggacggtgctaggcccaggttctcagcgtgcgatcgagtgcaggacgtcatctctgttagctggaattcctgagaccgtccccgtgagaactgtgaaccgccaatgctcatcggggctacaggcagtagcagatgttgctgctgcaataaaagctggtttctatgacatagggattggtgcaggtcttgaatccatgtcggtgaactccgttggttgggaaggccaagtaaacccaagagtcattgaactacagaaagcacaggattgtcttctacccatgggaataacatctgaaaatgttgctcagcgatacggtgtaaccagagaagagcaagataaggctgctgttgagtctcatgcgagagctgctgcagccacggcttctggaaagttcaaggatgagattattccagtgcatacaaagcttattgaccccaaaactggagaggaaaagaaagttgtgatatcagttgatgatgggattaggccagggaccacgctatctggattggccaagcttaagacagttttcaagaaggatgggactacaactgcaggtaattctagccaagtgagtgatggtgctggagctgttcttctcatgaagagatctgtagcggtgagcaaggggcttcctatacttggcgttttcaggagtttcgctgctgttggagtggatccagctgttatgggtgtcggccctgcggtcgccatacctgctgcagtgaagtctgctggccttgagattgacgacattgatctctttgaattgaacgaggcctttgcctcccaatttgtctactgctgcaacaagctgggactcgaccggtcaaaggtgaacgtgaatggaggagccatcgctatggggcatcctcttggagcaacaggcgcccggtgcatctcgacccttctgaacgaaatgaagcgccggggcagggactgcagattcggcgtggtgaccatgtgcatcgggtccggcatgggcgcggcggccgtgttcgagcggggcgactcggtggacgagctctccaacgtgcgccacatccagtcgcacaacttcctgtccaaggatgctgcaaagtag

SEQ ID NO: 3446 - protein, 460 aa, Triticum aestivum
MEKAIDRQRVLLAHLLPSSSAAPSRISASACAAGDSAAYQRSSCFGDDVVIVAAYRTPICKAKRGGFKDTYPEDLLTPVLKAVLDKTGINPAEIGDVVVGTVLGPGSQRAIECRTSSLLAGIPETVPVRTVNRQCSSGLQAVADVAAAIKAGFYDIGIGAGLESMSVNSVGWEGQVNPRVIELQKAQDCLLPMGITSENVAQRYGVTREEQDKAAVESHARAAAATASGKFKDEIIPVHTKLIDPKTGEEKKVVISVDDGIRPGTTLSGLAKLKTVFKKDGTTTAGNSSQVSDGAGAVLLMKRSVAVSKGLPILGVFRSFAAVGVDPAVMGVGPAVAIPAAVKSAGLEIDDIDLFELNEAFASQFVYCCNKLGLDRSKVNVNGGAIAMGHPLGATGARCISTLLNEMKRRGRDCRFGVVTMCIGSGMGAAAVFERGDSVDELSNVRHIQSHNFLSKDAAK

SEQ ID NO: 3447 - DNA, 1206 bp, Triticum aestivum
  CDS (1)..(1206)
atgggttcacagaacatcggccccagagatgtctgcatcgtcggggtcgcgcgcacccctatgggtggtttcctcggcgccctgtcttccttgcctgctaccaaactcggctccgtggctatcgaagctgctctgaaaagggcgaatgtcgatccatcccttgtgcaggaggtcttcttcggcaatgtcctgagtgctaacttggggcaagctccagcgagacaggctgccttaggcgcagggataccgaacacggttgtttgcaccactgtcaacaaagtttgcgcatctggcatgaaagcaacgatgtttgctgcacagtcgattcaactgggcagcaatgatattgtagtggcaggtggcatggagagcatgtcgaatgctccgaaatacatcgctgaagctagaaaaggttctcgtttcggacatgacagccttgttgatggtatgcttaaggatggcctttgggatgtatatggcgattgtgccatgggagtgtgtgctgagctctgtgctgacaatcatgctctgacaagggaagaccaagatgcttttgctattcaaagtaatgagcggcgaattgctgctcgtgatagtggcgcttttgcatgggagatcgttccggttgaagctcctgttggcagaggaaaacaaccggtacttgttgaaaaagacgagagcctagacaggtttgacccagcgaaactgaggaagctccgcccaagtttcaaggagaaagctggcactgttactgctgggaacgcttctagtataagtgatggtgctgccgcattagtattggtgagtgggcagaaggctcaagaacttgggctgcaagttcttgcaaggatcaaaggatttgccgatgcggctcaagctcccgaactatttaccaccaccccagcacttgccataccgaaggctctctcaaatgctggcttagaatcttcatctgttgatttttacgaaattaacgaagcctttgcggctgttgcactcgcaaatcagaagattcttggaattccttcagaaaagattaatgtacatggaggagctgtgtctttaggacaccctcttggatgcagcggtgctcgcatcttggtcacccttattggtgtcctcagggagaagggtggcaaaatcggggtcgctggcgtctgcaacggtggaggcggagcatccgcacttgttctcgagcttgcgtag

SEQ ID NO: 3448 - protein, 401 aa, Triticum aestivum
MGSQNIGPRDVCIVGVARTPMGGFLGALSSLPATKLGSVAIEAALKRANVDPSLVQEVFFGNVLSANLGQAPARQAALGAGIPNTVVCTTVNKVCASGMKATMFAAQSIQLGSNDIVVAGGMESMSNAPKYIAEARKGSRFGHDSLVDGMLKDGLWDVYGDCAMGVCAELCADNHALTREDQDAFAIQSNERRIAARDSGAFAWEIVPVEAPVGRGKQPVLVEKDESLDRFDPAKLRKLRPSFKEKAGTVTAGNASSISDGAAALVLVSGQKAQELGLQVLARIKGFADAAQAPELFTTTPALAIPKALSNAGLESSSVDFYEINEAFAAVALANQKILGIPSEKINVHGGAVSLGHPLGCSGARILVTLIGVLREKGGKIGVAGVCNGGGGASALVLELA

SEQ ID NO: 3449 - DNA, 1386 bp, Zea mays
  CDS (1)..(1386)
atggagaaggcgatcgatcggcagcgggtcctcctggcgcacctcctcccctccccctccgccgcctcctcgcagcctcagcttgcggcgtcggcgtgcgcggccggggacagcgccgcctaccagaggtcctcctccttcggggacgatgtcgtcgtcgtcgctgcctacaggacgccgatatgcaaggccaagcgaggaggcttcaaggacacctacccagaggacctcctcactgttgttctcaaggctgttctggacaacactagaatcaatccagctgacatcggtgacatcgtcgttgggacggtgctcggccctggttcccagcgtgcaaacgagtgcaggatggctgcgttgtttgctggattccctgaaaccgtccctgttagaactgtcaaccgccagtgttcatctgggctacaggcagtagccgatgtcgcagctgctataaaggctggttactatgacatagggattggtgctggtttggaatccatgtccataaattccattgcttgggaaggacaagttaacccaaaaataagcgcattccagaaagcacaggattgtcttctgcccatgggaattacttctgaaaatgttgcccatcgatatggtgtaaccaggcaagagcaagatcaggccgccgctgagtctcataggagagctgctgcagccacggcctctggaaaattcaaggatgagatcgtcccggtgccaacaaagatcgttgatcctaaaactggagaggagaaggaagttgtgatatcagttgatgatgggattaggccagggaccacagcatctggattggcgaaactgaaaccagtttttaaaaaggatggaactacaactgcaggcaattccagtcaagtgagtgatggtgctggagctgttcttctcatgaaaagatctgtggctctgaagaaagggctgcccattcttggtgttttcaggagctttgcggctgttggagtggatccagctgttatgggcgttggtcctgctgtggccattcctgctgctgtgaagtctgcaggccttgagattggcgacattgatctgtttgaactgaatgaggccttcgcctctcagtttgtctattgctgcaacaagttggggctggaccgttctaaagtaaatgtaaatggaggcgcgattgcccttggacaccctctgggtgcaacaggtgcccggtgtgtggctactcttctaaatgaaatgaagcgccggggcagagactgcagatttggtgttgtcaccatgtgtatcggatctggaatgggggcagcagctgtgttcgagcggggagacgcggtggatggactctccaacgtgagggacatgcaggcacataattttctgtctaaggatgcgaagtag

SEQ ID NO: 3450 - protein, 461 aa, Zea mays
MEKAIDRQRVLLAHLLPSPSAASSQPQLAASACAAGDSAAYQRSSSFGDDVVVVAAYRTPICKAKRGGFKDTYPEDLLTVVLKAVLDNTRINPADIGDIVVGTVLGPGSQRANECRMAALFAGFPETVPVRTVNRQCSSGLQAVADVAAAIKAGYYDIGIGAGLESMSINSIAWEGQVNPKISAFQKAQDCLLPMGITSENVAHRYGVTRQEQDQAAAESHRRAAAATASGKFKDEIVPVPTKIVDPKTGEEKEVVISVDDGIRPGTTASGLAKLKPVFKKDGTTTAGNSSQVSDGAGAVLLMKRSVALKKGLPILGVFRSFAAVGVDPAVMGVGPAVAIPAAVKSAGLEIGDIDLFELNEAFASQFVYCCNKLGLDRSKVNVNGGAIALGHPLGATGARCVATLLNEMKRRGRDCRFGVVTMCIGSGMGAAAVFERGDAVDGLSNVRDMQAHNFLSKDAK

SEQ ID NO: 3451 - DNA, 1386 bp, Zea mays
  CDS (1)..(1386)
atggagaaggcgatcgatcggcagcgggtcctcctggcgcacctcctcccctccccctccgccgcctcctcgcagcctcagcttgcggcgtcggcgtgcgcggccggggacagcgccgcctaccagaggtcctcctccttcggggacgatgtcgtcgtcgtcgctgcctacaggacgccgatatgcaaggccaagcgaggaggcttcaaggacacctacccagaggacctcctcactgttgttctcaaggctgttctggacaacactagaatcaatccagctgacatcggtgacatcgtcgttgggacggtgcttggccctggttcccagcgtgcaaacgagtgcaggatggctgcgttgtttgctggattccctgaaaccgtccctgttagaactgtcaaccgccagtgttcatctgggctacaggcagtagccgatgtcgcagctgctataaaggctggttactatgacatagggattggtgctggtttggaatccatgtccataaattccattgcttgggaaggacaagttaacccaaaaataagcgcattccagaaagcacaggattgtcttctgcccatgggaattacgtctgaaaatgttgcccatcgatatggtgtaaccaggcaagagcaagatcaggccgccgctgagtctcataggagagctgctgcagccacggcctctggaaaattcaaggatgagatcgtcccggtgccaacaaagatcgttgatcctaaaactggagaggagaaggaagttgtgatatcagttgatgatgggattaggccagggaccacagcatctagattggcgaaactgaaaccagtttttaaaaaggatggaactacaactgcaggcaattccagtcaagtgagtgatggtgctggagctgttcttctcatgaaaagatctgtggctctgaagaaagggctgcccattcttggtgttttcaggagctttgcggctgttggagtggatccagctgttatgggtgttggtcctgctgtggccattcctgctgctgtgaagtctgcaggccttgagattggcgacattgatctgtttgaactgaatgaggccttcgcctctcagtttgtctattgctgcaacaagttggggctggaccgttctaaagtaaatgtaaatggaggcgcgattgcccttggacaccctctgggtgcaacaggtgcccggtgtgtggctactcttctaaatgaaatgaagcgccggggcagagactgcagatttggtgttgtcaccatgtgtatcggatctggaatgggggcagcagctgtgttcgagcggggagacgcggtggatggactctccaacgtgagggacatgcaggcacataattttctgtctaaggatgcgaagtag

SEQ ID NO: 3452 - protein, 461 aa, Zea mays
MEKAIDRQRVLLAHLLPSPSAASSQPQLAASACAAGDSAAYQRSSSFGDDVVVVAAYRTPICKAKRGGFKDTYPEDLLTVVLKAVLDNTRINPADIGDIVVGTVLGPGSQRANECRMAALFAGFPETVPVRTVNRQCSSGLQAVADVAAAIKAGYYDIGIGAGLESMSINSIAWEGQVNPKISAFQKAQDCLLPMGITSENVAHRYGVTRQEQDQAAAESHRRAAAATASGKFKDEIVPVPTKIVDPKTGEEKEVVISVDDGIRPGTTASRLAKLKPVFKKDGTTTAGNSSQVSDGAGAVLLMKRSVALKKGLPILGVFRSFAAVGVDPAVMGVGPAVAIPAAVKSAGLEIGDIDLFELNEAFASQFVYCCNKLGLDRSKVNVNGGAIALGHPLGATGARCVATLLNEMKRRGRDCRFGVVTMCIGSGMGAAAVFERGDAVDGLSNVRDMQAHNFLSKDAK

SEQ ID NO: 3453 - DNA, 1266 bp, Zea mays
  CDS (1)..(1266)
atggcgtcgtcgagctcggctgctactactagtggtgacagtcagggtctcaaggctcgagatgcctgcatcgtcggcgtcgcccgcacgcccatcggcgcacttctcgggtcgctgtcgtccctccccgccaccaagctcggctccatcgccatccagggtgctctcaagagggcgaaggtcgacccggcgctcgtgcaggaggttttcatgggcaacgtcctcagcgccaaccttggccaggctccggcaaggcaggcagcccttggcgccggcttgcccaactccgtgccatgtaccaccgtcaacaaagtttgttcctcgggaatgaaggctgtcatgtttgcggctcaaagtattcagctggggatcaacgatgttgtggtcgccggtggcatggaaagcatgtcgaatgccccaaaatatgtggctgaagcaagacgaggatcacggttcggacatgatgtccttgttgatgggatgctcaaggatggcctgtgggatgtctataacgatttcccgatgggaatgtgtgctgaattgtgttcagaccagcactcaatctcaagggaggagcaggattcgtatgctatcctcagcaatgaacgtggcatagcagctcgggatagcggtgcattttcttgggagattgttcctgttgaaatttcttctggtagagggaaaccaccagttgttgttgacaaggatgagagtcttgcaaagtttgatccagtaaagctgaagaaacttgggccaacttttaagacgaatggttctgtaacggctggcaattcttctagtataagtgatggcgctgctgcaattgtccttgtcagtggagagagagccaagaatcttggccttgaagttattgcaaggattacagggtatgctgatgctgcacaggcacctgagctgtttacgacagctccagcccttgccattccaaaggctatatcaaatgcagctcttcaaacttcacagatagattattatgaagtaaatgaggctttctctgttgttgctatagctaatcagaggcttcttggtatcccttccggaaagctaaacttaagtggtggtgctgtttccctgggccatcctatcggttgcagtggtgcacggataattgtcactttgcttgggattcttagacagaaaaatggaaaatttggtgttgctggagtttgcaatggcggcggcggcgcttcagccctcgttttggagctcatgcaaccctcttcgcatatccattcatcattgtga

SEQ ID NO: 3454 - protein, 421 aa, Zea mays
MASSSSAATTSGDSQGLKARDACIVGVARTPIGALLGSLSSLPATKLGSIAIQGALKRAKVDPALVQEVFMGNVLSANLGQAPARQAALGAGLPNSVPCTTVNKVCSSGMKAVMFAAQSIQLGINDVVVAGGMESMSNAPKYVAEARRGSRFGHDVLVDGMLKDGLWDVYNDFPMGMCAELCSDQHSISREEQDSYAILSNERGIAARDSGAFSWEIVPVEISSGRGKPPVVVDKDESLAKFDPVKLKKLGPTFKTNGSVTAGNSSSISDGAAAIVLVSGERAKNLGLEVIARITGYADAAQAPELFTTAPALAIPKAISNAALQTSQIDYYEVNEAFSVVAIANQRLLGIPSGKLNLSGGAVSLGHPIGCSGARIIVTLLGILRQKNGKFGVAGVCNGGGGASALVLELMQPSSHIHSSL

SEQ ID NO: 3455 - DNA, 1386 bp, Zea mays
  CDS (1)..(1386)
atggagaaggccgtcgacaggcagcgggtcctgctgcggcacctcaaccccgccgcggcggggagccccgccccgcccgccatctccgcaagcgcgtgcgcggcgggggacagcgcggcgtaccaccggaggccggccttcgccgacgacgtcgtcatcgtcgctgcttacaggacggcaatttgcaaggccaagagagggggtttcaaggatacctttgctgaggacctcttggttcctgtcttcaaggctttggtagacaagacgaagctggacccaagtgaagttggcgacattgttgttggtactgtcttagctcctggttcccagagggcaatcgaatgcagaatggctgcactgtatgctggtttccctgacaccgttcctcttaagactgtaaacaggcagtgctcttctggccttcaggcagttgcagatgttgccactgctattaaagcagggctctatgacattggtattgctgctggtttggagtccatgacagtgaacaaagttagtcttgatggccaagcgaatcccaaagttgagctattttctcaagcacgtgattgtcttctcccaatgggcctcacatctgagaatgttgcacaccgttttggcataacacgactggagcaagatcaagctgctgttgagtcacatagaaaggctgctgccgcagcagctgctggtaaattcaaagaggaaattgtgccagttcatacaaagattgttgatccaaaaactggtgaggaaaagaagatcgtagtctctgcagatgatggaatccgagtggatacttctcttgcagtcctgtcaaaactcaaaccagcattttcaaaggatggcagcactactgctgggaatgcaagccaagtgagtgatggtgctggggccgtcttgctaatgagacgggatgttgctatgaaaaagggtcttccagttcttggtgtctttaggacctttgccgctgttggagttgatccagctgtaatgggtattggtcctgccgtagcaatccccgcagcagtgaaagctgctggccttcagatggatgatatcgatcttttcgaaatcaatgaggcttttgcatctcagtatgtctactgctgcaagaagttgaaacttgatcctgctaaagtcaatgttaatggcggtgcaatggcccttggacatccgttgggtgctacaggtgcacggtgcgtcagtactcttctcaatgagatgaagcgccgcggcaaggattgccggttcggagtgatttctatgtgcataggttctgggatgggtgctgctgctgtgttcgagcggggagacggcgttgatgagctcaccaatgctcggggaatctcgacccacaactggctttccaaggacgccatgtaa

SEQ ID NO: 3456 - protein, 461 aa, Zea mays
MEKAVDRQRVLLRHLNPAAAGSPAPPAISASACAAGDSAAYHRRPAFADDVVIVAAYRTAICKAKRGGFKDTFAEDLLVPVFKALVDKTKLDPSEVGDIVVGTVLAPGSQRAIECRMAALYAGFPDTVPLKTVNRQCSSGLQAVADVATAIKAGLYDIGIAAGLESMTVNKVSLDGQANPKVELFSQARDCLLPMGLTSENVAHRFGITRLEQDQAAVESHRKAAAAAAAGKFKEEIVPVHTKIVDPKTGEEKKIVVSADDGIRVDTSLAVLSKLKPAFSKDGSTTAGNASQVSDGAGAVLLMRRDVAMKKGLPVLGVFRTFAAVGVDPAVMGIGPAVAIPAAVKAAGLQMDDIDLFEINEAFASQYVYCCKKLKLDPAKVNVNGGAMALGHPLGATGARCVSTLLNEMKRRGKDCRFGVISMCIGSGMGAAAVFERGDGVDELTNARGISTHNWLSKDAM

SEQ ID NO: 3457 - DNA, 20 bp, Artificial sequence
  primer
atggagaaggcatttaacag

SEQ ID NO: 3458 - DNA, 21 bp, Artificial sequence
  primer
ctaacgagcatcttttgacag

SEQ ID NO: 3459 - protein, 491 aa, Artificial sequence
  consensus sequence
  Variant (2)..(5): Xaa in position 2 to 5 is any amino acid
  Variant (8)..(12): Xaa in position 8 to 12 is any amino acid
  Variant (13)..(19): Xaa in position 13 to 19 is any or no amino acid
  Variant (21)..(29): Xaa in position 21 to 29 is any amino acid
  Variant (31)..(32): Xaa in position 31 to 32 is any amino acid
  Variant (33)..(58): Xaa in position 33 to 58 is any or no amino acid
  Variant (60)..(75): Xaa in position 60 to 75 is any amino acid
  Variant (76)..(82): Xaa in position 76 to 82 is any or no amino acid
  Variant (84)..(84): Xaa in position 84 is any amino acid
  Variant (86)..(92): Xaa in position 86 to 92 is any amino acid
  Variant (93)..(98): Xaa in position 93 to 98 is any or no amino acid
  Variant (100)..(101): Xaa in position 100 to 101 is any amino acid
  Variant (103)..(103): Xaa in position 103 is any amino acid
  Variant (106)..(112): Xaa in position 106 to 112 is any amino acid
  Variant (114)..(115): Xaa in position 114 to 115 is any amino acid
  Variant (117)..(118): Xaa in position 117 to 118 is any amino acid
  Variant (120)..(124): Xaa in position 120 to 124 is any amino acid
  Variant (125)..(127): Xaa in position 125 to 127 is any or no amino acid
  Variant (129)..(129): Xaa in position 129 is any amino acid
  Variant (131)..(131): Xaa in position 131 is any amino acid
  Variant (133)..(152): Xaa in position 133 to 152 is any amino acid
  Variant (153)..(188): Xaa in position 153 to 188 is any or no amino acid
  Variant (191)..(191): Xaa in position 191 is any amino acid
  Variant (193)..(193): Xaa in position 193 is any amino acid
  Variant (195)..(196): Xaa in position 195 to 196 is any amino acid
  Variant (198)..(203): Xaa in position 198 to 203 is any amino acid
  Variant (204)..(204): Xaa in position 204 is any or no amino acid
  Variant (206)..(207): Xaa in position 206 to 207 is any amino acid
  Variant (210)..(211): Xaa in position 210 to 211 is any amino acid
  Variant (213)..(214): Xaa in position 213 to 214 is any amino acid
  Variant (216)..(216): Xaa in position 216 is any amino acid
  Variant (217)..(218): Xaa in position 217 to 218 is any or no amino acid
  Variant (220)..(221): Xaa in position 220 to 221 is any amino acid
  Variant (223)..(225): Xaa in position 223 to 225 is any amino acid
  Variant (227)..(227): Xaa in position 227 is any amino acid
  Variant (229)..(229): Xaa in position 229 is any amino acid
  Variant (230)..(230): Xaa in position 230 is any or no amino acid
  Variant (233)..(233): Xaa in position 233 is any amino acid
  Variant (235)..(240): Xaa in position 235 to 240 is any amino acid
  Variant (241)..(266): Xaa in position 241 to 266 is any or no amino acid
  Variant (268)..(270): Xaa in position 268 to 270 is any amino acid
  Variant (272)..(277): Xaa in position 272 to 277 is any amino acid
  Variant (278)..(279): Xaa in position 278 to 279 is any or no amino acid
  Variant (281)..(282): Xaa in position 281 to 282 is any amino acid
  Variant (284)..(286): Xaa in position 284 to 286 is any amino acid
  Variant (288)..(291): Xaa in position 288 to 291 is any amino acid
  Variant (292)..(319): Xaa in position 292 to 319 is any or no amino acid
  Variant (323)..(323): Xaa in position 323 is any amino acid
  Variant (325)..(325): Xaa in position 325 is any amino acid
  Variant (327)..(329): Xaa in position 327 to 329 is any amino acid
  Variant (333)..(333): Xaa in position 333 is any amino acid
  Variant (335)..(358): Xaa in position 335 to 358 is any amino acid
  Variant (359)..(362): Xaa in position 359 to 362 is any or no amino acid
  Variant (364)..(365): Xaa in position 364 to 365 is any amino acid
  Variant (367)..(368): Xaa in position 367 to 368 is any amino acid
  Variant (369)..(369): Xaa in position 369 is any or no amino acid
  Variant (372)..(372): Xaa in position 372 is any amino acid
  Variant (375)..(376): Xaa in position 375 to 376 is any amino acid
  Variant (378)..(378): Xaa in position 378 is any amino acid
  Variant (379)..(385): Xaa in position 379 to 385 is any or no amino acid
  Variant (387)..(395): Xaa in position 387 to 395 is any amino acid
  Variant (396)..(396): Xaa in position 396 is any or no amino acid
  Variant (398)..(398): Xaa in position 398 is any amino acid
  Variant (404)..(412): Xaa in position 404 to 412 is any amino acid
  Variant (414)..(420): Xaa in position 414 to 420 is any amino acid
  Variant (421)..(437): Xaa in position 421 to 437 is any or no amino acid
  Variant (439)..(440): Xaa in position 439 to 440 is any amino acid
  Variant (446)..(446): Xaa in position 446 is any amino acid
  Variant (450)..(450): Xaa in position 450 is any amino acid
  Variant (452)..(453): Xaa in position 452 to 453 is any amino acid
  Variant (456)..(470): Xaa in position 456 to 470 is any amino acid
  Variant (471)..(477): Xaa in position 471 to 477 is any or no amino acid
  Variant (479)..(482): Xaa in position 479 to 482 is any amino acid
  Variant (484)..(484): Xaa in position 484 is any amino acid
  Variant (486)..(486): Xaa in position 486 is any amino acid
  Variant (488)..(488): Xaa in position 488 is any amino acid
  Variant (490)..(490): Xaa in position 490 is any amino acid
IXXXXRTXXXXXXXXXXXXGXXXXXXXXXLXXXXXXXXXXXXXXXXXXXXXXXXXXXXGXXXXXXXXXXXXXXXXXXXXXXXGXPXXXXXXXXXXXXXNXXCXSGXXXXXXXAXXIXXGXXXXXXXXGXEXMXXXXXXXXXXXXXXXXXXXXXXXXXXXXXXXXXXXXXXXXXXXXXXXXXXXXXXXXMGXTXEXXAXXXXXXXRXXQDXXAXXSXXXAXXAXXXGXFXXEIXPXXXXXXXXXXXXXXXXXXXXXXXXXXXXXXXXDXXXRXXXXXXXXLXXLXXXFXXXXXXXXXXXXXXXXXXXXXXXXXXXXXXXXTAGXNXSXXXDGAXAXXXXXXXXXXXXXXXXXXXXXXXXXXXXGXXPXXXMGXGPXXAXXXXXXXXGXXXXXXXXXXEXNEAFAXXXXXXXXXLXXXXXXXXXXXXXXXXXXXXXXXXNXXGGAIAXGHPXGXXGAXXXXXXXXXXXXXXXXXXXXXXGXXXXCXGXGXGXA

SEQ ID NO: 3460 - protein, 18 aa, Artificial sequence
  protein pattern
  Variant (2)..(2): Xaa in position 2 is Ala, Ile, Leu, Pro or Val
  Variant (3)..(3): Xaa in position 3 is any amino acid
  Variant (6)..(6): Xaa in position 6 is Ala or Ser
  Variant (7)..(7): Xaa in position 7 is any amino acid
  Variant (9)..(9): Xaa in position 9 is Phe, Ile, Leu, Met or Val
  Variant (13)..(13): Xaa in position 13 is any amino acid
  Variant (15)..(15): Xaa in position 15 is any amino acid
  Variant (16)..(16): Xaa in position 16 is Ser or Thr
  Variant (18)..(18): Xaa in position 18 is Ala, Cys, Gly, Ser or Thr
NXXGGXXAXGHPXGXXGX

SEQ ID NO: 3461 - protein, 13 aa, Artificial sequence
  protein pattern
  Variant (2)..(3): Xaa in position 2 to 3 is any amino acid
  Variant (4)..(5): Xaa in position 4 to 5 is any or no amino acid
  Variant (7)..(7): Xaa in position 7 is Ala, Ile or Leu
  Variant (13)..(13): Xaa in position 13 is Ala, Cys, Ser or Val
DXXXXEXNEAFAX

SEQ ID NO: 3462 - protein, 18 aa, Artificial sequence
  protein pattern
  Variant (2)..(3): Xaa in position 2 to 3 is Ala, Gly or Pro
  Variant (4)..(4): Xaa in position 4 is Ala, Cys, Asn, Ser, Thr or Val
  Variant (5)..(5): Xaa in position 5 is Ala or Ser
  Variant (7)..(8): Xaa in position 7 to 8 is any amino acid
  Variant (9)..(9): Xaa in position 9 is Ala, Cys, Asn, Ser or Thr
  Variant (12)..(13): Xaa in position 12 to 13 is any or no amino acid
  Variant (15)..(17): Xaa in position 15 to 17 is any amino acid
  Variant (18)..(18): Xaa in position 18 is Ile, Leu, Met or Val
TXXXXSXXXDGXXAXXXX

SEQ ID NO: 3463 - DNA, 492 bp, Populus trichocarpa
  CDS (1)..(492)
atggttctcaagactgaactctgccgcttcagtggggcaaagatatatcctggcaggggtatcagatttattcgctcagattcccaggtattcctctttgccaactctaaatgcaagaggtacttccacaacaagctgaaaccctcaaagctaacgtggacagctatgtacaggaagcaacataagaaggacattgctgctgaaactgttaagaagagacgccgcactaccaaaaaaccgtactcaaggtccattgtaggtgctactttggaggtcatacagaagaagcgagctgagaaacctgaagttcgtgatgctgcacgagaggctgcactccgtgaaattaaggagaggattaagaaaacaaaggacgagaagaaagccaagaaggccgaggtaatgtccaaggcacaaaagagcagcaaaggtagcttgccaaagggtgctgcgccaaagggccccaagcttggtggaggtggagggaagcggtga

SEQ ID NO: 3464 - protein, 163 aa, Populus trichocarpa
MVLKTELCRFSGAKIYPGRGIRFIRSDSQVFLFANSKCKRYFHNKLKPSKLTWTAMYRKQHKKDIAAETVKKRRRTTKKPYSRSIVGATLEVIQKKRAEKPEVRDAAREAALREIKERIKKTKDEKKAKKAEVMSKAQKSSKGSLPKGAAPKGPKLGGGGGKR

SEQ ID NO: 3465 - DNA, 774 bp, Triticum aestivum
  CDS (134)..(619)
cctagcagaggaggcggcggaggcagagaaggagagcggcagctcgcgcgcgcgcgcccccattgccgccgcagcaggagcccgccgattccaatccaaggaggagctttgaaggtttgtcagggcggggaagatggttctcaagacagagctctgccgtttcagtggtgccaagatatacccagggaaggggatcagattcatccgctcagactctcaagtcttccttttctccaactcaaagtgcaagagctacttccacaaccgtctcaagccagctaagcttgcatggacggccatgtacaggaagcagcacaagaaggatattcatgctgaggctgcaaagaagaggcgccgcaccaccaagaggccgtattccaggtcaattgtaggtgcttcccttgaagttatccagaagaagagagctgagaagccggaggtccgtgatgcagccagggaagcagctctgcgtgagatcaaggagcgcattaagaagaccaaggatgagaagaaagctaagaaggtggaggtgacgaaatcccagaagaccgccggcagaggcaatgcccccaaacccgggaaggcccccaagcttggcggtggtggtgggaagcgctaggtggcgtccctgccgatcaatgcgaaattttgaactagttacatgatgtcctaccctgtatcttttaggaagtttttggctcaaacctgctgttgccgtcggtatgcagcatctgggtgcataaaccgtcgtcaatgtgagattgttttatgctc

SEQ ID NO: 3466 - protein, 161 aa, Triticum aestivum
MVLKTELCRFSGAKIYPGKGIRFIRSDSQVFLFSNSKCKSYFHNRLKPAKLAWTAMYRKQHKKDIHAEAAKKRRRTTKRPYSRSIVGASLEVIQKKRAEKPEVRDAAREAALREIKERIKKTKDEKKAKKVEVTKSQKTAGRGNAPKPGKAPKLGGGGGKR

SEQ ID NO: 3467 - DNA, 750 bp, Triticum aestivum
  CDS (85)..(573)
cgaaaaacttccccccatccgccgccgccgcgcctcctcctcgcccaaggtaggagcttgtgaaagttctctaaggctgagaagatggttctgaagaccgagctctgccgttttagcggccagaagatttaccctgggaagggtatcaggttcattcgttcggattcgcaggttttcctctttgccaactcaaaatgcaagcgctacttccacaaccgcctgaagcctgcaaagctttgctggacagcaatgtacaggaagcagcacaagaaggacatccatgctgaggctgccaagaagaggcgccgcaccaccaagaagccgtactcacggtcgattgttggtgccactctggaagttatccagaagaagagggctgagaagcctgaagtccgtgatgctgcccgagaagctgctctccgtgagatcaaggagcgcatcaagaagaccaaggatgagaagaaggccaagaaggcagaggtgaccaagtcccagaagtcacaggggggcaagggcgccgtgcagaagggttccaagggcccaaagattggcggtggcggcgggaagcgttgaaagtcgattacgccatagacatagaattgtgctgcctagccttgtttcctatcctactatcatagacctttgtcaagttattaccccgccatcttgaatttgcaccttatctgtgaggctgaatggtgttaacgttttggattgtctcgatgagtttatttataatgaatggtactc

SEQ ID NO: 3468 - protein, 162 aa, Triticum aestivum
MVLKTELCRFSGQKIYPGKGIRFIRSDSQVFLFANSKCKRYFHNRLKPAKLCWTAMYRKQHKKDIHAEAAKKRRRTTKKPYSRSIVGATLEVIQKKRAEKPEVRDAAREAALREIKERIKKTKDEKKAKKAEVTKSQKSQGGKGAVQKGSKGPKIGGGGGKR

SEQ ID NO: 3469 - DNA, 489 bp, Oryza sativa
  CDS (1)..(489)
atggttctgaagactgaactttgccgttttagtgggcagaagatatacccaggcaagggtatcaggttcattcgtgctgattcccaggtttttctgtttgccaactcgaaatgcaagcgctacttccacaaccgcctgaagcctgccaagcttacctggacagctatgtacaggaagcagcacaagaaggacattcatgctgaagctgtcaagaagaggcgtcgcaccaccaagaagccatactcacggtcaattgttggtgctacactggaagttatccaaaagaagaggagtgagaaacctgaagtccgtgatgcagccagagaagcggctctccgtgagatcaaggagcgcatcaagaaaaccaaggatgagaaaaaggcaaagaaggcagaggtggcaaaatctcagaagacacagtcgaagggtggtgctacccagaggggtgctaaaggtcctaagattggcggcggtggtgggaagcgctga

SEQ ID NO: 3470 - protein, 162 aa, Oryza sativa
MVLKTELCRFSGQKIYPGKGIRFIRADSQVFLFANSKCKRYFHNRLKPAKLTWTAMYRKQHKKDIHAEAVKKRRRTTKKPYSRSIVGATLEVIQKKRSEKPEVRDAAREAALREIKERIKKTKDEKKAKKAEVAKSQKTQSKGGATQRGAKGPKIGGGGGKR

SEQ ID NO: 3471 - DNA, 486 bp, Oryza sativa
  CDS (1)..(486)
atggtgctgaagacagagctttgccgttttagtggccagaagatatatccagggaagggcattcgctttattcgtgctgattcacaggtcttcctttttgcaaactcaaaatgcaagcgctacttccacaaccgcctgaagcctgcaaagcttacctggacagccatgtacaggaagcagcacaagaaggatatccatgctgaagctgtcaagaagaggcgccgcaccaccaagaagccatactctaggtcaattgttggtgcttcgttggaagtcatccaaaagaagagagctgaaaagcctgaagttcgtgatgctgctagagaagctgctcttcgtgagatcaaggaacgcatcaagaagaccaaggatgaaaagaaggcgaagaaggctgaggtaaccaagtcccagaagtcgcagtcgaagggtgccgccccgaggggttccaagggcccgaagattggtggtggtggtggaaagcgctga

SEQ ID NO: 3472 - protein, 161 aa, Oryza sativa
MVLKTELCRFSGQKIYPGKGIRFIRADSQVFLFANSKCKRYFHNRLKPAKLTWTAMYRKQHKKDIHAEAVKKRRRTTKKPYSRSIVGASLEVIQKKRAEKPEVRDAAREAALREIKERIKKTKDEKKAKKAEVTKSQKSQSKGAAPRGSKGPKIGGGGGKR

SEQ ID NO: 3473 - DNA, 486 bp, Oryza sativa
  CDS (1)..(486)
atggttctcaagacagagctgtgccgtttcagcggcgccaagatttacccagggaagggtatcagattcatccgtgcagactcccaggtgttcctgttttcaaactcgaagtgcaagcgctacttccacaaccgtctgaagccagccaagcttacatggacagccatgtacagaaagcagcacaagaaggatattcacgccgaggcagtcaagaagaggcgccgcaccaccaagaaaccgtactcccggtctatagttggtgctacccttgaagtcatccagaagaagagagctgagaagccagaggttcgtgatgcagcaagggaatccgctcttcgtgagatcaaggagcgcatcaagaagacaaaggacgagaagaaagcgaagaaggcagaggtggcaaaatcgcagaaggcttctggtaaaggcaatgctcccaagcctgggaaaggcccaaagctcggtggtggtggtgggaagcggtag

SEQ ID NO: 3474 - protein, 161 aa, Oryza sativa
MVLKTELCRFSGAKIYPGKGIRFIRADSQVFLFSNSKCKRYFHNRLKPAKLTWTAMYRKQHKKDIHAEAVKKRRRTTKKPYSRSIVGATLEVIQKKRAEKPEVRDAARESALREIKERIKKTKDEKKAKKAEVAKSQKASGKGNAPKPGKGPKLGGGGGKR

SEQ ID NO: 3475 - DNA, 495 bp, Glycine max
  CDS (1)..(495)
atggttctcaaaactgaactatgccgattcagtggtgccaagatctacccaggaaagggcatcagatttgttcgtggtgattctcaggttttcctgtttgcaaactcaaaatgtaagaggtatttccacaatcgcctgaagccttcaaagctcacctggactgcaatgtacagaaagcaacacaaaaaggacattgctcaagaagctgtgaggaagaggagacgtgctgccaaaaagccttactctaggtccattgttggtgcgaccttggaagtaatccagaaaaagagagctgagaagccagaagttcgagatgcagctagggaagctgctcttcgtgaaattaaggagaggatcaagaaaacaaaggatgagaagaaggctaagaaagcagaagttgcttccaagtcgcaaaaagcaggagggaaaggcaatgtttctaagggtgctatgcccaaaggtcccaaacttggcggtggaggcgggaaacgctga

SEQ ID NO: 3476 - protein, 164 aa, Glycine max
MVLKTELCRFSGAKIYPGKGIRFVRGDSQVFLFANSKCKRYFHNRLKPSKLTWTAMYRKQHKKDIAQEAVRKRRRAAKKPYSRSIVGATLEVIQKKRAEKPEVRDAAREAALREIKERIKKTKDEKKAKKAEVASKSQKAGGKGNVSKGAMPKGPKLGGGGGKR

SEQ ID NO: 3477 - DNA, 492 bp, Glycine max
  CDS (1)..(492)
atggttctcaaaactgaactatgccgattcagtggtgccaagatctaccccggaaagggcatcagatttgttcgtggtgattctcaggttttcctgtttgccaactcaaaatgtaagcggtatttccacaaccgcctgaagccctcaaagctcacctggactgctatgtacagaaagcaacacaaaaaggacattgctcaagaagctgtgaagaagaggagacgcgctgccaaaaagccttactctaggtccattgttggtgccactctggaagttatccagaaaaagagagctgagaagccagaagttcgagatgcagctagggaagctgctcttcgtgaaattaaggagaggatcaagaaaacaaaggatgagaagaaggctaagaaagcagaagttacagccaagtcacaaaaagcaggagggaaaggcatttctaagggtgctatgcccaaaggtcccaaactcggtggtggaggcgggaaacgctga

SEQ ID NO: 3478 - protein, 163 aa, Glycine max
MVLKTELCRFSGAKIYPGKGIRFVRGDSQVFLFANSKCKRYFHNRLKPSKLTWTAMYRKQHKKDIAQEAVKKRRRAAKKPYSRSIVGATLEVIQKKRAEKPEVRDAAREAALREIKERIKKTKDEKKAKKAEVTAKSQKAGGKGISKGAMPKGPKLGGGGGKR

SEQ ID NO: 3479 - DNA, 495 bp, Glycine max
  CDS (1)..(495)
atggttctcaaaaccgagctgtgccgattcagcggtgccaagatctacccagggaaaggcatcagatttgttcgtggtgattctcaggttttcctgtttgctaactcaaaatgtaagaggtatttccacaacaggttgaagccgtcaaagctcacgtggactgcaatgtaccgaaagcagcataagaaggatattgctcaagaagctgtgaagaagagaagacgtgctaccaaaaaaccttactctaggtctattgttggtgctactttagaagttatccagaaaaagagaaccgagaagccagaagttcgagatgcagctagggaagcacagcttcgtgaaattaaggagaggatcaagaaaactaaggatgacaagaaagctaagaaagcagaagttgcagctaagtcccaaaaatcacaagggaaaggaagtatttcgaagggtgccatgcccaaaggtcccaaacttggtgggggaggtgggaaacgctga

SEQ ID NO: 3480 - protein, 164 aa, Glycine max
MVLKTELCRFSGAKIYPGKGIRFVRGDSQVFLFANSKCKRYFHNRLKPSKLTWTAMYRKQHKKDIAQEAVKKRRRATKKPYSRSIVGATLEVIQKKRTEKPEVRDAAREAQLREIKERIKKTKDDKKAKKAEVAAKSQKSQGKGSISKGAMPKGPKLGGGGGKR

SEQ ID NO: 3481 - DNA, 492 bp, Glycine max
  CDS (1)..(492)
atggttctcaaaaccgaactatgccgattcagcggtgccaagatctacccagggaaaggcatcagatttgttcgtggtgattctcaggttttcctgtttgctaactcgaaatgtaagaggtatttccacaacaggttgaagccatcaaagctcacctggactgcaatgtacagaaagcaacacaagaaggacattgctcaagaagctgtgaagaaaagaagacgtgctgccaaaaagccttactccaggtccattgtcggtgccactttggaagttatccagaaaaagagagctgagaagccagaagttcgagatgcaaatagggaagctgcccttcgtgaaattaaggagaggaacaagaaaacaaaggatgagaagaaggctaagaaagcagagtttgccaagtcccaaaaatcacaagggaaaggaaatgtttcgaagggtgccatgcccaaaggtcccaaacttggtggtggaggcgggaaacgctga

SEQ ID NO: 3482 - protein, 163 aa, Glycine max
MVLKTELCRFSGAKIYPGKGIRFVRGDSQVFLFANSKCKRYFHNRLKPSKLTWTAMYRKQHKKDIAQEAVKKRRRAAKKPYSRSIVGATLEVIQKKRAEKPEVRDANREAALREIKERNKKTKDEKKAKKAEFAKSQKSQGKGNVSKGAMPKGPKLGGGGGKR

SEQ ID NO: 3483 - DNA, 822 bp, Sorghum bicolor
  CDS (130)..(615)
tgcgccggccgggccgggggaaccacgaacacactcgcctcctctctccgccgccgccaccgtcgcctcgcggccgcccccggctccgctcctccgctcggttggtgaaggtttcttgaagttgagaagatggtgctgaagaccgaactttgccgcttcagcggccagaagatttatcctgggaagggcatccgatttattcgcgctgattctcaggttttcctttttgccaactcgaaatgcaagcgctacttccacaaccgtctgaagcctgcaaagcttacctggacagcaatgtacaggaagcagcacaagaaggatatccatgctgaagctgtgaagaagaggcgccgcaccaccaagaagccatactccaggtcaattgtgggtgcctccctggaagtgatccagaagaagagagctgagaagcccgaggtgcgcgatgctgctagggaagctgctcttcgcgagatcaaggagcgcatcaagaagaccaaggatgagaagaaggcaaagaaggcggaggtgaccaagtcccagaagtcgcagtcgaagggcgcggttcagaagggttccaagggccccaagctgggcggcggcggcggcaagcgctgaaagaactgaagatgtcatttgctgctgaccttgcaatcgctcctcattagcctacctaccttgtttctccagagccagttttgtagtacctgtacctgggttaaatttgcagttcctttcaccgttgctttgtgggtgttaaataccgtgacgagaaaatggatttatctttgtgttgcaaaaaatgatggtcgttcatgtgctgcc

SEQ ID NO: 3484 - protein, 161 aa, Sorghum bicolor
MVLKTELCRFSGQKIYPGKGIRFIRADSQVFLFANSKCKRYFHNRLKPAKLTWTAMYRKQHKKDIHAEAVKKRRRTTKKPYSRSIVGASLEVIQKKRAEKPEVRDAAREAALREIKERIKKTKDEKKAKKAEVTKSQKSQSKGAVQKGSKGPKLGGGGGKR

SEQ ID NO: 3485 - DNA, 527 bp, Zea mays
  CDS (12)..(485)
gagctgtcgccatgaaggtcgagctgagcagttttagcgggtacaagatctaccccggacacgggaggcgctacgccaggaccgacgggaaggttttccagtttcttaatgcgaaatgcgagtcggctttcctttccaagaggaatcctcggcagataaactggactgtcctctacagaaggaagcacaaaaagggacagtcggaagaaattcaaaagaaaagaacccgccgagcagtcaaattccagagggccattactggtgcatctcttgctgatataatggccaagaggaatcagaaacctgaagttagaaaggctcaacgagaacaagctatcagggctgctaaggaagcaaaaacgggtaagcaagcatctaaaaagactgcaatggctgctgctaaggcacctacaaaggcagcacctaagcaaaagattgtgaagcctgtgaaagtttcggctccccgagttggtggaaaacgctaaactggcagattagatggttaaataaagattggagtataaaag

SEQ ID NO: 3486 - protein, 157 aa, Zea mays
MKVELSSFSGYKIYPGHGRRYARTDGKVFQFLNAKCESAFLSKRNPRQINWTVLYRRKHKKGQSEEIQKKRTRRAVKFQRAITGASLADIMAKRNQKPEVRKAQREQAIRAAKEAKTGKQASKKTAMAAAKAPTKAAPKQKIVKPVKVSAPRVGGKR

SEQ ID NO: 3487 - DNA, 866 bp, Zea mays
  CDS (171)..(656)
aaattatcaaaaaaaaaaaaaaaaaaaaaaaaaaaaaaaaaaaaaaaaaaaaaaaaaaaaaaaaaaaacactcttcctccttcctccaccgccgccaacgtcgcctgggggccgtctgcagctccgcgcctctgctcgaaagttggggaaggtttcttgaagctgaaaagatggggctgaaaacaaaactctgccgtttcagcggccaaaaaatttatccggggaaaggcatccgatttatccgggctgattctcaggttttcctttttgccaactcaaaatgcaagcgctacttccacaaccgcctgaagcctgcaaagtttacctggacagcaatgtacaggaagcagcacaagacggatatccatgctgaggctgtcaaaaaaaggcgccgcgccaccaaaaagccatactcgaggcccattgggggggcttccctagaggggatccaaaaaaagagggctgaaaagcccgaggcccgcgatgctgctaaagaagctgctcttcgcgagatcaaggagcgcatcaagaagaccaaggatgagaagaaggcgaaaaaggctgaggtgaccaagtcccagaaggcacagacaaagggtgcggtccagaagggttccaagggccccaagttgggcttgtgttgtgggaagcgctgaaagaacttagtgtcgtttctcgacattgcagtcgttccttagccaaagccactttcgtagaacctgtgttgaatttgcaagacttattcaagcgttgcttgtgcgtgctaaataccatggcaagagaacggatttatatttatgcctgaaaaaaatgaccgttcatattcttaactcatcttggataagggcttgtttcgtttctcccaa

SEQ ID NO: 3488 - protein, 161 aa, Zea mays
MGLKTKLCRFSGQKIYPGKGIRFIRADSQVFLFANSKCKRYFHNRLKPAKFTWTAMYRKQHKTDIHAEAVKKRRRATKKPYSRPIGGASLEGIQKKRAEKPEARDAAKEAALREIKERIKKTKDEKKAKKAEVTKSQKAQTKGAVQKGSKGPKLGLCCGKR

SEQ ID NO: 3489 - DNA, 793 bp, Zea mays
  CDS (117)..(602)
acgcggggagccaccagcacacctcgtctttttcctctacggccgccaccatcgcctcgcggccgcctgccgctccgctcgagagtttttagtgaagattttttgaagccgagaagatggtgctgaagacggaactctgccgcttcagtggccagaagatctatcctgggaaaggcatccggtctattcgtgctgattctcaggttttcctttttgccaactcgaaatgcaagcgctacttccacaaccgcctgaagcctgcaaagcttacctggacagcaatgtacaggaagcagcacaagaaggacatccatgctgaagctgtcaagaagaggcgccgcgccaccaagaagccatactcgaggtccattgtgggtgcttccttggaagtgatccagaagaagagagctgagaagcctgaagtccgtgatgctgctagagaagctgctcttcgtgagatcaaggagcgcattaagaagaccaaggatgagaagaaggcgaagaaggctgaggtgtccaagtcccagaaggcgcagacgaagggcgctgtccagaagggttccaagggccccaagttgggcggcggcggtggcaaacgctgaaaaggaacgaagtgtcattctgagacctcaccaaagccacctttgtagtacctgggttaattttgcattttcgttcagagttacctgtgactcttaactaccatgtcaagagaatggattcgttatttttatatattgggagaaatgatcgccgttccttcaaaaaaaaaaaaaaaagggcgccctccgat

SEQ ID NO: 3490 - protein, 161 aa, Zea mays
MVLKTELCRFSGQKIYPGKGIRSIRADSQVFLFANSKCKRYFHNRLKPAKLTWTAMYRKQHKKDIHAEAVKKRRRATKKPYSRSIVGASLEVIQKKRAEKPEVRDAAREAALREIKERIKKTKDEKKAKKAEVSKSQKAQTKGAVQKGSKGPKLGGGGGKR

SEQ ID NO: 3491 - DNA, 787 bp, Zea mays
  CDS (112)..(597)
actctctgctccccccactccctcccgcgccgccgccggcgttgtcaccgccgcatcgccgctgccgacggctgcgctccgaagaattctgtgaggatttaagctgagaagatggtgctgaagacagagctttgccgttttagtggccagaagatatatccagggaagggcatgcgctttattcgtgctgattcacaggtcttcctttttgcaaactcaaaatgcaagcgctacttccacaaccgcctgaagcctgcaaagcttacctggacagccatgtacaggaagcagcacaagaaggatatccatgctgaagctgtcaagaagaggcgccgcgctaccaagaagccatactcgaggtcaattgttggtgcttccttggaagtgatccagaagaagagagctgagaagcctgaagtccgtgatgctgctagagaagctgctcttcgtgagatcaaggagcgcatcaagaagaccaaggatgagaagaaggcgaagaaggctgaggtgtccaagtcccagaaggcgcagacgaagggtgctgttcagaagggttccaaaggccccaagttgggtggcggcggtggcaaacgctgaaaaggaacgaagtgtcattccgagacctcatcaaagccacctttgtagtaccttggttaattttgtattttctttcagagttacttgtgactcttaattttgcatctttatatattgggagaaatgatcgccgttcgttcatatgatttcctcatctttgtttcctaaaaaaaaaaaaaaaaaagcggcc

SEQ ID NO: 3492 - protein, 161 aa, Zea mays
MVLKTELCRFSGQKIYPGKGMRFIRADSQVFLFANSKCKRYFHNRLKPAKLTWTAMYRKQHKKDIHAEAVKKRRRATKKPYSRSIVGASLEVIQKKRAEKPEVRDAAREAALREIKERIKKTKDEKKAKKAEVSKSQKAQTKGAVQKGSKGPKLGGGGGKR

SEQ ID NO: 3493 - DNA, 587 bp, Zea mays
  CDS (48)..(506)
gccggccggtccagactcggtcgctcccataagcacccattttgaaaatgaagcttgagatttgctccttctctggtcacaagatttaccctgccaagggtaagacctacgtccgtgtcgactctagaactttccgtttcatcaacggtaaggctgcctcttacttcctccaacgtttgaacccccgtaagatcagatggaccgtcatctaccgtcgtttgaacaagaagggtatgactgaggaagtccaaaagaagcgttctcgtcgtaccgtcaagcacgaacgtgctgttgttggtgcctcttgggatgccatccgtgccaagcgtaaccaaaagcctgatgcccgtgctgccgctcgtcaagccgccatctccaagtccaaggacgccaagaaggctgctgctgctgccaagaaggctgctaaccctgctggttctcaagccagggttagcaagcaacaagccaagggtttcgcccccaaggccgctgccacctctcgctaaattgctttacaaccaacaattttaatatgaaaaataaagatgtaaattcattgtgaaaaaaaaaaaaaaaaaaggccccta

SEQ ID NO: 3494 - protein, 152 aa, Zea mays
MKLEICSFSGHKIYPAKGKTYVRVDSRTFRFINGKAASYFLQRLNPRKIRWTVIYRRLNKKGMTEEVQKKRSRRTVKHERAVVGASWDAIRAKRNQKPDARAAARQAAISKSKDAKKAAAAAKKAANPAGSQARVSKQQAKGFAPKAAATSR

SEQ ID NO: 3495 - DNA, 622 bp, Gossypium hirsutum
  CDS (31)..(525)
ggatttcttccagtgcgaagagcagcagccatggttctcaagacggagctttgccgatttagtggtgccaagatataccctgggaaaggcatcagatttgttcgtggtgattcccaggtcttcctcttttccaattcaaaatgcaagaggtacttccacaaccgcctgaagccatcaaaacttacatggacggccatgtacaggaagcaacacaagaaggacattgcccaagaagctgtgaagaagaggagacgtactgcaaagaagccatactccagatccattgtgggtgccaccttagaggttatccagaagaagaggagtgagaaacctgaagttcgtgatgctgccagggaagctgctctccgagaaatcaaggaaaggatcaagaagactaaggatgaaaagaaggcaaagaaggcagaagtagcagcgaagcaacagaagacacaaggcaagggtaaccttccaaagggtggtgcacccaaaggtcccaagcttggtggtggtggtggaaagcgataagtttacctggttattatctgtttttacataggtagtatgttgattttgaaggcatttgtatggactgaatggccattcggccgtgtatcttttttgc

SEQ ID NO: 3496 - protein, 164 aa, Gossypium hirsutum
MVLKTELCRFSGAKIYPGKGIRFVRGDSQVFLFSNSKCKRYFHNRLKPSKLTWTAMYRKQHKKDIAQEAVKKRRRTAKKPYSRSIVGATLEVIQKKRSEKPEVRDAAREAALREIKERIKKTKDEKKAKKAEVAAKQQKTQGKGNLPKGGAPKGPKLGGGGGKR

SEQ ID NO: 3497 - DNA, 749 bp, Gossypium hirsutum
  CDS (59)..(553)
gacccacgcgtcgccgctagggtttcaataacaaaggaacagagcagcagcagcagccatggttctcaagacggagctttgccgatttagtggtgccaagatataccctgggaaaggcatcagatttgttcgtggagattctcaggttttcctcttttccaattcgaaatgcaagaggtacttccacaaccgtctgaagccatcaaaacttacatggacagccatgtataggaagcagcataagaaggatattgcccaagaggccgtgaagaagagaagacgtgcagcaaagaagccttactcccgatccattgttggtgccaccttagaggttatccagaagaagagaagtgagaaacccgaagtccgtgatgctgccagggaagctgctctccgagaaatcaaggaaagaatcaagaaaactaaggatgaaaagaaggcaaagaaagcagaagtagcggcaaagcaacaaaagactcagggcaagggtaacgttccaaagggtggagcaccgaaaggccccaagcttggtggcggtggtggaaagcgttaagttgctaaagttattatctgtttttccctagccagaaaaaaatagggttagtatgttttttttgaagccaattttatggacttaatggcattgatggccatgatgtttttgcatttatgcttgatcctatactatgaacccagtgttgaagttttgtgatgaagtgcttttatggattttgaatttattctttttc

SEQ ID NO: 3498 - protein, 164 aa, Gossypium hirsutum
MVLKTELCRFSGAKIYPGKGIRFVRGDSQVFLFSNSKCKRYFHNRLKPSKLTWTAMYRKQHKKDIAQEAVKKRRRAAKKPYSRSIVGATLEVIQKKRSEKPEVRDAAREAALREIKERIKKTKDEKKAKKAEVAAKQQKTQGKGNVPKGGAPKGPKLGGGGGKR

SEQ ID NO: 3499 - DNA, 588 bp, Zea mays
  CDS (63)..(551)
gaattagggtttactagtctcaggaggaggaagaagaggaggagcagcagccagcagcaacaatggttctcaagaccgagctttgtcgtttcagtggccacaagatttacccaggaagaggaatcagatttatccgatctgactctcaggtgttcttgttcatcaactcgaagtgtaagcattactttcataataagctgaagccttccaagcttgcatggactaccatgtacagaaagcagcacaagaaggatgcagctcaagaggctgtgaagaagaggagacgtgcgactaagaagccgtactcgaggtctattgttggtgctaccttggaagtgattcagaagaagagagctgagaagcctgaagttcgtgatgctgcaagagaagctgctcttcgtgatatcaaggagagaatcaagaagacaaaggatgagaagaaggcaaagaaggctgaatttgcttctaagcaacagaagattcaggctaagatccccaaggctgctgccaagggaggtcctaagttgggaggtggtggtggcaaacgctgaagaacctaaccaagaacatctctctctcactctgtgg

SEQ ID NO: 3500 - protein, 162 aa, Zea mays
MVLKTELCRFSGHKIYPGRGIRFIRSDSQVFLFINSKCKHYFHNKLKPSKLAWTTMYRKQHKKDAAQEAVKKRRRATKKPYSRSIVGATLEVIQKKRAEKPEVRDAAREAALRDIKERIKKTKDEKKAKKAEFASKQQKIQAKIPKAAAKGGPKLGGGGGKR

SEQ ID NO: 3501 - DNA, 806 bp, Zea mays
  CDS (101)..(586)
actctcctccttcctccaccgccgccaacgtcgcctggcggccgtctgcagctccgcgcctctgctcggaagttggtgaaggtttcttgaagctgagaagatggtgctgaagacagaactctgccgcttcagcggccagaagatttatcctgggaaaggcatccgatttatccgtgctgattctcaggttttcctttttgccaactcaaaatgcaagcgctacttccacaaccgcctgaagcctgcaaagcttacctggacagcaatgtacaggaagcagcacaagaaggatatccatgctgaggctgtcaagaagaggcgccgcgccaccaagaagccatactcgaggtccattgtgggtgcttccctagaggtgatccaggagaagagggctgagaagcccgaggtccgcgatgctgctagagaagctgctcttcgtgagatcaaggagcgcatcaagaagaccaaggatgagaagaaggcgaaaaaggctgaggtgaccaagtcccagaaggcacagacgaagggagcggtccagaagggttccaagggccccaagttgggtggtggcggtggcaagcgctgaaagaacctaagtgtcgttccttgaccttgcaattgctcctccatagcccaccttgttgcaccaacgccacttttgtagtacctcggttaattttgcattttctttcagagttgtttgtgggttttgagttccatctcaagagagttgagtttatttatctttatattgggtgaaatgttcatatgctttcctcagcttggatgaaaaaaaaaaaaaaaaa

SEQ ID NO: 3502 - protein, 161 aa, Zea mays
MVLKTELCRFSGQKIYPGKGIRFIRADSQVFLFANSKCKRYFHNRLKPAKLTWTAMYRKQHKKDIHAEAVKKRRRATKKPYSRSIVGASLEVIQEKRAEKPEVRDAAREAALREIKERIKKTKDEKKAKKAEVTKSQKAQTKGAVQKGSKGPKLGGGGGKR

SEQ ID NO: 3503 - DNA, 935 bp, Zea mays
  CDS (148)..(633)
agtcgcctccttcctgcgccgccgccgccgccgccgctaccaccgcctcgcggccgcctgcggctccgcgtttccgcacggagaggtgattaggtgtgactgtagtcactgtcatgcagttggtgaaggtttcttgaggctgagaacatggtgctgaagacggaactttgccgcttcagcggccagaagatttatcctgggaaaggcattagatttatccgtgctgattctcaggtcttcctttttgccaactcgaaatgcaagcgctacttccacaactgcctgaagcctgcaaagcttacctggacagcaatgtacaggaagcagcacaagaaggatatccatgctgaagcggtaaagaagaggcgccgcgccaccaagaagccatactccaggtcaattgtgggtgcttccttggaagtaatccagaagaagagagctgagaagccagaggtccgcgatgctgctagagaagctgctcttcgtgagatcaaggagcgcatcaagaagaccaaggatgagaagaaagcgaagaaggcggaggtgagcaagtcccagaagacgcagacaaagggtgcggtccagaagggttccaagggccccaagttgggcggcggtggtgggaagcgctgaaagaacttaaggcctgtttggaggctgacgtcgagcgccacaccccgcctaagatgcggcggccaatttggccgccacaactgcggcgcgtggcgtgtggcgcggcgtggtgtttgcggcagcgatccaaacacgcccttagtgtcgtttctcgacattgcagtcgttccttagccaaagccactttcgtagaacctgtgttgaatttgcaagacttattcaagcgttgcttgtgcgtgctaaataccatggcaagagaacggatttaaaaaaaaaaaaaaaaagggcggccggacgcgggg

SEQ ID NO: 3504 - protein, 161 aa, Zea mays
MVLKTELCRFSGQKIYPGKGIRFIRADSQVFLFANSKCKRYFHNCLKPAKLTWTAMYRKQHKKDIHAEAVKKRRRATKKPYSRSIVGASLEVIQKKRAEKPEVRDAAREAALREIKERIKKTKDEKKAKKAEVSKSQKTQTKGAVQKGSKGPKLGGGGGKR

SEQ ID NO: 3505 - DNA, 468 bp, Bombyx mori
  CDS (1)..(468)
atgaagatcggactttgcgcctatagtggatacaaaatatatccaggccatggcaagaccatggttaaagtggatggaaaaaccttcacattcctgaattcaaaatgtgaagccgcccatttgatgaggaggaatcctcgtaaagtaacatggactgtcctgtacaggcgcaagttcaaaaagggccaagaggaagaacaagcaaagaaacgtactagaaggacccaaaagttccaacgtgcgattgttggtgcttcacttagtgacattatggctaagcgtaatatgaagcctgaagtacgtaaagcgcagagagaacaggccattaaggcggcaaaggaacaaaagaaatcaactaaagctgccaagaagactacagctcctcctacgaaggctaaatcacaacctaaagcaaaggctgctaaagtcagtcaaaaagcagcacctagagttggtggaaagcgataa

SEQ ID NO: 3506 - protein, 155 aa, Bombyx mori
MKIGLCAYSGYKIYPGHGKTMVKVDGKTFTFLNSKCEAAHLMRRNPRKVTWTVLYRRKFKKGQEEEQAKKRTRRTQKFQRAIVGASLSDIMAKRNMKPEVRKAQREQAIKAAKEQKKSTKAAKKTTAPPTKAKSQPKAKAAKVSQKAAPRVGGKR

SEQ ID NO: 3507 - DNA, 564 bp, Oryza sativa Japonica Group
  CDS (1)..(564)
atggcgttgctgcgccgtctcgtgtatgtagcgtattcgctgtttcgagtcccgcgcttgtttcttggtaaggaggcattgaaggtttggacagagctgtgccgtttcagcggcgccaagatttacccagggaagggtatcagattcatccgtgcagactcccaggtgttcctgttttcaaactcgaagtgcaagcgctacttccacaaccgtctgaagccagccaagcttacatggacagccatgtacagaaagcagcacaagaaggatattcacgccgaggcagtcaagaagaggcgccgcaccaccaagaaaccgtactcccggtctatagttggtgctacccttgaagtcatccagaagaagagagctgagaagccagaggttcgtgatgcagcaagggaatccgctcttcgtgagatcaaggagcgcatcaagaagacaaaggacgagaagaaagcgaagaaggcagaggtggcaaaatcgcagaaggcttctggtaaaggcaatgctcccaagcctgggaaaggcccaaagctcggtggtggtggtgggaagcggtag

SEQ ID NO: 3508 - protein, 187 aa, Oryza sativa Japonica Group
MALLRRLVYVAYSLFRVPRLFLGKEALKVWTELCRFSGAKIYPGKGIRFIRADSQVFLFSNSKCKRYFHNRLKPAKLTWTAMYRKQHKKDIHAEAVKKRRRTTKKPYSRSIVGATLEVIQKKRAEKPEVRDAARESALREIKERIKKTKDEKKAKKAEVAKSQKASGKGNAPKPGKGPKLGGGGGKR

SEQ ID NO: 3509 - DNA, 474 bp, Acyrthosiphon pisum
  CDS (1)..(474)
atgaagatcggactctgcgcctacagcgggtacaaaatctacccaggacatggaaaaaccatggtcaaagctgacggaaagacattcacttttctcaattcaaaatgcgagcgcgctcacttaatgaagaggaacccccgtaaagtgacatggacgatattgtacagacgcaagcatcgcaagggtcaagaagaagaaatgaccaaaaagaagacaaggagaactcaaaaattccaacgtgctattgtcggtgcatccctcactgatattttggccaagaggaacatgaaacctgagatgaggaaagctcaacgagatattgccatcaaggtggctaaggaccaaaagaaggctgctagagcagctaagaagcctcctccaccacctccatcaaaaacgaagaaacaacccaagaaagtgcaaacaaaatctgtacaacaaaaggctgctcctcgtgttggtggaaaacgatag

SEQ ID NO: 3510 - protein, 157 aa, Acyrthosiphon pisum
MKIGLCAYSGYKIYPGHGKTMVKADGKTFTFLNSKCERAHLMKRNPRKVTWTILYRRKHRKGQEEEMTKKKTRRTQKFQRAIVGASLTDILAKRNMKPEMRKAQRDIAIKVAKDQKKAARAAKKPPPPPPSKTKKQPKKVQTKSVQQKAAPRVGGKR

SEQ ID NO: 3511 - DNA, 486 bp, Zea mays
  CDS (1)..(486)
atggtgctgaagacggaactttgccgcttcagcggccagaagatttatcctgggaaaggcattagatttatccgtgctgattctcaggtcttcctttttgccaactcgaaatgcaagcgctacttccacaaccgcctgaagcctgcaaagcttacctggacagcaatgtacaggaagcagcacaagaaggatatccatgctgaagcggtaaagaagaggcgccgcgccaccaagaagccatactccaggtcaattgtgggtgcttccttggaagtaatccagaagaagagagctgagaagccagaggtccgcgatgctgctagagaagctgctcttcgtgagatcaaggagcgcatcaagaagaccaaggatgagaagaaagcgaagaaggcggaggtgagcaagtcccagaagacgcagacaaagggtgcggtccagaagggttccaagggccccaagttgggcggcggtggtgggaagcgctga

SEQ ID NO: 3512 - protein, 161 aa, Zea mays
MVLKTELCRFSGQKIYPGKGIRFIRADSQVFLFANSKCKRYFHNRLKPAKLTWTAMYRKQHKKDIHAEAVKKRRRATKKPYSRSIVGASLEVIQKKRAEKPEVRDAAREAALREIKERIKKTKDEKKAKKAEVSKSQKTQTKGAVQKGSKGPKLGGGGGKR

SEQ ID NO: 3513 - DNA, 486 bp, Zea mays
  CDS (1)..(486)
atggtgctgaagacggaactctgccgcttcagtggccagaagatctatcctgggaaaggcatccggtttattcgtgctgattctcaggttttcctttttgccaactctaaatgcaagcgctacttccacaaccgcctgaagcctgcaaagcttacctggacagcaatgtacaggaagcagcacaagaaggacatccatgctgaagctgtcaagaagaggcgccgcgccaccaagaagccatactcgaggtccattgtgggtgcttccttggaagtgatccagaagaagagagctgagaagcctgaggtccgtgatgctgctagagaagctgctcttcgtgagatcaaggagcgcatcaagaagaccaaggacgagaagaaggcgaagaaggctgaggtgtccaagtcccagaaggcgcagacgaagggcgctgtccagaagggttccaagggccccaagttgggcggcggcggtggcaaacgctga

SEQ ID NO: 3514 - protein, 161 aa, Zea mays
MVLKTELCRFSGQKIYPGKGIRFIRADSQVFLFANSKCKRYFHNRLKPAKLTWTAMYRKQHKKDIHAEAVKKRRRATKKPYSRSIVGASLEVIQKKRAEKPEVRDAAREAALREIKERIKKTKDEKKAKKAEVSKSQKAQTKGAVQKGSKGPKLGGGGGKR

SEQ ID NO: 3515 - DNA, 501 bp, Zea mays
  CDS (1)..(501)
atgaggttggagaagtgctggttctgctcctctaccatctaccccggccatggaatccagttcgtccgcaacgacgccaaggtcttccgcttttgccggtcaaagtgccataaaaacttcaagatgaagaggaaccctcgtaaggttaagtggacaaaagcatacaggcatttgcatggcaaggacatgacccaggatacaacctttgagtttgagaggaagaggaacaggcccgagcgctacgaccgcaatttgacggagcagactctgaaggctatcccgcttattgcaaagattaggcatgaccgtatgggaaaacacatctcaaacagacataaacctggtaaacgcaaggagatggaaaaggactccaaggagctggagcaggacatcggcatgctcccgaagaagcttattatcaaccatctcgcggctgagaaaacgaaggtcaaggttgaagttgttcagcagcagacagaagataacgctatggaagagtag

SEQ ID NO: 3516 - protein, 166 aa, Zea mays
MRLEKCWFCSSTIYPGHGIQFVRNDAKVFRFCRSKCHKNFKMKRNPRKVKWTKAYRHLHGKDMTQDTTFEFERKRNRPERYDRNLTEQTLKAIPLIAKIRHDRMGKHISNRHKPGKRKEMEKDSKELEQDIGMLPKKLIINHLAAEKTKVKVEVVQQQTEDNAMEE

SEQ ID NO: 3517 - DNA, 468 bp, Saccharomyces cerevisiae
  CDS (1)..(468)
atgaaggttgaaatcgattctttttcaggtgccaaaatctacccaggcagaggtaccttgtttgtccgtggtgactccaaaatcttcagattccaaaactccaaatctgcctctttgttcaagcaaagaaagaacccaagaagaatcgcttggactgtcttattcagaaagcatcacaagaagggtatcaccgaagaagttgctaagaagagatctagaaaaaccgttaaggcccaaagaccaattaccggtgcttctttggacttgatcaaggaaagaagatctttgaagccagaagttagaaaggctaacagagaagaaaaattgaaggccaacaaagaaaagaagaaggctgaaaaggctgctagaaaggctgaaaaggctaagtctgctggtactcaaagttctaagttctccaagcaacaagctaagggtgctttccaaaaggttgctgctacttctcgttaa

SEQ ID NO: 3518 - protein, 155 aa, Saccharomyces cerevisiae
MKVEIDSFSGAKIYPGRGTLFVRGDSKIFRFQNSKSASLFKQRKNPRRIAWTVLFRKHHKKGITEEVAKKRSRKTVKAQRPITGASLDLIKERRSLKPEVRKANREEKLKANKEKKKAEKAARKAEKAKSAGTQSSKFSKQQAKGAFQKVAATSR

SEQ ID NO: 3519 - DNA, 468 bp, Saccharomyces cerevisiae
  CDS (1)..(468)
atgaaggttgaagttgattccttttccggcgctaagatctacccaggtagaggtactttatttgtccgtggtgactccaaaattttcagattccaaaactccaaatctgcttctttgttcaaacaaagaaagaacccaagaagaatcgcttggaccgtcttgttcagaaagcatcacaagaagggtatcaccgaagaagttgctaagaagagatctagaaagaccgttaaggcgcaaagaccaatcactggtgcttctttggacttgatcaaggaaagaagatctttgaagccagaagttagaaaagctaacagagaagaaaaattgaaagccaacaaggaaaagaagagagctgaaaaggctgctagaaaggctgaaaaggctaagtccgctggtgtccaaggttccaaggtttccaagcaacaagctaagggtgctttccaaaaggttgccgccacttcccgttaa

SEQ ID NO: 3520 - protein, 155 aa, Saccharomyces cerevisiae
MKVEVDSFSGAKIYPGRGTLFVRGDSKIFRFQNSKSASLFKQRKNPRRIAWTVLFRKHHKKGITEEVAKKRSRKTVKAQRPITGASLDLIKERRSLKPEVRKANREEKLKANKEKKRAEKAARKAEKAKSAGVQGSKVSKQQAKGAFQKVAATSR

SEQ ID NO: 3521 - DNA, 492 bp, Arabidopsis thaliana
  CDS (1)..(492)
atggttctcaagacggagctttgtcgtttcagtggacagaagatttacccaggaagaggaattaggtttatccgatctgattctcaggttttcttgtttcttaactcaaaatgtaagaggtacttccataacaagttgaagccatccaagcttgcatggactgccatgtacagaaagcaacacaagaaggatgcagcacaagaggctgtgaagagaaggagacgtgccaccaagaagccatactcaaggtccattgttggtgctaccttggaagtaattcagaagaagagagctgagaagcctgaagttcgtgatgcagccagggaagctgctctgcgtgagatcaaggaaagaatcaaaaagaccaaagatgaaaagaaggctaagaaggtggaatttgcttctaagcaacagaaggtcaaggctaatttccccaaagctgctgctgcatccaagggtcctaaggtgggaggtggtggtggcaaacgctga

SEQ ID NO: 3522 - protein, 163 aa, Arabidopsis thaliana
MVLKTELCRFSGQKIYPGRGIRFIRSDSQVFLFLNSKCKRYFHNKLKPSKLAWTAMYRKQHKKDAAQEAVKRRRRATKKPYSRSIVGATLEVIQKKRAEKPEVRDAAREAALREIKERIKKTKDEKKAKKVEFASKQQKVKANFPKAAAASKGPKVGGGGGKR

SEQ ID NO: 3523 - DNA, 480 bp, Caenorhabditis elegans
  CDS (1)..(480)
atgaaggtcgaaacctgcgtttactccggatacaagatccacccaggacacggaaagagacttgtccgtactgacggaaaggtccaaatcttcctcagtggaaaggcactcaagggagccaagcttcgccgtaacccacgtgacatcagatggactgtcctctacagaatcaagaacaagaagggaacccacggacaagagcaagtcaccagaaagaagaccaagaagtccgtccaggttgttaaccgcgccgtcgctggactttcccttgatgctatccttgccaagagaaaccagaccgaagacttccgtcgccaacagcgtgaacaagccgctaagatcgccaaggatgccaacaaggctgtccgtgccgccaaggctgctgccaacaaggaaaagaaggcctctcagccaaagacccagcaaaagaccgccaagaatgtgaagactgctgctccacgtgtcggaggaaagcgataa

SEQ ID NO: 3524 - protein, 159 aa, Caenorhabditis elegans
MKVETCVYSGYKIHPGHGKRLVRTDGKVQIFLSGKALKGAKLRRNPRDIRWTVLYRIKNKKGTHGQEQVTRKKTKKSVQVVNRAVAGLSLDAILAKRNQTEDFRRQQREQAAKIAKDANKAVRAAKAAANKEKKASQPKTQQKTAKNVKTAAPRVGGKR

SEQ ID NO: 3525 - DNA, 495 bp, Arabidopsis thaliana
  CDS (1)..(495)
atggttctcaagactgagctttgccgattcagtggccagaaaatttaccctggtagagggatcagatttatccgatcggactctcaggtgtttttgtttctcaactccaaatgtaagaggtatttccacaacaagttgaagccatctaagctttgctggactgctatgtaccgaaagcagcacaagaaggacgcagcacaagaggctgtgaagagaaggagacgtgcaactaagaagccttactcaaggtcgattgtcggtgctactttggaggttattcagaagaagcgagcagagaagcctgaagttcgtgatgccgctagagaagctgccctacgtgagatcaaggagagaatcaagaagaccaaggacgagaagaaggcaaagaaggtcgagtatgcatcaaagcaacagaagtcacaagtgaagggaaatatccccaagagtgctgcacccaaggctgctaagatgggtggtggtggaggcagacgttga

SEQ ID NO: 3526 - protein, 164 aa, Arabidopsis thaliana
MVLKTELCRFSGQKIYPGRGIRFIRSDSQVFLFLNSKCKRYFHNKLKPSKLCWTAMYRKQHKKDAAQEAVKRRRRATKKPYSRSIVGATLEVIQKKRAEKPEVRDAAREAALREIKERIKKTKDEKKAKKVEYASKQQKSQVKGNIPKSAAPKAAKMGGGGGRR

SEQ ID NO: 3527 - DNA, 450 bp, Schizosaccharomyces pombe
  CDS (1)..(450)
atgaaggtggaagtttgctcattttctggatccaaggtttatcccggagctggaagactctttgttcgtggagacaacaaggttttccgctttgtcaacaagaagtctgagagccttttccttcaacgcaagaacccccgtcgtttgtcatggactgtcctttaccgtcgtatgcacaagaagggtatctctgaggagcatgctaagaagcgtactcgtcgtaccgtcaagcaccaacgtggaattgtcggtgctaacttggatgtcattaaagagaagcgtaaccaacgtcctgaagtccgtgctgctgcccgtgccgctgctttgaagcaacgtaaggataagagggccgcctccgaatctgaaaagaaggccatcaaggccaagtctgctgccagctctgctcgtggccaagctattaagaatgccaaggttgctgctcgtcgttag

SEQ ID NO: 3528 - protein, 149 aa, Schizosaccharomyces pombe
MKVEVCSFSGSKVYPGAGRLFVRGDNKVFRFVNKKSESLFLQRKNPRRLSWTVLYRRMHKKGISEEHAKKRTRRTVKHQRGIVGANLDVIKEKRNQRPEVRAAARAAALKQRKDKRAASESEKKAIKAKSAASSARGQAIKNAKVAARR

SEQ ID NO: 3529 - DNA, 450 bp, Schizosaccharomyces pombe
  CDS (1)..(450)
atgaaggtggaagtttgctcattttctggatccaaggtttatcctggcgctggaagacttttcgtccgtggggacaacaaggttttccgctttgtcaacaagaagtctgaaagccttttcttacaacgcaagaatcctcgtcgtttgtcttggactgttttataccgtcgtatgcacaagaagggtatctctgaggagcatgccaagaagcgtacccgtcgtaccgtcaagcaccaacgtggaattgttggtgctaacttggatgtcattaaggagaagcgtaaccaacgccctgaagttcgtgctgctgcccgtgctgctgctttgaagcaacgtaaggataagaaggccgcttctgagtctgaaaagaaggccatcaaggccaagtccgctgccagttccgctcgtggccaagctattaagaatgccaaggctgctgctcgccattaa

SEQ ID NO: 3530 - protein, 149 aa, Schizosaccharomyces pombe
MKVEVCSFSGSKVYPGAGRLFVRGDNKVFRFVNKKSESLFLQRKNPRRLSWTVLYRRMHKKGISEEHAKKRTRRTVKHQRGIVGANLDVIKEKRNQRPEVRAAARAAALKQRKDKKAASESEKKAIKAKSAASSARGQAIKNAKAAARH

SEQ ID NO: 3531 - DNA, 468 bp, Drosophila melanogaster
  CDS (1)..(468)
atgaaaattggcttgtgcgcattcagcgggtacaaaatctaccccggtcatggcaagaccatggtcaagatcgatggcaagtcgttcaccttcctggacaagaagtgcgagcgctcctacctgatgaagcgcaatccccgcaaggttacgtggaccgtgctgtaccgccggaagcaccgcaagggaatcgaggaggaggcctccaagaagcgcacccgccgcacccagaagttccagcgcgccatcgtcggtgcctcgctggccgagattctggccaagcgtaacatgaagcccgaggtgcgcaaggcgcagcgcgaccaggccatcaaggtggccaaggagcagaagcgtgccgtcaaggccgccaagaaggctgctgcccccgctcccgctaagaagtcggcgcccaagcagaaggccgccaaggtcacgcagaaggctgctccccgcgtcggaggcaagcggtaa

SEQ ID NO: 3532 - protein, 155 aa, Drosophila melanogaster
MKIGLCAFSGYKIYPGHGKTMVKIDGKSFTFLDKKCERSYLMKRNPRKVTWTVLYRRKHRKGIEEEASKKRTRRTQKFQRAIVGASLAEILAKRNMKPEVRKAQRDQAIKVAKEQKRAVKAAKKAAAPAPAKKSAPKQKAAKVTQKAAPRVGGKR

SEQ ID NO: 3533 - DNA, 468 bp, Ashbya gossypii ATCC 10895
  CDS (1)..(468)
atgaaggtcgaaattgactccttttctggtgctaagatctacccaggcagaggtaccttgtttgtcagaggcgactccaaggtcttcagattccactcttccaagtctgcttctttgttccaccaaagaaagaacccaagaagaatcgcctggactgtcttgtacagaagacaccacaagaagggtatcaccgaggaggttgccaagaagagatccagaaagaccgtgaaggctcaaagagcggttgtcggtgcttctttggagttgatcaaggagagaagatccttgaagccagagatcagaaaggctaagagagacgagaaggccaaggctgacaaggaaaagaagaaggccgacaaggctgccagaaaggccgacaaggccaagtctgctgccactcaggcttccaagatctccaagcagcaagccaagggtgccttccagaaggtcgctgctacttctcgttaa

SEQ ID NO: 3534 - protein, 155 aa, Ashbya gossypii ATCC 10895
MKVEIDSFSGAKIYPGRGTLFVRGDSKVFRFHSSKSASLFHQRKNPRRIAWTVLYRRHHKKGITEEVAKKRSRKTVKAQRAVVGASLELIKERRSLKPEIRKAKRDEKAKADKEKKKADKAARKADKAKSAATQASKISKQQAKGAFQKVAATSR

SEQ ID NO: 3535 - DNA, 465 bp, Apis mellifera
  CDS (1)..(465)
atgaagatcggactttgtgcatatagtggatataaaatatatcccggtcatggtaaaaccatggtaaaagtggatggaaaaacattcactttcttgaattcaaaatgtgaatccgcacatttaatgagacgtaatccaagaaaagtcacgtggactgtattatatagacgaaaacataaaaaaggacaagaagaagaacaagcaaaaaaaagaacaagacgtactcaaaaatttcaacgtgctattgtaggtgcatctcttacagatattttagcaaaacgtaatatgaaaccagaaattcgtaaagcacagagagaacaagctattaaagctgcaaaggaacaaaagaaagctgcaaaagcaacaaagaaagcagttgtacctcctaaaacaaaggctattccaaaacataaagctgcaaaaataacacaaaaatcagctccacgtgttggaggaaaacgttaa

SEQ ID NO: 3536 - protein, 154 aa, Apis mellifera
MKIGLCAYSGYKIYPGHGKTMVKVDGKTFTFLNSKCESAHLMRRNPRKVTWTVLYRRKHKKGQEEEQAKKRTRRTQKFQRAIVGASLTDILAKRNMKPEIRKAQREQAIKAAKEQKKAAKATKKAVVPPKTKAIPKHKAAKITQKSAPRVGGKR

SEQ ID NO: 3537 - DNA, 486 bp, Aspergillus terreus NIH2624
  CDS (1)..(486)
atgcgtacctacgacgattctttcagcggtcagaagatctaccctggaaagggtaagctgtacgtccgtggcgacagcaagatcttccgcttccagaatggaaagtccgagtcccttttcctccagcgcaagaacccccgccgcatcgcctggaccgtcctcttccgtcgccagcacaagaaggattttcgctctgaacaggaagttgctaagaagcgcacccgccgtgtcgtcaagcaccagcgtgccgttgtcggtgcctccctcgatgtgatcaaggagcgccgcaaccagcgccccgaggctcgtgccgccgcccgccagcaggccatcaaggaggccaaggaaaagaaggccgccaacgagagccgcaagaaggccgagaaggccaagctcgccgccagtggcaagggcgccgcccagcgcatccagagcaagcagggtgctaagggctctgcccccaaggtcgctgccaagtcgcgttaa

SEQ ID NO: 3538 - protein, 161 aa, Aspergillus terreus NIH2624
MRTYDDSFSGQKIYPGKGKLYVRGDSKIFRFQNGKSESLFLQRKNPRRIAWTVLFRRQHKKDFRSEQEVAKKRTRRVVKHQRAVVGASLDVIKERRNQRPEARAAARQQAIKEAKEKKAANESRKKAEKAKLAASGKGAAQRIQSKQGAKGSAPKVAAKSR

SEQ ID NO: 3539 - DNA, 486 bp, Chaetomium globosum CBS 148.51
  CDS (1)..(486)
atgagaacctacgacgacagtttctcgggccagcggatttaccccggcaagggtaagctgtacgtccgtggcgacagcaagatcttccgcttccagaacggcaagtccgagtcgctgttcctccagcgcaagaacccccgtcgcattgcctggaccgtcctctaccgcaggcaacaccgcaagggtatctcagaggaagtcgccaagaagcgcactcgccgcaccgtcaagtcgcagcgtgccatcgttggtgcttcgctcgatgtgatcaaggagcgccgctcgatccgcccggagacccgcagcgcggcccgcctggctgccatcaaggagagcaaggagaagaggcaggctgagcaggcggccaagaaggccgagaaggccaagaacgctgccgccgcgtccaagggccagtctggcggccgcatcgtcggcaagcagggtgcgaagggtgcgcagcagaaggtcgccgccaacacccgctaa

SEQ ID NO: 3540 - protein, 161 aa, Chaetomium globosum CBS 148.51
MRTYDDSFSGQRIYPGKGKLYVRGDSKIFRFQNGKSESLFLQRKNPRRIAWTVLYRRQHRKGISEEVAKKRTRRTVKSQRAIVGASLDVIKERRSIRPETRSAARLAAIKESKEKRQAEQAAKKAEKAKNAAAASKGQSGGRIVGKQGAKGAQQKVAANTR

SEQ ID NO: 3541 - DNA, 480 bp, Coccidioides immitis RS
  CDS (1)..(480)
atgcggacctacgacgataccttcagcggtgagaagatctaccctggaaagggtaaattgtatgtccgtggagacagcaagatcttcagattccagaatggcaaatccgaatccctcttccttcaacgcaagaaccctcgccggatcgcctggaccgtcctttacagaagacagcacaagaagggtatctctgaagaagttgccaagaagcgtactcgccgtaccgtcaagcaccagcgtgctatcgtcggtgcttccctcgatgtgatcaaggaacgccgatccatgcgccctgaggcccgtctcgccgctcgccaggccgccatcaaggaaggaaaggagaagaagcaagccgctgagaagcagaagagagagaaggcccgcaccgccgccgccgcctccagaggtcaaacttccagaatccagagcaagcaaggcgctaagggttcagcaccaaaggttgccgccaagacccgttaa

SEQ ID NO: 3542 - protein, 159 aa, Coccidioides immitis RS
MRTYDDTFSGEKIYPGKGKLYVRGDSKIFRFQNGKSESLFLQRKNPRRIAWTVLYRRQHKKGISEEVAKKRTRRTVKHQRAIVGASLDVIKERRSMRPEARLAARQAAIKEGKEKKQAAEKQKREKARTAAAASRGQTSRIQSKQGAKGSAPKVAAKTR

SEQ ID NO: 3543 - DNA, 483 bp, Aspergillus clavatus NRRL 1
  CDS (1)..(483)
atgcgtacctacgacgattctttcagcggtcagaagatctaccctggaaagggtaagctgtacgtccgtggcgacagcaagatcttccgcttccagaatggaaagtccgagtcccttttcctccagcgcaagaaccctcgccggatagcctggactgttctctaccgtcgccagcacaagaagggtatctctgaagaggttgccaagaagcgcactcgccgtgccgtcaagtcccagcgtgctatcgttggtgcttccctcgatgtgatcaaggagcgccgcagcatgcgccctgaggcccgtgccgccgcccgccagcaggccatcaaggaggccaaggagaagaaggccgcttccgagagccgcaagaaggctgagaaggccaagaccgccgccggcgccgccaagggcaccgctcagcgcatccagagcaagcagggtgctaagggctctgctcccaaggtcgctgccaagtctcgttaa

SEQ ID NO: 3544 - protein, 160 aa, Aspergillus clavatus NRRL 1
MRTYDDSFSGQKIYPGKGKLYVRGDSKIFRFQNGKSESLFLQRKNPRRIAWTVLYRRQHKKGISEEVAKKRTRRAVKSQRAIVGASLDVIKERRSMRPEARAAARQQAIKEAKEKKAASESRKKAEKAKTAAGAAKGTAQRIQSKQGAKGSAPKVAAKSR

SEQ ID NO: 3545 - DNA, 468 bp, Pichia stipitis CBS 6054
  CDS (1)..(468): transl_table=12
atgaaggttgaagttgactccttttccggttccaagatctacccaggtagaggtaccttgttcgttagaggtgactctaaggttttcagatttcaatcctcgaagtctgcttccttgttccaccaaagaaagaacccaagaagaatctcttggactgttttgtacagaagacaacacaagaagggtatttctgaagaaacttctaagagaagaagcagaaagaccatcaagcaccaaagagccattgtcggtgcttctttagaattgatcaaggaaagaagaaacttaaaggactctgacagaaaggctgccagagacaacaagttggccaaggacaaggaagccaagaaggttgccaaggctgccagaaaggctgaaaaggccaagttggctgctgccggcggtaacatcgtctccaagcaacaatccaagggtgctttccaaaaagttcacgccacttcccgttaa

SEQ ID NO: 3546 - protein, 155 aa, Pichia stipitis CBS 6054
MKVEVDSFSGSKIYPGRGTLFVRGDSKVFRFQSSKSASLFHQRKNPRRISWTVLYRRQHKKGISEETSKRRSRKTIKHQRAIVGASLELIKERRNLKDSDRKAARDNKLAKDKEAKKVAKAARKAEKAKLAAAGGNIVSKQQSKGAFQKVHATSR

SEQ ID NO: 3547 - DNA, 480 bp, Aspergillus niger CBS 513.88
  CDS (1)..(480)
atgcgtacctacgacgattctttcagcggtcagaagatctaccctggaaagggtaagctgtacgtccgtggcgacagcaagatcttccgcttccagaatggaaagtccgagtccctcttcctccagcgcaagaacccccgccgcatcgcctggactgtcctctaccgtcgccagcacaagaagggcatctctgaagaagttgccaagaagcgcacccgccgtgtcgtgaagagccagcgtgccatcgttggtgcctccctcgacgtgatcaaggagcgccgcgctcagcgccccgaggcccgtgccgccgcccgccagcaggccatcaaggacgccaaggagaagaaggccgccaacgagagccgcaagcgtgctgagaaggccaaggccgctgcctccggtgccaagcccgctcagcgcatccagagcaagcagggtgctaagggctctgcccccaaggtcgctgccaagtcgcgttaa

SEQ ID NO: 3548 - protein, 159 aa, Aspergillus niger CBS 513.88
MRTYDDSFSGQKIYPGKGKLYVRGDSKIFRFQNGKSESLFLQRKNPRRIAWTVLYRRQHKKGISEEVAKKRTRRVVKSQRAIVGASLDVIKERRAQRPEARAAARQQAIKDAKEKKAANESRKRAEKAKAAASGAKPAQRIQSKQGAKGSAPKVAAKSR

SEQ ID NO: 3549 - DNA, 471 bp, Pichia guilliermondii ATCC 6260
  CDS (1)..(471): transl_table=12
atgaaggttgaaatcgattcgttttccggtaacaagatctacccaggtagaggtaccttgtttgtcagaggtgactccaaggtgttcagattctcgtcatcgaaatctgcctctttattccaccaaagaaagaacccaagaagaattgcttggactgtattgtacagaagacaacacaagaagggtatttctgaggaaaccaccaagagaaagaacagaagaaccgtcaagcaccaaagagccattgtcggagcttcattggatttgattaaggagagaagatcgcaaaaacctcaagacagaaagcatgccagagacctcaagttggctaaggacaaggaagccaagaaggctgctaaggccagtagaaaggctgagaaggccaagtctgctgctgccggagctcagtccaagttttccaagcaacaagccaagggtgctttccaaaaggtgcacgctacctcccgttaa

SEQ ID NO: 3550 - protein, 156 aa, Pichia guilliermondii ATCC 6260
MKVEIDSFSGNKIYPGRGTLFVRGDSKVFRFSSSKSASLFHQRKNPRRIAWTVLYRRQHKKGISEETTKRKNRRTVKHQRAIVGASLDLIKERRSQKPQDRKHARDLKLAKDKEAKKAAKASRKAEKAKSAAAGAQSKFSKQQAKGAFQKVHATSR

SEQ ID NO: 3551 - DNA, 477 bp, Magnaporthe grisea 70-15
  CDS (1)..(477)
atggagggagttaatgaggctgacttgtggtcctgtacctttctcttgcagggtaagctctatgtccgtggcgacagcaagatcttccgcttccagaacggaaagtccgagtcccttttcctgcagcgcaagaaccctcgccgcatcgcatggaccgttctgtaccgccgggcgcaccgcaagggtatctctgaggaggtcgccaagaagcgtacccgcaggaccgtcaagtcgcagcgtgccatcgttggtgcttcgctcgatgtgattaaggagcgcaggacgatgcggcctgaggcccgcagcgccgccagggctgctgccatcaaggagagcaaggcaaagaaggctgaggctgagaaggccaagaaggccgagaaggcaaaggttgctggcggcaagggccagaccggtcgtctgacgagcaagcagggcgccaagggtgcgcagcagaaggttgccgccaacactcgttaa

SEQ ID NO: 3552 - protein, 158 aa, Magnaporthe grisea 70-15
MEGVNEADLWSCTFLLQGKLYVRGDSKIFRFQNGKSESLFLQRKNPRRIAWTVLYRRAHRKGISEEVAKKRTRRTVKSQRAIVGASLDVIKERRTMRPEARSAARAAAIKESKAKKAEAEKAKKAEKAKVAGGKGQTGRLTSKQGAKGAQQKVAANTR

SEQ ID NO: 3553 - DNA, 468 bp, Lodderomyces elongisporus NRRL YB-4239
  CDS (1)..(468)
atgaagatcgaagttgattcattctcaggttctaagatctacccaggtagaggaactttgttcgtcagaggagactccaaaattttcagattccaatcatcaaagtctgcttcccttttccaacaaagaaaaaacccaagaagaatttcatggaccgttttgtacagaagacaccacaaaaagggtatttcagaagaaacttctaagaagagaaccagaaagaccgttaagcaccaaagagctattgtcggtgcttcattggaattgatcaaagaaagaagaagccaaaagccatctgacagaaaggctgctagagaatcaaagttggccaaggacaaggaagctaagaaggctgctaaggctgctagaaaagctgaaaaggccaaggctgctgcttcaggtgcttcagttgtttccaagcaaggtgccaagggttcattccaaaaagtcaaggctacctcccgttaa

SEQ ID NO: 3554 - protein, 155 aa, Lodderomyces elongisporus NRRL YB-4239
MKIEVDSFSGSKIYPGRGTLFVRGDSKIFRFQSSKSASLFQQRKNPRRISWTVLYRRHHKKGISEETSKKRTRKTVKHQRAIVGASLELIKERRSQKPSDRKAARESKLAKDKEAKKAAKAARKAEKAKAAASGASVVSKQGAKGSFQKVKATSR

SEQ ID NO: 3555 - DNA, 483 bp, Ajellomyces capsulatus NAm1
  CDS (1)..(483)
atgcgtacctacgacgacactttcagcggcgagaagatttaccccggaaagggtaaactctacgtccgcggcgacggcaaagtcttccgcttccagaatggcaagaccgaatccctcttcctccaacgcaaaaaccctcgccgaatcttatggacgaccctttatagaagacaacacaggaaaggcatctctgaagaagttgcaaagaagcgtacccgacgcacagtcaagtcccagcgtgctgttgtcggcgcctctctagacgtcatcaaagaacgacgaagcatgcgccctgaggcccgcctcgctgctcgccaacaagccatcaaggaaggaaaggaaaagaagtccgctgccgaaagcaagaagagagctgagaaggctaagaacgctgccaacgctgccagaggccaggcgagcagaatccaaagcaaacagggtgctaagggtgcgccacccaaggttgctgctaagtctcgttaa

SEQ ID NO: 3556 - protein, 160 aa, Ajellomyces capsulatus NAm1
MRTYDDTFSGEKIYPGKGKLYVRGDGKVFRFQNGKTESLFLQRKNPRRILWTTLYRRQHRKGISEEVAKKRTRRTVKSQRAVVGASLDVIKERRSMRPEARLAARQQAIKEGKEKKSAAESKKRAEKAKNAANAARGQASRIQSKQGAKGAPPKVAAKSR

SEQ ID NO: 3557 - DNA, 468 bp, Botryotinia fuckeliana B05.10
  CDS (1)..(468)
atgcgtacttacgaagattccttctccggagccaagatctaccctggaaagggcaagctctacgtccgtggagactccaagatcttccgtttccaaaacggtaaatccgaatctttgttcttgcaacgcaagaaccctcgccgaattgcatggaccgtcctcttcagaagacaacacaagaagggtatctctgaggaagtcgccaagaagcgttcccgcaagaccgtcaagtcccaaagagctatcgtcggtgcttccctcgatgtcatcaaggagcgaagaaaccagagaccagaagccagatccgctgctcgtgagtccgccatcaaggccgctaaggagaagcgtgccgcagagcaagccgccaagaaggccacaaaggcaaagaccaatgtctccacccaatcgaaagtcagcaagcaaggttccaagggtaaggcaccaaagccaatgaacaccagccgttaa

SEQ ID NO: 3558 - protein, 155 aa, Botryotinia fuckeliana B05.10
MRTYEDSFSGAKIYPGKGKLYVRGDSKIFRFQNGKSESLFLQRKNPRRIAWTVLFRRQHKKGISEEVAKKRSRKTVKSQRAIVGASLDVIKERRNQRPEARSAARESAIKAAKEKRAAEQAAKKATKAKTNVSTQSKVSKQGSKGKAPKPMNTSR

SEQ ID NO: 3559 - DNA, 468 bp, Sclerotinia sclerotiorum 1980
  CDS (1)..(468)
atgcgtacttacgaagattctttctccggagctaagatctaccctggaaagggcaagctctacgttcgtggagactccaagatcttccgtttccaaaacggtaaatctgaatcgttgttcttgcaacgcaagaaccctcgccgaattgcatggaccgttctcttcagaagacaacacaagaagggtatctctgaggaggttgccaagaagcgttcccgcaagaccgtcaagtcccaaagaggtattgttggtgcttccctcgaagtcatcaaggagcgaagaagtcaaagaccagaagccagatccgctgctcgtgaatccgctatcaaggcagccaaggagaagcgtgccgcagagcaagccgtcaagaaggccgcaaaggcaaagaccaatgtttccacccaatcgaaagtcagcaagcaaggttccaagggtaaggcaccaaagccaatgaacactagccgttaa

SEQ ID NO: 3560 - protein, 155 aa, Sclerotinia sclerotiorum 1980
MRTYEDSFSGAKIYPGKGKLYVRGDSKIFRFQNGKSESLFLQRKNPRRIAWTVLFRRQHKKGISEEVAKKRSRKTVKSQRGIVGASLEVIKERRSQRPEARSAARESAIKAAKEKRAAEQAVKKAAKAKTNVSTQSKVSKQGSKGKAPKPMNTSR

SEQ ID NO: 3561 - DNA, 465 bp, Nasonia vitripennis
  CDS (1)..(465)
atgaagatcggactgtgcgcgtacagcggatacaagatttatcctggccatggcaagaccatggtcaaagtcgatggaaagaacttcacattcctgaactcgaaatgtgagtctgcccatctgatgaagcgcaaccccaggaaagtcacatggaccgtactgtacaggcgcaagcacaagaagggtcaggaggaagaacagaccaagaagaggacccgtaggacgcaaaagttccagcgtgctattgtgggtgcctccttgactgatatcctggctaagcgtaacatgaagccagagatcaggaaggcccaacgtgatcaagccatcaaggctgccaaggaacagaagaaggcccagaaggccgtcaagaaggcagcagcgccacccaaacagaagcctgtgcacaagcagaaggccacgaaagtacagcagaaggctgcccccagggttggcggcaagcgataa

SEQ ID NO: 3562 - protein, 154 aa, Nasonia vitripennis
MKIGLCAYSGYKIYPGHGKTMVKVDGKNFTFLNSKCESAHLMKRNPRKVTWTVLYRRKHKKGQEEEQTKKRTRRTQKFQRAIVGASLTDILAKRNMKPEIRKAQRDQAIKAAKEQKKAQKAVKKAAAPPKQKPVHKQKATKVQQKAAPRVGGKR

SEQ ID NO: 3563 - DNA, 465 bp, Nematostella vectensis
  CDS (1)..(465)
atgaagctcgagctgtgcaattacagtgggtataaaatctacccaggccacggcaagcgctatgtgcgacaagacggcaaggtgttcaacttcttaaacaagagatgtgagcgtgcccttctcatgagacgtaacccccgtgaggtgacctggactgttctgtatcgccgcaagcacaagaaaggcacccaggaagaagtgtccaagaagcgcacccgccgtaatatcaagttccagaggtctgtacagggggcatctcttgacaacatcctcgccaagagaaaccagaagcctgaggtccgcaaggcgcagagagagcaagctatcagggcagcgaaagaaaagcagagagcaaaggcatctactaaaaagccaaccactgcccagcccgctgcccaacgacagaaggctcagaagaatgtcaagcagatggctgccaagccgcgtgtgggaggcaagcgataa

SEQ ID NO: 3564 - protein, 154 aa, Nematostella vectensis
MKLELCNYSGYKIYPGHGKRYVRQDGKVFNFLNKRCERALLMRRNPREVTWTVLYRRKHKKGTQEEVSKKRTRRNIKFQRSVQGASLDNILAKRNQKPEVRKAQREQAIRAAKEKQRAKASTKKPTTAQPAAQRQKAQKNVKQMAAKPRVGGKR

SEQ ID NO: 3565 - DNA, 468 bp, Vanderwaltozyma polyspora DSM 70294
  CDS (1)..(468)
atgaagattgaaatcgattccttttctggtgctaagatctacccaggtagaggtactttgtttgtccgtggtgactccaagattttcagattccaaaactccaagtctgcttctttgtttcaccaaagaaagaacccaagaagaattgcttggaccgtcttgtacagaagacaccacaagaaaggtatcaccgaagaagtctctaagaagagatctagaaagtctgtcaagactcaaagagctatcgtcggtgcttctttggatttgatcaaagaaagaagatctttgaagccagaagttagaaaggctcaaagagaagaaaagaagaaagctgacaaggaaaagaagaaggctgacaaggctgccagaaaggtcgaaaaggctaagttagctggttcccaaggtaacaaggtctccaagcaacaagctaagggtgctttccaaaaggtcaatgctacttctcgttaa

SEQ ID NO: 3566 - protein, 155 aa, Vanderwaltozyma polyspora DSM 70294
MKIEIDSFSGAKIYPGRGTLFVRGDSKIFRFQNSKSASLFHQRKNPRRIAWTVLYRRHHKKGITEEVSKKRSRKSVKTQRAIVGASLDLIKERRSLKPEVRKAQREEKKKADKEKKKADKAARKVEKAKLAGSQGNKVSKQQAKGAFQKVNATSR

SEQ ID NO: 3567 - DNA, 462 bp, Aedes aegypti
  CDS (1)..(462)
atgaagatcggcctttgcgcgttcagcggtttcaagatctaccccgcaagtggtaaaacattggtcaaagccgatggcaagactttcaccttcatcaacaagaaatgcgagcgttccttcctgatgaagcgcaacccgcgcaaggtgaagtggaccgtcctgtaccgcaggaagcacaagaagggcatggttgaggaagcggccaagaagcgcacccgccgtaccatgaagttccagcgcgccatcgttggcgcttccatcaccgacattatggccaagcgtaacatgaagccggaggttcgcaaggcccagcgtgatcaggccatcaaggtcgccaaggaagccaagaaggccaagcaggccgagaagaaggtgaccaaggccccagcctcgaagcagcagaagaccaaggccgccaaggtgtcccagaaggcggctccacgtgtcggaggaaagcgataa

SEQ ID NO: 3568 - protein, 153 aa, Aedes aegypti
MKIGLCAFSGFKIYPASGKTLVKADGKTFTFINKKCERSFLMKRNPRKVKWTVLYRRKHKKGMVEEAAKKRTRRTMKFQRAIVGASITDIMAKRNMKPEVRKAQRDQAIKVAKEAKKAKQAEKKVTKAPASKQQKTKAAKVSQKAAPRVGGKR

SEQ ID NO: 3569 - DNA, 450 bp, Chlamydomonas reinhardtii
  CDS (1)..(450)
atggtgctgaagacgaacacgtgccgcttcagcggcctgaggatttaccctggcaagggcatgattttcatccgcacggatggccagcactacatgttcctgaacaagaagtgcaagtcctactaccacaaccgtctccgtcccgccaagctggcgtggactgtgacctaccgcaagcagcacaagaaggaccagatcagcgaggtgcagaagaagaagcgccggactgccgctaagtccaacaaccgctccatcgtgggcacctcgctggaggtgatccagaagaagcgggcggagaagcccgaggtccgccaggccagccgtgaggctgccatccgtgaggttaaggagcgcgccaagaagcagaaggcggagcgcgccgccgctgccaaggccgccgctggtccccaaaaggctgcccccaaggtcgtgggccgcggcaagcgctaa

SEQ ID NO: 3570 - protein, 149 aa, Chlamydomonas reinhardtii
MVLKTNTCRFSGLRIYPGKGMIFIRTDGQHYMFLNKKCKSYYHNRLRPAKLAWTVTYRKQHKKDQISEVQKKKRRTAAKSNNRSIVGTSLEVIQKKRAEKPEVRQASREAAIREVKERAKKQKAERAAAAKAAAGPQKAAPKVVGRGKR

SEQ ID NO: 3571 - DNA, 486 bp, Physcomitrella patens subsp. patens
  CDS (1)..(486)
atggtgctcaagactgaggtgtgcaggttctccggcgccaagatctaccctgggcgggggatcaggttcatccggagcgacagtcaggtgttccttttcctcaacagtaagtgcaagcggtactttcacaaccggctgaagcccgctaagttgtcatggacggcattgttcaggaagcagcacaagaaggaccttcacgacaccactgtcaagaagaaacgccgcaccaccaacaagccgtactctcggtccatcgtgggagcctcgctcgaggtgatccagaagaagaggacggagaagacggaggtgcgtgccgcagcccgcgaggcggcgttgcgggagatcaaggagaggatcaagaagacaaaggatgagaaaaaggcgaagaaggccgaggtggtgaagacgacgaagggagtggggaagcaggtggcacggggtcctcagcccaaggctggcaagaccggagctggaggcaagcgttaa

SEQ ID NO: 3572 - protein, 161 aa, Physcomitrella patens subsp. patens
MVLKTEVCRFSGAKIYPGRGIRFIRSDSQVFLFLNSKCKRYFHNRLKPAKLSWTALFRKQHKKDLHDTTVKKKRRTTNKPYSRSIVGASLEVIQKKRTEKTEVRAAAREAALREIKERIKKTKDEKKAKKAEVVKTTKGVGKQVARGPQPKAGKTGAGGKR

SEQ ID NO: 3573 - DNA, 486 bp, Physcomitrella patens subsp. patens
  CDS (1)..(486)
atggtgctcaagaccgaggtctgcaggttctccggcgccaagatctaccccggccggggcatcaggttcatccgcagcgacagtcaggtgttcctgttcctgaatagcaagtgcaagcggtacttccacaaccggctgaagcccgcgaagctttcgtggacggctttgttccggaagcaacacaagaaagatttgcacgacaccgccgtaaagaagaagcgtagaaccaccaacaaaccctactccaggtccatcgtgggcgcgtcgttggaggtgatccagaagaagaggaccgagaagaccgaggtccgcgccgcagctcgggaggcggcgttgcgagagatcaaggagaggatcaagaagacgaaggatgagaagaaggcgaagaaggccgagatggtgaagacgacgaagggggtcgggaagcaggcgacacgggcagctcagcccaaggctgcgaagaccagtgccggtggcaaacgttaa

SEQ ID NO: 3574 - protein, 161 aa, Physcomitrella patens subsp. patens
MVLKTEVCRFSGAKIYPGRGIRFIRSDSQVFLFLNSKCKRYFHNRLKPAKLSWTALFRKQHKKDLHDTAVKKKRRTTNKPYSRSIVGASLEVIQKKRTEKTEVRAAAREAALREIKERIKKTKDEKKAKKAEMVKTTKGVGKQATRAAQPKAAKTSAGGKR

SEQ ID NO: 3575 - DNA, 486 bp, Physcomitrella patens subsp. patens
  CDS (1)..(486)
atggtgctcaagactgaggtgtgcaggttctccggcgccaagatctaccctgggcgggggatcaggttcatccggagcgacagtcaggtgttcctgttcctcaacagtaagtgcaagcggtacttccacaaccggctgaagcccgctaagctgtcatggacggcattgttcaggaagcagcacaagaaggaccttcacgacaccaccgtgaagaagagacgccgcaccaccaacaagccgtactctcggtccatcgtgggagcctcgcttgaggtgatccagaagaagaggacggagaagacggaggtgcgtgccgcagctcgcgaggcggcgttgcgggagatcaaagagaggatcaagaagacgaaggatgagaagaaggcgaagaaggccgaggtggtgaagacgacgaagggagcggggaagcaggtggcacggggtccccagcccaaggctggcaagaccggcgctggaggcaagcgttaa

SEQ ID NO: 3576 - protein, 161 aa, Physcomitrella patens subsp. patens
MVLKTEVCRFSGAKIYPGRGIRFIRSDSQVFLFLNSKCKRYFHNRLKPAKLSWTALFRKQHKKDLHDTTVKKRRRTTNKPYSRSIVGASLEVIQKKRTEKTEVRAAAREAALREIKERIKKTKDEKKAKKAEVVKTTKGAGKQVARGPQPKAGKTGAGGKR

SEQ ID NO: 3577 - DNA, 486 bp, Physcomitrella patens subsp. patens
  CDS (1)..(486)
atggtgctcaaaacagaggtatgtcggttctccggtgcgaagatctatcccggccgggggattaggtttattcgcagcgatagtcaggtgttccttttcctcaacagcaagtgcaagaggtacttccacaataggctgaagcccgcgaagctgtcttggacggcgttgttccggaaacagcacaagaaggaccttcacgacaccgcagtgaagaagaagaggaggaccacgaacaagccatactctaggtccatcgtgggagcatcgctagaggtgattcagaagaagaggacggagaagacggaggtgcgcgccgcagctcgcgaggcagcgctgcgggagattaaggagaggatcaagaagacgaaggacgagaagaaggcgaagaaagccgaggtggtgaagacgacgaaggggccggggaagcaggcggcaaggggtccacagccgaaggcagcgaagagtggtgccggaggcaagcgctaa

SEQ ID NO: 3578 - protein, 161 aa, Physcomitrella patens subsp. patens
MVLKTEVCRFSGAKIYPGRGIRFIRSDSQVFLFLNSKCKRYFHNRLKPAKLSWTALFRKQHKKDLHDTAVKKKRRTTNKPYSRSIVGASLEVIQKKRTEKTEVRAAAREAALREIKERIKKTKDEKKAKKAEVVKTTKGPGKQAARGPQPKAAKSGAGGKR

SEQ ID NO: 3579 - DNA, 486 bp, Physcomitrella patens subsp. patens
  CDS (1)..(486)
atggtgctcaaaacagaggtgtgtcggttctccggtaggaagatctatcccggccgggggattaggtttatccggagcgatagtcaggtgttccttttcctcaacagcaagtgcaaacggtacttccacaataggctgaagcccgcgaagctgtcatggacggcgttgttccggaaacagcacaagaaagaccttcacgacaccacagtgaagaagaagaggaggaccacgaacaaaccatactctaggtccatcgtgggagcatcgatggaggtgattcagaagaagaggacagagaagacggaggtgcgcgccgcggctcgcgaggcagcgctgcgggagataaaggagaggatcaagaagactaaggacgagaagaaggcgaagaaggccgaggtggtgaagacaacgaaggggccggggaagcaggcggcacggggtccacagccgaaggctgcgaagagcggtgctggaggcaagcgctga

SEQ ID NO: 3580 - protein, 161 aa, Physcomitrella patens subsp. patens
MVLKTEVCRFSGRKIYPGRGIRFIRSDSQVFLFLNSKCKRYFHNRLKPAKLSWTALFRKQHKKDLHDTTVKKKRRTTNKPYSRSIVGASMEVIQKKRTEKTEVRAAAREAALREIKERIKKTKDEKKAKKAEVVKTTKGPGKQAARGPQPKAAKSGAGGKR

SEQ ID NO: 3581 - DNA, 486 bp, Phaeosphaeria nodorum SN15
  CDS (1)..(486)
atgcgtacctacgacgactccttcagcggtcaaaagatctaccctggaaagggcaagctgtacatccgtggtgacagcaagatcttccgcttccagaacggcaagaccgagtccctcttcctgcagaggaagaacccccgcaagatctcatggaccaccctttaccgacggatgcacaagaagggtatctctgaggaagttgccaagaagcgtacccgccgcacagtcaagcaccagcgtgccatcgtcggtgcttccctcgacgtgatcaaggagcgccgttcccagcgccccgaggcccgtgccgccgcccgttcagccgccgtccaggaaggaaaggagaagaaggccgctgccgagtcaaagaagaaggctgagaaggccaagagcgcctccagcgctgcgcgaggccaggcatccaagatccagagcaagcagggctccaagggtgccgcacccaaggtccaggcatccggccgtcgttaa

SEQ ID NO: 3582 - protein, 161 aa, Phaeosphaeria nodorum SN15
MRTYDDSFSGQKIYPGKGKLYIRGDSKIFRFQNGKTESLFLQRKNPRKISWTTLYRRMHKKGISEEVAKKRTRRTVKHQRAIVGASLDVIKERRSQRPEARAAARSAAVQEGKEKKAAAESKKKAEKAKSASSAARGQASKIQSKQGSKGAAPKVQASGRR

SEQ ID NO: 3583 - DNA, 453 bp, Coprinopsis cinerea okayama7#130
  CDS (1)..(453)
atgaaggtcgaaattgactctttctcgggctaccgaatctaccccagcaagggcaagctctttgtccggggtgactccaaagtcttccgcttctccggctccaaatccgcttccctcttcctccaacgcaaaaacccccgcaaaatcgcctggacacaagtctaccgccgcatgcacaagaagggcctcactgaggaggtcaccaagaggaagtcgaggaagactgtgaagcaccagaggggtatcgtcggtgctgacttggctgccatcgccgccaagcggaaccagaccgctgctgttagggagcagcagaggttggctgctatcgccaaggctaagagcgagaagaaggagagggagagcaagaaggccaagcccgctgttcgtcaatcgatcccctctggacccaaggtgtccaagcagcagatgaagggtggcaaggctggccgataa

SEQ ID NO: 3584 - protein, 150 aa, Coprinopsis cinerea okayama7#130
MKVEIDSFSGYRIYPSKGKLFVRGDSKVFRFSGSKSASLFLQRKNPRKIAWTQVYRRMHKKGLTEEVTKRKSRKTVKHQRGIVGADLAAIAAKRNQTAAVREQQRLAAIAKAKSEKKERESKKAKPAVRQSIPSGPKVSKQQMKGGKAGR

SEQ ID NO: 3585 - DNA, 462 bp, Culex quinquefasciatus
  CDS (1)..(462)
atgaagatcggcttgtgcgcgttcagcggattcaaaatttaccccgccagcggtaaaacactggtcaaagccgatggcaagaccttcaccttcatcaacaagaaatgcgagcgttctttcctgatgaagcgcaacccgcgcaaggtgaaatggaccgtgctgtacagaaggaagcacaagaagggcatcgtcgaggaggccaccaagaagcgctcccgccgcacccagaagttccagcgcgccatcgtcggtgcctccatcaccgacatcatggccaagcgtaacatgaagccggaggtgcgcaaggcccagcgggaccaggccatcaaggtcgccaaggaagccaagaaggccaagcaggccgagaagaaggtgacgaaggcgccggccgcgaaacagcaaaagaccaaggccgccaaggtgtcccagaaggctgccccacgcgtcggaggcaagcgataa

SEQ ID NO: 3586 - protein, 153 aa, Culex quinquefasciatus
MKIGLCAFSGFKIYPASGKTLVKADGKTFTFINKKCERSFLMKRNPRKVKWTVLYRRKHKKGIVEEATKKRSRRTQKFQRAIVGASITDIMAKRNMKPEVRKAQRDQAIKVAKEAKKAKQAEKKVTKAPAAKQQKTKAAKVSQKAAPRVGGKR

SEQ ID NO: 3587 - DNA, 450 bp, Laccaria bicolor S238N-H82
  CDS (1)..(450)
atgaaggtcgaaattgactccttctccggctaccgtatctatcccagcaagggcaagcttttcgttcgcggcgacagcaaagtcttccgcttcgctggctcgaaaaatgcttcgctcttcctccagcgcaaaaatccccgtaaaatcgcctggactcaagtttaccgtaggatgcacaagaagggtatcacggaggaggttgctaagaagcgctcacgcaggactgtgaaacaccagcgcggaatcgttggtgctgatcttgccgccattgccgcgaagcgcaaccaaaccgccgccgttaggtcacaacaaagactggctgccattacaaaggccaagaccgagaagaaggagaaggaagtgaagaaggccaagcctgcgcgccaagcaaccacttcaggtcccaaggtctccaagcagcagatgaagggtggcaagggaggacgatga

SEQ ID NO: 3588 - protein, 149 aa, Laccaria bicolor S238N-H82
MKVEIDSFSGYRIYPSKGKLFVRGDSKVFRFAGSKNASLFLQRKNPRKIAWTQVYRRMHKKGITEEVAKKRSRRTVKHQRGIVGADLAAIAAKRNQTAAVRSQQRLAAITKAKTEKKEKEVKKAKPARQATTSGPKVSKQQMKGGKGGR

SEQ ID NO: 3589 - DNA, 483 bp, Brugia malayi
  CDS (1)..(483)
atgaagttggaaacttgtgtatattcaggatataagatttatccaggacatgggaaaaggatggttcgtgctgatggaaaggtgcaaatatttttgaataaaaagtgcctacgatcgtacaaattgaagcgaaatcctcgtgacataccgtggacagtgttgtatcgccgtaaacacaaaaagggtgttcatggtgaagaaaatgcacaaaagaaacgtacacgacgcgttatacaaattgcgtctcgagcagttggcaatgtttcactggaagctatacttgcaaaacgaaatcagaaaccagaatttcgacgtgaacaacgtgaacaagcaataaaagctgcgaaagaagctgcgcgagcttcaaagagcgagaagaaagcagcaaataaggcattgaaggagaagaaggctgctccacagaagatgaagataccaaaaccgacgaaaacccagcaaccacgagttggtggcaaacgctga

SEQ ID NO: 3590 - protein, 160 aa, Brugia malayi
MKLETCVYSGYKIYPGHGKRMVRADGKVQIFLNKKCLRSYKLKRNPRDIPWTVLYRRKHKKGVHGEENAQKKRTRRVIQIASRAVGNVSLEAILAKRNQKPEFRREQREQAIKAAKEAARASKSEKKAANKALKEKKAAPQKMKIPKPTKTQQPRVGGKR

SEQ ID NO: 3591 - DNA, 474 bp, Podospora anserina DSM 980
  CDS (1)..(474)
atgcgcacctacgaggataccttctccggcgcccggatctaccctggcaagggcaagctgtacgtccgtggcgacagtaagatcttccgtttccaaaacggcaaatccgagtcccttttcctccagcgcaagaaccctcgccgcatcgcctggactgtcctctaccgcagacaacacaagaagggtatctctgaggaggttgccaagaagcgtactcgccgcaccgtcaagtcccagcgtgccatcgttggtgctaccctcgatgtgatcaaggagcgccgcgccatgcgccccgaggcccgctctgctgctcgcgctcaggccattaaggaggccaaggagaagaaggctgcttccgccgccgctaagaagtctgagaaggccaaggctgctgccaacgcctccaagggccgtatcgtcggcaagcagggtgctaagggtgcgcagtccaagcctgccatccacagccgttaa

SEQ ID NO: 3592 - protein, 157 aa, Podospora anserina DSM 980
MRTYEDTFSGARIYPGKGKLYVRGDSKIFRFQNGKSESLFLQRKNPRRIAWTVLYRRQHKKGISEEVAKKRTRRTVKSQRAIVGATLDVIKERRAMRPEARSAARAQAIKEAKEKKAASAAAKKSEKAKAAANASKGRIVGKQGAKGAQSKPAIHSR

SEQ ID NO: 3593 - DNA, 480 bp, Pyrenophora tritici-repentis Pt-1C-BFP
  CDS (1)..(480)
atgcgtacctacgacgattccttcagcggtcaaaagatctacccgggcaagggcaagctctacatccgcggtgacagcaagatcttccgtttccagaatggcaagaccgagtcccttttcctccagcgcaagaaccctcgcaagattcactggaccactctctaccgaagggcgcacaagaagggtatctctgaggaagtcgccaagaagcgtacccgccgcacagtcaagcaccagcgtgccatcgtcggtgcctcgctcgatgtaatcaaggagcgccgtagccaacgccctgaggcccgtgccgctgcccgcagcgccgccgtcaaggagggcaaggagaagaaggccgccgccgagtcgcagaagaaggctgagaaggccaagaacgctgccgcatccgcacgaggcaacgccgccaaggtcagcaagcagggtgccaagggtgccgcaccaaaggtgcaggcaaggactcgttaa

SEQ ID NO: 3594 - protein, 159 aa, Pyrenophora tritici-repentis Pt-1C-BFP
MRTYDDSFSGQKIYPGKGKLYIRGDSKIFRFQNGKTESLFLQRKNPRKIHWTTLYRRAHKKGISEEVAKKRTRRTVKHQRAIVGASLDVIKERRSQRPEARAAARSAAVKEGKEKKAAAESQKKAEKAKNAAASARGNAAKVSKQGAKGAAPKVQARTR

SEQ ID NO: 3595 - DNA, 468 bp, Drosophila ananassae
  CDS (1)..(468)
atgaaaatcggcttgtgttcgttcagtgggtacaaaatctaccccggccatggcaagaccatggtcaaggtcgacggcaagaccttcaccttcctggacaagaagtgcgagcgctcgtacctgatgaagcgcaacccccgcaaggttacctggaccgtgctttaccgcaggaagcaccgcaagggtatcgaggaggaggcctccaagaagcgcacccgccgcacccagaagttccagcgtgccatcgtcggcgcctcgctggccgaaatcatggccaagcgtaacatgaagcccgaggttcgtaaggctcagcgcgatcaagccatcaaggtggccaaggagcagaagcgcgccgccaaggctgccaagaaggctgctgcccccgcacccgccaagaaggctgctcccaagcagaaggccgccaaggtgacgcagaagtctgctccccgcgtcggtggaaagcggtaa

SEQ ID NO: 3596 - protein, 155 aa, Drosophila ananassae
MKIGLCSFSGYKIYPGHGKTMVKVDGKTFTFLDKKCERSYLMKRNPRKVTWTVLYRRKHRKGIEEEASKKRTRRTQKFQRAIVGASLAEIMAKRNMKPEVRKAQRDQAIKVAKEQKRAAKAAKKAAAPAPAKKAAPKQKAAKVTQKSAPRVGGKR

SEQ ID NO: 3597 - DNA, 468 bp, Drosophila grimshawi
  CDS (1)..(468)
atgaaaatcggtttgtgtgcattcagtgggtataaaatttaccccggccatggcaagaccatggtcaaaatcgatggcaagaccttcaccttcctggacaagaagtgcgagcgctcctacctgatgaagcgcaatccccgcaaggtgacctggacggtgctgtaccgtcgcaagcatcgcaagggcatcgaggaggaagcgtccaagaagcgtacgcgccgcacacagaaattccagcgcgccattgttggtgcctccctcgccgaaatcatggccaagcgcaacatgaagccggaggtgcgcaaggcgcaacgcgatcaggccatcaaagtagccaaggaacagaagcgcgcaaccaaggcagccaagaaggccgccgccccagcacccgccaagaagtccgcgcccaagcagaaggccaccaaggttacgcaaaaggccgctcctcgcgtcggtggcaagcggtaa

SEQ ID NO: 3598 - protein, 155 aa, Drosophila grimshawi
MKIGLCAFSGYKIYPGHGKTMVKIDGKTFTFLDKKCERSYLMKRNPRKVTWTVLYRRKHRKGIEEEASKKRTRRTQKFQRAIVGASLAEIMAKRNMKPEVRKAQRDQAIKVAKEQKRATKAAKKAAAPAPAKKSAPKQKATKVTQKAAPRVGGKR

SEQ ID NO: 3599 - DNA, 468 bp, Drosophila mojavensis
  CDS (1)..(468)
atgaaaattggcttgtgtgcattcagtgggtacaaaatctaccccggccatggcaagaccatggtcaaagtcgatggcaagaccttcacctttctggacaagaagtgcgagcgctcctacctgatgaagcgtaatccccgcaaagtcacctggactgtgctgtaccgccgtaagcaccgtaagggtattgaggaggaggcgtccaagaagcgtactcgccgcacacagaaattccagcgcgccatcgtcggtgcctcgcttgccgagattatggctaagcgcaacatgaaacccgaggtgcgaaaggcccaacgggatcaggccatcaaggtagccaaggagcagaagcgcgccgctaaggcagccaagaaggccgccgcgccagcacccgccaagaaatcagcgcccaagcagaaggccaccaaggtaacgcagaagtcggcccctcgcgtcggtggcaagcggtaa

SEQ ID NO: 3600 - protein, 155 aa, Drosophila mojavensis
MKIGLCAFSGYKIYPGHGKTMVKVDGKTFTFLDKKCERSYLMKRNPRKVTWTVLYRRKHRKGIEEEASKKRTRRTQKFQRAIVGASLAEIMAKRNMKPEVRKAQRDQAIKVAKEQKRAAKAAKKAAAPAPAKKSAPKQKATKVTQKSAPRVGGKR

SEQ ID NO: 3601 - DNA, 468 bp, Drosophila persimilis
  CDS (1)..(468)
atgaaattggcttgtgtgcattcagcggggtacaaaatctaccccggccatggcaagaccatggtcaagattgatggcaagagcttcaccttcctggacaagaagtgcgagcgctcttacctgatgaagcgcaaccctcgtaaggttacctggactgtgctctaccgccgcaagcaccgcaagggcattgaggaggaggcctccaagaagcgcacccgtcgcacacagaaattccagcgcgctattgtcggcgcttccctggccgagatcatggccaagcgcaacatgaagccggaggttcgcaaggcccagcgcgatcaggccatcaaggtcgccaaggaacagaagcgcgccgtcaaggcagcaaagaaggcgtcagccccagctcccgccaagaagtctgctcccaagacgaaggccgccaaggtcacgcagaagtctgctccccgcgtcggtggcaagcggtaa

SEQ ID NO: 3602 - protein, 155 aa, Drosophila persimilis
MKLACVHSAGYKIYPGHGKTMVKIDGKSFTFLDKKCERSYLMKRNPRKVTWTVLYRRKHRKGIEEEASKKRTRRTQKFQRAIVGASLAEIMAKRNMKPEVRKAQRDQAIKVAKEQKRAVKAAKKASAPAPAKKSAPKTKAAKVTQKSAPRVGGKR

SEQ ID NO: 3603 - DNA, 468 bp, Drosophila virilis
  CDS (1)..(468)
atgaaaatcggtttgtgtgcattcagcgggtataagatttaccccggccatggcaagaccatggtcaaaatcgatggcaagaccttcacctttctggacaagaagtgcgagcgctcctatctgatgaagcgtaacccccgtaaggttacctggacggtgctgtatcgccgcaagcaccgcaagggtattgaggaggaggcctccaagaagcgcacgcgtcgcacacagaaattccagcgcgccattgttggcgcctcgctggctgagatcatggccaagcgcaacatgaaaccggaagtacgcaaggctcagcgcgaccaagccataaaggtggccaaggaacagaagcgtgccgtcaaggcagccaaaaaggccgcagcaccagcaccagccaagaagtccgcgcccaagcagaaggccaccaaggtaacgcagaagtctgcgcctcgcgtcggtggcaagcgataa

SEQ ID NO: 3604 - protein, 155 aa, Drosophila virilis
MKIGLCAFSGYKIYPGHGKTMVKIDGKTFTFLDKKCERSYLMKRNPRKVTWTVLYRRKHRKGIEEEASKKRTRRTQKFQRAIVGASLAEIMAKRNMKPEVRKAQRDQAIKVAKEQKRAVKAAKKAAAPAPAKKSAPKQKATKVTQKSAPRVGGKR

SEQ ID NO: 3605 - DNA, 468 bp, Drosophila willistoni
  CDS (1)..(468)
atgaaaatcggtttgtgttcattcagtgggtacaaaatctaccccggccatggcaagaccatggttaaggttgatggcaagtctttcaccttcctggacaagaagtgcgagcgctcctacctgatgaagcgtaatccccgcaaagtcacctggactgtgctgtaccgtcgcaagcatcgcaagggtatcgaggaggaggcctccaagaagcgtactcgccgcacacagaaattccagcgcgctattgtcggtgcctcgctggccgagattatggccaagcgtaacatgaagcccgaggtgcgtaaggctctccgtgaccaggccatcaaagtcgccaaggaacagaagcgtgccaccaaggccgccaaaaaggcagccgctccagctcccgccaagaagtctgctcccaagcagaaggccgccaaggttacacagaaatctgctccccgtgtcggaggaaagcggtaa

SEQ ID NO: 3606 - protein, 155 aa, Drosophila willistoni
MKIGLCSFSGYKIYPGHGKTMVKVDGKSFTFLDKKCERSYLMKRNPRKVTWTVLYRRKHRKGIEEEASKKRTRRTQKFQRAIVGASLAEIMAKRNMKPEVRKALRDQAIKVAKEQKRATKAAKKAAAPAPAKKSAPKQKAAKVTQKSAPRVGGKR

SEQ ID NO: 3607 - DNA, 453 bp, Trichoplax adhaerens
  CDS (1)..(453)
atgaagctcgaattgtgtaattacagtggttataagatttatcctggtcacggtaagagatactgccgtgtcgatggtaagaccttcaattttttaaatggaaaatgcgaggcttctcatcttatgcgtcgtaatccccgaaaaatatcatggacggtagtataccgtcgcaagcacaaaaagggaaaggttgaagaaacttccaaaaagagaaccaggcgtacaaccaaatttcagcgtgctatccaaggtgctactctagaaaatattatggcaaaaagaaatcaaaagccagaagtccgtaaagcgcagagagagcaagcaataagagctgccaaagagaaacaaaagggcaagaagcaaacacagaagacacaaactacaaaacaatccaagagcaaagctaccaaggttgtaaaaggtagtgccccgaaagttggtgtcagacgataa

SEQ ID NO: 3608 - protein, 150 aa, Trichoplax adhaerens
MKLELCNYSGYKIYPGHGKRYCRVDGKTFNFLNGKCEASHLMRRNPRKISWTVVYRRKHKKGKVEETSKKRTRRTTKFQRAIQGATLENIMAKRNQKPEVRKAQREQAIRAAKEKQKGKKQTQKTQTTKQSKSKATKVVKGSAPKVGVRR

SEQ ID NO: 3609 - DNA, 468 bp, Drosophila pseudoobscura pseudoobscura
  CDS (1)..(468)
atgaaaattggcttgtgtgcattcagcgggtacaaaatctaccccggccatggcaagaccatggtcaagattgatggcaagagcttcaccttcctggacaagaagtgcgagcgctcttacctgatgaagcgcaaccctcgtaaggttacctggactgtgctctaccgccgcaagcaccgcaagggcattgaggaggaggcctccaagaagcgcacccgccgcacacagaaattccagcgcgctattgtcggcgcttccctggccgagatcatggccaagcgcaacatgaagccggaggttcgcaaggcccagcgcgatcaggccatcaaggtcgccaaggaacagaagcgcgccgtcaaggcagcaaagaaggcgtcagccccagctcccgccaagaagtctgctcccaagacgaaggccgccaaggtcacgcagaagtctgctccccgcgtcggtggcaagcggtaa

SEQ ID NO: 3610 - protein, 155 aa, Drosophila pseudoobscura pseudoobscura
MKIGLCAFSGYKIYPGHGKTMVKIDGKSFTFLDKKCERSYLMKRNPRKVTWTVLYRRKHRKGIEEEASKKRTRRTQKFQRAIVGASLAEIMAKRNMKPEVRKAQRDQAIKVAKEQKRAVKAAKKASAPAPAKKSAPKTKAAKVTQKSAPRVGGKR

SEQ ID NO: 3611 - DNA, 471 bp, Hydra magnipapillata
  CDS (1)..(471)
atgaagcttgagctttgcaacttcagcggttacaaaatataccctggccatggaaagcgatatgttagatcagatggcaagcttttcaatttcctaagtaaaaaaagtgaacgctcttttcatatgagaagaaatccacgtaaaatttcatggacagtattatacagaaaaaaacataaaaagggaactcaagaggagctttcaaaaaaaagaaccagacgtactgtaaagttccaaagagccatccaaggagcatcactagaagcaattcttgctaaaagaaacatgaaacctgaattaagagaagctcaaagaaatcaagcaataaaagtcgcaaaagaaaaggctaaagctaaaaaatcagaaaagaaagcagctaagaaagctgctccagttgctaagaaaccaaaggagaaagttgctaagactgtacctaaaggtggacccggtcgtgttggcggaaaaagataa

SEQ ID NO: 3612 - protein, 156 aa, Hydra magnipapillata
MKLELCNFSGYKIYPGHGKRYVRSDGKLFNFLSKKSERSFHMRRNPRKISWTVLYRKKHKKGTQEELSKKRTRRTVKFQRAIQGASLEAILAKRNMKPELREAQRNQAIKVAKEKAKAKKSEKKAAKKAAPVAKKPKEKVAKTVPKGGPGRVGGKR

SEQ ID NO: 3613 - DNA, 450 bp, Schizosaccharomyces japonicus yFS275
  CDS (1)..(450)
atgaaggtcgaagtttgctctttctctggcgccaaggtttaccctggttttggtcgtctctacgtccgtggagacaacaaggtcttccgctttgttaactccaagtctgagagccttttcttgcaacgcaagaaccctcgtcgtttgtcctggactcaactctaccgtagcatgcacaagaagggtgtttcggttgagcaagctaagaagcgcactcgccgtaccgtcaagcaccaacgtggagttgtcggtgccgacctcagcgtcatcaaggagaagcgtaaccaacgccccgaggttcgtgctgccgctcgtactgccgctttgaaggcccacaaggagaagaaggctacttctgaggctgccaagaaggccaacaaggccaaggctgctgcctctaacgctcgtggtcaagccctcaagaccgctaaggtcgctgcccgtcgttag

SEQ ID NO: 3614 - protein, 149 aa, Schizosaccharomyces japonicus yFS275
MKVEVCSFSGAKVYPGFGRLYVRGDNKVFRFVNSKSESLFLQRKNPRRLSWTQLYRSMHKKGVSVEQAKKRTRRTVKHQRGVVGADLSVIKEKRNQRPEVRAAARTAALKAHKEKKATSEAAKKANKAKAAASNARGQALKTAKVAARR

SEQ ID NO: 3615 - DNA, 426 bp, Schizosaccharomyces japonicus yFS275
  CDS (1)..(426)
atgaaggtcgaagtttgctcgttctctggcgctaaggtctaccccggcttcggccgtctctacgttcgtggagacaacaaggtcttccgcttcgttaactccaagtccgaaagtttgttcttgcaacgcaagaacccccgtcgtctttcctggacccaactctaccgtagcatgcacaagaagggtgtctcggttgagcaagctaagaagcgtactcgccgtactgtcaagcaccaacgtggtgttgtcggtgctgacttgaacgtcatcaaggagaagcgtagccaacgccccgaggttcgtgctgctgcccgtagcgctgccttgaaggcccacaaggagaagaaggctgcttccgagtctgctaagaaggccaacaaggccaaggctgccgcctctaacgctcgtggtcaggctcgtcattag

SEQ ID NO: 3616 - protein, 141 aa, Schizosaccharomyces japonicus yFS275
MKVEVCSFSGAKVYPGFGRLYVRGDNKVFRFVNSKSESLFLQRKNPRRLSWTQLYRSMHKKGVSVEQAKKRTRRTVKHQRGVVGADLNVIKEKRSQRPEVRAAARSAALKAHKEKKAASESAKKANKAKAAASNARGQARH

SEQ ID NO: 3617 - DNA, 465 bp, Branchiostoma floridae
  CDS (1)..(465)
atgaagatcgagctgtgtctctacagcgggtataaaatctaccctggccatggcaagagatatgccaggactgatggcagggtatacactttcctgaacgcgaaatgcgaggcttcattcctgatgaagcggaacccgcgtgagatcacgtggacggtgctgtaccgccgcaagcacaagaagggccagcaggaggagatacagaagaaacgcagccgtagaactgccaagttccagcgcgctatcactggtgcctccctgacggagatcatggctaagagaaatcagaagccagaggttcgtaaggcacagagagagcaggctgtcaaggctgccaaggaaaagaagaaggcagatcaggcaggcaagaggaaggcccctgctaaggctcggtctgctgcgccaaagactaaggccacgaagactgtaaaggccgcagcacccagagttggcggaaagcgatag

SEQ ID NO: 3618 - protein, 154 aa, Branchiostoma floridae
MKIELCLYSGYKIYPGHGKRYARTDGRVYTFLNAKCEASFLMKRNPREITWTVLYRRKHKKGQQEEIQKKRSRRTAKFQRAITGASLTEIMAKRNQKPEVRKAQREQAVKAAKEKKKADQAGKRKAPAKARSAAPKTKATKTVKAAAPRVGGKR

SEQ ID NO: 3619 - DNA, 495 bp, Vitis vinifera
  CDS (1)..(495)
atggttctcaagactgaactctgtcgcttcagtggtgcaaagatataccctggtaaaggtatcagatttgttagatctgattcacaggtatttctatttgccaattcaaaatgcaagagatactttcacaaccgacttaagccttcaaagcttacctggacggctatgtatagaaagcaacataagaaggacatagctgcggaggctgtgaagaagaggcgtcgtgccaccaagaagccattctccagatccatagttggtactaccttggaggcgatacagaagaggagaactgaaaaaccagaagttcgagatgctgctagggaggctgctcttcgtgaaattaaggagagggtcaagaaaaccaaggatgagaagaaagcaaagaaagcagaagtgatggccaaaactcagaagtctcagagcaagggtaatgcaggcagggctgctgcaccaaagggcccgaaactaggaggtggtggtggaaaacgctga

SEQ ID NO: 3620 - protein, 164 aa, Vitis vinifera
MVLKTELCRFSGAKIYPGKGIRFVRSDSQVFLFANSKCKRYFHNRLKPSKLTWTAMYRKQHKKDIAAEAVKKRRRATKKPFSRSIVGTTLEAIQKRRTEKPEVRDAAREAALREIKERVKKTKDEKKAKKAEVMAKTQKSQSKGNAGRAAAPKGPKLGGGGGKR

SEQ ID NO: 3621 - DNA, 492 bp, Vitis vinifera
  CDS (1)..(492)
atggatttcaggactgaactctgccgcttcagtggggccaagatataccctggtaagggtatcagatttgttcggtctgattcccaggtttttctctttgccaattctaaatgcaagaggtacttccacaaccggcttaagccatcgaagcttacatggacagccatgtacagaaagcagcacaagaaggacattgcagcagaagctgttaagaagaagcgccgcaccgcaaagaagccatactcaaggtccatagtgggtgccacattggaggttatacagaagagaagaaccgagaaacctgaagttcgagatgctgctagggaggctgctctccgtgaaattaaagagaggatcaagaaaaccaaggatgaaaagaaagccaagaaggctgaggtaatggccaagacgcagaaaactcagagcaagggtgtgcctaaaggggctgcaccaaagggccccaagcttggaggaggaggtggaaagcgctga

SEQ ID NO: 3622 - protein, 163 aa, Vitis vinifera
MDFRTELCRFSGAKIYPGKGIRFVRSDSQVFLFANSKCKRYFHNRLKPSKLTWTAMYRKQHKKDIAAEAVKKKRRTAKKPYSRSIVGATLEVIQKRRTEKPEVRDAAREAALREIKERIKKTKDEKKAKKAEVMAKTQKTQSKGVPKGAAPKGPKLGGGGGKR

SEQ ID NO: 3623 - DNA, 498 bp, Vitis vinifera
  CDS (1)..(498)
atggttctcaaaactgaactctgccgattcagtggtgccaagatataccctgggaaaggaatcagatttgttcgttcagattctcaggtgtttctatttgccaattcaaaatgcaagaggtacttccacaaccggctgaagccatcaaagcttacctggacagccatgtacaggaagcaacataaaaaggatattgctcaagaggctgtaaagaagaggcgtcgtgccaccaaaaagccctactctaggtccattgtgggtgctacattggaggttatccagaagagaagaaccgagaaagcagaagtcagagatgctgccagggaggctgctcttcgtgaaattaaggaaagaatcaagaagaccaaggatgaaaagaaggcaaagaaggcagaagtgatggctaaggtgcagaagacacagggcaagggtaacgttcccaagggtgctgctgctccaaagggccctaaaattggaggtggtggtggtaagcgctga

SEQ ID NO: 3624 - protein, 165 aa, Vitis vinifera
MVLKTELCRFSGAKIYPGKGIRFVRSDSQVFLFANSKCKRYFHNRLKPSKLTWTAMYRKQHKKDIAQEAVKKRRRATKKPYSRSIVGATLEVIQKRRTEKAEVRDAAREAALREIKERIKKTKDEKKAKKAEVMAKVQKTQGKGNVPKGAAAPKGPKIGGGGGKR

SEQ ID NO: 3625 - DNA, 492 bp, Populus trichocarpa
  CDS (1)..(492)
atggttctcaagactgagctttgccgcttcagtggtgccaagatttaccctggtaagggtatcagatttattcgttccgattctcaggttttcctctttgccaactcgaaatgcaagaggtatttccacaatcgccttaagccttccaagcttacctggacagccatgtacaggaaacagcacaagaaggacattgctgctgaggctgttaagaagaagcgccgaaccactaagaagccctactcgagatctatagttggtgctactttggaagtcatacagaagaggagagctgagaagcctgaggtccgtgatgcagctcgtgaagctgctctacgtgaaatcaaggagagaatcaagaaaaccaaggatgaaaagaaggcgaagaaagcagagtcgatggcaaagacacagaagacacaaaccaagggtgggcctaagggcgctggacctaagggccctaagcttggtggcggcggtggaaagcgatga

SEQ ID NO: 3626 - protein, 163 aa, Populus trichocarpa
MVLKTELCRFSGAKIYPGKGIRFIRSDSQVFLFANSKCKRYFHNRLKPSKLTWTAMYRKQHKKDIAAEAVKKKRRTTKKPYSRSIVGATLEVIQKRRAEKPEVRDAAREAALREIKERIKKTKDEKKAKKAESMAKTQKTQTKGGPKGAGPKGPKLGGGGGKR

SEQ ID NO: 3627 - DNA, 492 bp, Populus trichocarpa
  CDS (1)..(492)
atggttctcaagactgaactctgccgcttcagtggggcgaagatctatcctggcaagggtatcagatttattcgctcagattcccaggtcttcctctttgccaattctaaatgcaagaggtacttccacaacaggctgaagccctcaaagctaacctggacagctatgtacaggaagcagcataaaaaggacattgctgcagaaactattaagaagaggcgtcgcgccacgaaaaaaccttactcaaggtccattgtaggggctactttggaggtcatacagaagaagcgaactgagaaacctgaagttcgtgatgctgcaagggaggctgcactccgtgaaattaaggagaggattaagaaaacaaaggatgagaagagagccaagaaggctgaggtaacagccaaggtacaaaagagcagcaaaggtagcgtgccaaagggtgctgcaccaaagggccccaagcttggcgggggtggaggaaagcggtga

SEQ ID NO: 3628 - protein, 163 aa, Populus trichocarpa
MVLKTELCRFSGAKIYPGKGIRFIRSDSQVFLFANSKCKRYFHNRLKPSKLTWTAMYRKQHKKDIAAETIKKRRRATKKPYSRSIVGATLEVIQKKRTEKPEVRDAAREAALREIKERIKKTKDEKRAKKAEVTAKVQKSSKGSVPKGAAPKGPKLGGGGGKR

SEQ ID NO: 3629 - DNA, 492 bp, Populus trichocarpa
  CDS (1)..(492)
atggttctcaagactgaactctgccgcttcagtggggcgaagatataccccggcaagggtatcagatttattcgctcagattcccaggttttcctctttgctaattctaaatgcaagaggtacttccacaacaggctgaagccctcaaagctaacttggacagctatgtacaggaagcagcacaagaaggacattgctgctgaaactattaagaagaggcgtcgcactacaaaaaaaccttactcaaggtccattgtaggtgctactttggaggtcatacagaagaagcgaactgagaaacctgaagtccgtgatgctgcaagagaggctgcactccgtgaaattaaggaaaggattaagaaaacaaaggatgagaaaaaagccaagaaggctgaggtaatggccaaggcacaaaagagcagcaaaggtagcctgccaaagggtgctgcaccaaagggccccaagctcggcgggggtggaggaaagcgttga

SEQ ID NO: 3630 - protein, 163 aa, Populus trichocarpa
MVLKTELCRFSGAKIYPGKGIRFIRSDSQVFLFANSKCKRYFHNRLKPSKLTWTAMYRKQHKKDIAAETIKKRRRTTKKPYSRSIVGATLEVIQKKRTEKPEVRDAAREAALREIKERIKKTKDEKKAKKAEVMAKAQKSSKGSLPKGAAPKGPKLGGGGGKR

SEQ ID NO: 3631 - DNA, 480 bp, Aspergillus flavus NRRL3357
  CDS (1)..(480)
atgcgtacctacgacgattctttcagcggtcagaagatctaccctggaaagggtaagctgtacgtccgtggcgacagcaagatcttccgcttccagaatggaaagtccgagtccctcttcctccagcgcaagaacccccgccgcatctcctggactgtcctctaccgtcgccagcacaagaagggtatctctgaagaagtcgctaagaagcgtacccgccgtgccgtcaagtcccagcgtgctatcgttggtgcttccctcgacgtgatcaaggagcgccgcaaccagcgccctgaggcccgtgctgctgctcgccagcaggccatcaaggacgccaaggagaagaaggccgcttccgagaaggctaagaaggccgagaaggccaagaacgctgccgccggcaagggtaccgcccagcgcatccagagcaagcagggtgctaagggctctgcccccaaggttgccgccaagtctcgttaa

SEQ ID NO: 3632 - protein, 159 aa, Aspergillus flavus NRRL3357
MRTYDDSFSGQKIYPGKGKLYVRGDSKIFRFQNGKSESLFLQRKNPRRISWTVLYRRQHKKGISEEVAKKRTRRAVKSQRAIVGASLDVIKERRNQRPEARAAARQQAIKDAKEKKAASEKAKKAEKAKNAAAGKGTAQRIQSKQGAKGSAPKVAAKSR

SEQ ID NO: 3633 - DNA, 477 bp, Magnaporthe grisea 70-15
  CDS (1)..(477)
atgcggacgtacgacgacactttctccggccagaggatctaccccggcaagggtaagctctatgtccgtggcgacagcaagatcttccgcttccagaacggaaagtccgagtcccttttcctgcagcgcaagaaccctcgccgcatcgcatggaccgttctgtaccgccgggcgcaccgcaagggtatctctgaggaggtcgccaagaagcgtacccgcaggaccgtcaagtcgcagcgtgccatcgttggtgcttcgctcgatgtgattaaggagcgcaggacgatgcggcctgaggcccgcagcgccgccagggctgctgccatcaaggagagcaaggcaaagaaggctgaggctgagaaggccaagaaggccgagaaggcaaaggttgctggcggcaagggccagaccggtcgtctgacgagcaagcagggcgccaagggtgcgcagcagaaggttgccgccaacactcgttaa

SEQ ID NO: 3634 - protein, 158 aa, Magnaporthe grisea 70-15
MRTYDDTFSGQRIYPGKGKLYVRGDSKIFRFQNGKSESLFLQRKNPRRIAWTVLYRRAHRKGISEEVAKKRTRRTVKSQRAIVGASLDVIKERRTMRPEARSAARAAAIKESKAKKAEAEKAKKAEKAKVAGGKGQTGRLTSKQGAKGAQQKVAANTR

SEQ ID NO: 3635 - DNA, 483 bp, Gibberella zeae PH-1
  CDS (1)..(483)
atgcgaacctacgaggacaccttctccggcgcgagaatctaccctggcaagggtaagctctacgtccgtggcgacagcaagatcttccgattccagaacggcaagtcggagtctctcttccttcaaaggaagaacccccgccgtatcgcatggaccgtcctctaccgccgacagcaccgcaagggtatctctgaggaggttgccaagaagcgaacccgccgcactgtcaaggctcagcgtggtatcgttggtgcttctcttgacgtgatcaaggagaagcgcaacatccgacccgaggcccgctccgctgcccgcgcccaggccatcaaggagagcaaggagaagaagcaggccgaggctgctaccaagaagtccgagaaggctaagctcgctgcccaggcctccaagggccaggctgtccgacaggtcagcaagcagggtgccaagggctctgctcccaaggtccaggccaagacccgttaa

SEQ ID NO: 3636 - protein, 160 aa, Gibberella zeae PH-1
MRTYEDTFSGARIYPGKGKLYVRGDSKIFRFQNGKSESLFLQRKNPRRIAWTVLYRRQHRKGISEEVAKKRTRRTVKAQRGIVGASLDVIKEKRNIRPEARSAARAQAIKESKEKKQAEAATKKSEKAKLAAQASKGQAVRQVSKQGAKGSAPKVQAKTR

SEQ ID NO: 3637 - DNA, 468 bp, Candida glabrata CBS 138
  CDS (1)..(468)
atgaaggttgaaatcgactccttttctggtgccaagatctacccaggtagaggtactctatttgtccgtggtgactccaagatcttcagattccaaaactctaagtctgcttctttgttcaagcaaagaaagaacccaagaagagttgcttggactgtcttgtacagaagacaccacaagaagggtatcactgaagaagtcgccaagaagagatccagaaagaccgtcaaggctcaaagagctatcgtcggtgcttctttggaattgatcaaggaaagaagatctttgaagccagaagttagaaaggctaagagagatgacaaggctaaggctgacaaggaaaagaagaaggctgacaaggctgccagaaaggctgaaaaggctaagctagctgctgctcaaggctccaaggtctccaagcaacaagctaagggtgctttccaaaaggttgctgccacctcccgttaa

SEQ ID NO: 3638 - protein, 155 aa, Candida glabrata CBS 138
MKVEIDSFSGAKIYPGRGTLFVRGDSKIFRFQNSKSASLFKQRKNPRRVAWTVLYRRHHKKGITEEVAKKRSRKTVKAQRAIVGASLELIKERRSLKPEVRKAKRDDKAKADKEKKKADKAARKAEKAKLAAAQGSKVSKQQAKGAFQKVAATSR

SEQ ID NO: 3639 - DNA, 468 bp, Kluyveromyces lactis NRRL Y-1140
  CDS (1)..(468)
atgaaggtcgaaattgattccttttccggtgctaagatttacccaggtagaggtaccttgtttgtccgtggtgactccaagatcttcagattccaatcttccaagtccgcttctttgttccaccaaagaaagaacccaagaagaattgcttggactgtcttgtacagaagacaccacaagaagggtatcactgaagaagttgccagaaagagaactagaaagtccgtcaaggctcaaagagctgttgtcggtgcttctttggaattgatcaaggaaagaagatctttgaagccagaagttagaaaggcccaaagagacgaaaagaagaaggctgacaaggaaaagaagaaggctgacaaggctgcaagaaagtccgaaaaggctaagttggctgctgctcaaggttctaaggtctctaagcaacaagctaagggtgccttccaaaaggttgctgctacttcccgttaa

SEQ ID NO: 3640 - protein, 155 aa, Kluyveromyces lactis NRRL Y-1140
MKVEIDSFSGAKIYPGRGTLFVRGDSKIFRFQSSKSASLFHQRKNPRRIAWTVLYRRHHKKGITEEVARKRTRKSVKAQRAVVGASLELIKERRSLKPEVRKAQRDEKKKADKEKKKADKAARKSEKAKLAAAQGSKVSKQQAKGAFQKVAATSR

SEQ ID NO: 3641 - DNA, 471 bp, Debaryomyces hansenii CBS767
  CDS (1)..(471): transl_table=12
atgaaggttgaacttgactcattttccggtactaagatctacccaggtagaggtactttattcgttagaggagactctaagattttcagattccaatcatctaagtctgcttctttattccaccaaagaaagaacccaagaagaatctcatggactgttttatacagaagacaacacaagaagggtatttctgaagaaagtgctaagagaagaactagaaagaccgtcaagaaccaaagagctattgtcggtgcttctttagaattgatcaaagaaagaagatcccaaaagccatctgacagaaaggctgccagagacgttaagttagctaaggacaaggaagccaagaaggctgacaaggctgctagaaaggctgaaaaggccaagtctgccgctgctggtgctcaatctaaggtctctaagcaacaatcaaagggtgctttccaaaaagtccacgccacttcccgttaa

SEQ ID NO: 3642 - protein, 156 aa, Debaryomyces hansenii CBS767
MKVELDSFSGTKIYPGRGTLFVRGDSKIFRFQSSKSASLFHQRKNPRRISWTVLYRRQHKKGISEESAKRRTRKTVKNQRAIVGASLELIKERRSQKPSDRKAARDVKLAKDKEAKKADKAARKAEKAKSAAAGAQSKVSKQQSKGAFQKVHATSR

SEQ ID NO: 3643 - DNA, 468 bp, Yarrowia lipolytica CLIB122
  CDS (1)..(468)
atgaaaatcgaactcgactccttttctggcaacaagatctaccccggccgaggtaccctcttcgtccgaggcgactccaagatcttccgattctactcctccaagaccgcttctctgttcaagcagcgaaagaacccccgacgaatcgcctggaccgttctttaccgacgaaagcacaagaagggaatcactgaggaggtttccaagaagcgatcccgaaagtccgtcaaggccgtgcgaggtatcgtcggtgcctctctcgatgtgatcaaggagaagcgaaacgcccgacccgagacccgaaacgccacccgagccaagcacgccgaggctgctaaggagcgaaaggagaaggaggccgagcgacgaaaggccgccaaggctgcccacgttgccgccggaggccccaaggtctccaagctcggtgctaagggctctgctcccaaggtccaggctacttctcgataa

SEQ ID NO: 3644 - protein, 155 aa, Yarrowia lipolytica CLIB122
MKIELDSFSGNKIYPGRGTLFVRGDSKIFRFYSSKTASLFKQRKNPRRIAWTVLYRRKHKKGITEEVSKKRSRKSVKAVRGIVGASLDVIKEKRNARPETRNATRAKHAEAAKERKEKEAERRKAAKAAHVAAGGPKVSKLGAKGSAPKVQATSR

SEQ ID NO: 3645 - DNA, 453 bp, Cryptococcus neoformans var. neoformans JEC21
  CDS (1)..(453)
atgcgtgtcgacaggtgtgacttcaccgggtacaaggtctacccttccaggggaaaggtctacgtccgaggggactccaagaccttccgattcctcagcgccaaggctgagtctctcttccttcaacgaaagaacccccgaaagatcgcttggactcaggtttaccgacggatgcacaagaagggtatcaccgaggaggtcgccaagaagaggtctaggaagaacgtcaaggtccagcgtggtatcgttggtgccgaccttgcttccatcctcgctaagcgaactgctaagcccgaggtccgcgccgctgcccgtcaagccgccatcaccaaggccaagactgagaagcgtgacaaggaggcccgcaaggccgccaacaagcccgcccaggccaacgtccccaaggtttctaagcagagcatgaagggtggcgccggcaagggtggccgttaa

SEQ ID NO: 3646 - protein, 150 aa, Cryptococcus neoformans var. neoformans JEC21
MRVDRCDFTGYKVYPSRGKVYVRGDSKTFRFLSAKAESLFLQRKNPRKIAWTQVYRRMHKKGITEEVAKKRSRKNVKVQRGIVGADLASILAKRTAKPEVRAAARQAAITKAKTEKRDKEARKAANKPAQANVPKVSKQSMKGGAGKGGR

SEQ ID NO: 3647 - DNA, 483 bp, Aspergillus nidulans FGSC A4
  CDS (1)..(483)
atgcgtacctacgacgattctttcagcggtcagaagatctaccctggaaagggtaagctgtacgtccgcggtgacagcaagatcttccgcttccagaatggaaagtccgagtccctcttcctccagcgcaagaaccctcgccggatagcttggactgtcctttaccgtcgccagcacaagaagggtatctctgaggaggttgccaagaagcgtacccgccgtgtcgtcaagtcccagcgtgccatcgtcggtgcttccctcgacgtgatcaaggagcgccgctcccagcgccccgaggcccgtgccgccgcccgccagcaggccatcaaggacgccaaggagaagaaggctgccgctgagtccaagaagaaggctgagaaggctaagaacgccgctgctggtgccaagggtgctgctcagcgcatccagagcaagcagggtgctaagggttctgctcccaaggtcgctgccaagtctcgttaa

SEQ ID NO: 3648 - protein, 160 aa, Aspergillus nidulans FGSC A4
MRTYDDSFSGQKIYPGKGKLYVRGDSKIFRFQNGKSESLFLQRKNPRRIAWTVLYRRQHKKGISEEVAKKRTRRVVKSQRAIVGASLDVIKERRSQRPEARAAARQQAIKDAKEKKAAAESKKKAEKAKNAAAGAKGAAQRIQSKQGAKGSAPKVAAKSR

SEQ ID NO: 3649 - DNA, 468 bp, Candida albicans SC5314
  CDS (1)..(468): transl_table=12
atgaagattgaagttgactccttttcaggttctaaaatctacccaggtagaggtactttatttgtcagaggtgactctaaaattttcagattccaatcctcaaaatctgcttctttattccaacaaagaaagaacccaagaagaatttcttggactgttttgtacagaagacaccacaaaaaaggtatttctgaagaagctgctaaaaagagaaccagaaagaccgtcaagcaccaaagagctattgtcggtgcttctttggaattgatcaaagaaagaagaagtcaaaaaccatctgacagaaaagctgctagagactctaaattggctaaagacaaagaagctaaaaaagctgctaaagctgccagaaaagctgaaaaggctaaggctgttgcttccggtgcttctgttgtttctaaacaacaagctaaaggttctttccaaaaagttaaagctacctcccgttaa

SEQ ID NO: 3650 - protein, 155 aa, Candida albicans SC5314
MKIEVDSFSGSKIYPGRGTLFVRGDSKIFRFQSSKSASLFQQRKNPRRISWTVLYRRHHKKGISEEAAKKRTRKTVKHQRAIVGASLELIKERRSQKPSDRKAARDSKLAKDKEAKKAAKAARKAEKAKAVASGASVVSKQQAKGSFQKVKATSR

SEQ ID NO: 3651 - DNA, 483 bp, Aspergillus fumigatus Af293
  CDS (1)..(483)
atgcgtacctacgacgattctttcagcggtcagaagatctaccctggaaagggtaagctgtacgtccgtggcgacagcaagatcttccgcttccagaatggaaagtccgagtccctgttcctccagcgcaagaaccctcgccggatagcctggactgtcctctaccgccgtcagcacaagaagggtatctctgaagaagttgccaagaagcgcacccgccgtgtcgtcaagcaccagcgtgccatcgtcggtgcctcccttgatgtgatcaaggagcgccgcagcatgcgccctgaggctcgtgccgccgcccgccagcaggctatcaaggaggccaaggagaagaaggccgcttccgagagccgcaagaaggctgagaaggccaagaacgccgccaccgccgccaagggcactgctcagcgcatccagagcaagcagggtgctaagggttctgctcccaaggtcgccgccaagtctcgttaa

SEQ ID NO: 3652 - protein, 160 aa, Aspergillus fumigatus Af293
MRTYDDSFSGQKIYPGKGKLYVRGDSKIFRFQNGKSESLFLQRKNPRRIAWTVLYRRQHKKGISEEVAKKRTRRVVKHQRAIVGASLDVIKERRSMRPEARAAARQQAIKEAKEKKAASESRKKAEKAKNAATAAKGTAQRIQSKQGAKGSAPKVAAKSR

SEQ ID NO: 3653 - DNA, 471 bp, Neurospora crassa OR74A
  CDS (1)..(471)
atgagaacgtacgacgataccttctccggccagaggatctaccctggaaagggtaagctgtacgtccgtggcgacagcaagatcttccgtttccagaacggcaagtccgagtcgcttttcctccagcgcaagaacccccgccgcattgcctggactgtcctctaccgccgccagcacaagaagggtatctctgaggaggtcgccaagaagcgctcccgccgtaccgtcaaggcccagcgtgccatcgtcggtgcctccctcgaggtgatcaaggagcgccgctccatgcgccctgaggcccgctccgccgctcgtctcgccgccatcaaggagtccaaggccaagaagcaggagactcaggccgccaagaaggctgagaaggccaagaacgctgccaaccccaaggcccgtgtcacctccaagcagggtgccaagggtgcgcccgtcaaggtcgctgccaagtcccgttaa

SEQ ID NO: 3654 - protein, 156 aa, Neurospora crassa OR74A
MRTYDDTFSGQRIYPGKGKLYVRGDSKIFRFQNGKSESLFLQRKNPRRIAWTVLYRRQHKKGISEEVAKKRSRRTVKAQRAIVGASLEVIKERRSMRPEARSAARLAAIKESKAKKQETQAAKKAEKAKNAANPKARVTSKQGAKGAPVKVAAKSR

SEQ ID NO: 3655 - DNA, 468 bp, Tribolium castaneum
  CDS (1)..(468)
atgaagatcggactttgtgcgtacagtgggtacaaaatataccctggtcatgggaaaaccatggttaaagtcgatggaaagaccttcactttcctcaactcgaagtgcgaacgtgcgcatttaatgaagcgaaacccgcgtaaagttacgtggaccgtcttgtacagacgtaaacataaaaaaggccaggaggaggaagctaccaaaaaacgcacacgaaggactcaaaaattccaacgtgcaattgttggcgcttctctcaatgatattttagccaaaaggaatcagaggcctgaagttaggaaagcacaaagggagcaggcgatcagggccgccaaggagcagaaaaaacaaaccaaaactgcgaaaaaggtgacacagcctgccaaacaagtgaaaagcgttccgaaacaaaaggcggccaagaatgtgcaaaaggccgcgcccagagttggtggaaagcgctaa

SEQ ID NO: 3656 - protein, 155 aa, Tribolium castaneum
MKIGLCAYSGYKIYPGHGKTMVKVDGKTFTFLNSKCERAHLMKRNPRKVTWTVLYRRKHKKGQEEEATKKRTRRTQKFQRAIVGASLNDILAKRNQRPEVRKAQREQAIRAAKEQKKQTKTAKKVTQPAKQVKSVPKQKAAKNVQKAAPRVGGKR

SEQ ID NO: 3657 - DNA, 471 bp, Hydra attenuata
  CDS (1)..(471)
atgaagcttgagctttgcaacttcagcggttacaaaatataccctggccatggaaagcgatatgttagatcagacggcaagcttttcaatttcctaagtaaaaaaagtgaacgctcttttcatatgagaagaaatccacgtaaaatttcatggacagtattatacagaaaaaaacataaaaagggaactcaagaggagctttcaaaaaaaagaaccagacgtactgtaaagttccaaagagccatccaaggagcatcactagaagcaattcttgctaaaagaaacatgaaacctgaattaagagaagttcaaagaaatcaagcaataaaagtcgcaaaagaaaaggctaaagctaaaaaatcagaaaagaaagcagctaagaaagctgctccagttgctaagaaaccaaaggagaaagttgctaagactgtacctaaaggtggacccggtcgtgttggcggaaaaagataa

SEQ ID NO: 3658 - protein, 156 aa, Hydra attenuata
MKLELCNFSGYKIYPGHGKRYVRSDGKLFNFLSKKSERSFHMRRNPRKISWTVLYRKKHKKGTQEELSKKRTRRTVKFQRAIQGASLEAILAKRNMKPELREVQRNQAIKVAKEKAKAKKSEKKAAKKAAPVAKKPKEKVAKTVPKGGPGRVGGKR

SEQ ID NO: 3659 - DNA, 477 bp, Maconellicoccus hirsutus
  CDS (1)..(477)
atgaagatcggtttgtgtgtatacagtgggtacaaaatataccctggccatggcaagaccctggttaaagctgacggaaaagtcctaacttttttgaattctaaatgcgaaagatcgcatttgatgaaaaggaattcccgtaaagttacctggactatgctatacagacgtaagcataagaaaggtcaagaagaagaaacttctaagaaacgtgtgcgtcgtattaatagaggacaaaaagctatcgtcggtgcttccttgaccgaaattttggcaaaaagaaacatgaagcctgaagttcgtaaagctcaacgggatcaagctatcaaaatagcgaaagaacagaaaaaagcgacgaaagcatcgaagaaaccgcctccaccaccacctactaaagcaaagggaaaacaaagcaaagtgaaatcttcgaaattacaatcgaaaggagctgcaccgcgtgtaggcgcaaaacgatag

SEQ ID NO: 3660 - protein, 158 aa, Maconellicoccus hirsutus
MKIGLCVYSGYKIYPGHGKTLVKADGKVLTFLNSKCERSHLMKRNSRKVTWTMLYRRKHKKGQEEETSKKRVRRINRGQKAIVGASLTEILAKRNMKPEVRKAQRDQAIKIAKEQKKATKASKKPPPPPPTKAKGKQSKVKSSKLQSKGAAPRVGAKR

SEQ ID NO: 3661 - DNA, 465 bp, Ornithodoros parkeri
  CDS (1)..(465)
atgaagatcgggctgtgctcgttcagcggttataaaatctaccccggccatgggaaacgaatggtcaaagccgacgggaagactttccacttcctgaacgctaaatgcgaggcatcgcatatgatgcgccgtaacccgcgtaaggtgacctggacggtgttgtaccgtcgcaagcacaagaagggtctggaggaggagacggccaagaagaggactcgacgcacagccaagttccagagggccatcgtcggagcttccctcaacgacatccttgcaaagagaaacatgaagcccgaggtgcgcaaggctcagcgagaacaggccatccgtgctgccaaggagaagcagagggcccagaaagtacagaaaaagaccaccacagccaccgcaccaaaggctgctccaaaacagaaggctgccaagccagtgcaagtaaaggcaccgcgtgtgggtggaaagcgctga

SEQ ID NO: 3662 - protein, 154 aa, Ornithodoros parkeri
MKIGLCSFSGYKIYPGHGKRMVKADGKTFHFLNAKCEASHMMRRNPRKVTWTVLYRRKHKKGLEEETAKKRTRRTAKFQRAIVGASLNDILAKRNMKPEVRKAQREQAIRAAKEKQRAQKVQKKTTTATAPKAAPKQKAAKPVQVKAPRVGGKR

SEQ ID NO: 3663 - DNA, 468 bp, Saccharomyces cerevisiae (strain YJM789)
  CDS (1)..(468)
atgaaggttgaagttgattccttttccggtgctaagatctacccaggtagaggtactttatttgtccgtggtgactccaaaattttcagattccaaaactccaaatctgcttctttgttcaaacaaagaaagaacccaagaagaatcgcttggaccgtcttgttcagaaagcatcacaagaagggtatcaccgaagaagttgctaagaagagatctagaaagaccgttaaggcacaaagaccaatcactggtgcttctttggacttgatcaaggaaagaagatctttgaagccagaagttagaaaagctaacagagaagaaaaattgaaagccaacaaggaaaagaagagagctgaaaaggctgctagaaaggctgaaaaggctaagtccgctggtgtccaaggttccaaggtttccaagcaacaagctaagggtgctttccaaaaggttgccaccacttcccgttaa

SEQ ID NO: 3664 - protein, 155 aa, Saccharomyces cerevisiae (strain YJM789)
MKVEVDSFSGAKIYPGRGTLFVRGDSKIFRFQNSKSASLFKQRKNPRRIAWTVLFRKHHKKGITEEVAKKRSRKTVKAQRPITGASLDLIKERRSLKPEVRKANREEKLKANKEKKRAEKAARKAEKAKSAGVQGSKVSKQQAKGAFQKVATTSR

SEQ ID NO: 3665 - DNA, 459 bp, Sipunculus nudus
  CDS (1)..(459)
atgaagctcgagctgtgttcatacagcgggatcaaaatctatcccggccatgggaaacgaatggtcagaatcgatggcaggtcattcacatttttgaatgcaaaatgcgaggcctcgcacatgatgaagcgcaacccccgtaaaatcagctggactgtgttgtacagacgtaagcacaaaaaggggttgcaggaagaggccaccaagaaaaggtcgagacgtacacaaaagttccagcgtgccatcaccggtgcttctctcagtgacatcatggcaaagcgtaaccagaaacctgaagtcaggaaggcacagcgtgaacaggcaatcagggcagccaaggagaagcaaaaggctaagaatgctctcaaaaaacagggcccgagcaaaccttcacagcccaaggtaaaggcttccaagaaggtcattacagccaaacccagggtcggtggaaagcgataa

SEQ ID NO: 3666 - protein, 152 aa, Sipunculus nudus
MKLELCSYSGIKIYPGHGKRMVRIDGRSFTFLNAKCEASHMMKRNPRKISWTVLYRRKHKKGLQEEATKKRSRRTQKFQRAITGASLSDIMAKRNQKPEVRKAQREQAIRAAKEKQKAKNALKKQGPSKPSQPKVKASKKVITAKPRVGGKR

SEQ ID NO: 3667 - DNA, 459 bp, Arenicola marina
  CDS (1)..(459)
atgaagatcgagctgtgctcgttcagcggttacaaaatctaccctggccatggcaagaaagtcgtcaagagtgacggcagggccttccagttcatcactggcaagtgcgagaaatcgcatgccatgaagaggaacccgcgtaagatcaactggactgtgctgtaccgtcgcaagcacaagaagggtcagcaggaggaggtgaccaagaagcgcacgcgccgtacgaccaagttccagcgggccatcactggggccaccctctccgacatcatggccaagaggaaccagaagccggaggtcaggaaggcacagcgcgagcaggcaatcagggctgcgaaggagaagaataaggccaaggaggtcaccaagaagaaggcgcccgcgcccaaggcagctaagggaggcaagtcagccaaggtcatgccctctgccaagcctcgtgttggtggcaagcgctaa

SEQ ID NO: 3668 - protein, 152 aa, Arenicola marina
MKIELCSFSGYKIYPGHGKKVVKSDGRAFQFITGKCEKSHAMKRNPRKINWTVLYRRKHKKGQQEEVTKKRTRRTTKFQRAITGATLSDIMAKRNQKPEVRKAQREQAIRAAKEKNKAKEVTKKKAPAPKAAKGGKSAKVMPSAKPRVGGKR

SEQ ID NO: 3669 - DNA, 471 bp, Lycosa singoriensis
  CDS (1)..(471)
atgaagattgaactgtgtgcgtacagtgggtataaaatttaccctggtcatggaaaaaagatgatcaaaacagacggaaaagttttccagtttttaaatggtaagtgtgaagcctctcacatgatgaagaggaatccaaggaagataacatggacagtgttgtatagaaggaaacataaaaaaggaattgaagaagaaaccagcaaaaagaggacccgtcgtacggcaaaattccagagagctattgttggtgctagtttaagtgacattatggccaagagaaacatgaaacctgaagtgagaaaagcacaaagagatcaagctatcagggctgcaaaagaaaagcaaagagctgccaaggctcaaaagaaagcaactgctgcaccaccaaaggttgccaaagttgctcaaaagcagaaggctgcaaaacctgtccaaaccaaggctcctcgtgttggtggaaagcgataa

SEQ ID NO: 3670 - protein, 156 aa, Lycosa singoriensis
MKIELCAYSGYKIYPGHGKKMIKTDGKVFQFLNGKCEASHMMKRNPRKITWTVLYRRKHKKGIEEETSKKRTRRTAKFQRAIVGASLSDIMAKRNMKPEVRKAQRDQAIRAAKEKQRAAKAQKKATAAPPKVAKVAQKQKAAKPVQTKAPRVGGKR

SEQ ID NO: 3671 - DNA, 471 bp, Flustra foliacea
  CDS (1)..(471)
atgaagatcgaattgtgctcgtttagtgggtataaaatctacccaggccatggcagtcgatttatccgtgtcgatggcaagtcgttcacgtttcttgacaagaagtccaagcggttgcacctaactaaacgaaacccacgaagggtcagttggactgttttgtatagaaggaaacacaagaagggtcaggtcgaggaaatcgccaaaaagaagaccagaaagacacagaagttccagaaggcagtagctggcgccactatcaatgaaatcatggccaagaggaaccagaaacctgaagttagaaaagctcaacgtgaacaagctatcagagcttacaaagagaaacagaaagcaaaagcagccaccaagaagccaaccacagctccaacaaaatctaaatctaagggaggaaaggcacccaaaactgctgcgggaggaaaagcccctggacgtgttggtggaaagagataa

SEQ ID NO: 3672 - protein, 156 aa, Flustra foliacea
MKIELCSFSGYKIYPGHGSRFIRVDGKSFTFLDKKSKRLHLTKRNPRRVSWTVLYRRKHKKGQVEEIAKKKTRKTQKFQKAVAGATINEIMAKRNQKPEVRKAQREQAIRAYKEKQKAKAATKKPTTAPTKSKSKGGKAPKTAAGGKAPGRVGGKR

SEQ ID NO: 3673 - DNA, 462 bp, Lineus viridis
  CDS (1)..(462)
atgaagatcgaattgtgcgcgttcagcgggtacaaagtctaccccggccatgggaagaagttggtcaagattgacggaaaggtttaccaattcgtcagtgccaaagctgaggcatcgttcttgatgaagcgtaaccctcgtaagattagctggactgtcctttaccgtcgcaagcacaagaagggacaacaggaagagcagtccaagaagaggacgaggcgaaccaccaagttccagcgagccatcactggcgccaccctcatggacatcatggccaagaggaatcagaagccggaggttaggaaagctcagagggaacaggctatcagggctgccaaagaaaaaacgaagacaaagaaggcagtttcccgatcagtaaagcccgctgctaccaagacaaaggcccagaaagctgcccggccgatgcagagtaaagcacccaaagtaggaggaaagcgataa

SEQ ID NO: 3674 - protein, 153 aa, Lineus viridis
MKIELCAFSGYKVYPGHGKKLVKIDGKVYQFVSAKAEASFLMKRNPRKISWTVLYRRKHKKGQQEEQSKKRTRRTTKFQRAITGATLMDIMAKRNQKPEVRKAQREQAIRAAKEKTKTKKAVSRSVKPAATKTKAQKAARPMQSKAPKVGGKR

SEQ ID NO: 3675 - DNA, 468 bp, Phoronis muelleri
  CDS (1)..(468)
atgttgaaggttgaactgtgtaccttcagcgggtacaaaatttaccctggtcatgggaaaagaatctgtaaagttgatggaaggaccttccagttcctcagtggcaaatgtgagaagtccttctccatgaagcgcaacccccgtaaaattaactggacagtcttgtaccgtcgtaaacacaagaagggtatctccgaggaggtttccaagaagaggacacgccgcacgacaaagttccagcgtgccatcactggcgtctcccttggcgacatcatcgccaagaggaaccagaagcctgaagtgaggaaagctcagcgtgaccaggccatcagagcggccaaggaaaaacagaaggtcaaggaatcgcaaaagaagaccctcaaggcgtcgatgcccaaagcacagaagtcgcagaagacatcaaagcccatgacgaaggccgcaccaagagtagggggaaagagataa

SEQ ID NO: 3676 - protein, 155 aa, Phoronis muelleri
MLKVELCTFSGYKIYPGHGKRICKVDGRTFQFLSGKCEKSFSMKRNPRKINWTVLYRRKHKKGISEEVSKKRTRRTTKFQRAITGVSLGDIIAKRNQKPEVRKAQRDQAIRAAKEKQKVKESQKKTLKASMPKAQKSQKTSKPMTKAAPRVGGKR

SEQ ID NO: 3677 - DNA, 471 bp, Schistosoma japonicum
  CDS (1)..(471)
atgaagttggaagtgtgctcctacagtggtttcaaagtatatccaggccatggcaaacgagtcatccgtgttgacggccgcagtttctacttcataaataaaaagagcgagcgatctcattacttgaaacgcaatccacgtgagatcagctggactgtgctttaccgaaggaagtacaaaaaaggtatgagtgaagagcagacaaaaaaacgaactaagcgtgtaactaaaactgctcgaggtattgcaggagcaagccttgctgaaataatggctaaacgtaatcagaagccagaagttcgtaaggcaatgcgtgaccaggctatacgagcagcaaaggagaagcagaaacaaaaagaattggagaagaaggcaaaaaaagttgaaaagaaaaagcctacattggctccaaaacagaaggctgcgaaaatcactcagaagccggctcctagagttggtggaaagcgttaa

SEQ ID NO: 3678 - protein, 156 aa, Schistosoma japonicum
MKLEVCSYSGFKVYPGHGKRVIRVDGRSFYFINKKSERSHYLKRNPREISWTVLYRRKYKKGMSEEQTKKRTKRVTKTARGIAGASLAEIMAKRNQKPEVRKAMRDQAIRAAKEKQKQKELEKKAKKVEKKKPTLAPKQKAAKITQKPAPRVGGKR

SEQ ID NO: 3679 - DNA, 492 bp, Elaeis guineensis var. tenera
  CDS (1)..(492)
atggttctgaagacagaactttgccgtttcagtggtgctaagatataccctggaaagggcatcagatttgttcgatctgactcccaggtctttctttttgccaactcaaaatgcaagcgctacttccacaaccgtctgaagcctgcgaagcttacctggacagctatgtacaggaagcaacacaagaaggaccttcatgctgaaactatcaaaaagagacgtcgtaccacgaagaagccatattcaagatcaattgttggtgctaccctggaagttattcagaagaggagaactgagaaacccgaggttcgcgatgctgccagagaagcagctcttcgtgagattaaggagcgtataaagaagaccaaggatgaaaagaaagctaagaaggcagaactgatggctaaaacccagaagatccagacaaagggcggtagcatgggtaaggctcctaaaggcccaaagcttggtggtggtggtgggaagcgttga

SEQ ID NO: 3680 - protein, 163 aa, Elaeis guineensis var. tenera
MVLKTELCRFSGAKIYPGKGIRFVRSDSQVFLFANSKCKRYFHNRLKPAKLTWTAMYRKQHKKDLHAETIKKRRRTTKKPYSRSIVGATLEVIQKRRTEKPEVRDAAREAALREIKERIKKTKDEKKAKKAELMAKTQKIQTKGGSMGKAPKGPKLGGGGGKR

SEQ ID NO: 3681 - DNA, 492 bp, Elaeis guineensis var. tenera
  CDS (1)..(492)
atggttctcaagactgaactttgtcgcttcagcggtgccaagatataccctggtaagggtatcagattcgtccgctcagattcccaggttttccttttcgccaattcaaaatgcaagaggtacttccacaaccggctcaagccttcaaagcttacctggactgcaatgtacaggaagcagcataagaaggatatccatgctgaagctgtgaagaagaggcgccgaactaccaagaaaccttactctagatcaattgttggcgccactttggaggtgattcagaagagaagaactgagaaaccagaagtacgggatgctgccagggaagctgccttacgtgaaatcaaggaaagaattaagaaaaccaaggatgagaagaaggcgaagaaggcagaaacattggcaaagacacaaaaaactcagactaagagcatgcccaagggaccagcatcgaaaggccctaaacttggaggtggtggtggaaagcgctga

SEQ ID NO: 3682 - protein, 163 aa, Elaeis guineensis var. tenera
MVLKTELCRFSGAKIYPGKGIRFVRSDSQVFLFANSKCKRYFHNRLKPSKLTWTAMYRKQHKKDIHAEAVKKRRRTTKKPYSRSIVGATLEVIQKRRTEKPEVRDAAREAALREIKERIKKTKDEKKAKKAETLAKTQKTQTKSMPKGPASKGPKLGGGGGKR

SEQ ID NO: 3683 - DNA, 486 bp, Zea mays
  CDS (1)..(486)
atggtgctgaagacagaactctgccgcttcagcggccagaagatttatcctgggaaaggcatccgatttatccgtgctgattctcaggttttcctttttgccaactcaaaatgcaagcgctacttccacaaccgcctgaagcctgcaaagcttacctggacagcaatgtacaggaagcagcacaagaaggatatccatgctgaggctgtcaagaagaggcgccgcgccaccaagaagccatactcgaggtccattgtgggtgcttccctagaggtgatccagaagaagagggctgagaagcccgaggtccgcgatgctgctagagaagctgctcttcgtgagatcaaggagcgcatcaagaagaccaaggatgagaagaaggcgaaaaaggctgaggtgaccaagtcccagaaggcacagacgaagggagcggtccagaagggttccaagggccccaagttgggtggtggcggtggcaagcgctga

SEQ ID NO: 3684 - protein, 161 aa, Zea mays
MVLKTELCRFSGQKIYPGKGIRFIRADSQVFLFANSKCKRYFHNRLKPAKLTWTAMYRKQHKKDIHAEAVKKRRRATKKPYSRSIVGASLEVIQKKRAEKPEVRDAAREAALREIKERIKKTKDEKKAKKAEVTKSQKAQTKGAVQKGSKGPKLGGGGGKR

SEQ ID NO: 3685 - DNA, 468 bp, Loxostege sticticalis (beet webworm)
  CDS (1)..(468)
atgaagatcggtctttgcgcctacagtggatacaagatctatcctggccatggaaaaaccatggttaaggtggatggcaagagtttcacattcttgaactcaaaatgtgaagctgcccatctcatgaggaggaatccccgtaaagtaacatggactgtactctacaggcgcaagttcaagaagggccaagaggaagaacaggccaaaaagcgtacaaggaggacccagaagtaccagcgagctattgttggtgcctctctcagtgacatcatggccaaaaggaacatgaagcctgaagtacgcaaggctcaaagagatcaggctatcaaggccgccaaggagcaaaagaaatcaactaaggctgccaagaaagctgcagctcctcctcccaagagcaaaactgcacctaaagctaaggctgctaaagtcagtcagaagtctgcaccaagagttggaggaaaacgataa

SEQ ID NO: 3686 - protein, 155 aa, Loxostege sticticalis (beet webworm)
MKIGLCAYSGYKIYPGHGKTMVKVDGKSFTFLNSKCEAAHLMRRNPRKVTWTVLYRRKFKKGQEEEQAKKRTRRTQKYQRAIVGASLSDIMAKRNMKPEVRKAQRDQAIKAAKEQKKSTKAAKKAAAPPPKSKTAPKAKAAKVSQKSAPRVGGKR

SEQ ID NO: 3687 - DNA, 462 bp, Anopheles darlingi
  CDS (1)..(462)
atgaagatcggactgtgtgcattcagtgggttcaaaatctacccaggtagtggcaagactctggtgaaggctgacggtaagacacatgtcttcctcaacaaaaaatgtgagcgctcatttctcatgaagcgtaatccgcgcaaggtgaagtggacggtgctgtaccgccgcaagcacaagaagggcatcgtggaggaagcgtcgaagaagcgtacgcgccgcacgcagaaattccaacgtgctattgtcggtgcttctatcacggacatcatggctaagcgaaacatgaagccagaagtccgtaaggcacagcgtgaacaggccatcaaggtcgccaaggacgccaagaaggcgaaacaggtggagaagaaggttaagacgcagccgaacccgaagcaacagaaaaccaaggctaccaaggtatcgcaaaaggctgcgccgcgcgtcgggggcaagcgatag

SEQ ID NO: 3688 - protein, 153 aa, Anopheles darlingi
MKIGLCAFSGFKIYPGSGKTLVKADGKTHVFLNKKCERSFLMKRNPRKVKWTVLYRRKHKKGIVEEASKKRTRRTQKFQRAIVGASITDIMAKRNMKPEVRKAQREQAIKVAKDAKKAKQVEKKVKTQPNPKQQKTKATKVSQKAAPRVGGKR

SEQ ID NO: 3689 - DNA, 477 bp, Penicillium chrysogenum (strain ATCC 28089 / DSM 1075 / Wisconsin 54-1255)
  CDS (1)..(477)
atgcgtacttacgacgacgccttcagcggccagaagatctaccctggcaagggcaagctgttcgtccgtggcgacagcaagatcttccgcttccagcgtggaaagtccgagtcccttttccttcagcgcaagaacccccgccgcatcgcatggaccgttctcttccgtcgtcagcaccgcaagggtatctctgaggaggtcgccaagaagcgcacccgccgtgttgtcaagaaccagcgtgccatcgttggtgcttccctcgatgtgatcaaggagcgccgctcccagcgccccgaggcccgtgaggctgctcgcaagcaggccatcaaggacgccaaggagaagaaggctgcttccgccagcgccaagaaggctgagaaggccaagatcgccgcctccaagggcggtgcccagcgcatccagagcaagcagggtgctaagggctctgctcccaaggtcgccgccaagtcccgctaa

SEQ ID NO: 3690 - protein, 158 aa, Penicillium chrysogenum (strain ATCC 28089 / DSM 1075 / Wisconsin 54-1255)
MRTYDDAFSGQKIYPGKGKLFVRGDSKIFRFQRGKSESLFLQRKNPRRIAWTVLFRRQHRKGISEEVAKKRTRRVVKNQRAIVGASLDVIKERRSQRPEAREAARKQAIKDAKEKKAASASAKKAEKAKIAASKGGAQRIQSKQGAKGSAPKVAAKSR

SEQ ID NO: 3691 - DNA, 480 bp, Penicillium marneffei (strain ATCC 18224 / CBS 334.59 / QM 7333)
  CDS (1)..(480)
atgcgtacctacgacgactctttctccggccagaagatctaccctggaaagggtaagctgtacatccgcggcgacagcaagatcttccgcttccagaatggaaagtccgagtccctcttcctccagcgcaagaaccctcgccgcatttcctggaccatcctttaccgtcgccaacaccgcaagggtatctctgaagaagttgccaagaagcgtacccgtcgtgccgttaagtcccaacgtggtattgtcggtgcttcccttgatgtgatcaaggaacgacgaagccagcgccccgaggcccgtgccgccgctcgccaacaggctatcaaggacgccaaggagaagaaggctgcttccgagagcaagaagaaggctgagaaggccaagtccgctgccagcgccgctgccggcaaggcccgtatccagagcaagcagggtgccaagggtgctcctatcaaggtccaggccaagtcccgataa

SEQ ID NO: 3692 - protein, 159 aa, Penicillium marneffei (strain ATCC 18224 / CBS 334.59 / QM 7333)
MRTYDDSFSGQKIYPGKGKLYIRGDSKIFRFQNGKSESLFLQRKNPRRISWTILYRRQHRKGISEEVAKKRTRRAVKSQRGIVGASLDVIKERRSQRPEARAAARQQAIKDAKEKKAASESKKKAEKAKSAASAAAGKARIQSKQGAKGAPIKVQAKSR

SEQ ID NO: 3693 - DNA, 486 bp, Zea mays
  CDS (1)..(486)
atggtgctgaagacagaactctgccgcttcagcggccagaagatttatcctgggaaaggcatccgatttatccgtgctgattctcaggttttcctttttgccaactcaaaatgcaagcgctacttccacaaccgcctgaagcctgcaaagcttacctggacagcaatgtacaggaagcagcacaagaaggatatccatgctgaggctgtcaagaagaggcgccgcgccaacaagaagccatactcgaggtccattgtgggtgcttccctagaggtgatccagaagaagagggctgagaagcccgaggtccgcgatgctgctagagaagctgctcttcgcgagatcaaggagcgcatcaagaagaccaaggatgagaagaaggcgaagaaggcggaggtgaccaagtcccagaaggcgcagacgaagggcgcggtccagaagggttccaagggccccaagttgggtggcggcggtggcaagcgctga

SEQ ID NO: 3694 - protein, 161 aa, Zea mays
MVLKTELCRFSGQKIYPGKGIRFIRADSQVFLFANSKCKRYFHNRLKPAKLTWTAMYRKQHKKDIHAEAVKKRRRANKKPYSRSIVGASLEVIQKKRAEKPEVRDAAREAALREIKERIKKTKDEKKAKKAEVTKSQKAQTKGAVQKGSKGPKLGGGGGKR

SEQ ID NO: 3695 - DNA, 462 bp, Medicago truncatula
  CDS (1)..(462)
atggttctcaagactgaactctgcagattcagtggtgcaaagatttacccaggaagagggatcagatttattcgtagtgattctcaggttttcctctttgtgaactcaaaatgtaagaggtatttccacaacaagttgaagccttcaaaactcacatggactgccatgtacagaaagcaacacaagaaggacattgctcaagaagcggtgaagaagaggcgccgtgccaccaagaagccatactccaggtccattgttggtactacacttgaagtcattcaaaaaaaaagaaccgagaagcccgaggttcgagatgcagctagggaagctgctcttcgtgaaatcaaggaaaggatagagaaaaccaaggatgaaaagaaagccaagaaagccgaggtagcatctaaggcacaaaagtcggggaaaggaatttcagaagggtgctatgcccaagggtcctaa

SEQ ID NO: 3696 - protein, 153 aa, Medicago truncatula
MVLKTELCRFSGAKIYPGRGIRFIRSDSQVFLFVNSKCKRYFHNKLKPSKLTWTAMYRKQHKKDIAQEAVKKRRRATKKPYSRSIVGTTLEVIQKKRTEKPEVRDAAREAALREIKERIEKTKDEKKAKKAEVASKAQKSGKGISEGCYAQGS

SEQ ID NO: 3697 - DNA, 492 bp, Medicago truncatula
  CDS (1)..(492)
atggttctcaaaactgaactctgtcgattcagtggcgcaaagatttacccaggaagagggatcagatttattcgtagtgattctcaggttttcctctttgtgaactcaaaatgtaagaggtatttccacaacaagttgaagccttcaaagctcatatggactgccatgtacagaaagcagcacaagaaggacattgctcaagaagcggtgaagaagaggcgccgtgccaccaagaagccatactccaggtccattgttggtgctacacttgaagtcattcaaaaaaaaagaaccgagaagcccgaggttcgagatgctgctagggaagctgctcttcgtgaaatcaaggagaggataaagaaaaccaaggatgagaaaaaagccaagaaagccgaagtagcatctaaggcacaaaagtcagggaaaggcaatgttcagaagggtgctatgcccaagggtcctaaaatgggcggtggtggtgggaaacgttaa

SEQ ID NO: 3698 - protein, 163 aa, Medicago truncatula
MVLKTELCRFSGAKIYPGRGIRFIRSDSQVFLFVNSKCKRYFHNKLKPSKLIWTAMYRKQHKKDIAQEAVKKRRRATKKPYSRSIVGATLEVIQKKRTEKPEVRDAAREAALREIKERIKKTKDEKKAKKAEVASKAQKSGKGNVQKGAMPKGPKMGGGGGKR

SEQ ID NO: 3699 - DNA, 465 bp, Ixodes scapularis
  CDS (1)..(465)
atgaagatcggattgtgttcgttcagtggctacaaaatttatcccggccatgggaagcggatggtcaagacagacgggaagaccttccacttcctgaatgccaagtgcgaggcatctcacatgatgaagcgcaacccacgcaaggtgacgtggacggtgctgtaccgccgcaagcacaagaagggcctggaggaggagacagccaagcggcgcaccaagcgcacggccaagttccagagggccatcgtgggcgccagcctcaacgacatcatggcgaggaggaacatgaagcccgaggtgcgcaaggcacagcgggagcaggccatccgggcagccaaggaaaagcagagggcacagaaggcccagaagaagaccaccgcaactccgctgacaaaggtggctcagaagcagaaggccagcaaaccgatccagatgaaggccccccgagtcggaggcaagcgctga

SEQ ID NO: 3700 - protein, 154 aa, Ixodes scapularis
MKIGLCSFSGYKIYPGHGKRMVKTDGKTFHFLNAKCEASHMMKRNPRKVTWTVLYRRKHKKGLEEETAKRRTKRTAKFQRAIVGASLNDIMARRNMKPEVRKAQREQAIRAAKEKQRAQKAQKKTTATPLTKVAQKQKASKPIQMKAPRVGGKR

SEQ ID NO: 3701 - DNA, 495 bp, Picea sitchensis
  CDS (1)..(495)
atggttttgaagacagaaatttgccgcttcagcggtgcaaagatctaccctggcaagggtatcaggttcatccgatccgattctcaggtattcttgtttgccaattccaaatgtaagaggtatttccacaatcgcctgaagccatccaagcttacctggactgcaatgtaccggaaacaacacaagaaggacattcatgctgagcaagtaaagaagaggagacgtacaacaaacaagccttattctaggtctattgtcggtgcttctttggaagttatccagaaaaagagaaccgagaagacggaagttagagctgctgctcgtgaagctgctctaaaggaaatcaaagaaagaataaagaagactaaagacgagaagaaagcgaaaaaggccgagactgttgcaaagggtccgaaagcacaaacaaagggtaacataccaaagggtaacatttccaaaggtcccaaacttgggggtggaggtggaaaacgatga

SEQ ID NO: 3702 - protein, 164 aa, Picea sitchensis
MVLKTEICRFSGAKIYPGKGIRFIRSDSQVFLFANSKCKRYFHNRLKPSKLTWTAMYRKQHKKDIHAEQVKKRRRTTNKPYSRSIVGASLEVIQKKRTEKTEVRAAAREAALKEIKERIKKTKDEKKAKKAETVAKGPKAQTKGNIPKGNISKGPKLGGGGGKR

SEQ ID NO: 3703 - DNA, 480 bp, Talaromyces stipitatus (strain ATCC 10500 / CBS 375.48 / QM 6759 / NRRL 1006)
  CDS (1)..(480)
atgcgtacctacgacgacactttctccggccagaagatctaccctggaaagggtaagctgtacgtccgtggcgacagcaagatcttccgcttccaaaatggaaagtccgagtccctcttcctccagcgcaagaaccctcgccggatatcctggaccgtactctaccgtcgtcaacaccgcaagggtatctctgaagaagttgccaagaagcgttctcgccgtgtcgtcaagtcccagcgtgctatcgtcggtgcttcccttgacgtgatcaaggagcgacgaagccagcgccctgaggcccgtgcggccgctcgccaacaagccatcaaggacgccaaggagaagaaggctgcttctgagagcaagaagaaggctgagaaggccaagtctgctgctagtgcctctgccggcaaggctcgtatccaaagcaagcagggtgctaagggtgctcctatcaaggttcaggccaagtctcgttaa

SEQ ID NO: 3704 - protein, 159 aa, Talaromyces stipitatus (strain ATCC 10500 / CBS 375.48 / QM 6759 / NRRL 1006)
MRTYDDTFSGQKIYPGKGKLYVRGDSKIFRFQNGKSESLFLQRKNPRRISWTVLYRRQHRKGISEEVAKKRSRRVVKSQRAIVGASLDVIKERRSQRPEARAAARQQAIKDAKEKKAASESKKKAEKAKSAASASAGKARIQSKQGAKGAPIKVQAKSR

SEQ ID NO: 3705 - DNA, 492 bp, Ricinus communis
  CDS (1)..(492)
atggttctcaagactgagctttgccgattcagcggtgctaagatttaccctggcaagggtatcagatttattcgatctgattctcaggttttcctcttcgccaattcaaaatgcaagaggtacttccacaaccgtctgaagccttcaaagcttacctggactgccatgtataggaaacaacacaagaaggatattgctgctgaggctgttaagaagaagcgcagaactaccaagaagccatactcaaggtctatagtcggtgctaccttggaggttatccagaagaggagaactgagaagccagaggtccgggatgctgctcgtgaagctgctttacgtgaaatcaaggagaggatcaagaaaaccaaggatgaaaagaaggcaaagaaagctgaattggccgccaagacaaagacccaaagcaagagtaatgtgtctagaggtgctgcaccgaagggccccaagcttggtggtggcggtggaaagcgatga

SEQ ID NO: 3706 - protein, 163 aa, Ricinus communis
MVLKTELCRFSGAKIYPGKGIRFIRSDSQVFLFANSKCKRYFHNRLKPSKLTWTAMYRKQHKKDIAAEAVKKKRRTTKKPYSRSIVGATLEVIQKRRTEKPEVRDAAREAALREIKERIKKTKDEKKAKKAELAAKTKTQSKSNVSRGAAPKGPKLGGGGGKR

SEQ ID NO: 3707 - DNA, 561 bp, Ricinus communis
  CDS (1)..(561)
atgacaaaactctttctagggtttactcagcaacagcagcaacaacagcagcaggatcaggcagccatggttctcaagaccgagctttgtcgtttcagtggagccaagatttaccccggtaaaggcatcagatttattcgttctgattctcaggtgttcctatttgctaattcaaaatgcaagaggtacttccacaatcggttgaagccatcaaagcttacatggacagccatgtataggaagcaacataagaaggatattgcacaagaggctgtaaagaagaggagacgtaccactaaaaagccttactctaggtccattgtgggtgccaccttggaggttatccaaaagagaagaactgagaagcctgaagttcgtgacgctgcaagggaagctgctctccgtgaaattaaggaaaggatcaagaaaaccaaagatgcaaagaaggcaaagaaggcagaagtgatggccaagacacagaaggcaggtggtaaagctaatgtacctaagagtggcgcatcaaagggtcccaagcttggtggtggtggtggaaagcgctga

SEQ ID NO: 3708 - protein, 186 aa, Ricinus communis
MTKLFLGFTQQQQQQQQQDQAAMVLKTELCRFSGAKIYPGKGIRFIRSDSQVFLFANSKCKRYFHNRLKPSKLTWTAMYRKQHKKDIAQEAVKKRRRTTKKPYSRSIVGATLEVIQKRRTEKPEVRDAAREAALREIKERIKKTKDAKKAKKAEVMAKTQKAGGKANVPKSGASKGPKLGGGGGKR

SEQ ID NO: 3709 - DNA, 468 bp, Candida dubliniensis (strain CD36 / CBS 7987 / NCPF 3949 / NRRL Y-17841)
  CDS (1)..(468): transl_table=12
atgaagattgaagttgactccttttcaggttctaaaatctacccaggtagaggtactttattcgtcagaggtgactctaaaattttcagattccaatcctcaaaatctgcttctttattccaacaaagaaagaacccaagaagaatctcttggactgttttgtacagaagacaccacaaaaaaggtatttctgaagaagctgctaaaaagagaaccagaaaaaccgtcaagcaccaaagagctattgtcggtgcctctttggaattgatcaaagaaagaagaagtcaaaaaccagctgacagaaaagctgctagagactctaaattagctaaagacaaagaagctaaaaaggctgctaaagctgccagaaaagctgaaaaggctaaagctgttgcttccggtgcttctgttgtttctaaacaacaagctaaaggttctttccaaaaagttaaagctacctcccgttaa

SEQ ID NO: 3710 - protein, 155 aa, Candida dubliniensis (strain CD36 / CBS 7987 / NCPF 3949 / NRRL Y-17841)
MKIEVDSFSGSKIYPGRGTLFVRGDSKIFRFQSSKSASLFQQRKNPRRISWTVLYRRHHKKGISEEAAKKRTRKTVKHQRAIVGASLELIKERRSQKPADRKAARDSKLAKDKEAKKAAKAARKAEKAKAVASGASVVSKQQAKGSFQKVKATSR

SEQ ID NO: 3711 - DNA, 471 bp, Lepeophtheirus salmonis (salmon louse)
  CDS (1)..(471)
atggagatcgatctttgctcttattctggatacaagatttacccttgtcggggtcgcaccttggtgaggcccgatggaaaggtcttcaagttcctcgacggccggagccacaaggctcatctcctcaagagaaaccctcgtaaagtaacgtggaccgtcttgtacagacgcaaacataagaagggtattgaagaggagacctccaagaagaggaccaagagaactcagcgattccaacgtgctgttgttggagccactctccaagacattttggctaaaaggaatcagaagcctgaagtgcgtaaggcacaaagagaacaagccatcagagctgctaaggactcgaaaaaggctactaaagcctccaagaagcctcaagcacaggctactaaggccaaaccctcaaccaaaacttctggtgaatccaagcctgtggcgaaatctgctcctcgtgttggtggaaagcgataa

SEQ ID NO: 3712 - protein, 156 aa, Lepeophtheirus salmonis (salmon louse)
MEIDLCSYSGYKIYPCRGRTLVRPDGKVFKFLDGRSHKAHLLKRNPRKVTWTVLYRRKHKKGIEEETSKKRTKRTQRFQRAVVGATLQDILAKRNQKPEVRKAQREQAIRAAKDSKKATKASKKPQAQATKAKPSTKTSGESKPVAKSAPRVGGKR

SEQ ID NO: 3713 - DNA, 465 bp, Anopheles funestus
  CDS (1)..(465)
atgaagatcggactgtgcgcattcagcgggttcaaaatttaccccgccagcggcaagactcttgtcaaagccgatggaaagacgttcacgttcctgaacaaaaaatgtgagcgttcgttcctgatgaagcgcaacccgcgcaaggtgaagtggacggtgctgtaccgccgcaagcacaagaagggtattgtggaggaagcctccaaaaagcgcactcgccgcacgcagaagttccagcgtgccatcgtcggtgcgtcgctttcggacatcatggcgaagagaaacatgaagcccgaagttcgtaaagcccagcgtgaacaggcaatcaaggctgccaaggaagctaagaaggctaagcagactgacaagaagccgaaaaccgctcagcaaaatcctaagcagcagaaaacaaaggccgccaaggtctcgcagaaggctgcaccacgcgttggaggaaaacgataa

SEQ ID NO: 3714 - protein, 154 aa, Anopheles funestus
MKIGLCAFSGFKIYPASGKTLVKADGKTFTFLNKKCERSFLMKRNPRKVKWTVLYRRKHKKGIVEEASKKRTRRTQKFQRAIVGASLSDIMAKRNMKPEVRKAQREQAIKAAKEAKKAKQTDKKPKTAQQNPKQQKTKAAKVSQKAAPRVGGKR

SEQ ID NO: 3715 - DNA, 465 bp, Argas monolakensis
  CDS (1)..(465)
atgaagatcgggctttgctcgttcagcggctataaaatatacccgggccatgggaagcggatggtcaaggcggatgggaagacgttccacttcctgaacgccaagtgcgaggcgtcgcacatgatgcggaggaacccgcgcaaagtgacgtggacggtgctgtaccggcgcaagcacaagaagggtcaggaggaggagacagccaagaagcgcacctggcgcacggccaagttccagagggccatcgtgggggcctccctcaacgacatcctggccaagcgcaacatgaagcccgaggtgcgcaaggcccagagggagcaggccatccgagctgccaaggagaagcagagggcgcagaaggcccagaagaaggccaccaccacacccgcacagaaggccgttcagaagcagaaggcagccaagccgatccaggtcaaggcacctcgtgtgggtgggaagcgctaa

SEQ ID NO: 3716 - protein, 154 aa, Argas monolakensis
MKIGLCSFSGYKIYPGHGKRMVKADGKTFHFLNAKCEASHMMRRNPRKVTWTVLYRRKHKKGQEEETAKKRTWRTAKFQRAIVGASLNDILAKRNMKPEVRKAQREQAIRAAKEKQRAQKAQKKATTTPAQKAVQKQKAAKPIQVKAPRVGGKR

SEQ ID NO: 3717 - DNA, 492 bp, Medicago truncatula
  CDS (1)..(492)
atggttctcaagaccgaattgtgccgattcagtggtgccaagatctaccctggtagggggatcagatttatccgtagtgattctcaggttttcctgtttgtcaactcgaaatgtaaaaggtatttccacaacaagttgaagccctcaaagcttacatggactgccatgtataggaagcaacacaagaaggatattgcccaagaagctgtgaaaaagaggcgtagagctaccaaaaagccttactcaaggtccattgttggtgctactttggaagttattcaaaagaagagatcagaaaagccagaggttcgggatgctgccagagaagctgcccttcgtgaaattaaggagagggtgaagaaaacaaaggatgagaagaaggcgaagaaggcagaaagtcaagctaaggcacaaaaatctgttggaaaaggcaatgtttctaaaggtgcatcaaaaggtcctaagcttggtggtggaggagggaagcgctga

SEQ ID NO: 3718 - protein, 163 aa, Medicago truncatula
MVLKTELCRFSGAKIYPGRGIRFIRSDSQVFLFVNSKCKRYFHNKLKPSKLTWTAMYRKQHKKDIAQEAVKKRRRATKKPYSRSIVGATLEVIQKKRSEKPEVRDAAREAALREIKERVKKTKDEKKAKKAESQAKAQKSVGKGNVSKGASKGPKLGGGGGKR

SEQ ID NO: 3719 - DNA, 516 bp, Solanum tuberosum
  CDS (1)..(516)
atggtgctaaagacagaactctgccgtttcagcggtgccaagatataccctgggaggggaatcagatttattcgatcagattctcaggtgttcctatttgtcaactcaaagtgcaaacattacttccacaaccgcctgaagccttccaagcttacatggactgccatgtacaggaagcagcacaagaaggatattgcacaagaagctgttaggaagaggagacgtgccacaaagaaaccttactctaggtccattgtgggtgcaaccttggaggtaatccagaagaagagagctgaaaggccagaagttcgagatgctgccagggaggctgctcttcgtgaaatcaaggaaagaatcaagaaaacaaaggacgaaaagaaggccaagaaggcagaggtgatggctaagtcacagaaagctggaggtaagggtaatgtgtcaaagggaggatcaaaaggcctaaacttggcggtggtggtggaaaacgttaagctattgtttatgttctctaagtag

SEQ ID NO: 3720 - protein, 171 aa, Solanum tuberosum
MVLKTELCRFSGAKIYPGRGIRFIRSDSQVFLFVNSKCKHYFHNRLKPSKLTWTAMYRKQHKKDIAQEAVRKRRRATKKPYSRSIVGATLEVIQKKRAERPEVRDAAREAALREIKERIKKTKDEKKAKKAEVMAKSQKAGGKGNVSKGGSKGLNLAVVVENVKLLFMFSK

SEQ ID NO: 3721 - DNA, 465 bp, Timarcha balearica
  CDS (1)..(465)
atgaagattgggctgtgtgcatacagtggctataaaatttacccgggccatgggaaaaccatggtaaaagttgatgggaagtgcttcacattcctcaattcaaaatgcgaacatgcccacctaatgaaacggaatcccagaaaagttacgtggacagttctttacagacgtaaacacaagaaaggccaagaggaagaagctactaaaaaacgtacacgaagaactcaaaagttccagcgagcaattgtgggcgcctcattaagcgatataatggctaagagaaatcagaggcctgaagtacgaaaagcgcaaagggagcaagctatacgtgctgcaaaagaacagaagaaaggcacaaaagtggcaaagaaagcaaccgcaccagccaaggcaaaacctgctccaaaacaaaaaattagcaaaactgttcaaaaagctgcgcctagagtgggaggaaaacgctag

SEQ ID NO: 3722 - protein, 154 aa, Timarcha balearica
MKIGLCAYSGYKIYPGHGKTMVKVDGKCFTFLNSKCEHAHLMKRNPRKVTWTVLYRRKHKKGQEEEATKKRTRRTQKFQRAIVGASLSDIMAKRNQRPEVRKAQREQAIRAAKEQKKGTKVAKKATAPAKAKPAPKQKISKTVQKAAPRVGGKR

SEQ ID NO: 3723 - DNA, 462 bp, Sphaerius sp. APV-2005
  CDS (1)..(462)
  misc_feature (236)..(236): r is g or a
atgaagataggactgtgcgcttacagcgggtataaaatataccctggtcatgggaaaacaatggttaaagttgatggaaagtcctttactttcctcaacgccaaatgtgaagctgcccacctgatgaagaggaaccctaggaaagttacatggacagtgctttacagacgtaagcacaaaaagggccaagaagaagaacagtccaagaagagaactagacgcaaccagaaattccrgagagctattgttggcgcctctttaacagatattttagctaaaaggaacatgcggcccgaggttcgaaaagcacagcgtgaacaagctatcagagctgctaaagagcagaagaaaggtatcaaagctgcgaaaaaagctgctcaacagcctaaagttaaagcacctaaagtgaaacccgcaaaagtgactcagaaagcagcaccccgggttggaggaaagcgttaa

SEQ ID NO: 3724 - protein, 153 aa, Sphaerius sp. APV-2005
  misc_feature (79)..(79): The Xaa at location 79 stands for Arg, or Gln.
MKIGLCAYSGYKIYPGHGKTMVKVDGKSFTFLNAKCEAAHLMKRNPRKVTWTVLYRRKHKKGQEEEQSKKRTRRNQKFXRAIVGASLTDILAKRNMRPEVRKAQREQAIRAAKEQKKGIKAAKKAAQQPKVKAPKVKPAKVTQKAAPRVGGKR

SEQ ID NO: 3725 - DNA, 465 bp, Julodis onopordi
  CDS (1)..(465)
atgaagataggtctgtgtgtttacagtggttataaaatttacccaggccatgggaaaaccatggtaaaagttgacggaaagacatttactttcctaaactcaaaatgtgaagcagctcatttaatgaagaggaatccccgtaaggtaacttggactgtactttataggcgcaagcataagaaaggacaggaagaggagactgcaaagaagcgtactcgtaggactcaaaaattccagcgtgctattgtaggggcatctcttaatgatatcttggctaagagaaatcaaagaccagaagtaaggaaagcacagcgtgaacaggccattagggcggccaaagaagctaaaaagagttcaaaggctcagaagaaagctgcacagccacccaaggctaaagttgcgccaaaaactaaagctgcaaaaataacacaaaaggcagccccccgtgttggaggaaaacgataa

SEQ ID NO: 3726 - protein, 154 aa, Julodis onopordi
MKIGLCVYSGYKIYPGHGKTMVKVDGKTFTFLNSKCEAAHLMKRNPRKVTWTVLYRRKHKKGQEEETAKKRTRRTQKFQRAIVGASLNDILAKRNQRPEVRKAQREQAIRAAKEAKKSSKAQKKAAQPPKAKVAPKTKAAKITQKAAPRVGGKR

SEQ ID NO: 3727 - DNA, 465 bp, Hister sp. APV-2005
  CDS (1)..(465)
atgaagatcggtttgtgtgcatacagtggttataaaatatatcctggccatggtaaaactatggttaaggttgatggaaagcaattcacattccttaattcaaaatgtgaacatgcacatttaatgaagagaaatccacgtaaagtaacatggaccgttttatacagacgtaaacataaaaaaggtcaaggagaagaagcatcaaagagacgtacacgtagaacacaaaagttccaaagggctattgtgggtgcttcacttaatgatatcttagctaaacgtaatcaaagaccagaagtaagaaaagctcaaagagagcaagctattcgtgctgctaaagagcaaaagaaatcgactaaaacagtaaaaaaagcagcacaaccagcaaaacagaaacctgtacaaaaaacaaaagcagcaaagaatatacaaaaggctgcaccaagagtaggaggtaaacgttaa

SEQ ID NO: 3728 - protein, 154 aa, Hister sp. APV-2005
MKIGLCAYSGYKIYPGHGKTMVKVDGKQFTFLNSKCEHAHLMKRNPRKVTWTVLYRRKHKKGQGEEASKRRTRRTQKFQRAIVGASLNDILAKRNQRPEVRKAQREQAIRAAKEQKKSTKTVKKAAQPAKQKPVQKTKAAKNIQKAAPRVGGKR

SEQ ID NO: 3729 - DNA, 465 bp, Biphyllus lunatus
  CDS (1)..(465)
atgaagatcgggttgtgcgcctatagtggctacaaaatctaccccggccatgggaaaactatggttaaagttgatggaaagacattcactttcctcaactccaaatgcgaacgtgcccatttgatgaaaagaaacccacgtaaagttacatggactgtactttacagacgtaaacataagaaaggccaagaggaagaggctacaaagaaacgtactcgcaggacacaaaagttccaacgttctattgtaggtgctagtttaaatgatattttagctaagcgtaatcaaaggcctgaagtaaggaaagcacagagagaacaagctatccgtgctgctaaagaacagaagaaaacgacaaaagcagcaaagaaatctacacaaccagccaaggcaaagcttgctcctaaacaaaaggccaccaagaatgtacagaaagctgcaccaagaattggtggaaaacgttaa

SEQ ID NO: 3730 - protein, 154 aa, Biphyllus lunatus
MKIGLCAYSGYKIYPGHGKTMVKVDGKTFTFLNSKCERAHLMKRNPRKVTWTVLYRRKHKKGQEEEATKKRTRRTQKFQRSIVGASLNDILAKRNQRPEVRKAQREQAIRAAKEQKKTTKAAKKSTQPAKAKLAPKQKATKNVQKAAPRIGGKR

SEQ ID NO: 3731 - DNA, 465 bp, Agriotes lineatus
  CDS (1)..(465)
atgaagatcggattgtgcgtatacagtgggtataaaatttacccgggccatggcaaaaccatggtcaaagttgatgggaagaactttacatttttgaattcgaaatgtgaggctgcacatttaatgaggagaaatcctcgtaaagttacatggactgtactttacagacggaagcataagaaaggccaagaagaagaggcagccaaaaagcgcacacgaagaactcaaaagttccaacgtgcgatcgtcggtgcttctctcaatgacattatggctaaacgtaatcaacgaccagaagttagaaaggcacagcgagaacaggcaatacgtgctgcgaaagaacagaagaaaactacaaaagcagcaaagaaggccacagctcctcctaaacctaagttggtacagaaatcaaaggcaaccaaggtgacccagaaagctgcacctagggtaggaggaaaacgttaa

SEQ ID NO: 3732 - protein, 154 aa, Agriotes lineatus
MKIGLCVYSGYKIYPGHGKTMVKVDGKNFTFLNSKCEAAHLMRRNPRKVTWTVLYRRKHKKGQEEEAAKKRTRRTQKFQRAIVGASLNDIMAKRNQRPEVRKAQREQAIRAAKEQKKTTKAAKKATAPPKPKLVQKSKATKVTQKAAPRVGGKR

SEQ ID NO: 3733 - DNA, 477 bp, Suberites domuncula
  CDS (1)..(477)
atgaagcttgagctctgccattttagccaacaaaaaatctaccccagtaaaagtagaaagtatgtccgagttgatggaaagtcgttcaactttgccaatggaaagtgttcaaagtcattctttatgagacgtaacccacgaaagacaagttggactgttctctatcggagaaaacacaagaagggcatcgttgaagaagtctcaaggaagcgaacctcgaaaaaagcagttaagttccagagaggatttggtggggcaactctagaggccattttgatgaagagaaatcaaaacccagaggttcgaaagaagcagagagaacaagcaatcaaagctgcaaaggaaagtgctaataccaaaaaaaagactcaacagcagaaggcaacaaaggttgttcagaaatcaaaccagaagcaaaccaaaaagtctcaagctgccaagggcggcggcttaagcagaggtggacaaaaacgctaa

SEQ ID NO: 3734 - protein, 158 aa, Suberites domuncula
MKLELCHFSQQKIYPSKSRKYVRVDGKSFNFANGKCSKSFFMRRNPRKTSWTVLYRRKHKKGIVEEVSRKRTSKKAVKFQRGFGGATLEAILMKRNQNPEVRKKQREQAIKAAKESANTKKKTQQQKATKVVQKSNQKQTKKSQAAKGGGLSRGGQKR

SEQ ID NO: 3735 - DNA, 468 bp, Lysiphlebus testaceipes
  CDS (1)..(468)
atgaggacgcacatgtgtgcttacagtgggttgaaaatataccctggtcatggaaagacattggttatagttgatggaaaatcatatacttttctcaatggaaaatgtgaagctgcacataaaatgagacgtaatccaagaaaggtcacctggactgtgctttacagacgtaagcacaagaaaggacaagaagaagatatagcaaagaaaagaacacgtcgtacccaaaaatacaacagagctattgttggtgcatcacttactgatattttggcaaaacgtaatgtcaagcctgaaatcagaaaggctcaacgtgaacaagccatcaaagctgcaaaagaacagaaaaaggcacaaaaagccaccaagaaagttgtagcaccaactaaaccaaaagctctttccaagaaagacaaggcacaaaaagttacacaaaaagcagccccaagagttggaggaaaaagataa

SEQ ID NO: 3736 - protein, 155 aa, Lysiphlebus testaceipes
MRTHMCAYSGLKIYPGHGKTLVIVDGKSYTFLNGKCEAAHKMRRNPRKVTWTVLYRRKHKKGQEEDIAKKRTRRTQKYNRAIVGASLTDILAKRNVKPEIRKAQREQAIKAAKEQKKAQKATKKVVAPTKPKALSKKDKAQKVTQKAAPRVGGKR

SEQ ID NO: 3737 - DNA, 462 bp, Aedes albopictus
  CDS (1)..(462)
atgaagatcggtctgtgcgcgttcagcggtttcaaaatctaccccgccagtggtaaaacattggtcaaagccgatggcaagaccttcaccttcatcaacaagaaatgcgagcgttccttcctgatgaagcgcaacccgcgcaaggtgaaatggaccgtgctgtaccgcaggaagcacaagaagggcatggttgaggaagccgccaagaagcgcacccgccgtaccatgaagttccagcgcgccatcgtcggtgcctccctcaccgatatcatggccaagcgtaacatgaagccagaggtccgcaaggcccagcgtgatcaggccatcaaggtcgccaaggaagccaagaaggccaagcaggctgagaagaaggtgaccaaggcaccagcctccaagcagcagaagactaaggccgccaaggtgtcgcagaaggctgctccacgtgtcggaggaaagcgataa

SEQ ID NO: 3738 - protein, 153 aa, Aedes albopictus
MKIGLCAFSGFKIYPASGKTLVKADGKTFTFINKKCERSFLMKRNPRKVKWTVLYRRKHKKGMVEEAAKKRTRRTMKFQRAIVGASLTDIMAKRNMKPEVRKAQRDQAIKVAKEAKKAKQAEKKVTKAPASKQQKTKAAKVSQKAAPRVGGKR

SEQ ID NO: 3739 - DNA, 495 bp, Penaeus japonicus
  CDS (1)..(495)
atgaagatacaatgctctgcagtttcaggcggatacaaaatccagccgggtccgttggcaagaccatggtccggacggagcgggagggtgatggtgttcctcaatgcaagatgtgaggcagcctatcttatgaagaagaacccacgtgaagtaaaatggactgtattgtacaggcgtttgcacaagaagggtgtggaggaagaagttgccaagagacgtactcgccgcacccagaagttccagcgtgccattgttggtgcctcactcacagacatcatggctaagaggaacatgaagcctgaagttcgtaaggcacagagagaacaggctatccgggctgccaaggagaaggcaaaggctgccaaagcagctaaggctgctgctaagaagcctgcagctccccagggaggaaagcagggaaaagccagccagaaggtccctaaggtccagaaaggtggtcgcccagcgcagagtgcacgtggcccgcgccgttaa

SEQ ID NO: 3740 - protein, 164 aa, Penaeus japonicus
MKIQCSAVSGGYKIQPGPLARPWSGRSGRVMVFLNARCEAAYLMKKNPREVKWTVLYRRLHKKGVEEEVAKRRTRRTQKFQRAIVGASLTDIMAKRNMKPEVRKAQREQAIRAAKEKAKAAKAAKAAAKKPAAPQGGKQGKASQKVPKVQKGGRPAQSARGPRR

SEQ ID NO: 3741 - DNA, 483 bp, Oryza sativa subsp. japonica
  CDS (1)..(483)
atgtacaggacagagctgtgccgtttcagcggcgccaagatttacccagggaagggtatcagattcatccgtgcagactcccaggtgttcctgttttcaaactcgaagtgcaagcgctacttccacaaccgtctgaagccagccaagcttacatggacagccatgtacagaaagcagcacaagaaggatattcacgccgaggcagtcaagaagaggcgccgcaccaccaagaaaccgtactcccggtctatagttggtgctacccttgaagtcatccagaagaagagagctgagaagccagaggttcgtgatgcagcaagggaatccgctcttcgtgagatcaaggagcgcatcaagaagacaaaggacgagaagaaagcgaagaaggcagaggtggcaaaatcgcagaaggcttctggtaaaggcaatgctcccaagcctgggaaaggcccaaagctcggtggtggtggtgggaagcggtag

SEQ ID NO: 3742 - protein, 160 aa, Oryza sativa subsp. japonica
MYRTELCRFSGAKIYPGKGIRFIRADSQVFLFSNSKCKRYFHNRLKPAKLTWTAMYRKQHKKDIHAEAVKKRRRTTKKPYSRSIVGATLEVIQKKRAEKPEVRDAARESALREIKERIKKTKDEKKAKKAEVAKSQKASGKGNAPKPGKGPKLGGGGGKR

SEQ ID NO: 3743 - DNA, 465 bp, Branchiostoma belcheri
  CDS (1)..(465)
atgaagatcgagctgtgtctctacagcgggtataaaatctaccctggccatggcaagagatatgccagaaccgatggccgggtgtacactttcctgaacgcaaaatgcgaggcttcattcctgatgaagcggaacccacgtgagatcacgtggacggtgctgtaccgccgtaagcacaagaagggccagcaggaggagattcagaagaaacgcagccgtagaactgccaagttccagcgcgctatcactggtgcctcgctgacggagatcatggccaagagaaatcagaagccagaggttcgtaaggcacagagggagcaggctgtcaaggctgccaaagaaaagaagaaggcagatcaggtaggcaagaggaaggcccctgctaaggctcgtgcaactgcaccgaagaccaaggccccgaagacggtaaaggctgcggcacccagagttggcggaaagcgatag

SEQ ID NO: 3744 - protein, 154 aa, Branchiostoma belcheri
MKIELCLYSGYKIYPGHGKRYARTDGRVYTFLNAKCEASFLMKRNPREITWTVLYRRKHKKGQQEEIQKKRSRRTAKFQRAITGASLTEIMAKRNQKPEVRKAQREQAVKAAKEKKKADQVGKRKAPAKARATAPKTKAPKTVKAAAPRVGGKR

SEQ ID NO: 3745 - DNA, 495 bp, Cicer arietinum
  CDS (1)..(495)
atggttctcaagactgaactttgccgattcagtggtgcaaagatctacccaggaagaggaatcagatttattcgtggtgattctcaggttttcctgtttgttaactcaaaatgcaaaaggtatttccacaaccgtttgaagccttcgaagcttacctggactgccatgttcaggaagcaacataaaaaggacgctgctcaagaagctgtgaagaagaggcgtcgtgctaccaaaaagccatactctaggtccattgttggtgctactttggaagtcattcagaagaaaagaactgagaagcctgaagttcgtgatgccgctagggaagctgctcttcgtgaaattaaggagagaatcaagaaaactaaggatgagaagaaagccaagaaagcagaagtagcatctaaggcacaaaaatctcaaggcaaaggaaatgttcagaagggtgctttgcccaaaggtcctaaaatgggtggcggcggtgggaaagcctga

SEQ ID NO: 3746 - protein, 164 aa, Cicer arietinum
MVLKTELCRFSGAKIYPGRGIRFIRGDSQVFLFVNSKCKRYFHNRLKPSKLTWTAMFRKQHKKDAAQEAVKKRRRATKKPYSRSIVGATLEVIQKKRTEKPEVRDAAREAALREIKERIKKTKDEKKAKKAEVASKAQKSQGKGNVQKGALPKGPKMGGGGGKA

SEQ ID NO: 3747 - DNA, 489 bp, Hordeum vulgare
  CDS (1)..(489)
atggttctgaagactgagctttgccgttttagcggccagaagatttacccagggaagggtatcaggttcattcgttcagattcacaggttttcctctttgccaactcaaaatgcaagcgctacttccacaaccgcctgaagcctgcaaagctttgctggacagcaatgtacaggaagcagcacaagaaggacatccatgctgaggctgccaagaagaggcgccgcaccaccaagaagccgtactcacggtcgattgttggtgccacactggaagttatccagaagaagagggctgagaagcctgaagtccgtgatgctgccagagaagccgctcttcgtgagatcaaggagcgcatcaagaagaccaaggatgagaagaaggccaagaaggcagaggtgaccaagtcccagaagtcacaggggggcaagggtgccgtgcagaagggttccaagggcccaaagcttggcggtggcggcggcaagcgttga

SEQ ID NO: 3748 - protein, 162 aa, Hordeum vulgare
MVLKTELCRFSGQKIYPGKGIRFIRSDSQVFLFANSKCKRYFHNRLKPAKLCWTAMYRKQHKKDIHAEAAKKRRRTTKKPYSRSIVGATLEVIQKKRAEKPEVRDAAREAALREIKERIKKTKDEKKAKKAEVTKSQKSQGGKGAVQKGSKGPKLGGGGGKR

SEQ ID NO: 3749 - DNA, 468 bp, Plutella xylostella
  CDS (1)..(468)
atgaagatcggactttgcgcctacagtggatacaagatctatcctggccatggaaagaccatggttaaggtggacggaaagaatttcacattcttgaactccaaatgtgaagctgctcacttgatgaggaggaatccccgtaaagtgacatggactgtcctatacaggcgcaagttcaagaaggggcaagaggaagagcaggccaagaagcgaacccgcaggacacagaagtaccagcgagccatcgtcggtgcctcactcagtgacatcatggccaagaggaacatgaagcccgaggtcaggaaggcacagagggaacaggccatcaagcaagccaaggaacagaagaagagcacaaaggccagcaagaagaccacagctccccctaccaaggggaaggccgcccccaaggccaaggccgctaaagtgagtcagaaggccgcccccagggttggaggaaagcgataa

SEQ ID NO: 3750 - protein, 155 aa, Plutella xylostella
MKIGLCAYSGYKIYPGHGKTMVKVDGKNFTFLNSKCEAAHLMRRNPRKVTWTVLYRRKFKKGQEEEQAKKRTRRTQKYQRAIVGASLSDIMAKRNMKPEVRKAQREQAIKQAKEQKKSTKASKKTTAPPTKGKAAPKAKAAKVSQKAAPRVGGKR

SEQ ID NO: 3751 - DNA, 561 bp, Prunus avium
  CDS (1)..(561)
atggttctcaagaccgaactctgtcgttttagcggggccaagatttacccaggaaagggcatcagatttattcgttctgactctcaggtcttcctgtttgccaactcaaaatgcaaaaggtacttccacaacaggttgaagccatcaaagcttacctggacagccatgtacaggaagcagcacaaaaaggatattgctcaagaagctgtgaagaagaggagacgtaccaccaagaagccttactcaaggtctattgtgggtgccacactcgaggttatccagaagaggagaactgagaagcccgaggttcgtgatgctgcaagggaagctgctctccgtgaaatcaaggagaggatcaagaaaaccaaggatgaaaagaaggccaagaaggcagaagttacaaaatcccaaaaatctcaaggcaagggtagcattgccaagggaggtgcacaaccaaagggaccaaagcttggggggtggcggtggcaagcgctgagccactgttctgttgcctacttgttgggaagtagagtaatagataggacgtgtttgtttgtttga

SEQ ID NO: 3752 - protein, 186 aa, Prunus avium
MVLKTELCRFSGAKIYPGKGIRFIRSDSQVFLFANSKCKRYFHNRLKPSKLTWTAMYRKQHKKDIAQEAVKKRRRTTKKPYSRSIVGATLEVIQKRRTEKPEVRDAAREAALREIKERIKKTKDEKKAKKAEVTKSQKSQGKGSIAKGGAQPKGPKLGGWRWQALSHCSVAYLLGSRVIDRTCLFV

SEQ ID NO: 3753 - DNA, 471 bp, Schistosoma japonicum
  CDS (1)..(471)
atgaagttggaagtgtgctcctacagtggtttcaaagtatatccaggccatggcaaacgagtcatccgtgttgacggccgcagtttctacttcataaataaaaaaagcgagcgatctcattacttgaaacgcaatccacgtgagatcagctggactgtgctttaccgaaggaagtacaagaaaggtatgagtgaagagcagacaaaaaacgaactaagcgtgttaactaaaactgctcgaggtattgcaggagcaagccttgctgaaataatggctaaacgtaatcagaagccagaagttcgtaaggcaatgcgtgaccaggctatacgagcagcaaaggagaagcagaaacaaaaagaattggagaagaaggcgaaaaaagttgaaaagaaaaagcctacattggctccaaaacagaaggctgcgaaaatcactcagaagccggctcctagagttggtggaaagcgttaa

SEQ ID NO: 3754 - protein, 156 aa, Schistosoma japonicum
MKLEVCSYSGFKVYPGHGKRVIRVDGRSFYFINKKSERSHYLKRNPREISWTVLYRRKYKKGMSEEQTKNELSVLTKTARGIAGASLAEIMAKRNQKPEVRKAMRDQAIRAAKEKQKQKELEKKAKKVEKKKPTLAPKQKAAKITQKPAPRVGGKR

SEQ ID NO: 3755 - DNA, 468 bp, Spodoptera frugiperda
  CDS (1)..(468)
atgaagatcggactttgcgcctacagtggatacaagatctatcctggccatggcaaaaccatggttaaggtggacggcaagaccttcacattcttgaactcaaaatgtgaggctgcacatttgatgaggaggaatcctcgtaaagtgacatggactgtgctgtacaggcgcaagttcaagaagggtcaagaagaagagcagaccaagaagcgcacaaggaggacgcagaaataccagcgtgccatcgttggcgcttcactcagtgacatcatggctaagcgtaacatgaaacctgaagtgcgcaaggctcaaagagatcaggccatcaaggctgccaaggaacaaaagaagtccacaaaggccgccaagaaggcctcagcaccagcacccaaggctaaggcagcacctaaagccaaggccgctaaagtcagtcaaaagtccgcccctagggttggaggaaaacgataa

SEQ ID NO: 3756 - protein, 155 aa, Spodoptera frugiperda
MKIGLCAYSGYKIYPGHGKTMVKVDGKTFTFLNSKCEAAHLMRRNPRKVTWTVLYRRKFKKGQEEEQTKKRTRRTQKYQRAIVGASLSDIMAKRNMKPEVRKAQRDQAIKAAKEQKKSTKAAKKASAPAPKAKAAPKAKAAKVSQKSAPRVGGKR

SEQ ID NO: 3757 - DNA, 495 bp, Brassica napus
  CDS (1)..(495)
atgagattggtcaagtgttggttttgctcttctacgatatatcctggacatggtattcagtttgtccgcaacgatgcaaagattttccggttctgtaggtctaaatgccacaagaacttcaagatgaagaggaaccctcgtaaggtcaagtggactaaagcctacagagctgcacacggaaaggacatgactcaggataaaacttttgagtttgagaagaagagaaacagacccgagaggtatgataggaacgttacggaggatactctcaaggccattaagaagattgataagatcagaagcactagagaagctgaacacatcaataagaggttgaagcctaacaaacagaagatattcaagagtgcaatcactgagttagatcagcacattagtttgatcaaggcaccaggttctcagcaacaagattcagagaagatgaaagttttggtctccagcaacaagtctgttcaaaacgaagccatggaagagtga

SEQ ID NO: 3758 - protein, 164 aa, Brassica napus
MRLVKCWFCSSTIYPGHGIQFVRNDAKIFRFCRSKCHKNFKMKRNPRKVKWTKAYRAAHGKDMTQDKTFEFEKKRNRPERYDRNVTEDTLKAIKKIDKIRSTREAEHINKRLKPNKQKIFKSAITELDQHISLIKAPGSQQQDSEKMKVLVSSNKSVQNEAMEE

SEQ ID NO: 3759 - DNA, 504 bp, Brassica napus
  CDS (1)..(504)
atggtcgtcaagacggacacctgcttctacaccgagttcaagatcttccccggtcatggctccagaatcgtgcgaaaggatggcaagctcctcgctttcatcaaccgcaagtcccgatctctctaccaacaaaagattaaggctcagcgattgacctggtcgcaacaatggcgcgccaagcacaagaagggtcgtgttgagctcgctgccaagaagaagtccaagaagaccaccaaggtgtacaaggctattcagggtatcgacattgaggagcttaagaagaagcgcgcccaaaagcccgatttccgcaaagctgctcgtgatgcctccctccgagaagtcaaggagcgtgcccgcaaagagaaggatgacaagaagaagcccgccgccgccagcggaaagaaggccaccaccgccgccaaggctgccaagcccgctgctggtttcgttaagatccccaagtctcgtcgtgtcatgaagggtgccaatgccaagagccgttaa

SEQ ID NO: 3760 - protein, 167 aa, Brassica napus
MVVKTDTCFYTEFKIFPGHGSRIVRKDGKLLAFINRKSRSLYQQKIKAQRLTWSQQWRAKHKKGRVELAAKKKSKKTTKVYKAIQGIDIEELKKKRAQKPDFRKAARDASLREVKERARKEKDDKKKPAAASGKKATTAAKAAKPAAGFVKIPKSRRVMKGANAKSR

SEQ ID NO: 3761 - DNA, 507 bp, Glycine max
  CDS (1)..(507)
atgagattggagaaatgctggttttgctcttcaaccatataccccggacatggaatccagtttgttcgtaatgatgcaaagatttttcggttttgtagatctaaatgccacaagaactttaaaatgaagagaaatcctcgtaaggtaaaatggaccaaggcatatcgtcgagtgcatggaaaggatatgacacaggactcaacttttgagtttgagagaaagagaaacaggcctgaaagatatgacaggaatcttgcggagaatgtcctcaaggccattcctaagattgataagatcagagtctcgagggaggagagacaccataagaacaggatgaaaggcaaaaaggaaaaattgctgaaggaggcagtgaaggagttggagcagggcatcagtttggtcaaagctccttctgtgcttcaacaggatccatctctcactttaccaaagatcaaagtcaaggtttcccaacagcaatcagaggagaatcatgccatggaagagtaa

SEQ ID NO: 3762 - protein, 168 aa, Glycine max
MRLEKCWFCSSTIYPGHGIQFVRNDAKIFRFCRSKCHKNFKMKRNPRKVKWTKAYRRVHGKDMTQDSTFEFERKRNRPERYDRNLAENVLKAIPKIDKIRVSREERHHKNRMKGKKEKLLKEAVKELEQGISLVKAPSVLQQDPSLTLPKIKVKVSQQQSEENHAMEE

SEQ ID NO: 3763 - DNA, 507 bp, Helianthus annuus
  CDS (1)..(507)
atgaggttggaaaagtgctggttttgttcttctactgtatatccaggacatggtattcagtttgtacggaatgatgcaaagatatttagattttgtcgatcaaaatgtcacaagaatttcaaaatgaagaggaatcctcgtaaggtgaagtggacaaaggcttatcggcggttacatggcaaggacatgactcaggatgcaacatttgagtttgagaggaaacgtaacagaccagagaggtatgaccgaaacctcacagagaacacactcaaggccatcaaggttatcgataaagtcagatcccgcaggggggaaaagcacattcagaacagattgaaggttagggttgcaaaggacagaaaggaggccataaaggaacttgaccagcaaatccacatactcatagccccgggtgcgacggtcaaaggtgcatcggctgctacaacatcgcccaaggtccctgttaaagttcaacaggaatccaatgaaaatcgcatggaagaatga

SEQ ID NO: 3764 - protein, 168 aa, Helianthus annuus
MRLEKCWFCSSTVYPGHGIQFVRNDAKIFRFCRSKCHKNFKMKRNPRKVKWTKAYRRLHGKDMTQDATFEFERKRNRPERYDRNLTENTLKAIKVIDKVRSRRGEKHIQNRLKVRVAKDRKEAIKELDQQIHILIAPGATVKGASAATTSPKVPVKVQQESNENRMEE

SEQ ID NO: 3765 - DNA, 489 bp, Helianthus annuus
  CDS (1)..(489)
atggttctcaagactgagctatgcagattcagtggccagaagatttatcctggtaggggtattagattcatcagatctgattcacaggtgtttttgttcgcaaattccaaatgcaaaaggtactttcacaacaagctgaagccgtcaaagcttacatggaccgcgatgtaccgaaagcagcacaagaaggatcttgctcaagaggctgtgaagaagaggcgtcgtgcgaccaagaagccgtattccagggctattgtgggagctactttggaagttattcagaagaagagaagtgagaaacctgaagttcgtgatgctgctagagaggctgctcttcgtgaaatcaaggaaagaatcaagaaaactaaggatgagaagaaggcaaagaaagccgaggttgcatcaaagcagaaggtccaaggtaaagctgggaatgcgcctaaaggaggtaagggacctaagctcggaggcggtggtgggaagcgttaa

SEQ ID NO: 3766 - protein, 162 aa, Helianthus annuus
MVLKTELCRFSGQKIYPGRGIRFIRSDSQVFLFANSKCKRYFHNKLKPSKLTWTAMYRKQHKKDLAQEAVKKRRRATKKPYSRAIVGATLEVIQKKRSEKPEVRDAAREAALREIKERIKKTKDEKKAKKAEVASKQKVQGKAGNAPKGGKGPKLGGGGGKR

SEQ ID NO: 3767 - DNA, 486 bp, Helianthus annuus
  CDS (1)..(486)
atggttctcaagactgagctctgccgtttcagtggccagaaaatttaccctggaaggggtattaggtttatccgatctgactcgcaggtgttcctgtttgcaaattctaaatgtaagaggtacttccataacaagctgaagccctcgaagctcacatggaccgccatgtaccgaaagcagcacaagaaggaccttgctcaagaggctgtgaagaaaagacgtcgtgctaccaagaagccttactccagggctattgtgggagcaactttggaagtcattcagaagaagagaagtgagaaacctgaagttcgtgatgccgctagggaggccgcccttcgtgaaatcaaggaaaggatcaagaaaacgaaggacgagaagaaagcgaagaaagcagaagtggcgtcaaagcagaaggtccaagccaagggtggcaatgtgcccaaaggtaagggacctaagcttggtggtggtggtgggaagcgttga

SEQ ID NO: 3768 - protein, 161 aa, Helianthus annuus
MVLKTELCRFSGQKIYPGRGIRFIRSDSQVFLFANSKCKRYFHNKLKPSKLTWTAMYRKQHKKDLAQEAVKKRRRATKKPYSRAIVGATLEVIQKKRSEKPEVRDAAREAALREIKERIKKTKDEKKAKKAEVASKQKVQAKGGNVPKGKGPKLGGGGGKR

SEQ ID NO: 3769 - DNA, 483 bp, Helianthus annuus
  CDS (1)..(483)
atggttctcaagactgagctctgccgtttcagtggccagaaaatttaccctggaaggggtattaggtttatccgatctgactcgcaggtgttcctgtttgcaaattctaaatgtaagaggtactaccataacaagctgaagccctcgaagctcacatggaccgccatgtaccgaaagcagcacaagaaggaccttgctcaagaggctgtgaagaaaagacgtcgtgctaccaagaagccttactccagggctattgtgggagcaactttggaagtcattcagaagaagagaagtgagaaacctgaagttcgtgatgccgctaggaaggccgcccttcgtgaaatcaaggaaaggatcaagaaaacgaaggacgagaagaaagcgaagaaagcagaagtggcgtcaaagcagaaggtccaagccaagggtggcaatgtgcccaaaggtaagggacctaagcttggtggtggtgggaagcgttga

SEQ ID NO: 3770 - protein, 160 aa, Helianthus annuus
MVLKTELCRFSGQKIYPGRGIRFIRSDSQVFLFANSKCKRYYHNKLKPSKLTWTAMYRKQHKKDLAQEAVKKRRRATKKPYSRAIVGATLEVIQKKRSEKPEVRDAARKAALREIKERIKKTKDEKKAKKAEVASKQKVQAKGGNVPKGKGPKLGGGGKR

SEQ ID NO: 3771 - DNA, 489 bp, Hordeum vulgare
  CDS (1)..(489)
atgaggttggagaagtgctggttctgctcctccaccgtctaccccggccacggcatccagttcgtccgcaacgacgccaaggtcttccgcttctgccgatcaaaatgccacaagaacttcaagatgaagaggaaccctcgcaaggttaagtggaccaaggcgtacagacgcctgcgtggaaaggacatgacacaggattccacgtttgagtttgagaggaagaggaacaggccggagcgctacgaccgtaacgtcaccgaacagactctcaaggccatcccgcttatcacaaagatcagacatgaacggcagaagaaacacattacagagagacagaagagtggtaagagcatggtgcggaagagcgatgctaaggagctggagcaggatattggcatggttcccaagaaggagaccgagaattatgtagccaagcagaaggttctagtttcccagctcaagaccgaagagaatcttatggaagagtaa

SEQ ID NO: 3772 - protein, 162 aa, Hordeum vulgare
MRLEKCWFCSSTVYPGHGIQFVRNDAKVFRFCRSKCHKNFKMKRNPRKVKWTKAYRRLRGKDMTQDSTFEFERKRNRPERYDRNVTEQTLKAIPLITKIRHERQKKHITERQKSGKSMVRKSDAKELEQDIGMVPKKETENYVAKQKVLVSQLKTEENLMEE

SEQ ID NO: 3773 - DNA, 495 bp, Linum usitatissimum
  CDS (1)..(495)
atggttttgaagaccgagctatgccgtttcagcggtcaaaagatctacccaggcaggggcatcagatttatccgctctgattctcaggttttcctctttgccaactccaaatgcaagaggtacttccacaaccgcctgaagccttccaagcttacctggaccgccgtgttcaggaagcagcacaagaaggatattgctgctgaggctgtgaagaagaagagaaggaccaacaagaagccttactcgaggtcaattgtcggtgcttccttggaggtgatccagaagaagagggccgagaagccagaagtccgtgatgctgctcgtgaagctgccattcgtgagatcaaggagaggatcaagaaaaccaaggacgagaagaaggcgaagaaggctgaagtttcaaagtcacaaaaggcacaaggtaagggtgctatgcccaggggtgctgcccccaagggaggacccaagcttggcggtggcggtggaaagcggtaa

SEQ ID NO: 3774 - protein, 164 aa, Linum usitatissimum
MVLKTELCRFSGQKIYPGRGIRFIRSDSQVFLFANSKCKRYFHNRLKPSKLTWTAVFRKQHKKDIAAEAVKKKRRTNKKPYSRSIVGASLEVIQKKRAEKPEVRDAAREAAIREIKERIKKTKDEKKAKKAEVSKSQKAQGKGAMPRGAAPKGGPKLGGGGGKR

SEQ ID NO: 3775 - DNA, 492 bp, Linum usitatissimum
  CDS (1)..(492)
atgaggttggagaattgctggttttgttcgtcgaagatataccctgggcatggtatccaattcgttcgcaacgatgctaagatctttaggttctgtaggtccaaatgccacaagaacttcaagatgaagagaaatccaaggaaggtgaaatggacgaaggcctataggaagctgcacgggaaggatatgacaaaggattcaacctttgagttcgagaggaagaggaacaggcccgatagatacgacagaaatgttgtcgaaaacaccctcaacgccatcaagaagatcagcaaaatccgaaacgaaagggaacacaagcacattaagaacaggttgagcgtgagtaagatcaagaatcacaaagaggcgcgaaaggaactcgatcagagcatccaccttatccatgcgccacgtggtatcagagtcacgaaggatgtcgttaaagttcccgtaccacaacaaactgcggagaatcgaccgatggaggagtag

SEQ ID NO: 3776 - protein, 163 aa, Linum usitatissimum
MRLENCWFCSSKIYPGHGIQFVRNDAKIFRFCRSKCHKNFKMKRNPRKVKWTKAYRKLHGKDMTKDSTFEFERKRNRPDRYDRNVVENTLNAIKKISKIRNEREHKHIKNRLSVSKIKNHKEARKELDQSIHLIHAPRGIRVTKDVVKVPVPQQTAENRPMEE

SEQ ID NO: 3777 - DNA, 489 bp, Brassica napus
  CDS (1)..(489)
atggttctcaagactgagctttgccgattcagtggccacaagatttacccaggcaggggtatcagattcatcagatctgactctcaggtgtttttgttcatcaactcgaaatgtaagcattattttcacaataagttgaagccttccaagcttgcatggaccactatgtaccgtaaacagcacaagaaggatgctgctcaagaggctgtgaagaagaggagacgtgcaaccaagaagccttactcaaggtccatcgttggtgctactttggaggtcattcagaagaagcgtgcagagaagcctgaagttcgtgatgcagccagagaagccgcccttcgtgacattaaggagagaatcaagaagaccaaggatgagaagaaggcaaagaaggccgagtttgcttccaagcaacaaaaaatcaagggcagcatccccaagactgccgcacccaaggctgctaagttgggtggtggtggtggcagacgttga

SEQ ID NO: 3778 - protein, 162 aa, Brassica napus
MVLKTELCRFSGHKIYPGRGIRFIRSDSQVFLFINSKCKHYFHNKLKPSKLAWTTMYRKQHKKDAAQEAVKKRRRATKKPYSRSIVGATLEVIQKKRAEKPEVRDAAREAALRDIKERIKKTKDEKKAKKAEFASKQQKIKGSIPKTAAPKAAKLGGGGGRR

SEQ ID NO: 3779 - DNA, 492 bp, Oryza sativa
  CDS (1)..(492)
atgaggttggagaagtgctggttctgctcgtccaccgtctaccccggccacggcatccagttcgtccggaacgacgccaagatctttcgcttttgccggtcaaaatgtcataaaaatttcaagatgaagaggaatcctcgtaaggttaaatggacaaaagcgtacaggtgcttgcatgggaaggacatgacacaggactccacctttgagtttgagaggaaaaggaacaggccagagcgctatgaccggaatgtcactgagcaaacacttaaggctatctctcttattacaaagattagacatgaacggcagaagaaacatattacagagaggcaaaaacagggtaagacaaagcaacgggagagggatgctaaggagttggaacaggatattcaaatgcttccaaagaaggttaccctatcaacacaaaaaacaaaagtcgtggttaaagtttcccagcagcagacagaagagaatcttatggaagagtaa

SEQ ID NO: 3780 - protein, 163 aa, Oryza sativa
MRLEKCWFCSSTVYPGHGIQFVRNDAKIFRFCRSKCHKNFKMKRNPRKVKWTKAYRCLHGKDMTQDSTFEFERKRNRPERYDRNVTEQTLKAISLITKIRHERQKKHITERQKQGKTKQRERDAKELEQDIQMLPKKVTLSTQKTKVVVKVSQQQTEENLMEE

SEQ ID NO: 3781 - DNA, 492 bp, Oryza sativa
  CDS (1)..(492)
atgaggttggagaagtgctggttctgctcgtccaccgtctaccccggccacggcatccagttcgtccggaacgacgccaagatctttcgcttttgccggtcaaaatgtcataaaaattttaagatgaagaggaatcctcgtaaggttaaatggacaaaagcatacaggtgcttgcatgggaaggacatgacacaggactccacctttgagtttgagaggaaaaggaacaggccagatcgctatgaccggaatgtcactgagcaaactcttaaggctatctctcttattacaaagattagacatgaacggcagaaaaaacatattacagagaggcaaaaacagggtaagacaaagcaacgggagagggatgctaaggagttggaacaggatattcaaatgcttccaaagaaggttaccctatcaacacaaaaaacaaaagtcgtggttaaagtttcccagcagcagacagaagagaatcttatggaagagtaa

SEQ ID NO: 3782 - protein, 163 aa, Oryza sativa
MRLEKCWFCSSTVYPGHGIQFVRNDAKIFRFCRSKCHKNFKMKRNPRKVKWTKAYRCLHGKDMTQDSTFEFERKRNRPDRYDRNVTEQTLKAISLITKIRHERQKKHITERQKQGKTKQRERDAKELEQDIQMLPKKVTLSTQKTKVVVKVSQQQTEENLMEE

SEQ ID NO: 3783 - DNA, 486 bp, Triticum aestivum
  CDS (1)..(486)
atggttctcaagacagagctctgccgtttcagcggtgccaagatatacccagggaagggtatcagattcatccgctcagactctcaagtcttccttttctccaactcaaagtgcaagagctacttccacaaccgtctcaagccagctaaactcgcatggacggccatgtacaggaagcagcacaagaaggatattcatgctgaggcttcaaagaagaggcgccgcaccaccaagaggccgtattccaggtcaattgtaggtgcttcccttgaagttatccagaagaagagagctgagaagccggaggtccgtgatgcagccagggaagcagctctgcgtgagatcaaggagcggattaagaagaccaaggatgagaagcgagcaaagaaggtggaggtgacaaaatcccagaagaccaccggcagaggcaacgcccccaaacctggaaaggcccccaagcttggcggtggtggcgggaagcgctag

SEQ ID NO: 3784 - protein, 161 aa, Triticum aestivum
MVLKTELCRFSGAKIYPGKGIRFIRSDSQVFLFSNSKCKSYFHNRLKPAKLAWTAMYRKQHKKDIHAEASKKRRRTTKRPYSRSIVGASLEVIQKKRAEKPEVRDAAREAALREIKERIKKTKDEKRAKKVEVTKSQKTTGRGNAPKPGKAPKLGGGGGKR

SEQ ID NO: 3785 - DNA, 486 bp, Zea mays
  CDS (1)..(486)
atggtgctgaagacagaactctgccgcttcagcggccagaagatttatcctgggaaaggcatccgatttatccgtgctgattctcaggttttcctttttgccaactcaaaatgcaagcgctacttccacaaccgcctgaagcctgcaaagcttacctggacagcaatgtacaggaagcagcacaagaaggatatccatgctgaggctgtcaagaagaggcgccgcaccaacaagaagccatactcgaggtccattgtgggtgcttccctagaggtgatccagaagaagagggctgagaagcccgaggtccgcgatgctgctagagaagctgctcttcgcgagatcaaggagcgcatcaagaagaccaaggatgagaagaaggcgaagaaggcggaggtgaccaagtcccagaaggcgcagacgaagggcgcggtccagaagggttccaagggccccaagttgggtggcggcggtggcaagcgctga

SEQ ID NO: 3786 - protein, 161 aa, Zea mays
MVLKTELCRFSGQKIYPGKGIRFIRADSQVFLFANSKCKRYFHNRLKPAKLTWTAMYRKQHKKDIHAEAVKKRRRTNKKPYSRSIVGASLEVIQKKRAEKPEVRDAAREAALREIKERIKKTKDEKKAKKAEVTKSQKAQTKGAVQKGSKGPKLGGGGGKR

SEQ ID NO: 3787 - DNA, 21 bp, Artificial sequence
  primer
atggttctcaagactgaactc

SEQ ID NO: 3788 - DNA, 20 bp, Artificial sequence
  primer
tcaccgcttccctccacctc

SEQ ID NO: 3789 - protein, 123 aa, Artificial sequence
  consensus sequence
  Variant (4)..(4): Xaa in position 4 is any amino acid
  Variant (5)..(5): Xaa in position 5 is any or no amino acid
  Variant (11)..(11): Xaa in position 11 is any amino acid
  Variant (12)..(12): Xaa in position 12 is any or no amino acid
  Variant (14)..(19): Xaa in position 14 to 19 is any amino acid
  Variant (21)..(23): Xaa in position 21 to 23 is any amino acid
  Variant (25)..(25): Xaa in position 25 is any amino acid
  Variant (27)..(29): Xaa in position 27 to 29 is any amino acid
  Variant (31)..(40): Xaa in position 31 to 40 is any amino acid
  Variant (42)..(45): Xaa in position 42 to 45 is any amino acid
  Variant (48)..(49): Xaa in position 48 to 49 is any amino acid
  Variant (52)..(53): Xaa in position 52 to 53 is any amino acid
  Variant (57)..(60): Xaa in position 57 to 60 is any amino acid
  Variant (61)..(62): Xaa in position 61 to 62 is any or no amino acid
  Variant (64)..(65): Xaa in position 64 to 65 is any amino acid
  Variant (69)..(69): Xaa in position 69 is any amino acid
  Variant (70)..(70): Xaa in position 70 is any or no amino acid
  Variant (72)..(74): Xaa in position 72 to 74 is any amino acid
  Variant (76)..(77): Xaa in position 76 to 77 is any amino acid
  Variant (78)..(78): Xaa in position 78 is any or no amino acid
  Variant (80)..(80): Xaa in position 80 is any amino acid
  Variant (85)..(85): Xaa in position 85 is any amino acid
  Variant (87)..(88): Xaa in position 87 to 88 is any amino acid
  Variant (90)..(92): Xaa in position 90 to 92 is any amino acid
  Variant (94)..(96): Xaa in position 94 to 96 is any amino acid
  Variant (99)..(99): Xaa in position 99 is any amino acid
  Variant (101)..(101): Xaa in position 101 is any amino acid
  Variant (103)..(103): Xaa in position 103 is any amino acid
  Variant (105)..(106): Xaa in position 105 to 106 is any amino acid
  Variant (108)..(111): Xaa in position 108 to 111 is any amino acid
  Variant (114)..(121): Xaa in position 114 to 121 is any amino acid
FSGXXKIYPGXXGXXXXXXDXXXFXFXXXKXXXXXXXXXXPXXXXWTXXYRXXHKKXXXXXXEXXKKRXXRXXXKXXXRXIVGAXLXXIXXXRXXXPEXRXAXRXXAXXXXKEXXXXXXXXKK

SEQ ID NO: 3790 - protein, 38 aa, Artificial sequence
  protein pattern
  Variant (3)..(3): Xaa in position 3 is His, Lys or Arg
  Variant (5)..(7): Xaa in position 5 to 7 is any amino acid
  Variant (8)..(8): Xaa in position 8 is Ile or Val
  Variant (9)..(9): Xaa in position 9 is Lys or Arg
  Variant (10)..(10): Xaa in position 10 is any amino acid
  Variant (12)..(12): Xaa in position 12 is Ala, Gly or Ser
  Variant (13)..(14): Xaa in position 13 to 14 is any amino acid
  Variant (16)..(16): Xaa in position 16 is any amino acid
  Variant (18)..(18): Xaa in position 18 is any amino acid
  Variant (19)..(19): Xaa in position 19 is Asp, Asn, Arg or Ser
  Variant (20)..(20): Xaa in position 20 is any amino acid
  Variant (22)..(22): Xaa in position 22 is Cys, Ser or Thr
  Variant (23)..(25): Xaa in position 23 to 25 is any amino acid
  Variant (26)..(26): Xaa in position 26 is Phe, His or Tyr
  Variant (27)..(28): Xaa in position 27 to 28 is any amino acid
  Variant (29)..(29): Xaa in position 29 is Lys or Arg
  Variant (30)..(31): Xaa in position 30 to 31 is any amino acid
  Variant (33)..(33): Xaa in position 33 is any amino acid
  Variant (34)..(34): Xaa in position 34 is Glu, Lys or Arg
  Variant (35)..(35): Xaa in position 35 is Phe, Ile, Leu or Val
  Variant (36)..(36): Xaa in position 36 is any amino acid
PGXGXXXXXXDXXXFXFXXXKXXXXXXXXXXPXXXXWT

SEQ ID NO: 3791 - protein, 11 aa, Artificial sequence
  protein pattern
  Variant (2)..(2): Xaa in position 2 is Ala, Gly, Pro or Ser
  Variant (4)..(4): Xaa in position 4 is any amino acid
  Variant (7)..(7): Xaa in position 7 is Asp, Asn, Ser or Thr
  Variant (9)..(9): Xaa in position 9 is Ala, Asp, Glu, Asn, Ser or Thr
  Variant (10)..(10): Xaa in position 10 is any amino acid
RXIXGAXLXXI

SEQ ID NO: 3792 - protein, 18 aa, Artificial sequence
  protein pattern
  Variant (2)..(3): Xaa in position 2 to 3 is any amino acid
  Variant (4)..(4): Xaa in position 4 is Phe, His or Tyr
  Variant (5)..(5): Xaa in position 5 is Lys or Arg
  Variant (7)..(7): Xaa in position 7 is Asp or Gly
  Variant (8)..(10): Xaa in position 8 to 10 is any amino acid
  Variant (12)..(13): Xaa in position 12 to 13 is any amino acid
  Variant (15)..(15): Xaa in position 15 is any or no amino acid
  Variant (17)..(17): Xaa in position 17 is any or no amino acid
RXXXXKXXXXEXXKXKXR

SEQ ID NO: 3793 - protein, 14 aa, Artificial sequence
  protein pattern
  Variant (2)..(2): Xaa in position 2 is Ala, Asn, Ser or Thr
  Variant (3)..(3): Xaa in position 3 is any amino acid
  Variant (4)..(4): Xaa in position 4 is Lys or Arg
  Variant (7)..(7): Xaa in position 7 is any amino acid
  Variant (9)..(9): Xaa in position 9 is any amino acid
  Variant (11)..(11): Xaa in position 11 is any amino acid
  Variant (13)..(13): Xaa in position 13 is any amino acid
  Variant (14)..(14): Xaa in position 14 is Ala, Asp, Glu, Gln or Ser
RXXXPEXRXAXRXX

SEQ ID NO: 3794 - DNA, 1563 bp, Populus trichocarpa
  CDS (1)..(1563)
atggcaatggcaatagccatggcccttcgcaggctcccctcttccttcgacaagccccttcgccccgctctcttcaaagccacctccctctattatatgtcttccttgccggatgaagctgtatacgagaaggagaaacctggtgtcacttggccaaagcagctaaatgcacccttagaggttgttgacccacaaattgctgatattattgagctcgagaaagctaggcaatggaaggggcttgagcttataccctcagagaacttcacctccgtatcagtgatgcaagccgtgggttctgtcatgaccaacaagtacagtgaaggatatccaggtgcaagatactacggtggaaacgagtttattgacatggcagaatcattatgtcagaagcgtgctctggaagcatttcgcctggatcctgctaaatggggagtcaacgtgcaatctttatctggatctccatctaattttcaagtctacactgcattgttaaaacctcatgaaagaatcatggcacttgatcttcctcacggaggccatctttctcatggctatcagacagacaccaaaaaaatatctgcagtgtcaatattttttgagacaatgccatacagattgaatgagagcactggctatattgactatgatcagctggagaaaagtgccactcttttcagaccaaaattaatagtagctggtgctagtgcttatgcacgtctatatgattatgcacgcattcgcaaggtttgcgacaaacaaaaagctatactgttggccgatatggcacacattagtggattggttgcagctggtgtcatcccatcgccttttgagtatgcagatgtagtgaccaccacaactcacaagtcacttcgtgggccacgtggggccatgattttcttcaggaaggggctaaaagaggttaacaaacaagggaaagaggtcttttatgactatgaggacaaaatcaatcaagctgtctttcctgggcttcaaggtggtccacacaaccacacaattgctggtttagcagttgctttgaaacaggctacaactctggagtacaaagcgtatcaagagcaggttcttagtaattgctcaaaatttgctcagagtctagttgagaaaggctatgaacttgtttctggtggaactgagaaccatttagttttggtgaacctgaagaacaagggtattgatggctccagagttgaaaaggtgctcgaatctgttcacattgctgcaaacaaaaacactgttcctggtgatgtgtctgccatggttcctggtggcatcaggatgggaacaccggctcttacttctagggggttcgtggaagaggattttgctaaggtggcagatttctttgatgcttcggtgaagttggcagtgaagatgaaggctgaaaccaaagggacaaagttgaaggatttcttggttacaatgcagtctgctcactttcaatctgagatttcaaaactccgtcatgaagtggaagaatatgctaagcaattcccaacaattggatttaacaaagaaaccatgaagtacaagaattga

SEQ ID NO: 3795 - protein, 520 aa, Populus trichocarpa
MAMAIAMALRRLPSSFDKPLRPALFKATSLYYMSSLPDEAVYEKEKPGVTWPKQLNAPLEVVDPQIADIIELEKARQWKGLELIPSENFTSVSVMQAVGSVMTNKYSEGYPGARYYGGNEFIDMAESLCQKRALEAFRLDPAKWGVNVQSLSGSPSNFQVYTALLKPHERIMALDLPHGGHLSHGYQTDTKKISAVSIFFETMPYRLNESTGYIDYDQLEKSATLFRPKLIVAGASAYARLYDYARIRKVCDKQKAILLADMAHISGLVAAGVIPSPFEYADVVTTTTHKSLRGPRGAMIFFRKGLKEVNKQGKEVFYDYEDKINQAVFPGLQGGPHNHTIAGLAVALKQATTLEYKAYQEQVLSNCSKFAQSLVEKGYELVSGGTENHLVLVNLKNKGIDGSRVEKVLESVHIAANKNTVPGDVSAMVPGGIRMGTPALTSRGFVEEDFAKVADFFDASVKLAVKMKAETKGTKLKDFLVTMQSAHFQSEISKLRHEVEEYAKQFPTIGFNKETMKYKN

SEQ ID NO: 3796 - DNA, 1554 bp, Arabidopsis thaliana
  CDS (7)..(1554)
atggcgatggccatggctcttcgaaggctttcttcttcaattgacaaacccattcgtcctcttattcgatccacttcatgttacatgtcttctttgcccagtgaagctgttgatgagaaggaaagatctcgtgtcacttggccaaaacagcttaacgcacctttagaggaggttgatcctgagattgctgacattattgagcatgagaaagctagacaatggaagggacttgaacttattccatctgagaacttcacatctgtgtcggtgatgcaagctgttgggtctgtcatgactaacaaatacagtgaaggctatcctggtgccagatactatggaggaaatgagtatatagacatggcagaaaccttatgccagaagcgcgctcttgaagctttccggttagatcctgaaaagtggggagtgaatgttcaacctttgtctggatctcctgccaacttccatgtgtacactgcattgttaaagcctcatgaaagaatcatggcacttgatcttcctcatggtggtcatctttctcatggttatcagactgacaccaagaagatatcagctgtgtctatcttctttgaaacaatgccctatagattggacgagagcactggctacatcgactacgatcagatggagaaaagtgctactcttttcaggccaaaattgattgttgctggtgcaagtgcttatgctagattgtatgactatgcccgcatcagaaaggtctgtaacaagcaaaaagctgtaatgctagcagatatggcacacatcagtggtttggttgctgctaatgtaatcccttcaccgttcgactatgctgatgttgtaaccaccacaactcacaagtcacttcgtggaccccgtggagccatgattttcttcagaaagggtgttaaggaaattaacaagcaagggaaagaggttttgtatgattttgaagacaagatcaaccaagctgtcttccctggtcttcaaggtggtccacacaaccacactatcacaggactagctgttgctttgaaacaggcaactacttcagagtacaaagcataccaagaacaagtcctgagtaacagtgcaaagtttgctcagactctaatggagagaggatatgaacttgtttctggtggaactgacaaccatctggttctagtgaatctaaagcccaagggaattgatggatctagagttgagaaagtgttggaagctgttcacattgcatccaacaaaaacactgttcctggagatgtttctgccatggttcctggtggaatcagaatgggtactcctgctctcacttccagaggctttgttgaggaagactttgccaaagtagctgaatacttcgacaaagctgtgacaatagctctcaaagtcaaatctgaagctcaaggaaccaagttgaaggatttcgtgtcagcaatggaatcctcttcaaccatccaatccgagattgcgaaactgcgccatgaagtcgaggaattcgctaagcagttcccaacaattgggtttgagaaagaaaccatgaagtacaagaactag

SEQ ID NO: 3797 - protein, 515 aa, Arabidopsis thaliana
MAMALRRLSSSIDKPIRPLIRSTSCYMSSLPSEAVDEKERSRVTWPKQLNAPLEEVDPEIADIIEHEKARQWKGLELIPSENFTSVSVMQAVGSVMTNKYSEGYPGARYYGGNEYIDMAETLCQKRALEAFRLDPEKWGVNVQPLSGSPANFHVYTALLKPHERIMALDLPHGGHLSHGYQTDTKKISAVSIFFETMPYRLDESTGYIDYDQMEKSATLFRPKLIVAGASAYARLYDYARIRKVCNKQKAVMLADMAHISGLVAANVIPSPFDYADVVTTTTHKSLRGPRGAMIFFRKGVKEINKQGKEVLYDFEDKINQAVFPGLQGGPHNHTITGLAVALKQATTSEYKAYQEQVLSNSAKFAQTLMERGYELVSGGTDNHLVLVNLKPKGIDGSRVEKVLEAVHIASNKNTVPGDVSAMVPGGIRMGTPALTSRGFVEEDFAKVAEYFDKAVTIALKVKSEAQGTKLKDFVSAMESSSTIQSEIAKLRHEVEEFAKQFPTIGFEKETMKYKN

SEQ ID NO: 3798 - DNA, 1554 bp, Arabidopsis thaliana; identical to SEQ ID NO: 3796
  CDS (13)..(1554)

SEQ ID NO: 3799 - protein, 513 aa, Arabidopsis thaliana
MALRRLSSSIDKPIRPLIRSTSCYMSSLPSEAVDEKERSRVTWPKQLNAPLEEVDPEIADIIEHEKARQWKGLELIPSENFTSVSVMQAVGSVMTNKYSEGYPGARYYGGNEYIDMAETLCQKRALEAFRLDPEKWGVNVQPLSGSPANFHVYTALLKPHERIMALDLPHGGHLSHGYQTDTKKISAVSIFFETMPYRLDESTGYIDYDQMEKSATLFRPKLIVAGASAYARLYDYARIRKVCNKQKAVMLADMAHISGLVAANVIPSPFDYADVVTTTTHKSLRGPRGAMIFFRKGVKEINKQGKEVLYDFEDKINQAVFPGLQGGPHNHTITGLAVALKQATTSEYKAYQEQVLSNSAKFAQTLMERGYELVSGGTDNHLVLVNLKPKGIDGSRVEKVLEAVHIASNKNTVPGDVSAMVPGGIRMGTPALTSRGFVEEDFAKVAEYFDKAVTIALKVKSEAQGTKLKDFVSAMESSSTIQSEIAKLRHEVEEFAKQFPTIGFEKETMKYKN

SEQ ID NO: 3800 - DNA, 1826 bp, Zea mays subsp. mays
  CDS (78)..(1619)
actacctcccaaactcgcgagcgagtcgaggctccaaccccggcacatcacaggaggaggaggacgacgcgcccaccatggccatggcgacggccctccgcaagctctccgccaacgctctgcgccgccagccgctctcccgcatcacgccgctctactacatggcgtcccttccggcgacggaggagagatccggaatcacctggactaagcagttgaacgcgccgctggaagaggtcgaccccgagattgctgacatcatcgagcacgagaaggcccgccaatggaagggtctggagctcatcccgtcggagaatttcacgtcggtgtcagtgatgcaggcagttgggtcggtaatgaccaacaagtacagcgaggggtaccctggcgcaagatactacgggggaaatgagtttattgatatggcagagtccttgtgtcagaaacgtgctttggaggctttccgtttggacccggcgaaatggggagtgaatgtgcaacctctatccggttcgcccgccaacttccatgtatacactgcactcttgaagccacatgaaaggatcatggctttggatcttcctcacggtggacatctttctcatggttaccagactgacactaagaagatatctgcaacttcaatattttttgagacaatgccttacagattggatgaaagcactggattgattgattacgatcagttgaagaaaagcgctgttctttttaggccaaagttgatcattgccggtgcaagtgcatatgctcggctatatgattatgaccgtatgcggaagatatgcaccaagcagaaggcaatacttctagcagacatggcacatattagtgggcttgttgcagctggtgttgttccatctccttttgattatgcagatgtagtgactaccactactcacaaatcactccgtgggccacgtggagccatgatcttttacaggaagggagtcaaagaaataaataaacaaggaaaagaggttatgtatgattttgaggacaaaatcaatgctgctgtctttcctggtctgcaaggtgggcctcataaccataccattactggcttggctgttgcgctcaaacaggcaactactccagaatacagagcttaccaagagcaagttatcagtaattgtgctaaatttgcgcagagcctgatttcaaaaggatatgaactcgtctctggtgggactgacaaccatttagttctggtgaatctcaagaataaggggatagatggttcaagggtggagaaggttttagaaagtgtgcatattgcagcaaacaagaacacagttcctggtgatgtttcagctatggtgccaggaggcatcaggatgggaaccccagcccttacgtcgagaggatttgttgaagaagatttcgctaaagttgctgacttcttcgatgcagcagtgaatctggccttgaagattaaggctgcaacgacaggtggaacaaagctgaaggactttgttgccactttgcaatctgatagcatccaagttgagattgcaaagcttcgccatgatgtagaggaatttgcaaaacaattcccaacaattggatttgagaaagagaccatgaaatacaagaactaatatctggatgacaagaagagaatgaggtcactcttcttgcagtaagcattcgaagcaagatgccacgatgattattgggagtttaaccatggtgtaatggcatcttatgttaaagagatgttggcaatttacagcatgtggaactttcgtcaatcatattgtagacacataccgcgagatgctatattgaccggacaattgcatttc

SEQ ID NO: 3801 - protein, 513 aa, Zea mays subsp. mays
MAMATALRKLSANALRRQPLSRITPLYYMASLPATEERSGITWTKQLNAPLEEVDPEIADIIEHEKARQWKGLELIPSENFTSVSVMQAVGSVMTNKYSEGYPGARYYGGNEFIDMAESLCQKRALEAFRLDPAKWGVNVQPLSGSPANFHVYTALLKPHERIMALDLPHGGHLSHGYQTDTKKISATSIFFETMPYRLDESTGLIDYDQLKKSAVLFRPKLIIAGASAYARLYDYDRMRKICTKQKAILLADMAHISGLVAAGVVPSPFDYADVVTTTTHKSLRGPRGAMIFYRKGVKEINKQGKEVMYDFEDKINAAVFPGLQGGPHNHTITGLAVALKQATTPEYRAYQEQVISNCAKFAQSLISKGYELVSGGTDNHLVLVNLKNKGIDGSRVEKVLESVHIAANKNTVPGDVSAMVPGGIRMGTPALTSRGFVEEDFAKVADFFDAAVNLALKIKAATTGGTKLKDFVATLQSDSIQVEIAKLRHDVEEFAKQFPTIGFEKETMKYKN

SEQ ID NO: 3802 - DNA, 1826 bp, Zea mays subsp. mays; identical to SEQ ID NO: 3800
  CDS (84)..(1619)

SEQ ID NO: 3803 - protein, 511 aa, Zea mays subsp. mays
MATALRKLSANALRRQPLSRITPLYYMASLPATEERSGITWTKQLNAPLEEVDPEIADIIEHEKARQWKGLELIPSENFTSVSVMQAVGSVMTNKYSEGYPGARYYGGNEFIDMAESLCQKRALEAFRLDPAKWGVNVQPLSGSPANFHVYTALLKPHERIMALDLPHGGHLSHGYQTDTKKISATSIFFETMPYRLDESTGLIDYDQLKKSAVLFRPKLIIAGASAYARLYDYDRMRKICTKQKAILLADMAHISGLVAAGVVPSPFDYADVVTTTTHKSLRGPRGAMIFYRKGVKEINKQGKEVMYDFEDKINAAVFPGLQGGPHNHTITGLAVALKQATTPEYRAYQEQVISNCAKFAQSLISKGYELVSGGTDNHLVLVNLKNKGIDGSRVEKVLESVHIAANKNTVPGDVSAMVPGGIRMGTPALTSRGFVEEDFAKVADFFDAAVNLALKIKAATTGGTKLKDFVATLQSDSIQVEIAKLRHDVEEFAKQFPTIGFEKETMKYKN

SEQ ID NO: 3804 - DNA, 1824 bp, Triticum aestivum
  CDS (79)..(1611)
ctcccaaacccgacactccaacccctaccgagaggtgcacgaggaggccgcccaccaccaccaccaccaccacccaccatggccatggcgacggcgctccgcaagctctccgcccgcggccagcccctctcccgcctcacgccgctctactccatggcgtctctgccggcgacggaggagagatccgcagtcacctggcccaagcagttgaacgcgccgctggaggaggtcgaccccgagattgccgacatcatcgagctcgagaaggcccgccaatggaaggggctggagctcatcccgtcggagaacttcacctccctctcggtgatgcaggcggtgggatccgtcatgaccaacaagtacagcgaggggtaccccggcgcgagatactacggtggaaacgaatacattgatatggccgagacgctgtgccagaaacgtgctttggaggctttcaatttggacccagagaagtggggagtgaatgtgcaacctctatcgggttcacctgccaacttccatgtatacactgctctgctgaagccacatgatagaattatggctctggatcttcctcacggtggacatctttcccatggttaccagactgacacaaagaaaatctcagcagtttcaatattctttgagacaatgccttacagactggatgaaagcactggcttgattgattatggccagttggagaaaagtgccgttctttttaggccaaagttgattgttgctggtgctagtgcatatgcccgcctttatgattataaccgcatgcggaagatctgtgacaagcagaaggcagttcttctcgcagacatggcacatatcagtgggctagttgctgctggtgtcattccgtctccttttgagtatgcagatgtggtgactaccactacccacaagtctctccgtggtccacgtggagccatgatctttttccggaagggggtgaaagaaataaacaaacaagggaaggaggttaagtatgattttgaggacaaaatcaatgctgctgtcttcccaggtctgcaaggtggaccccataaccatactattactggcctggccgttgcgcttaagcaggcaactactcaggagtacagagcttatcaagagcaagttatgagtaactctgctagatttgctgagagcttgacttcaaaaggttacgacattgtctctggtgggactgataaccatttagttttggtgaacctcaagaaaaagggaatagatggttcacgtgtggagaaggttttagaaaatgtgcatattgcagcaaacaagaacacggttcctggtgatgtttcagctatggtacccggaggcatcaggatgggaacccccgcacttacatcaagaggatttgttgaggaggacttcgccaaggttgctgacttcttcgattcggcagtgaacttggccttgaaggttaaagctgcagcagcaggtaccaaactgaaggactttgttgccacattgcaatccgacagcaacatccaagctgaaattgcaaagcttcgccacgatgtggaggaatatgcgaaacaattcccaacaattggattcgagaaggagaccatgaagtacaagaactaagaactgctatgtttcaacagcaaggaagcaaacaagaagcacagtttgaggacaagtcatgtaaacaatagatccacgatgaagcgccaccttatgtaaaagtaatccaatcattttacagaatatgggaactttgtcgatagtttcttattgcaggcacatactgtaagatgcttcgctgatatgctatatgaaccgccatccttcttggac

SEQ ID NO: 3805 - protein, 510 aa, Triticum aestivum
MAMATALRKLSARGQPLSRLTPLYSMASLPATEERSAVTWPKQLNAPLEEVDPEIADIIELEKARQWKGLELIPSENFTSLSVMQAVGSVMTNKYSEGYPGARYYGGNEYIDMAETLCQKRALEAFNLDPEKWGVNVQPLSGSPANFHVYTALLKPHDRIMALDLPHGGHLSHGYQTDTKKISAVSIFFETMPYRLDESTGLIDYGQLEKSAVLFRPKLIVAGASAYARLYDYNRMRKICDKQKAVLLADMAHISGLVAAGVIPSPFEYADVVTTTTHKSLRGPRGAMIFFRKGVKEINKQGKEVKYDFEDKINAAVFPGLQGGPHNHTITGLAVALKQATTQEYRAYQEQVMSNSARFAESLTSKGYDIVSGGTDNHLVLVNLKKKGIDGSRVEKVLENVHIAANKNTVPGDVSAMVPGGIRMGTPALTSRGFVEEDFAKVADFFDSAVNLALKVKAAAAGTKLKDFVATLQSDSNIQAEIAKLRHDVEEYAKQFPTIGFEKETMKYKN

SEQ ID NO: 3806 - DNA, 1824 bp, Triticum aestivum; identical to SEQ ID NO: 3804
  CDS (85)..(1611)

SEQ ID NO: 3807 - protein, 508 aa, Triticum aestivum
MATALRKLSARGQPLSRLTPLYSMASLPATEERSAVTWPKQLNAPLEEVDPEIADIIELEKARQWKGLELIPSENFTSLSVMQAVGSVMTNKYSEGYPGARYYGGNEYIDMAETLCQKRALEAFNLDPEKWGVNVQPLSGSPANFHVYTALLKPHDRIMALDLPHGGHLSHGYQTDTKKISAVSIFFETMPYRLDESTGLIDYGQLEKSAVLFRPKLIVAGASAYARLYDYNRMRKICDKQKAVLLADMAHISGLVAAGVIPSPFEYADVVTTTTHKSLRGPRGAMIFFRKGVKEINKQGKEVKYDFEDKINAAVFPGLQGGPHNHTITGLAVALKQATTQEYRAYQEQVMSNSARFAESLTSKGYDIVSGGTDNHLVLVNLKKKGIDGSRVEKVLENVHIAANKNTVPGDVSAMVPGGIRMGTPALTSRGFVEEDFAKVADFFDSAVNLALKVKAAAAGTKLKDFVATLQSDSNIQAEIAKLRHDVEEYAKQFPTIGFEKETMKYKN

SEQ ID NO: 3808 - DNA, 1803 bp, Oryza sativa
  CDS (1)..(1803)
atggatctctcgcggccggaatcgtcggacctgtcgctgggtttccactcgctcggccacgcccgcgggcacgcggtcacggggccgctgcggctgttcgatgacatggaggacgccaagccggagaagagcgtcggtggcggcggaggaggagggggaggaggaggcgaggaggaggatggggaggaagggggcgaccagcacttctccctcctcggccacgcgctctgcgtcaagcgtccacgccgcgcgctctacggaggcggaggcggaggcggggcaggaggtggaggaggaggaggaggggaggcgtcctcctgctcgtcttcctcctcgtcgctgcacccggcgaagcggcaggcgacggcggagcgcggcgcggatctggaggcccgccgcggcgccgtccgcgcgtggggcaaccaggcgctggcggaggccgacccggacgtgcacgcgctgatggagctcgagcgcgaccgccaggtgcgcgggatcgagctgatcgcgtcggagaacttcgtctgccgcgcggtgctcgaggcgctcggcagccacctcaccaacaagtactctgagggccatcccggggctcggtactatggcgggaaccagcacatcgacggcatcgagcgcctctgccatgagcgcgccctcgccgccttcggtctcgaccccgcctgctggggggtcaacgtccagccatactcctgcacctctgcaaacctagctgtttacacaggtctcctcctgcccaaggaccgtatcatggggctcgagccgccttccggtggccatgtcagccacgggtactacacaccaagtggtaagaaggtgtctggagcatccatattcttcgagagcttgtcgtacaaggtgaatccgcagactgggtatattgattacgacaagcttgaggagcgggcaatggatttccaccctaagattctcatatgtggtgggagctcataccccagggagtgggattttgcacggatgaggctcattgctgataagtgcggtgcggtgctcatgtgcgatatggcacatatcagcgggcttgttgcggccaaggaatgccgtagtccctttgattactgtgatgtggttacatcaactactcacaagaatctgagaggtcctagaggtggtataatatttttcaggagagggaaaaacttaaggaggcgtactggatctttttctcaagcggatgagaatgattatgacttcgaggacaggataaattttgcagttttcccttcaatgcaaggaggaccccataataatcatattgcagccttggcgataactctgaagcaagtagcaacacctgaatacaaagcatacatcatacaagttaagaaaaatgcccaagctttggcatcagccttactcagaagaaaatgcagattggttactggtggcaccgataaccacttggtactttgggacctcagaaatttaggcttgactggaaagaactttgagaaggtctgtgaggcatgccacatctccataaataagatgccgatatatggggataatggctcaatatctcctgggggtgttcggattggaacacctgcaatgactactagaggttgcttggaagatgactttgaggtgatcgcagatttcctcatcagagccacccaaatagctagtaatcttatgaaagaacatggaaaaatgcagaaggaattcctgagaggcctacagaacaataaagatatcatagaactccgtaaccaggttgagaattttgcatcgcagtttgcaatgccaggttttgatgtatga

SEQ ID NO: 3809 - protein, 600 aa, Oryza sativa
MDLSRPESSDLSLGFHSLGHARGHAVTGPLRLFDDMEDAKPEKSVGGGGGGGGGGGEEEDGEEGGDQHFSLLGHALCVKRPRRALYGGGGGGGAGGGGGGGGEASSCSSSSSSLHPAKRQATAERGADLEARRGAVRAWGNQALAEADPDVHALMELERDRQVRGIELIASENFVCRAVLEALGSHLTNKYSEGHPGARYYGGNQHIDGIERLCHERALAAFGLDPACWGVNVQPYSCTSANLAVYTGLLLPKDRIMGLEPPSGGHVSHGYYTPSGKKVSGASIFFESLSYKVNPQTGYIDYDKLEERAMDFHPKILICGGSSYPREWDFARMRLIADKCGAVLMCDMAHISGLVAAKECRSPFDYCDVVTSTTHKNLRGPRGGIIFFRRGKNLRRRTGSFSQADENDYDFEDRINFAVFPSMQGGPHNNHIAALAITLKQVATPEYKAYIIQVKKNAQALASALLRRKCRLVTGGTDNHLVLWDLRNLGLTGKNFEKVCEACHISINKMPIYGDNGSISPGGVRIGTPAMTTRGCLEDDFEVIADFLIRATQIASNLMKEHGKMQKEFLRGLQNNKDIIELRNQVENFASQFAMPGFDV

SEQ ID NO: 3810 - DNA, 1542 bp, Oryza sativa
  CDS (1)..(1542)
atggccatggcgacggcgctccgcaagctctcctccgacgccctccgccgccagccgctctcccgcatcaccccgctctactacatggcgtccctgccggcgacggaggagagatccggagtcacctggccgaagcagctgaacgcgccgctggaggaggtggatcccgagatcgccgacatcatcgagcacgagaaggcccgccaatggaagggtctggagctcatcccgtcggagaacttcacctcggtgtcagtgatgcaggcggtgggatccgtcatgaccaacaagtacagcgaggggtaccccggcgcgagatactacggtggaaacgaatacattgatatggccgagtcattgtgccagaaacgtgctttggaggccttccgcttggacccagcgaaatggggagtgaatgtgcaacctctatcagggtcacctgccaacttccatgtttacactgccctattgaaaccacatgagagaatcatggctttggatcttcctcatggtggacatctttctcacggctaccagactgatactaagaagatttcagcagtttcgatattctttgagacaatgccctacagattggatgaaagcactggcttgattgattatgatcagatggagaaaagtgccgttctttttaggccaaagttgatcgttgcgggtgcaagtgcatatgcgcgtctttatgactatgaccgcatgcggaaggtttgtgacaagcagaaggcaatacttctagcagatatggcacatatcagtgggcttgtcgcagctggtgttgttccatctccttttgattatgcagatgtagtgactaccactactcacaagtcactccgtggaccacgtggagccatgatcttttacaggaagggggtgaaaggagtaaacaagcaaggcaaagaggttatgtatgactttgaggacaagatcaatgctgctgtcttcccaggtctgcaaggtggaccacataatcataccattactggcttagctgttgcgcttaagcaggcaactactccggagtacagagcttatcaagagcaagttatgagtaactgtgcaaaatttgcacagagcttgacagcaaaaggctacgaacttgtctctggtgggactgacaaccatttagtgttggtaaatctcaagagcaagggcatagatggttcaagagtggagaaggttttagaaaacgtgcacattgcagcaaacaagaacacagttcctggtgatgtttcagctatggtaccaggaggcatcaggatgggaaccccagcactgacctcaagaggatttgttgaggaggactttgctaaggttgctgatttcttcgatgcagcagtgaacttggctttgaaggttaaggctgcagcaggtggaacaaaactgaaggactttgttgccactttgcaatctgatagcaacattcaatccgagattgcaaaacttcgccatgatgtggaggaatatgcaaaacagttccccacaattgggtttgagaaagaaaccatgaagtacaagaactaa

SEQ ID NO: 3811 - protein, 513 aa, Oryza sativa
MAMATALRKLSSDALRRQPLSRITPLYYMASLPATEERSGVTWPKQLNAPLEEVDPEIADIIEHEKARQWKGLELIPSENFTSVSVMQAVGSVMTNKYSEGYPGARYYGGNEYIDMAESLCQKRALEAFRLDPAKWGVNVQPLSGSPANFHVYTALLKPHERIMALDLPHGGHLSHGYQTDTKKISAVSIFFETMPYRLDESTGLIDYDQMEKSAVLFRPKLIVAGASAYARLYDYDRMRKVCDKQKAILLADMAHISGLVAAGVVPSPFDYADVVTTTTHKSLRGPRGAMIFYRKGVKGVNKQGKEVMYDFEDKINAAVFPGLQGGPHNHTITGLAVALKQATTPEYRAYQEQVMSNCAKFAQSLTAKGYELVSGGTDNHLVLVNLKSKGIDGSRVEKVLENVHIAANKNTVPGDVSAMVPGGIRMGTPALTSRGFVEEDFAKVADFFDAAVNLALKVKAAAGGTKLKDFVATLQSDSNIQSEIAKLRHDVEEYAKQFPTIGFEKETMKYKN

SEQ ID NO: 3812 - DNA, 1764 bp, Oryza sativa
  CDS (1)..(1764)
atgctcgatcgcgcgacgggggggcggcgccgcgccgcgggcgaagggatggaccatcggcccgacctgtccctcgccctccacccgccgccgccgcccgagggctcgtccgccgccgccgccgaggaggtgggggaggaggaggccgaaggcggcgaggggcggttctccctcatgggccagccgctcttcctcaagcggccgcggccgcggcccccgcgcccgccccgcgcgcgcggggtgggggacgacgtcgacgtcgacgtcgacgacgactcatccccgtgctgctcctcctcctgcctctcgcccgcggcgaagcggcgggcggcggcgggaggactcgaggcgcgccgcgcggccgtgcgcgcgtggggatgccagccgctcacggaggcggacccggacgtgcacgagctgatggagcgggagcggcgccggcaggcgggcggggtcgagctcatcgcctccgagaactacgcctgccgcgcggtgctcgacgcgctcggcagccacctcaccaacaagtactccgagggcctccccggcgcgcgctactactgcggcaaccagcacatcgacgccatcgagcgcctctgctgcgaccgcgcgctcgccgccttcggcctcgacccgtcgcgctggggcgtcaacgtgcagccctactcctgcacctccgccaacttcgccgtctacacggggctcctcctccccaacgacaggatcatgggcctcgactcgccgtccggcggccacgtcagccacgggtactacacgcccagcggcaagaaggtctccggcgcctccatcttcttcgagaacctctcctacagggtgaacccgcacaccgggtacatcgattacgataaggtagaggagaaggccgtggatttccaccccaagattctcatctgcggcgcgagctcgtatccaagggattgggactatgcacggatgcggcttgttgctgataagtgcggcgcagtactcatgtgtgacatggcacaaatcagtggtcttgtggcagcgaaggaatgtcgaaatccctttgactactgcgatattgttacttcaaccacacacaagagcttgaggggtcctagaggtggtataatatttttcaggaaagggaaaaatctaaggaaacgggtcggatctttaactcaagtggttgaaaatgatcagtatgattttgaggaccgtataaattttgctgttttcccttcaatgcaaggtggaccccacaataaccatattgctgctctggctatagctctaaaacaagtagccatgccagaattcaaagcatacattcaacaagtcaagaaaaatgcccaagctttggcgatggccttgctcaggaggaaatgcagactggttactggtggcacagataatcatttgatgctctgggacctaagaacatttggcttgacagggaagaactttgagaaggtctgtgaggcatgtcatatctctcttaataaaacaccaatatatggagataatggttcgatttctcctggaggtgtgcggattggaactcctgccatgacaactagaggttgcttggagagtgactttgagataatggcagaattccttttgagggcagcacatatagcaagtattgttttgaaggagcatggaaggcttcagaaggattttctgaaaggtctggagaacaataatgacattattgaactccggaatcaggtggagacatttgccttacaatttgccatgccgggatttgatgtataa

SEQ ID NO: 3813 - protein, 587 aa, Oryza sativa
MLDRATGGRRRAAGEGMDHRPDLSLALHPPPPPEGSSAAAAEEVGEEEAEGGEGRFSLMGQPLFLKRPRPRPPRPPRARGVGDDVDVDVDDDSSPCCSSSCLSPAAKRRAAAGGLEARRAAVRAWGCQPLTEADPDVHELMERERRRQAGGVELIASENYACRAVLDALGSHLTNKYSEGLPGARYYCGNQHIDAIERLCCDRALAAFGLDPSRWGVNVQPYSCTSANFAVYTGLLLPNDRIMGLDSPSGGHVSHGYYTPSGKKVSGASIFFENLSYRVNPHTGYIDYDKVEEKAVDFHPKILICGASSYPRDWDYARMRLVADKCGAVLMCDMAQISGLVAAKECRNPFDYCDIVTSTTHKSLRGPRGGIIFFRKGKNLRKRVGSLTQVVENDQYDFEDRINFAVFPSMQGGPHNNHIAALAIALKQVAMPEFKAYIQQVKKNAQALAMALLRRKCRLVTGGTDNHLMLWDLRTFGLTGKNFEKVCEACHISLNKTPIYGDNGSISPGGVRIGTPAMTTRGCLESDFEIMAEFLLRAAHIASIVLKEHGRLQKDFLKGLENNNDIIELRNQVETFALQFAMPGFDV

SEQ ID NO: 3814 - DNA, 1596 bp, Oryza sativa
  CDS (1)..(1596)
atggcgatggcttcgcaccacctcgcccagccgcccacgcgcgcggctctctcctcgcgccccacctacccgctctccagccatcaccactcctcccgtctccagctcccgctcgtcagcggggcgcggcgcagcaggctgtcccccgcggtggcgacgtccccggtcgccgccccagcgatggacgccgtggccgactgggggctgaccactctggaggaggctgacccggaggtgtacgacctcgtcgagcgcgagaagcggcggcagcgcgcgggcgtcgagctcatcgcgtcggagaacttcacctcgctcgccgtcatggaggcgctgggctcgccgctcaccaacaagtactccgagggcatgccggggtcccgctactacggaggcaacgaggtcatcgacgaggtggaggagctctgccgcgcccgcgcgctcgccgccttccacctcgaccccgaggcctggggcgtcaacgtgcagccctactccggctcgccggcgaacttcgccgcctacaccgggctgctccaaccccacgagcggatcatggggctcgatttgccgtccggcggccacctcacgcacggctactacaccgccggcggcaaaaagatctccgccacgtccatctacttcgagagcctgccgtacaaggtgagctccgagacaggatacgtcgattatgataagctggaggagaaggccatggattttcggcccaagctcatcatctgcggcgggagcgcgtacccgcgggattgggattacgccaggttcagggccatcgcggataagtgcggcgccatgttgctctgcgacatggctcacatcagtggcctagttgccgcgcaggaggctgcaaatccttttcaatattctgatgtggttaccaccaccacccacaagagtctccgagggccaagatctggtatgatcttctacaggaagggcctgaagcctcccaagaaaggccagcctgagggcgctctgtatgactacgaggacaggatcaacttcgcagtgtttccgtcgctccaagggggccctcacaaccaccaaattgctgcgctagcggttggtttgaagcagactatgtcacctggattcaagtcttatattaagcaggtcaaggccaatgctgttgcccttggtaaccatttgatgagtaagggctacaaattggttactgacggaacagagaaccatcttgttctctgggatctgcgccctcttggcttgactggtaacaaagttgagaaggtctgtgatttgtgcagcattacactgaacaaaaatgctgtctttggggatagcagtgcaatgtcacctggtggtgtccgcattggtacacctgccatgacatcaaggggtttggtagaggaggactttgtacagatcgccgagttccttcaccaggcagtgaccatctgcttggatgttcagaaggagcgtggcaagcttctcaagtacttcaacgagggcctggagaacaacaaggacattgaggacctcagggcggaggtggagaagtttgccacttcattcgagatgcctggcttcagggtatccgacatgaagtacaaggattag

SEQ ID NO: 3815 - protein, 531 aa, Oryza sativa
MAMASHHLAQPPTRAALSSRPTYPLSSHHHSSRLQLPLVSGARRSRLSPAVATSPVAAPAMDAVADWGLTTLEEADPEVYDLVEREKRRQRAGVELIASENFTSLAVMEALGSPLTNKYSEGMPGSRYYGGNEVIDEVEELCRARALAAFHLDPEAWGVNVQPYSGSPANFAAYTGLLQPHERIMGLDLPSGGHLTHGYYTAGGKKISATSIYFESLPYKVSSETGYVDYDKLEEKAMDFRPKLIICGGSAYPRDWDYARFRAIADKCGAMLLCDMAHISGLVAAQEAANPFQYSDVVTTTTHKSLRGPRSGMIFYRKGLKPPKKGQPEGALYDYEDRINFAVFPSLQGGPHNHQIAALAVGLKQTMSPGFKSYIKQVKANAVALGNHLMSKGYKLVTDGTENHLVLWDLRPLGLTGNKVEKVCDLCSITLNKNAVFGDSSAMSPGGVRIGTPAMTSRGLVEEDFVQIAEFLHQAVTICLDVQKERGKLLKYFNEGLENNKDIEDLRAEVEKFATSFEMPGFRVSDMKYKD

SEQ ID NO: 3816 - DNA, 1587 bp, Oryza sativa
  CDS (1)..(1587)
atggcgatggcttcgcaccacctcgcccagccgcccacgcgcgcggctctctcctcgcgccccacctacccgctctccagccatcaccactcctcccgtctccagctcccgctcgtcagcggggcgcggcgcagcaggctgtcccccgcggtggcgacgtccccggtcgccgccccagcgatggacgccgtggccgactgggggctgaccactctggaggaggctgacccggaggtgtacgacctcgtcgagcgcgagaagcggcggcagcgcgcgggcgtcgagctcatcgcgtcggagaacttcacctcgctcgccgtcatggaggcgctgggctcgccgctcaccaacaagtactccgagggcatgccggggtcccgctactacggaggcaacgaggtcatcgacgaggtggaggagctctgccgcgcccgcgcgctcgccgccttccacctcgaccccgaggcctggggcgtcaacgtgcagccctactccggctcgccggcgaacttcgccgcctacaccgggctgctccaaccccacgagcggatcatggggctcgatttgccgtccggcggccacctcacgcacggctactacaccgccggcggcaaaaagatctccgccacgtccatctacttcgagagcctgccgtacaaggtgagctccgagacaggatacgtcgattatgataagctggaggagaaggccatggattttcggcccaagctcatcatctgcggcgggagcgcgtacccgcgggattgggattacgccaggttcagggccatcgcggataagtgcggcgccatgttgctctgcgacatggctcacatcagtggcctagttgccgcgcaggaggctgcaaatccttttcaatattctgatgtggttaccaccaccacccacaagagtctccgagggccaagatctggtatgatcttctacaggaagggcctgaagcctcccaagaaaggccagcctgagggcgctctgtatgactacgaggacaggatcaacttcgcagtgtttccgtcgctccaagggggccctcacaaccaccaaattgctgcgctagcggttggtttgaagcagactatgtcacctggattcaagtcttatattaagcaggtcaaggccaatgctgttgcccttggtaaccatttgatgagtaagggctacaaattggttactgacggaacagagaaccatcttgttctctgggatctgcgccctcttggcttgactgttgagaaggtctgtgatttgtgcagcattacactgaacaaaaatgctgtctttggggatagcagtgcaatgtcacctggtggtgtccgcattggtacacctgccatgacatcaaggggtttggtagaggaggactttgtacagatcgccgagttccttcaccaggcagtgaccatctgcttggatgttcagaaggagcgtggcaagcttctcaagtacttcaacgagggcctggagaacaacaaggacattgaggacctcagggcggaggtggagaagtttgccacttcattcgagatgcctggcttcagggtatccgacatgaagtacaaggattag

SEQ ID NO: 3817 - protein, 528 aa, Oryza sativa
MAMASHHLAQPPTRAALSSRPTYPLSSHHHSSRLQLPLVSGARRSRLSPAVATSPVAAPAMDAVADWGLTTLEEADPEVYDLVEREKRRQRAGVELIASENFTSLAVMEALGSPLTNKYSEGMPGSRYYGGNEVIDEVEELCRARALAAFHLDPEAWGVNVQPYSGSPANFAAYTGLLQPHERIMGLDLPSGGHLTHGYYTAGGKKISATSIYFESLPYKVSSETGYVDYDKLEEKAMDFRPKLIICGGSAYPRDWDYARFRAIADKCGAMLLCDMAHISGLVAAQEAANPFQYSDVVTTTTHKSLRGPRSGMIFYRKGLKPPKKGQPEGALYDYEDRINFAVFPSLQGGPHNHQIAALAVGLKQTMSPGFKSYIKQVKANAVALGNHLMSKGYKLVTDGTENHLVLWDLRPLGLTVEKVCDLCSITLNKNAVFGDSSAMSPGGVRIGTPAMTSRGLVEEDFVQIAEFLHQAVTICLDVQKERGKLLKYFNEGLENNKDIEDLRAEVEKFATSFEMPGFRVSDMKYKD

SEQ ID NO: 3818 - DNA, 1545 bp, Glycine max
  CDS (1)..(1545)
atggccatggctcttcctcttcgcagactctcctccaccctcaacaaacctctcgccagcgctacttccatttatcatcgcatgtcctcctcgctctccgctcaggagaaagacaaatctcgcgccgattggataaagcagctcaacgatcctctcgagaccatcgatcccgagatcgctgacataatcgaactcgaaaaagcgcgtcaatggaaggggttcgaacttataccttcggagaatttcacgtcgctgtcggtgatgcaagccgttggatcggtgatgacgaataaatacagcgaaggatatcccggtgctagatactatggaggaaatgagtatattgacatggctgagaccttgtgtcagaagcgtgcacttgaagcttttcggctggatccagcaaaatggggagtcaatgtgcaatcattatctggatccccttctaacttccaagtttacactgctttattgaaacctcatgagagaattatggcacttgatcttccccatggtgggcatctgtcgcatggttatcagactgacaccaagaagatatcagctgtatctatattttttgaaacaatgccatacagattgaatgagagcactggttatatcgattatgaccagttggagaaaagtgcagtactttttaggccaaaattaatagttgctggtgctagtgcttatgctcgcctttatgattatgcacgtgttcgcaaggtctgtgataagcagaaggcagttctgttggctgatatggcacatatcagtggattggttgctgcaggtgttattccttctccttttgattatgcagatgttgtaacaaccacaacacataagtcacttcgtggaccacgtggggctatgattttcttcaggaagggtgtgaaagagataaacaaacaagggaaggaagtgttgtatgactatgaagacagaataaatcaggctgtttttcctggacttcaaggtggtccacacaatcacactatttctggcttagcagttgcactgaagcaggctatgacaccagaattcaagaattaccaaaagcaagtacttagcaactgctcagcatttgcacagagtttgttagagaaaggctacgaacttgtatctggtggaactgacaaccatttagtgttagtgaacttaagaaacaagggcattgatggttctagggttgagaaggtactggaagcagttcatatagctgccaataaaaatactgttccaggggatgtgtctgctatggttcctggaggcattcgaatgggaacccctgctctcacatctaggggatttgttgaggaagatttcgaaaaagtagctgaatactttgatgcagctgtcaagttagccttgcagattaaggaaaacaccaatggtacaaagttgaaggattttgtggcagctatgcaatcagatgaacaagttcaatctaagattgctaatctccgtcatgaagtagaggattatgctaagcagtttcccacaattggttttgacatagaaacaatgaagtatggcaaatga

SEQ ID NO: 3819 - protein, 514 aa, Glycine max
MAMALPLRRLSSTLNKPLASATSIYHRMSSSLSAQEKDKSRADWIKQLNDPLETIDPEIADIIELEKARQWKGFELIPSENFTSLSVMQAVGSVMTNKYSEGYPGARYYGGNEYIDMAETLCQKRALEAFRLDPAKWGVNVQSLSGSPSNFQVYTALLKPHERIMALDLPHGGHLSHGYQTDTKKISAVSIFFETMPYRLNESTGYIDYDQLEKSAVLFRPKLIVAGASAYARLYDYARVRKVCDKQKAVLLADMAHISGLVAAGVIPSPFDYADVVTTTTHKSLRGPRGAMIFFRKGVKEINKQGKEVLYDYEDRINQAVFPGLQGGPHNHTISGLAVALKQAMTPEFKNYQKQVLSNCSAFAQSLLEKGYELVSGGTDNHLVLVNLRNKGIDGSRVEKVLEAVHIAANKNTVPGDVSAMVPGGIRMGTPALTSRGFVEEDFEKVAEYFDAAVKLALQIKENTNGTKLKDFVAAMQSDEQVQSKIANLRHEVEDYAKQFPTIGFDIETMKYGK

SEQ ID NO: 3820 - DNA, 1557 bp, Glycine max
  CDS (1)..(1557)
atggcgatggcaatggcgcttcgcaggctttcatcttcaattgacaagcctctgcgccctctcttcaatgccggttccctctactacaagtcgtctttgcctgatgaagctgtttacgacaaggagcgacccggagttacatggccgaagcagttgaatgctccacttgaggtcgtggatcctgagattgctgatattattgagcttgagaaagctaggcaatggaaggggctagaattgataccgtcagagaatttcacctctgtgtctgtgatgcaagcggttggatcggttatgaccaacaaatacagtgaggggtaccctggtgcaagatattatggtggaaatgagtatattgacatggctgaaacactgtgccaaaagcgtgccctagaagcttttagattggatcccgctaaatggggagtgaacgtgcagcctctgtcagggtctcctgcaaatttccacgtttacactgcattgcttaaacctcatgaaagaatcatggcacttgatcttcctcatggtggccatctttctcacggatatcagactgataccaaaaagatatctgcagtctcgatattttttgagacaatgccatatcgattgaatgaaagtacaggatacatcgactatgaccagatggagaaatctgctacactcttcaggccaaaattaattgttgctggagctagcgcttatgcacgtctctatgattatgaacgtgtacgcaaggtttgcgataaacagaaagctatactattggcagatatggcacacatcagtggattggttgcagctggtgtcatcccatcaccttttgattatgctgatgtagttactaccacaactcacaagtcacttcgaggaccacgtggagctatgatattctacagaaaaggggttaaagaaattaacaaacaaggaaaagaggtattgtatgactacgaagacaaaatcaaccaagctgttttccctggactgcaaggtggccctcacaaccacactattactggtttagctgttgcgttgaagcaggccactactcccgaatatagagcatatcaagagcaagttctcagcaacagctttaaatttgcacaggctctgagtgagagaagctatgagcttgtctctggtggaaccgagaatcacctggttttggtgaatctgaagaataagggtattgatggctccagagttgagaaggtgttggaagcagttcatattgcagctaataaaaacactgttcctggagatgtgtctgccatggttcctggtggcatcaggatgggaacccctgctcttacttctagaggatttgttgaggaggattttgtcaaggtagcagagttttttgatgcagcagtgaagatagctgtgaagattaagggagagagcaaaggaacaaagctgaaggacttcttggccacaattgagtcatcttctacctttcaatcggagatagcaaagctccgccttgatgttgaggagtatgcaaaacaatttccaaccattggttttgataaagcaaccatgaagcacaagaattga

SEQ ID NO: 3821 - protein, 518 aa, Glycine max
MAMAMALRRLSSSIDKPLRPLFNAGSLYYKSSLPDEAVYDKERPGVTWPKQLNAPLEVVDPEIADIIELEKARQWKGLELIPSENFTSVSVMQAVGSVMTNKYSEGYPGARYYGGNEYIDMAETLCQKRALEAFRLDPAKWGVNVQPLSGSPANFHVYTALLKPHERIMALDLPHGGHLSHGYQTDTKKISAVSIFFETMPYRLNESTGYIDYDQMEKSATLFRPKLIVAGASAYARLYDYERVRKVCDKQKAILLADMAHISGLVAAGVIPSPFDYADVVTTTTHKSLRGPRGAMIFYRKGVKEINKQGKEVLYDYEDKINQAVFPGLQGGPHNHTITGLAVALKQATTPEYRAYQEQVLSNSFKFAQALSERSYELVSGGTENHLVLVNLKNKGIDGSRVEKVLEAVHIAANKNTVPGDVSAMVPGGIRMGTPALTSRGFVEEDFVKVAEFFDAAVKIAVKIKGESKGTKLKDFLATIESSSTFQSEIAKLRLDVEEYAKQFPTIGFDKATMKHKN

SEQ ID NO: 3822 - DNA, 1380 bp, Glycine max
  CDS (1)..(1380)
atggccatggctcttcgcagactcaacaaacctttctccaacgccacttccatttatcgccagtcctcttcgctctccgctcacgaaaaacacaaatctcgcgccgattggataaagcagctcaacgatcctctcgaggccatcgatcccgagatcgccgacataatcgaactcgaaaaggcgcgtcaatggaaggggttcgaacttataccttcggaaaatttcacgtcgctgtcggtgatgcaagcagttggatcggtgatgacgaataaatacagtgaaggatatcctggtgctagatactatggaggaaacgaatacattgacatggctgagaccttgtgtcagaagcgtgcacttgaagcttttcagctggatccagcaaaatggggagtcaatgtgcaatcattatctggatccccttctaacttccaagtttacactgctttattgaaacctcatgagagaattatggcacttgatcttccccatggtgggcatctatcgcatggttatcagactgacaccaagaagatatcggctgtatctatattctttgaaacaatgccatacagattgaatgagagcactggttatatcgattatgaccagttggagaaaagtgcagcactttttaggccaaaattaatagttgctggtgctagtgcttatgctcgcctttatgattatgcacgtgttcgcaaggtctgtgataagcagaaggcagttctgttggctgatatggcacatatcagtggattggttgctgccggtgttattccttctccttttgattatgcagatgttgtaacaaccacgacacataagtcacttcgtggaccacgtggggctatgattttcttcaggaagggtgtgaaagagataaacaaacaagggaaggaagtgttgtatgactatgaagacaaaataaaccaggctgtttttcctggacttcaaggtggtccacacaatcacactatttcaggcttagcagttgcactgaagcaggctatgacaccagaattcaagaattaccaaaagcaagtacttagcaactgctcagcatttgcacagagtttgttagaaaaaggctacgaacttgtatctggtggaactgacaaccatttagtgttggtgaacttaagaaacaagggtattgatggttctagggttgagaaggtactggaagcagttcatatagctgccaataaaaataccgttccaggggatgtgtctgctatggttcctggaggcattcgaatgggaacccctgctctcacatctaggggatttgttgaggaagattttgaaaaagtagctgaatactttgatgcggctgtcaagttagccttgcagattaaggaaaataccaatggttga

SEQ ID NO: 3823 - protein, 459 aa, Glycine max
MAMALRRLNKPFSNATSIYRQSSSLSAHEKHKSRADWIKQLNDPLEAIDPEIADIIELEKARQWKGFELIPSENFTSLSVMQAVGSVMTNKYSEGYPGARYYGGNEYIDMAETLCQKRALEAFQLDPAKWGVNVQSLSGSPSNFQVYTALLKPHERIMALDLPHGGHLSHGYQTDTKKISAVSIFFETMPYRLNESTGYIDYDQLEKSAALFRPKLIVAGASAYARLYDYARVRKVCDKQKAVLLADMAHISGLVAAGVIPSPFDYADVVTTTTHKSLRGPRGAMIFFRKGVKEINKQGKEVLYDYEDKINQAVFPGLQGGPHNHTISGLAVALKQAMTPEFKNYQKQVLSNCSAFAQSLLEKGYELVSGGTDNHLVLVNLRNKGIDGSRVEKVLEAVHIAANKNTVPGDVSAMVPGGIRMGTPALTSRGFVEEDFEKVAEYFDAAVKLALQIKENTNG

SEQ ID NO: 3824 - DNA, 1524 bp, Glycine max
  CDS (1)..(1524)
atggccatggctcttcgcagactcaacaaacctttctccaacgccacttccatttatcgccagtcctcttcgctctccgctcacgaaaaacacaaatctcgcgccgattggataaagcagctcaacgatcctctcgaggccatcgatcccgagatcgccgacataatcgaactcgaaaaggcgcgtcaatggaaggggttcgaacttataccttcggaaaatttcacgtcgctgtcggtgatgcaagcagttggatcggtgatgacgaataaatacagtgaaggatatcctggtgctagatactatggaggaaacgaatacattgacatggctgagaccttgtgtcagaagcgtgcacttgaagcttttcagctggatccagcaaaatggggagtcaatgtgcaatcattatctggatccccttctaacttccaagtttacactgctttattgaaacctcatgagagaattatggcacttgatcttccccatggtgggcatctatcgcatggttatcagactgacaccaagaagatatcggctgtatctatattctttgaaacaatgccatacagattgaatgagagcactggttatatcgattatgaccagttggagaaaagtgcagcactttttaggccaaaattaatagttgctggtgctagtgcttatgctcgcctttatgattatgcacgtgttcgcaaggtctgtgataagcagaaggcagttctgttggctgatatggcacatatcagtggattggttgctgccggtgttattccttctccttttgattatgcagatgttgtaacaaccacgacacataagtcacttcgtggaccacgtggggctatgattttcttcaggaagggtgtgaaagagataaacaaacaagggaaggaagtgttgtatgactatgaagacaaaataaaccaggctgtttttcctggacttcaaggtggtccacacaatcacactatttcaggcttagcagttgcactgaagcaggctatgacaccagaattcaagaattaccaaaagcaagtacttagcaactgctcagcatttgcacagagtttgttagaaaaaggctacgaacttgtatctggtggaactgacaaccatttagtgttggtgaacttaagaaacaagggtattgatggttctagggttgagaaggtactggaagcagttcatatagctgccaataaaaataccgttccaggggatgtgtctgctatggttcctggaggcattcgaatgggaacccctgctctcacatctaggggatttgttgaggaagattttgaaaaagtagctgaatactttgatgcggctgtcaagttagccttgcagattaaggaaaataccaatggtacaaagttgaaagattttgtggcagctatgcaatcagatgaacaaattcaatctaagattgctaatctctgtcatgaagttgaggattatgctaagaagtttcccactattggttttaacatagaaacaatgaagtatggtaagtga

SEQ ID NO: 3825 - protein, 507 aa, Glycine max
MAMALRRLNKPFSNATSIYRQSSSLSAHEKHKSRADWIKQLNDPLEAIDPEIADIIELEKARQWKGFELIPSENFTSLSVMQAVGSVMTNKYSEGYPGARYYGGNEYIDMAETLCQKRALEAFQLDPAKWGVNVQSLSGSPSNFQVYTALLKPHERIMALDLPHGGHLSHGYQTDTKKISAVSIFFETMPYRLNESTGYIDYDQLEKSAALFRPKLIVAGASAYARLYDYARVRKVCDKQKAVLLADMAHISGLVAAGVIPSPFDYADVVTTTTHKSLRGPRGAMIFFRKGVKEINKQGKEVLYDYEDKINQAVFPGLQGGPHNHTISGLAVALKQAMTPEFKNYQKQVLSNCSAFAQSLLEKGYELVSGGTDNHLVLVNLRNKGIDGSRVEKVLEAVHIAANKNTVPGDVSAMVPGGIRMGTPALTSRGFVEEDFEKVAEYFDAAVKLALQIKENTNGTKLKDFVAAMQSDEQIQSKIANLCHEVEDYAKKFPTIGFNIETMKYGK

SEQ ID NO: 3826 - DNA, 1557 bp, Glycine max
  CDS (1)..(1557)
atggcgatggcaatggcgcttcgcaggctttcatcttcaattgataagcctcttcgccctctcttcaatgcgggttccctctactacaagtcgtctttgcctgatgaagctgtttacgacaaggagcgacccggagttacatggccgaagcagttgaatgcttcacttgaggtcgttgatcctgagattgctgatattattgagcttgagaaagctaggcaatggaaggggctggaactgataccgtcagagaatttcacttctgtgtctgtgatgcaagcagttggatctgtgatgaccaacaaatacagtgaggggtaccctggtgcaagatattatggtggaaatgagtatattgacatggctgaaacactatgccaaaagcgtgccctggaagcgtttagattggatcccgctaaatggggagtgaacgtgcagcctctgtcagggtctcctgcaaatttccatgtctacactgcattgcttaaacctcatgaaagaatcatggcacttgatcttcctcatggtggccatctttctcatggatatcagactgataccaaaaagatatctgctgtctcaatattttttgagacaatgccatatagattgaacgaaagtacgggatacattgactatgaccagatggagaaatcagcaacactcttcaggccaaaattaattgttgctggagctagcgcttatgcacgtctgtatgattatgaacgtgtacgcaaggtttgtgataaacagaaagctatattattggcagatatggcacacatcagtggattggttgcagctggtgtcatcccatcaccttttgattatgcagatgtagttactaccaccactcacaagtcacttcggggaccacgtggagctatgatattctacagaaaaggcgttaaagaaattaacaaacaaggaaaagagctattgtatgactatgaggacaaaatcaaccaagctgttttccctggactgcaagggggccctcacaaccacactattactggtttagctgttgcattgaagcaggccacaactcccgaatatagagcatatcaggaacaagttctcagcaacagttttaaatttgcacaggctctaagtgagaggggctatgagctggtttctgggggaactgagaatcacctggttttggtgaatctgaagaataagggtattgatggctccagagttgagaaggtgttggaagcagttcatattgcagctaataaaaacactgttcctggagatgtgtctgccatggttcctggtggcatcaggatgggaacccctgctcttacttctagaggatttgttgaggaggattttgttaaggtagcagagttctttgatgcagcagtgaagttggctgtgaagattaagggacagagcaaaggaacaaagctgaaggacttcttggccacaattcaatcatcttctacctttcaatcggagatagcaaagctccgccatgatgttgaggactatgcaaaacaatttccaaccattggttttgagaaagctaccatgaagtacaagaattga

SEQ ID NO: 3827 - protein, 518 aa, Glycine max
MAMAMALRRLSSSIDKPLRPLFNAGSLYYKSSLPDEAVYDKERPGVTWPKQLNASLEVVDPEIADIIELEKARQWKGLELIPSENFTSVSVMQAVGSVMTNKYSEGYPGARYYGGNEYIDMAETLCQKRALEAFRLDPAKWGVNVQPLSGSPANFHVYTALLKPHERIMALDLPHGGHLSHGYQTDTKKISAVSIFFETMPYRLNESTGYIDYDQMEKSATLFRPKLIVAGASAYARLYDYERVRKVCDKQKAILLADMAHISGLVAAGVIPSPFDYADVVTTTTHKSLRGPRGAMIFYRKGVKEINKQGKELLYDYEDKINQAVFPGLQGGPHNHTITGLAVALKQATTPEYRAYQEQVLSNSFKFAQALSERGYELVSGGTENHLVLVNLKNKGIDGSRVEKVLEAVHIAANKNTVPGDVSAMVPGGIRMGTPALTSRGFVEEDFVKVAEFFDAAVKLAVKIKGQSKGTKLKDFLATIQSSSTFQSEIAKLRHDVEDYAKQFPTIGFEKATMKYKN

SEQ ID NO: 3828 - DNA, 1602 bp, Arabidopsis thaliana
  CDS (85)..(1602)
atggcgttggctcttcgtagactctcctcttccgttaagaaaccgatctcgcttctctcctctaatggcggttcactccgtttcatgtcgtctttatcaaccgcagctatggcggaatcggagaaatctcgttctagttggattaagcaattgaatgcatctctagatgaaatcgatcctgaagttgcggatattatcgaattagagaaggctagacaatggaagggatttgaacttataccgtcagagaatttcacttctctatctgtgatgcaagccgttggttctgttatgactaataagtatagtgaaggataccctggagctagatactatggaggaaatgagtacattgacatggctgagacattatgtcaaaaacgcgcattagaagcttttcagttagatccttctaaatggggagtcaatgtgcagtctttatcaggatcaccagctaatttccaagtttacactgcattgttgaagcctcatgaaagaatcatggcacttgatttacctcatggtggacatctttctcatggttatcagactgacacgaagaaaatatcggctgtatccatcttttttgagacaatgccatacagattggatgagaacactggttacattgattatgaccagctagaaaagagtgccgtgcttttcagaccgaaacttattgttgcgggtgcaagtgcttatgctcgtctatatgactatgcacgtattcgtaaggtctgtaacaagcaaaaggcagttatgttggctgatatggctcatattagtgggttggttgctgctggcgttattccttctccttttgagtatgcagatgttgttacgactacaactcacaaatcgcttcgcggtcctagaggggctatgatattctttaggaaggggttaaaagagattaacaaacaagggaaagaggtcatgtatgactatgaggacagaattaatcaagctgtttttcctggactgcaaggtggtccacataatcacactataacgggtctagcagttgctctgaagcaggcaagaactcctgagtacaaggcctaccaggatcaagttctccgtaattgctcaaagtttgctgagttggatataagacctactgtaatcatctcatatggcttgtcaatgcagactttgcttgcgaaaggatatgatttagtgtctggaggcactgataatcatttagttttggtgaatctgaaaaacaagggaatagatggatcaagagtggaaaaagtattagaattagtacatattgcagcaaacaagaatactgttcctggtgatgtttctgccatggttcccggtggcatccgtatgggaacaccagccctcacatcaagaggattcattgaggaagattttgcaaaagtggcggagtattttgatttagccgtcaagatagccttaaagatcaaagcagagtctcaaggaacaaagttgaaagactttgtagcaacaatgcaatcaaatgagaaattacagtcagagatgtcaaagctccgtgagatggtagaagaatatgctaagcaattcccaacgattgggttcgagaaagagacgatgagatacaaagagtag

SEQ ID NO: 3829 - protein, 505 aa, Arabidopsis thaliana
MSSLSTAAMAESEKSRSSWIKQLNASLDEIDPEVADIIELEKARQWKGFELIPSENFTSLSVMQAVGSVMTNKYSEGYPGARYYGGNEYIDMAETLCQKRALEAFQLDPSKWGVNVQSLSGSPANFQVYTALLKPHERIMALDLPHGGHLSHGYQTDTKKISAVSIFFETMPYRLDENTGYIDYDQLEKSAVLFRPKLIVAGASAYARLYDYARIRKVCNKQKAVMLADMAHISGLVAAGVIPSPFEYADVVTTTTHKSLRGPRGAMIFFRKGLKEINKQGKEVMYDYEDRINQAVFPGLQGGPHNHTITGLAVALKQARTPEYKAYQDQVLRNCSKFAELDIRPTVIISYGLSMQTLLAKGYDLVSGGTDNHLVLVNLKNKGIDGSRVEKVLELVHIAANKNTVPGDVSAMVPGGIRMGTPALTSRGFIEEDFAKVAEYFDLAVKIALKIKAESQGTKLKDFVATMQSNEKLQSEMSKLREMVEEYAKQFPTIGFEKETMRYKE

SEQ ID NO: 3830 - DNA, 1602 bp, Arabidopsis thaliana; identical to SEQ ID NO: 3828
  CDS (109)..(1602)

SEQ ID NO: 3831 - protein, 497 aa, Arabidopsis thaliana
MAESEKSRSSWIKQLNASLDEIDPEVADIIELEKARQWKGFELIPSENFTSLSVMQAVGSVMTNKYSEGYPGARYYGGNEYIDMAETLCQKRALEAFQLDPSKWGVNVQSLSGSPANFQVYTALLKPHERIMALDLPHGGHLSHGYQTDTKKISAVSIFFETMPYRLDENTGYIDYDQLEKSAVLFRPKLIVAGASAYARLYDYARIRKVCNKQKAVMLADMAHISGLVAAGVIPSPFEYADVVTTTTHKSLRGPRGAMIFFRKGLKEINKQGKEVMYDYEDRINQAVFPGLQGGPHNHTITGLAVALKQARTPEYKAYQDQVLRNCSKFAELDIRPTVIISYGLSMQTLLAKGYDLVSGGTDNHLVLVNLKNKGIDGSRVEKVLELVHIAANKNTVPGDVSAMVPGGIRMGTPALTSRGFIEEDFAKVAEYFDLAVKIALKIKAESQGTKLKDFVATMQSNEKLQSEMSKLREMVEEYAKQFPTIGFEKETMRYKE

SEQ ID NO: 3832 - DNA, 1536 bp, Zea mays
  CDS (1)..(1536)
atggcgacggccctccgcaagctctccgccaacgctctgcgccgccagccgctctcccgcatcacgccgctctactacatggcgtcccttccggcgacggaggagagatccggaatcacctggactaagcagttgaacgcgccgctggaagaggtcgaccccgagattgctgacatcatcgagcacgagaaggcccgccaatggaagggtctggagctcatcccgtcggagaatttcacgtcggtgtcagtgatgcaggcagtgggttccgtcatgaccaacaagtacagcgaggggtaccctggcgcaagatactacgggggaaatgagtttattgatatggcagagtccttgtgtcagaaacgtgctttggaggctttccgtttggacccggcgaaatggggagtgaatgtgcaacctctatccggttcgcccgccaacttccatgtatacactgcactcttgaagccacatgaaaggatcatggctttggatcttcctcacggtggacatctttctcatggttaccagactgacactaagaagatatctgcaacttcaatattttttgagacaatgccttacagattggatgaaagcactggattgattgattacgatcagttggagaaaagcgctgttctttttaggccaaagttgatcattgctggtgcaagtgcatatgctcggctatatgattatgaccgtatgcggaagatatgcaacaagcagaaggcaatacttctagcagacatggcacatattagtgggcttgttgcagctggtgttgttccatctccttttgattatgcagatgtagtgactaccactactcacaaatcactccgtgggccacgtggagccatgatcttttacaggaagggagtcaaagaaataaataaacaaggaaaagaggttatgtatgattttgaggacaaaatcaatgctgctgtctttcctggtctgcaaggtgggcctcataaccataccattactggcttggctgttgcgctcaaacaggcaactactccagaatacagagcttaccaagagcaagttatcagtaattgtgctaaatttgcgcagagcctgatttcaaaaggatatgaactcgtctctggtgggactgacaaccatttagttctggtgaatctcaagaataaggggatagatggttcaagggtggagaaggttttagaaagtgtgcatattgcagcaaacaagaacacagttcctggtgatgtttcagctatggtgccaggaggcatcaggatgggaaccccagcccttacgtcgagaggatttgttgaagaagatttcgctaaagttgctgacttcttcgatgcagcagtgaatctggccttgaagattaaggctgcaacgacaggtggaacaaagctgaaggactttgttgccactttgcaatctgatagcatccaagttgagattgcaaagcttcgccatgatgtagaggaatttgcaaaacaattcccaacaattggatttgagaaagagaccatgaaatacaagaactaa

SEQ ID NO: 3833 - protein, 511 aa, Zea mays
MATALRKLSANALRRQPLSRITPLYYMASLPATEERSGITWTKQLNAPLEEVDPEIADIIEHEKARQWKGLELIPSENFTSVSVMQAVGSVMTNKYSEGYPGARYYGGNEFIDMAESLCQKRALEAFRLDPAKWGVNVQPLSGSPANFHVYTALLKPHERIMALDLPHGGHLSHGYQTDTKKISATSIFFETMPYRLDESTGLIDYDQLEKSAVLFRPKLIIAGASAYARLYDYDRMRKICNKQKAILLADMAHISGLVAAGVVPSPFDYADVVTTTTHKSLRGPRGAMIFYRKGVKEINKQGKEVMYDFEDKINAAVFPGLQGGPHNHTITGLAVALKQATTPEYRAYQEQVISNCAKFAQSLISKGYELVSGGTDNHLVLVNLKNKGIDGSRVEKVLESVHIAANKNTVPGDVSAMVPGGIRMGTPALTSRGFVEEDFAKVADFFDAAVNLALKIKAATTGGTKLKDFVATLQSDSIQVEIAKLRHDVEEFAKQFPTIGFEKETMKYKN

SEQ ID NO: 3834 - DNA, 1509 bp, Arabidopsis thaliana
  CDS (1)..(1509)
atgcctccagtgaccaaattttctcagcagttgaagttcaatatttcaaaacctttccgttcttcatttctgaaaagaaacctggtctctgaaatgagagcatcttcagtctcgctacctaatgtcgagataagcagcaaagaaatcccttttgaggactatggtcttggtgaagttgatccagaggtccgaaccatcatcacaaaggagaaagatagacaattcaggagcttggagcttattgcatctgagaatttcacgtctcgagcagttatggaggcggttggctcatgccttaccaacaagtattctgagggactgcctggtaaaagatattatggtggcaatgagtacattgatcagttggagacgctttgccagaaccgggctttggcagccttccgcttagattctacgaaatggggggttaatgttcagccgttatctggttcacctgcaaactttgctgtctacactgcgatacttagccctcatgatcggatcatgggtttggatttacctcacggtggtcatctgtcgcatgggttcatgaccgctaaaaggcgtgtatctggaacttcaatatactttgagtccatgccttatcgacttgatgaatcaacaggcattgttgactacgatatgctcgagaaaactgctacacttttcagaccaaagcttattatcgcaggagctagtgcatacagccgagattttgactatcctcgcatgaggaagatcgcagactcagttggtgcttttctgatgatggatatggctcatatcagtgggcttgtggctgcttctgtggtagctgacccttttgagtattgtgatattgttacaacaacaactcacaagtctttgagaggtccgagaggtggcatgatcttcttcaggaaggatccaattaatggggttgatcttgaatctgccgtgaacaatgctgtcttccctggtttgcagggtggccctcataaccacacaattggaggattagcagtctgcttgaaacacgcacaatcaccggaattcaaggcgtaccagaaaagagttgtgtctaactgtagagctctagctaaccgattggttgaactcgggtttaagctagtttctggtggcagcgataaccacttggttctcgtcgatcttagacccatgggtatggatggtgcgcgggttgagaaaatcttagacatggcatctattactctcaacaagaactctgtccctggggacaaaagtgcgttggtaccagggggaataaggataggatcccccgcgatgacgacaagaggactgtcagagaaagactttgtagtagtggctgacttcatcaaggaaggtgtggagataacaatggaagccaagaaagccgcgccgggttcaaagcttcaagatttcaacaagttcgtgacatctcctgagtttccattgaaagagagagtgaagagtctaaaggagagagtggaaaccttcacatctcgttttcccattcctggcgtttaa

SEQ ID NO: 3835 - protein, 502 aa, Arabidopsis thaliana
MPPVTKFSQQLKFNISKPFRSSFLKRNLVSEMRASSVSLPNVEISSKEIPFEDYGLGEVDPEVRTIITKEKDRQFRSLELIASENFTSRAVMEAVGSCLTNKYSEGLPGKRYYGGNEYIDQLETLCQNRALAAFRLDSTKWGVNVQPLSGSPANFAVYTAILSPHDRIMGLDLPHGGHLSHGFMTAKRRVSGTSIYFESMPYRLDESTGIVDYDMLEKTATLFRPKLIIAGASAYSRDFDYPRMRKIADSVGAFLMMDMAHISGLVAASVVADPFEYCDIVTTTTHKSLRGPRGGMIFFRKDPINGVDLESAVNNAVFPGLQGGPHNHTIGGLAVCLKHAQSPEFKAYQKRVVSNCRALANRLVELGFKLVSGGSDNHLVLVDLRPMGMDGARVEKILDMASITLNKNSVPGDKSALVPGGIRIGSPAMTTRGLSEKDFVVVADFIKEGVEITMEAKKAAPGSKLQDFNKFVTSPEFPLKERVKSLKERVETFTSRFPIPGV

SEQ ID NO: 3836 - DNA, 1584 bp, Glycine max
  CDS (1)..(1584)
atgcaggcttgtacaacgatgagttctttgcagcaacaacctatttggaccaaagggttaaatttccctgcaaaagggtatggcagcaataacgggtttctacctcaggtgaggttctgcaatattaagccatccaaagcttctcatgttgaagcaagtttagtcactgggaagccgtcatctgtgcctttctctgtgcctgaaattggaggcgacggaagtagcttcctggactatggcttgagtgaagctgatcctgatgttcgtgcaattattgacaaggaaaaggaccgacaatttaaaagtcttgagcttattgcttctgagaattttacatctagagcagtgatggaagcagttgggtcgtgcctcacaaacaagtactcagaaggattgccgggtaaaaggtactatggtggcaatgagtacattgatgagcttgaaatcctatgtcaacaaagggcactggctgcatttcatgtagatgaaaacaaatggggtgttaatgttcaaactttatctggttcccctgctaattttgcagtatacactgcagttcttaaaccacatgatcggataatgggtttggacttgcctcacggaggacatttgtctcatggattcatgacacccaaaaaacgtgtatcagccacatcaatttattttgaatctatgccttatcgacttgatgaatcaacaggtcttattgattatgatatgctggagaaaactgctactctgtttcgtccaaaactcattgttgctggtgctagtgcttatcctcgggacattgactaccctcgtatgagaaaaattgcagatgaagtaggtgcttttcttatgatggatatggctcatataagtgggcttgttgctgcatctgtactttctaatccctttgagtattgtgatattgtgaccaccacaacccacaagtctttacgaggtccaagaggtggtatgatattcttcaagaaagatactgtgcatggggttgatttggagcctgccattaacaatgctgtttttcctggtctacaggggggtcctcataaccacacaattggaggactagcagtttgcttgaagtatgctcagtctccagaatttaaaaattatcaaaatcaggtggttgctaactgtagagctcttgctaagcgattaattgagcatggatataaactggtttctggtggtagtgacaatcacctggttcttgtcgatctaaggccatctggtcttgatggtgctcgggtggagaaaattcttgacttggcttctataaccctcaacaaaaattcagtgcctggtgataagagtgccctagttccaggaggcattcgcattggggcaccagcaatgacaacaagaggacttggtgagaaagaattttcactcattgctgatttcattcatgagggtgtgcaaataagtcttgaagccaaaagtttggtctcaggaacgaagctccaagattttttgaagtttgtaacatcttctgaatttcctttgggagagaaggtatcagagttgcgtaggaaagttgaagctcttactactcagtatccaatacccggagtctaa

SEQ ID NO: 3837 - protein, 527 aa, Glycine max
MQACTTMSSLQQQPIWTKGLNFPAKGYGSNNGFLPQVRFCNIKPSKASHVEASLVTGKPSSVPFSVPEIGGDGSSFLDYGLSEADPDVRAIIDKEKDRQFKSLELIASENFTSRAVMEAVGSCLTNKYSEGLPGKRYYGGNEYIDELEILCQQRALAAFHVDENKWGVNVQTLSGSPANFAVYTAVLKPHDRIMGLDLPHGGHLSHGFMTPKKRVSATSIYFESMPYRLDESTGLIDYDMLEKTATLFRPKLIVAGASAYPRDIDYPRMRKIADEVGAFLMMDMAHISGLVAASVLSNPFEYCDIVTTTTHKSLRGPRGGMIFFKKDTVHGVDLEPAINNAVFPGLQGGPHNHTIGGLAVCLKYAQSPEFKNYQNQVVANCRALAKRLIEHGYKLVSGGSDNHLVLVDLRPSGLDGARVEKILDLASITLNKNSVPGDKSALVPGGIRIGAPAMTTRGLGEKEFSLIADFIHEGVQISLEAKSLVSGTKLQDFLKFVTSSEFPLGEKVSELRRKVEALTTQYPIPGV

SEQ ID NO: 3838 - DNA, 1581 bp, Zea mays
  CDS (1)..(1581)
atgtgcacacgcgcccacctcccgtccaccaccgctatatatcccggcgccccttcctccctcccccgtccttccctccgcctccgcctccgcccccgcccccgcccacgcccactcctcgctgccaccactcctgtcacctcttcccgcgccgacgcagccgccatggaccccgtcgccacatgggggctaaccccgctcgcgggcgccgacccggagatctacgacctcctggagcgcgagaagcggcgccagcgtcgcggcatcgagctcatcgcctccgagaacttcacctccttcgccgtcatggaggcgctcggctccgcgctcactaacaagtactccgagggcatgcccggtgcccgctactacggcggcaacgacgtcatcgacgagatcgagaacctctgccggtcacgcgcgctcgctgccttccaccttgacgccgcgtcctggggcgtcaacgtgcagccctactcgggctcccccgccaacttcgccgcctacaccgcgctgctcaacccgcacgaccggatcatggggctcgaccttccctccggcggacacctcactcacgggtactacacggccggcggtaagaagatctccgccacctcgatctactttgagagcctgccgtacaaggtgagcgccgcaacggggtacatcgactacgagaagctcgaggagaaggcacttgacttccgccccaagctcatcatctgcggtggcagtgcgtacccgagggactgggattacgccaagctcagggccgtcgccgacaaggtcggggccctgctgctctgcgacatggcgcacatcagcgggctcgtcgccgcgcaggaagctgcaaatccttttgaatattgtgatgtggttaccacaaccacgcacaagtccctcagagggccaagggctggcatgatcttctacaggaaaggccctaagccccccaagaagggccagcctgagggtgctgtttatgattacgaagacaagatcaactttgcagtgttcccatctctccaaggtggccctcacaaccaccagattgctgcacttgctgttgctctacagcaaactatgtcgcctggcttcaaggcctatgcaaagcaagtgaaggccaatgctgttgcaattggaaactatctcatgagcaagggctacaagatggtgactgatggaactgagaaccaccttgttctctgggatctccgcccccttggcttgactggaaacaaggtcgaaaagctatgtgatctttgccacatcacattgaacaagaatgctgtcttcggtgacagcagtgcattgtctccgggtggtgtccgcattggcgcgccagcaatgacctcgaggggtctactggagaaggatttcgagcagattggggagttcctccaccaggcagtgaccatctgcctgaacatccagaaggagtacggcaagctcctcaaggacttcaacaagggcctggtgaacaacaaggacatcgagaacctcaaggtccaggtggagaagtttgccgactccttcgacatgcctgggttcacgcttgagagcatgaaatacaaggagtag

SEQ ID NO: 3839 - protein, 526 aa, Zea mays
MCTRAHLPSTTAIYPGAPSSLPRPSLRLRLRPRPRPRPLLAATTPVTSSRADAAAMDPVATWGLTPLAGADPEIYDLLEREKRRQRRGIELIASENFTSFAVMEALGSALTNKYSEGMPGARYYGGNDVIDEIENLCRSRALAAFHLDAASWGVNVQPYSGSPANFAAYTALLNPHDRIMGLDLPSGGHLTHGYYTAGGKKISATSIYFESLPYKVSAATGYIDYEKLEEKALDFRPKLIICGGSAYPRDWDYAKLRAVADKVGALLLCDMAHISGLVAAQEAANPFEYCDVVTTTTHKSLRGPRAGMIFYRKGPKPPKKGQPEGAVYDYEDKINFAVFPSLQGGPHNHQIAALAVALQQTMSPGFKAYAKQVKANAVAIGNYLMSKGYKMVTDGTENHLVLWDLRPLGLTGNKVEKLCDLCHITLNKNAVFGDSSALSPGGVRIGAPAMTSRGLLEKDFEQIGEFLHQAVTICLNIQKEYGKLLKDFNKGLVNNKDIENLKVQVEKFADSFDMPGFTLESMKYKE

SEQ ID NO: 3840 - DNA, 1557 bp, Nicotiana tabacum
  CDS (1)..(1557)
atggccatggcaacggctcttcgaagactttcctcttctgttgacaaaccaattaagcgtctctataatggcggctctctctattacatgtcatcgttgcctaatgaagctgtttacgagaaggaaaaaaatggtgtcacgtggccaaagcaacttaatgctcctctagaggaggttgatccagaaattgctgacattattgagcttgagaaagcacgccagtggaagggacttgaactcattccttcagaaaatttcacttctgtgtctgtaatgcaagctgttggatctgttatgacaaacaagtacagtgaaggataccctggggctagatactatggaggaaatgagtatattgacatggcggaaaccttatgccagaaacgtgctttagaagccttcaggttggatcctgcaaaatggggagtgaatgtgcagcctctgtcaggatcacctgctaattttcatgtttacactgcacttttaaaacctcatgaaagaatcatggcccttgatcttccccacggtggacatctttctcatggatatcagactgatacaaagaagatatctgccgtctctatattttttgagaccatgccatatagactgaatgagagcactggctacattgactatgaccagcttgagaaaagtgccacactctttaggccaaagttaattgtcgctggtgctagtgcttatgcacgtctttatgactatgcacgtatccgaaaggtttgtgacaaacagaaggctatcatgttggcagatatggctcatattagtgggttagttgcagctggagtcatcccatcaccatttgattatgcagatgttgtgaccaccacaacccacaaatcccttcgcgggcctcgtggtgccatgattttcttccggaagggtgtgaaggaggttaacaagcaaggcaaggaggtgttgtacgactatgaagataaaattaaccaggcagtctttcccggacttcaaggtggtcctcacaaccatacaattactggcttggcagttgctttgaaacaggcaatgactccagaatacagagcttaccaagagcaatgccttagcaactgctcaaaatttgcccaggctttagcgggaatgggttatgaacttgtttctggtggaacagagaatcacttggttttggtgaacttgaaaaacaagggtattgatggttctagggttgaaaaagttttggaagcggtacatattgcagcgaataagaacactgttcctggagatgtatctgccatggtccctggtggcatcagaatggggactcctgcactcacatcaaggggatttattgaggaagattttgtgaaagttgctgaattctttgatgctgctgtgaagatagcagtgaaaataaagactgaagctcaaggaacaaagttgaaagactttgtgacaacactacagtctagcgcttcaatccagtcggagattgcaaaactccgccatggtgtggaggagtatgcaaagcagttccctacaattgggtttgagaaggaaaccatgaagtacaaaaactga

SEQ ID NO: 3841 - protein, 518 aa, Nicotiana tabacum
MAMATALRRLSSSVDKPIKRLYNGGSLYYMSSLPNEAVYEKEKNGVTWPKQLNAPLEEVDPEIADIIELEKARQWKGLELIPSENFTSVSVMQAVGSVMTNKYSEGYPGARYYGGNEYIDMAETLCQKRALEAFRLDPAKWGVNVQPLSGSPANFHVYTALLKPHERIMALDLPHGGHLSHGYQTDTKKISAVSIFFETMPYRLNESTGYIDYDQLEKSATLFRPKLIVAGASAYARLYDYARIRKVCDKQKAIMLADMAHISGLVAAGVIPSPFDYADVVTTTTHKSLRGPRGAMIFFRKGVKEVNKQGKEVLYDYEDKINQAVFPGLQGGPHNHTITGLAVALKQAMTPEYRAYQEQCLSNCSKFAQALAGMGYELVSGGTENHLVLVNLKNKGIDGSRVEKVLEAVHIAANKNTVPGDVSAMVPGGIRMGTPALTSRGFIEEDFVKVAEFFDAAVKIAVKIKTEAQGTKLKDFVTTLQSSASIQSEIAKLRHGVEEYAKQFPTIGFEKETMKYKN

SEQ ID NO: 3842 - DNA, 1554 bp, Brassica napus
  CDS (1)..(1554)
atggcgatggctatggctcttcggaggctttcttcttcagttgacaaacctattcgtcctcttatcagatcatcttcatgctacatgtcttctttaccaagtgaagctgttgatgacaaggagaggtctcgtgtcacttggccaaaacagcttaacgcatctttggaggaagttgatcctgagattgctgacatcattgagcatgagaaagctagacaatggaagggacttgaactcattccatctgagaatttcacatctgtctcggtgatgcaagctgttggctctgtgatgactaacaagtacagtgaagggtaccctggtgctagatactatggaggaaatgagtacatagacatggcggaaaccttgtgccagaagcgtgctcttgaagctttccggttagaccctgagaagtggggagtcaatgtgcaacctttgtctggatctcctgccaacttccatgtgtacactgcattgttgaagcctcatgagagaatcatggcacttgatcttcctcatggtggtcatctttctcatggttaccagactgacaccaagaagatatctgctgtgtctatcttttttgaaactatgccctaccgcttggacgagagcactggcttcatcgactacgaccagatggagaagagtgctactcttttcaggccaaaactgattgttgctggtgcaagtgcttatgctcgattgtatgactatgcccgcatccgaaaggtgtgtaacaagcaaaaagctgtgatgctagcagatatggcacacataagcggtttggttgcagctggtgtaatcccttcaccgttcgaatatgcagatgttgtaaccaccacaactcacaagtcacttcgtggacctcgtggtgccatgattttctacagaaagggtgttaaggaaattaacaaacaagggaaagaggttatgtatgattttgaagacaagatcaatcaagctgtcttccctggtcttcaaggtggtccacacaaccacactattacaggactagctgttgctttaaaacaggcaactacttcagagtacaaagcataccaagagcaagtcctcagtaactctgcaaagtttgctcagactctgatggagaaaggttatgaacttgtttctggtggaactgacaaccatctggttctagtgaacctgaagcccaagggaattgatggatctagagttgagaaagtactggaagctgttcacattgcatccaacaaaaacactgttcctggagatgtttctgccatggttcctggtggaatcagaatgggtactcctgctctcacttccagaggctttgttgaggaagactttgccaaagtagctgagtactttgacaaagctgtgaagttggctctcaaagtcaaatctgaagctcaaggaaccaaactgaaagattttgtgtcagcaatggaatcatcttcagccattcaatcagagattgccaagctgcgccacgacgtggaggagttcgctaagcagttcccaactattgggtttgagaaagaaaccatgaagtacaagaactga

SEQ ID NO: 3843 - protein, 517 aa, Brassica napus
MAMAMALRRLSSSVDKPIRPLIRSSSCYMSSLPSEAVDDKERSRVTWPKQLNASLEEVDPEIADIIEHEKARQWKGLELIPSENFTSVSVMQAVGSVMTNKYSEGYPGARYYGGNEYIDMAETLCQKRALEAFRLDPEKWGVNVQPLSGSPANFHVYTALLKPHERIMALDLPHGGHLSHGYQTDTKKISAVSIFFETMPYRLDESTGFIDYDQMEKSATLFRPKLIVAGASAYARLYDYARIRKVCNKQKAVMLADMAHISGLVAAGVIPSPFEYADVVTTTTHKSLRGPRGAMIFYRKGVKEINKQGKEVMYDFEDKINQAVFPGLQGGPHNHTITGLAVALKQATTSEYKAYQEQVLSNSAKFAQTLMEKGYELVSGGTDNHLVLVNLKPKGIDGSRVEKVLEAVHIASNKNTVPGDVSAMVPGGIRMGTPALTSRGFVEEDFAKVAEYFDKAVKLALKVKSEAQGTKLKDFVSAMESSSAIQSEIAKLRHDVEEFAKQFPTIGFEKETMKYKN

SEQ ID NO: 3844 - DNA, 1554 bp, Brassica napus
  CDS (1)..(1554)
atggcgatggccatggctcttcggagactttcttcttcagttgacaaacctattcgtcctcttatcagatcaactacatgctacatgtcatctctgcccagtgaagctgttgatgacaaggagagatctcgtgtcacttggccaaaacagcttaacgcatctttggaggaggttgatcctgagattgctgacattattgagcatgagaaagctagacaatggaagggacttgaactcattccatctgagaatttcacatctgtctcggtgatgcaagctgttggctctgtgatgactaacaagtacagtgaagggtaccctggtgctagatactatggaggaaatgagtacatagacatggcagagactttatgccaaaagcgcgctcttgaggctttcagattagatcctgaaaagtggggagtgaatgtgcaacccttgtctggatctcctgccaacttccatgtctacactgcattgctcaaacctcatgagagaatcatggcacttgatcttcctcatggtggtcatctttctcatggttatcagactgacaccaagaagatatctgctgtgtctatcttctttgagacaatgccttatcgcttggacgagagcactggctacattgactatgatcagatggagaaaagtgctactcttttcaggccaaaactgattgttgctggtgcgagtgcttatgctcgattgtatgactatgcccgcatccgaaaggtgtgtaacaagcaaaaagctgtgatgctagcagatatggcacacatcagtggtttggttgctgctggtgtaatcccttcaccgttcgactatgcagatgttgtgaccaccacaactcacaagtcacttcgtggaccccgtggagccatgattttctacagaaagggtgttaaggaaattaacaaacaagggaaagaggttttgtatgattttgaagacaagataaatcaagctgtcttccctggtcttcaaggtggtccacataaccacactattacaggactagctgttgctttaaaacaggcaactacttcagagtacaaagcataccaagagcaagtcctcagtaactctgcaaagtttgctcagactctgatggagaaaggttatgaacttgtttctggtggaactgacaaccatctggttctagtgaacctgaagcccaagggaattgatggatctagagttgagaaagtgttggaagctgttcacattgcatccaacaaaaacactgttcctggagatgtttctgccatggttcctggtggaatcagaatgggtacacctgctctcacttccagaggctttgttgaggaagactttgctaaagtagctgaatactttgacaaagctgtaacgttggctctcaaagtcaaatctgaagctcaagggaccaagctgaaagactttgtgtcagcaatggaagcttcttcaaccattcaatcagagattgctaagctgcgccatgaagttgaggaatttgctaaacagtttccaacaattgggtttgagaaagaaaccatgaagtacaagaactaa

SEQ ID NO: 3845 - protein, 517 aa, Brassica napus
MAMAMALRRLSSSVDKPIRPLIRSTTCYMSSLPSEAVDDKERSRVTWPKQLNASLEEVDPEIADIIEHEKARQWKGLELIPSENFTSVSVMQAVGSVMTNKYSEGYPGARYYGGNEYIDMAETLCQKRALEAFRLDPEKWGVNVQPLSGSPANFHVYTALLKPHERIMALDLPHGGHLSHGYQTDTKKISAVSIFFETMPYRLDESTGYIDYDQMEKSATLFRPKLIVAGASAYARLYDYARIRKVCNKQKAVMLADMAHISGLVAAGVIPSPFDYADVVTTTTHKSLRGPRGAMIFYRKGVKEINKQGKEVLYDFEDKINQAVFPGLQGGPHNHTITGLAVALKQATTSEYKAYQEQVLSNSAKFAQTLMEKGYELVSGGTDNHLVLVNLKPKGIDGSRVEKVLEAVHIASNKNTVPGDVSAMVPGGIRMGTPALTSRGFVEEDFAKVAEYFDKAVTLALKVKSEAQGTKLKDFVSAMEASSTIQSEIAKLRHEVEEFAKQFPTIGFEKETMKYKN

SEQ ID NO: 3846 - DNA, 1554 bp, Brassica napus
  CDS (1)..(1554)
atggcgatggccatggctcttcggcgactttcttcttcagttgacaaacctattcgtcctcttatcagatcaactacatgctacatgtcatctctgcccagtgaagctgttgatgacaaggagagatctcgtgtcacttggccaaaaaagcttaacgcatctttggaggaggttgatcctgagattgctgacattattgagcatgagaaagctagacaatggaagggacttgaactcattccatctgagaatttcacatctgtctcggtgatgcaagctgttggctctgtgatgactaacaagtacagtgaagggcaccctggtgctagatactatggaggaaatgagtacatagacatggcagagactttatgccaaaagcgcgctcttgaggctttcagattagatcctgaaaagtggggagtgaatgtgcaacccttgtctggatctcctgccaacttccatgtctacactgcattgctcaaacctcatgagagaatcatggcacttgatcttcctcatggtggtcatctttctcatggttatcagactgacaccaagaagatatctgctgtgtctatcttctttgagacaatgccttatcgcttggacgagagcactggctacattgactatgatcagatggagaaaagtgctactcttttcaggccaaaactgattgttgctggtgcgagtgcttatgctcgattgtatgactatgcccgcatccgaaaggtgtgtaacaagcaaaaagctgtgatgctagcagatatggcacacatcagtggtttggttgctgctggtgtaatcccttcaccgttcgactatgcagatgttgtgaccaccacaactcacaagtcacttcgtggaccccgtggagccgtgattttctacagaaagggtgttaaagaaattaacaaacaagggaaagaggttttgtatgattttgaagacaagataaatcaagccgtcttccctggtcttcaaggtggtccacataaccacactattacaggactagctgttgctttaaaacaggcaactacttcagagtacaaagcataccaagagcaagtcctgagcaactctgcaaagttcgctcagactctgatggagaaaggttatgaacttgtttctggtggaaccgacaaccatctggttctagtgaacctgaagcccaagggaattgatggatctagagttgagaaagtgttggaagctgttcacattgcatcaaacaaaaacactgttcctggagatgtttctgccatggttcctggtggaatcagaatgggtacacctgctctcacttccagaggctttgttgaggaagactttgctaaagtagctgaatactttgacaaagctgtaacgttggctctcaaagtcaaatctgaagctcaagggaccaagctgaaagactttgtgtcagcaatggaagcttcttcaaccattcaatcagagattgctaagctgcgccatgaagttgaggaatttgctaaacagtttccaacaattgggtttgagaaagaaaccatgaagtacaagaactaa

SEQ ID NO: 3847 - protein, 517 aa, Brassica napus
MAMAMALRRLSSSVDKPIRPLIRSTTCYMSSLPSEAVDDKERSRVTWPKKLNASLEEVDPEIADIIEHEKARQWKGLELIPSENFTSVSVMQAVGSVMTNKYSEGHPGARYYGGNEYIDMAETLCQKRALEAFRLDPEKWGVNVQPLSGSPANFHVYTALLKPHERIMALDLPHGGHLSHGYQTDTKKISAVSIFFETMPYRLDESTGYIDYDQMEKSATLFRPKLIVAGASAYARLYDYARIRKVCNKQKAVMLADMAHISGLVAAGVIPSPFDYADVVTTTTHKSLRGPRGAVIFYRKGVKEINKQGKEVLYDFEDKINQAVFPGLQGGPHNHTITGLAVALKQATTSEYKAYQEQVLSNSAKFAQTLMEKGYELVSGGTDNHLVLVNLKPKGIDGSRVEKVLEAVHIASNKNTVPGDVSAMVPGGIRMGTPALTSRGFVEEDFAKVAEYFDKAVTLALKVKSEAQGTKLKDFVSAMEASSTIQSEIAKLRHEVEEFAKQFPTIGFEKETMKYKN

SEQ ID NO: 3848 - DNA, 1533 bp, Hordeum vulgare
  CDS (1)..(1533)
atggccatggcgacggcgctccgcaagctctccgcccgcggtcagcccctctcccgactcacgccgctctactccatggcgtccctgccggcgacggaggagagatccgcagtcacctggccgaagcagctcaacgcgccgctggaggaggtcgacccggagattgccgacatcatcgagctcgagaaggcccgccaatggaaggggctggagctcatcccgtcggagaacttcacctccctgtcggtgatgcaggccgtgggatccgtcatgacgaacaagtacagcgaggggtaccccggcgccagatactacggtggaaacgaatacattgatatggccgagacgctgtgccagaaacgtgctttggaggccttcaatttggacccggagaagtggggagtgaatgtgcaacctctgtcgggttcacctgccaacttccatgtatacactgctctgctgaagccacatgacagaattatggccctggatcttcctcacggtggacatctttcccatggttaccagactgacacaaagaaaatctcagcagtttcaatattctttgagacaatgccttacagactggatgaaagcactggcttgattgattatgaccagttggagaaaagtgccgttctttttaggccaaagttgattgttgctggtgctagtgcatatgctcgcctttatgattataaccgcatgcggaagatctgtgacaagcagaaggcagttcttctcgcagacatggcacatatcagtgggctagttgctgctggtgtcattccctctccttttgagtatgccgatgtggtgactaccactacccacaagtcactccgtggtccacgtggagccatgatctttttccggaagggggtgaaagaaataaacaaacaagggaaggaggttaagtatgattttgaggacaaaatcaatgctgctgtcttccctggtctgcaaggtggaccacataaccatactattactggcctggccgttgcgcttaagcaggcaactactcaggagtaccgagcttatcaagagcaagttatgagcaactctgctagatttgctgagagcttgacttccaaaggctacgacattgtctctggtgggactgataaccatttagttttggtgaacctcaagaaaaagggaatagatggttcaagagtggagaaggttttagaaaatgtgcatattgcagcaaacaagaacacagttcctggtgatgtttcagctatggtacccggaggcatcaggatgggaacccccgcgcttacatcaagaggatttgttgaggaggacttcgccaaggttgccgaattcttcgattcggcagtgaacttggctttgaaggttaaagctgcagcagcaggtaccaaactgaaggactttgttgccactttgcaatccgacagcaacatccaagctgaaattgcaaagcttcgccacgatgtggaggaatatgcaaaacaattcccaacaatcggattcgagaaagagaccatgaagtacaagaactaa

SEQ ID NO: 3849 - protein, 510 aa, Hordeum vulgare
MAMATALRKLSARGQPLSRLTPLYSMASLPATEERSAVTWPKQLNAPLEEVDPEIADIIELEKARQWKGLELIPSENFTSLSVMQAVGSVMTNKYSEGYPGARYYGGNEYIDMAETLCQKRALEAFNLDPEKWGVNVQPLSGSPANFHVYTALLKPHDRIMALDLPHGGHLSHGYQTDTKKISAVSIFFETMPYRLDESTGLIDYDQLEKSAVLFRPKLIVAGASAYARLYDYNRMRKICDKQKAVLLADMAHISGLVAAGVIPSPFEYADVVTTTTHKSLRGPRGAMIFFRKGVKEINKQGKEVKYDFEDKINAAVFPGLQGGPHNHTITGLAVALKQATTQEYRAYQEQVMSNSARFAESLTSKGYDIVSGGTDNHLVLVNLKKKGIDGSRVEKVLENVHIAANKNTVPGDVSAMVPGGIRMGTPALTSRGFVEEDFAKVAEFFDSAVNLALKVKAAAAGTKLKDFVATLQSDSNIQAEIAKLRHDVEEYAKQFPTIGFEKETMKYKN

SEQ ID NO: 3850 - DNA, 1644 bp, Helianthus annuus
  CDS (1)..(1644)
atgctttccaatgtcgaattccaaccgcaatggctccaaaatcctccaattgcagaatgtgccaagacttccttctgcggtgcccatttcacgatcaaacctctcgccttcatctcactcaccaaaccctccggcaaaaactcaatccattcaaaccctttaaccgaaccgggtcgaaccacccccaacaacctctcctctctctatactctactctctctagaccgcatggatcccgttaatgtgtggggcaacacccccctagacgccgccgacccagagatcttcgacctcattgagaaagaaaaacgccgccaatgtcgcggaatcgaactgattgcatccgaaaacttcacctcatttgcagtcatccaagctttgggatcccccttgaccaacaaatactccgagggcatgcctggaaaccgttactacggtggcaacgagtacatcgaccagatcgaaaacctctgccgttctcgcgccttacaggcttaccgtctagatcccaccaaatggggtgttaatgtccagccctattctggatctcctgccaattttgctgcctatacagccctcttagagccccatgatcggatcatgggccttgatttgccatcaggtgggcatttgacgcatggatattatacttccggtgggaagaagatatcagctacctcgatttactttgagagtttgccgtataaagtgaattcgactacgggatatatcgattacgagaagatggaggagaaggccttggactttagacccaagttgattatttgtggggggagtgcgtacccgagagattgggattacaagaggatcaggggcattgctgataaatgtggggccctcatgttgtgtgatatggctcatatcagtggccttgttgctgcacaggaagctgcagatccgttcgaatactgtgacgtggtcactaccaccacccacaagagtctcaggggaccaagagctggtatgatcttctaccgcaaaggtccaaaaccaccgaagaagggtcagccagaagatgctgtttatgactttgaagacaagatcaattttgctgtgttcccggctctgcaaggtgggccgcacaaccaccagattggtgctctagcggttgcgttgaaacaggccatgtcacctggattcaaggcatatgctaagcaagttagagccaatgctgttgcacttggtaactacttgatgagcaaagactacaagcttgtgaccggtggaactgaaaaccatcttgtgttgtgggatcttcgtcctcttggcttgaccgggaacaaggtggagaagctttgcgatcttgcaaacatcactgttaacaagaatgctgtgtttggtgacagcagtgctttggccccaggaggtgttcgtattggtacacctgcaatgacctcaaggggtttagttgagaaggattttgagcaaattggggagtttcttcaccgtgcaattcaaatcactttaagcatccagaaggagttcgggaaattattgaaggatttcaacaagggtttggtgaacaacaaggagatcgaacaactcaaggctgatgtcgagaagttttctggttcgtttgacatgcctgggttctcgttggccgacatgaagtataaggattga

SEQ ID NO: 3851 - protein, 547 aa, Helianthus annuus
MLSNVEFQPQWLQNPPIAECAKTSFCGAHFTIKPLAFISLTKPSGKNSIHSNPLTEPGRTTPNNLSSLYTLLSLDRMDPVNVWGNTPLDAADPEIFDLIEKEKRRQCRGIELIASENFTSFAVIQALGSPLTNKYSEGMPGNRYYGGNEYIDQIENLCRSRALQAYRLDPTKWGVNVQPYSGSPANFAAYTALLEPHDRIMGLDLPSGGHLTHGYYTSGGKKISATSIYFESLPYKVNSTTGYIDYEKMEEKALDFRPKLIICGGSAYPRDWDYKRIRGIADKCGALMLCDMAHISGLVAAQEAADPFEYCDVVTTTTHKSLRGPRAGMIFYRKGPKPPKKGQPEDAVYDFEDKINFAVFPALQGGPHNHQIGALAVALKQAMSPGFKAYAKQVRANAVALGNYLMSKDYKLVTGGTENHLVLWDLRPLGLTGNKVEKLCDLANITVNKNAVFGDSSALAPGGVRIGTPAMTSRGLVEKDFEQIGEFLHRAIQITLSIQKEFGKLLKDFNKGLVNNKEIEQLKADVEKFSGSFDMPGFSLADMKYKD

SEQ ID NO: 3852 - DNA, 1563 bp, Zea mays
  CDS (1)..(1563)
atgtgcacacgcgccctcctcccgtccaccaccgctatatatcccggcgccccttcctccctcccccgtccttccctccgcctccgcccccgcccactcctcgctgccaccactcctgtcacctcttcccgcgccgacgcagccgccatggaccccgtcgccacatgggggctaaccccgctcgcgggcgccgacccggagatctacgacctcctggagcgcgagaagcggcgccagcgtcgcggcatcgagctcatcgcctccgagaacttcacctccttcgccgtcatggaagcgctcggctccgcgctcactaacaagtactccgagggcatgcccggcgcccgctactacggcggcaacgacgtcatcgacgagatcgagaacctctgccggtcacgcgcgctcgctgccttccgccttgacgccgcgtcctggggcgtcaacgtgcagccctactcgggctcccccgccaacttcgccgcctacaccgcgctgctcaacccgcacgaccggatcatggggctcgaccttccctccggcggacacctcactcacgggtactacacggccggcggtaagaagatctccgccacctcgatctactttgagagcctgccgtacaaggtgagcgccgcaacggggtacatcgactacgagaagctcgaggagaaggcacttgacttccgccccaagctcatcatctgcggtggcagtgcgtacccgagggactgggattacgccaagctcagggccgtcgccgacaaggtcggggccctgctgctctgcgacatggcgcacatcagcgggctcgtcgccgcgcaggaagctgcaaatccttttgaatattgtgatgtggttaccacaaccacgcacaagtccctcagagggccaagggctggcatgatcttctacaggaaaggccctaagccccccaagaagggccagcctgagggtgctgtttatgattacgaagacaagatcaactttgcagtgttcccatctctccaaggtggccctcacaaccaccagattgctgcacttgctgttgctctacagcaaactatgtcgcctggcttcaaggcctatgcaaagcaagtgaaggccaatgctgttgcaattggaaactatctcatgagcaagggctacaagatggtgactgatggaactgagaaccaccttgttctctgggatctccgcccccttggcttgactggaaacaaggtcgaaaagctatgtgatctttgccacatcacattgaacaagaatgctgtcttcggtgacagcagtgcattgtctccgggtggtgtccgcattggcgcgccagcaatgacctcgaggggtctactggagaaggatttcgagcagattggggagttcctccaccaggcagtgaccatctgcctgaacatccagaaggagtacggcaagctcctcaaggacttcaacaagggcctggtgaacaacaaggacatcgagaacctcaaggtccaggtggagaagtttgccgactccttcgacatgcctgggttcacgcttgagagcatgaaatacaaggagtag

SEQ ID NO: 3853 - protein, 520 aa, Zea mays
MCTRALLPSTTAIYPGAPSSLPRPSLRLRPRPLLAATTPVTSSRADAAAMDPVATWGLTPLAGADPEIYDLLEREKRRQRRGIELIASENFTSFAVMEALGSALTNKYSEGMPGARYYGGNDVIDEIENLCRSRALAAFRLDAASWGVNVQPYSGSPANFAAYTALLNPHDRIMGLDLPSGGHLTHGYYTAGGKKISATSIYFESLPYKVSAATGYIDYEKLEEKALDFRPKLIICGGSAYPRDWDYAKLRAVADKVGALLLCDMAHISGLVAAQEAANPFEYCDVVTTTTHKSLRGPRAGMIFYRKGPKPPKKGQPEGAVYDYEDKINFAVFPSLQGGPHNHQIAALAVALQQTMSPGFKAYAKQVKANAVAIGNYLMSKGYKMVTDGTENHLVLWDLRPLGLTGNKVEKLCDLCHITLNKNAVFGDSSALSPGGVRIGAPAMTSRGLLEKDFEQIGEFLHQAVTICLNIQKEYGKLLKDFNKGLVNNKDIENLKVQVEKFADSFDMPGFTLESMKYKE

SEQ ID NO: 3854 - DNA, 2066 bp, Gossypium hirsutum
  CDS (91)..(1635)
cacaaacaaaacattttcagtcctccaccaacccactctaaacactcttttgttttccccccttggaacagctgagccaagacgcgagtaatggcggtggcaatgagctttcgtagattgtcttcctccatcaagtccccaaccagacctctcttcagtggcagctccctctattatatgtcaacagctgcggcagagaaagagaaagctcgtgctaatcggatacatcagttgaatgctccgctagaggaaatcgatcctgaaattgctaccataatcgaactcgagaaagctaggcaatggaagggactagaacttataccatcagagaattttacatccctatcagtaatgcaagcagtgggctctgtcatgatcaacaagtacagtgaagggtatcctggtgctagatactacggaggaaacgaatacattgacatggctgagtccttgtgtcaaacgcgtgcactagaggcttttgggttggatcctgcaaagtggggagtcaatgtgcagtcactttccggatctcctgctaactttcaggtttatactgccttgttgaaacctcatgagcgaattatggcactagatttaccccatggtggacatctttcacatggttatcagactgacactaagaagatatctgctgtgtcaatattctttgagacaatgccatatagattgaacgagggtacaggttatattgactatgatcagctagagaaaagtgcagtgcttttcagaccaaaacttatagttgctggtgccagtgcttatgctcgcctttatgactatgctcgtatacgcaaggtctgtgataagcagaaagcaattatgttggctgacatggcacatattagcgggttggttgctgcaggtgttattccatctccttttgaatacgctgatgttgtgacaaccacaacacacaagtcacttcgtggtccacgtggtgctatgattttcttcaggaagggactcaaagagattaacaaacaagggaaagaggtaatgtatgacttggaagacaaaattaatcaagctgtctttcctggtcttcaaggtggaccacataatcacaccatagctggtttagcagttgcattgaagcaggtcagaacacccgagtacaaggcttaccaagagcaagttcttagtaattgctcgaaattttctcagaggttgctggagaacggctatgaactagtatctggtgggaccgagaaccatttagtcttggtcaatttgcgaaacaagggtattgatggctcaagagttgagaaggtattggaatcagttcatattgcagccaataaaaacactgttccaggggatgtgtctgctatggttcctggtggtatccgcatgggaaccccagctctcacatctaggggtttcattgaggaagatttcgagaaggtagctgacttctttgacgctgctgtgaaattagccttgaaaatcaaggccaagacggaaggaacaaagttgaaggattttgtagcaaccttacagtcggatacatactttcaaaccgaaatcgctaagctccgacaagaagtggaggagtacgcaaaacagtttccgactattggttttgagaaagaagcaatgaaatacaaggactaaagcggatatctttacacacaatgcaaggtttgtcagctctaaagaacttcctaaactggttgctgtcttatttgttgaacgtaatcttctagaggcaactatcttagaatttattgaaatgccaaaatatgcacgttagtttttagtattaaggatgttatctggggttgagccgaactgtattcaaactgtatgaaactatgagcttttcattcaaagtttgagacttgagtttggctcacgctcgatcaattttcgttttcgaagctcaaaatcgattcgcgatttaaaaaagaaaatgaactgctcatgtttgtttgattagactcgtttattggctattaaattcatgtatcaaacaattcagctgagttggatagctagttttactattcaaaagattacaaaataattttttaaaaaaacaaaaa

SEQ ID NO: 3855 - protein, 514 aa, Gossypium hirsutum
MAVAMSFRRLSSSIKSPTRPLFSGSSLYYMSTAAAEKEKARANRIHQLNAPLEEIDPEIATIIELEKARQWKGLELIPSENFTSLSVMQAVGSVMINKYSEGYPGARYYGGNEYIDMAESLCQTRALEAFGLDPAKWGVNVQSLSGSPANFQVYTALLKPHERIMALDLPHGGHLSHGYQTDTKKISAVSIFFETMPYRLNEGTGYIDYDQLEKSAVLFRPKLIVAGASAYARLYDYARIRKVCDKQKAIMLADMAHISGLVAAGVIPSPFEYADVVTTTTHKSLRGPRGAMIFFRKGLKEINKQGKEVMYDLEDKINQAVFPGLQGGPHNHTIAGLAVALKQVRTPEYKAYQEQVLSNCSKFSQRLLENGYELVSGGTENHLVLVNLRNKGIDGSRVEKVLESVHIAANKNTVPGDVSAMVPGGIRMGTPALTSRGFIEEDFEKVADFFDAAVKLALKIKAKTEGTKLKDFVATLQSDTYFQTEIAKLRQEVEEYAKQFPTIGFEKEAMKYKD

SEQ ID NO: 3856 - DNA, 1554 bp, Arabidopsis thaliana
  CDS (1)..(1554)
atggcgatggccatggctcttcgaaggctttcttcttcaattgacaaacccattcgtcctcttattcgatccacttcatgttacatgtcttctttgcccagtgaagctgttgatgagaaggaaagatctcgtgtcacttggccaaaacagcttaacgcacctttagaggaggttgatcctgagattgctgacattattgagcatgagaaagctagacaatggaagggacttgaacttattccatctgagaacttcacatctgtgtcggtgatgcaagctgttgggtctgtcatgactaacaaatacagtgaaggctatcctggtgccagatactatggaggaaatgagtatatagacatggcagaaaccttatgccagaagcgcgctcttgaagctttccggttagatcctgaaaagtggggagtgaatgttcaacctttgtctggatctcctgccaacttccatgtgtacactgcattgttaaagcctcatgaaagaatcatggcacttaatcttcctcatggtggtcatctttctcatggttatcagactgacaccaagaagatatcagctgtgtctatcttctttgaaacaatgccctatagattggacgagagcactggctacatcgactacgatcagatggagaaaagtgctactcttttcaggccaaaattgattgttgctggtgcaagtgcttatgctagattgtatgactatgcccgcatcagaaaggtctgtaacaagcaaaaagctgtaatgctagcagatatggcacacatcagtggtttggttgctgctaatgtaatcccttcaccgttcgactatgctgatgttgtaaccaccacaactcacaagtcacttcgtggaccccgtggagccatgattttcttcagaaagggtgttaaggaaattaacaagcaagggaaagaggttttgtatgattttgaagacaagatcaaccaagctgtcttccctggtcttcaaggtggtccacacaaccacactatcacaggactagctgttgctttgaaacaggcaactacttcagagtacaaagcataccaagaacaagtcctgagtaacagtgcaaagtttgctcagactctaatggagagaggatatgaacttgtttctggtggaactgacaaccatctggttctagtgaatctaaagcccaagggaattgatggatctagagttgagaaagtgttggaagctgttcacattgcatccaacaaaaacactgttcctggagatgtttctgccatggttcctggtggaatcagaatgggtactcctgctctcacttccagaggctttgttgaggaagactttgccaaagtagctgaatacttcgacaaagctgtgacaatagctctcaaagtcaaatctgaagctcaaggaaccaagttgaaggatttcgtgtcagcaatggaatcctcttcaaccatccaatccgagattgcgaaactgcgccatgaagtcgaggaattcgctaagcagttcccaacaattgggtttgagaaagaaaccatgaagtacaagaactaa

SEQ ID NO: 3857 - protein, 517 aa, Arabidopsis thaliana
MAMAMALRRLSSSIDKPIRPLIRSTSCYMSSLPSEAVDEKERSRVTWPKQLNAPLEEVDPEIADIIEHEKARQWKGLELIPSENFTSVSVMQAVGSVMTNKYSEGYPGARYYGGNEYIDMAETLCQKRALEAFRLDPEKWGVNVQPLSGSPANFHVYTALLKPHERIMALNLPHGGHLSHGYQTDTKKISAVSIFFETMPYRLDESTGYIDYDQMEKSATLFRPKLIVAGASAYARLYDYARIRKVCNKQKAVMLADMAHISGLVAANVIPSPFDYADVVTTTTHKSLRGPRGAMIFFRKGVKEINKQGKEVLYDFEDKINQAVFPGLQGGPHNHTITGLAVALKQATTSEYKAYQEQVLSNSAKFAQTLMERGYELVSGGTDNHLVLVNLKPKGIDGSRVEKVLEAVHIASNKNTVPGDVSAMVPGGIRMGTPALTSRGFVEEDFAKVAEYFDKAVTIALKVKSEAQGTKLKDFVSAMESSSTIQSEIAKLRHEVEEFAKQFPTIGFEKETMKYKN

SEQ ID NO: 3858 - DNA, 1398 bp, Bombyx mori
  CDS (1)..(1398)
atgagcgccaagttactaaatagcaacctctgggaggctgatcctgaacttttcgatattatcgtcaaagaaaaggaccgtcaacgagctggactagagatgatagcatcagaaaattttacatcagttcctgtacttcagtgcctgagttcatgtcttcataacaaatattctgaaggcatgcccaatcaacggtactatggggggaatgaatatattgatgaaatagagatactggcacagaacaggtctctggaagcatacagattaaaatcggaagaatggggcgtcaatgtacagccatattcaggctctccggcgaactttgccgtttataccggcattgtcgaaccccatggcaggataatggggttagatttacctgacggtggacatctcacccatggtttctttactgctactaaaaaaatatctgctacgtcaatattctttgaaagcatgccatataaggtagatcctaaaagcggattaattgattacgacaaactagcagaaacagcgaagttgttcaagcctcgtttgatcatcgctggcatgagctgttactcaagatgtctcgattataagaggttccgtgagatcgcagacgcaaatggagcttatctgatggctgatatggctcacgtatctggactggttgctgcaggtgtaataccgagcccgttcgaatactgcgatattgtgaccaccaccactcataagacgctgcgtggtcctcgtgccggtgtcatattcttccgcaagggcgtgaggtccgtcaaggcgaacggacagaaggtcatgtacgatttggaatcgaagataaaccaggctgtgttcccgggcctgcagggcggaccgcacaaccacgcaatagcggccatagccacggccatgaaacaagctacaactactgaattcgtcgaatatcagaaacaggtgataaagaacgcgcagcggttgtgcgagggtttaatatcgcgcgggtactctatagcgacgggcggcaccgacgtgcacctcgcgctcgtggatctgcgcggcgtcgggctgcggggcgcgccggccgagcgcgtgctcgagctctgcagcgtggcctgcaacaagaacaccgtgcccggcgacattagcgcgctcaaccccagcggcatcagactcggtacaccagcgttgaccacaagaggtctcaaggaagctgatattgataaagttgtcgattttattgatagagcattgaaaataggtctagaaatcattaaggtttccgggctgaaacttgttgacttcaataaagccattgaagaaaatgctgagttcaaaaagaaaattgaaaatctgaaggaagaagttgaaaactacagcaaatcattccctttgcctgggttcgataaatattaa

SEQ ID NO: 3859 - protein, 465 aa, Bombyx mori
MSAKLLNSNLWEADPELFDIIVKEKDRQRAGLEMIASENFTSVPVLQCLSSCLHNKYSEGMPNQRYYGGNEYIDEIEILAQNRSLEAYRLKSEEWGVNVQPYSGSPANFAVYTGIVEPHGRIMGLDLPDGGHLTHGFFTATKKISATSIFFESMPYKVDPKSGLIDYDKLAETAKLFKPRLIIAGMSCYSRCLDYKRFREIADANGAYLMADMAHVSGLVAAGVIPSPFEYCDIVTTTTHKTLRGPRAGVIFFRKGVRSVKANGQKVMYDLESKINQAVFPGLQGGPHNHAIAAIATAMKQATTTEFVEYQKQVIKNAQRLCEGLISRGYSIATGGTDVHLALVDLRGVGLRGAPAERVLELCSVACNKNTVPGDISALNPSGIRLGTPALTTRGLKEADIDKVVDFIDRALKIGLEIIKVSGLKLVDFNKAIEENAEFKKKIENLKEEVENYSKSFPLPGFDKY

SEQ ID NO: 3860 - DNA, 1416 bp, Oryza sativa Japonica Group
  CDS (1)..(1416)
atggactccgtcgcgtcgtgggggctgaccccgctcgccgcggccgacccgctcgtccacgacctcctcgagcgggagaagcggcggcagcggagcggcatcgagctcatcgcctcggagaacttcacctccttcgccgtcatggaggccctcggctccgcgctcaccaacaagtactccgaggggatgcccggggcgcgctactacggcgggaacgacgtcatcgacgagatcgagaacctgtgccgcgaccgcgccctcgccgcgttccgcctcgacgccgcgtcgtggggcgtcaacgtgcagccctactccggctcgccggccaccttcgccgcctacacggcgctcctcaacccgcacgaccgcatcatggggctcgacctcccctccggtggccacctcacccatggctactacaccgcgggcgggaagaagatctccgcgacgtcgatctacttcgagagcctcccctacaaggtgagcgccgccacggggtacatcgactacgagaagctggaggagaaggcgctcgacttccgccccaagctcatcatctgcggcggcagcgcgtacccgagggactgggactacgccaagctcagggccgtcgccgacaaggtcggggcgctgctcctctgcgacatggcgcacatcagcggcctcgtcgccgcgcaggaagctgcaaatccttttgagtactgtgatgtggttaccaccaccacgcacaagtccctccgaggaccaagagctggcatgatcttctacaggaagggccctaagcctcccaagaagggccagcctgagggtgctgtctatgactacgaggacaagatcaacttcgcagtgttcccgtcactgcaaggtggtcctcacaaccaccagattgcagcccttgctgttgctctgcagcaaaccatgacacctggattcaaggcctacgcaaagcaggtcaaggccaacgctgtcgccattggcaagtatcttatgagcaagggctacaaaatggtgactgatggaactgagaaccaccttgttctctgggatcttcgccctcttggcttgactggcaacaaggttgagaagatgtgtgacctttgcagcattacacttaacaagaatgctgtctttggtgacagcagtgcattggctcctggcggtgtccgcattggtactcctgcgatgacatccaggggtcttgtcgagaaggactttgagcagatcggcgagttcctccaccaggccgtgaccatctgcctcaacatccagaaggagcacggcaagctcctcaaggacttctccaagggcctggtgaacaacaaggacatcgagaacctcaagctggaggtcgagaagttcgccacctccttcgacatgcccggcttcaccctcgacagcatgaagtacaaggagtag

SEQ ID NO: 3861 - protein, 471 aa, Oryza sativa Japonica Group
MDSVASWGLTPLAAADPLVHDLLEREKRRQRSGIELIASENFTSFAVMEALGSALTNKYSEGMPGARYYGGNDVIDEIENLCRDRALAAFRLDAASWGVNVQPYSGSPATFAAYTALLNPHDRIMGLDLPSGGHLTHGYYTAGGKKISATSIYFESLPYKVSAATGYIDYEKLEEKALDFRPKLIICGGSAYPRDWDYAKLRAVADKVGALLLCDMAHISGLVAAQEAANPFEYCDVVTTTTHKSLRGPRAGMIFYRKGPKPPKKGQPEGAVYDYEDKINFAVFPSLQGGPHNHQIAALAVALQQTMTPGFKAYAKQVKANAVAIGKYLMSKGYKMVTDGTENHLVLWDLRPLGLTGNKVEKMCDLCSITLNKNAVFGDSSALAPGGVRIGTPAMTSRGLVEKDFEQIGEFLHQAVTICLNIQKEHGKLLKDFSKGLVNNKDIENLKLEVEKFATSFDMPGFTLDSMKYKE

SEQ ID NO: 3862 - DNA, 1767 bp, Zea mays
  CDS (1)..(1767)
atggatctctcgcggcccacatcgtcggacctctcgctcgggctccactctcacggtcacgcccacgcccacgctcgcaggcacgcggtagccgcgccgctgcgcctgttcgacgacgcggaggagccgaagccggagcgcgtcggggccggagaggccgacgcggagagggatgacgaggacgggggcgaccagcacttctccctcctcgggcactccctctgcgtcaagcgcccgcgccgcgccggcaacggcggcgggggcggagagacgtcatcctgctcgtccacgtccgcggcgcttcgccctgccaagcgacaggcgacgggggagggcagcggcgcagatctggagacccgccgcgccgcggtccgcgcctggggcaatcagtcgctggcggaggccgacccggacgtgcactcgctgatggagcaggagttggaccgccaggtgcgaggcatcgagctcatagcgtcggaaaacttcgtctgccgcgcggtgctcgatgcactcggcagccacctcactaacaagtactccgagggggccccgggtgctcgctactacggcgggaatcagcacatcgacgccatcgaacggctctgccatgagcgcgctctcaccgccttcggtctcgaccctgcctgctggggcgtcaacgtgcagccctactcgtgcacgtctgccaacttggctgtctacactgggctccttcaacccaaggaccgcatcatggggctggagccaccgtcgggcggccatgttagccatggttactacacgcccagtggcaagaaggtgtcaggtgcctctattttcttcgagagcatgtcgtacaaggtgaacccacagactgggtatattgattacgacaagcttgaagaaagagcaatggatttccaccctaaaattctcatctgtggtgggagctcttaccccagagagtgggactttgcacggatgagattgattgctgataagtgtggtgcggtgcttctttgcgacatggcacatatcagtgggcttgtcgcagcaaaggaatgccgtagccctttcgactactgtgatgttgttacgtcaactactcacaagaatcttaggggccctagaggtggtataatattcttcaggaaagggaaaaatttaaggaaacgagctggatctttttctcaaggagatgagaatgaatacgacttcgaggataggataaattttggtgttttcccttcaatgcaaggagggccccataataatcatattgctggcttggctataactctgaagcaggtagcaacttctgaatataaagcatacattcaacaagtcaagaaaaatgctcaggctttggcatcagctttgatcagaagaaaatgcagattggttacaggtggcacagataatcacttagtactttgggacctcagaactcttggcttgactggcaagatcttcgagaaggtttgcgaggcatgccacatatctgtcaacaagacaccaatatatggagataatggctcgatatcgccaggtggtgtgcggattggaacacctgcaatgactactagaggttgcttagaagaggacttcgaggtgattgcagacttcctcataagggctactcaaattgctaacaatgttctgaaagaacatggcaaagtgcaaaaggagtttctaagaggcctacagaacaataatgatgttatagaactccgaaatcaggttgaggcatttgcgtcacagtttgcgatgccaggttttgatgtatga

SEQ ID NO: 3863 - protein, 588 aa, Zea mays
MDLSRPTSSDLSLGLHSHGHAHAHARRHAVAAPLRLFDDAEEPKPERVGAGEADAERDDEDGGDQHFSLLGHSLCVKRPRRAGNGGGGGETSSCSSTSAALRPAKRQATGEGSGADLETRRAAVRAWGNQSLAEADPDVHSLMEQELDRQVRGIELIASENFVCRAVLDALGSHLTNKYSEGAPGARYYGGNQHIDAIERLCHERALTAFGLDPACWGVNVQPYSCTSANLAVYTGLLQPKDRIMGLEPPSGGHVSHGYYTPSGKKVSGASIFFESMSYKVNPQTGYIDYDKLEERAMDFHPKILICGGSSYPREWDFARMRLIADKCGAVLLCDMAHISGLVAAKECRSPFDYCDVVTSTTHKNLRGPRGGIIFFRKGKNLRKRAGSFSQGDENEYDFEDRINFGVFPSMQGGPHNNHIAGLAITLKQVATSEYKAYIQQVKKNAQALASALIRRKCRLVTGGTDNHLVLWDLRTLGLTGKIFEKVCEACHISVNKTPIYGDNGSISPGGVRIGTPAMTTRGCLEEDFEVIADFLIRATQIANNVLKEHGKVQKEFLRGLQNNNDVIELRNQVEAFASQFAMPGFDV

SEQ ID NO: 3864 - DNA, 1404 bp, Drosophila melanogaster
  CDS (1)..(1404)
atggccgatcagaaactgctgcaaaccccgctggcacagggcgatccggagctggccgagctgatcaagaaggagaaggagcgccagcgcgaaggactcgagatgatcgccagtgagaacttcacctcggtggcggttctcgagagcctgagctcctgcctgaccaacaagtactccgagggatatcccggcaagaggtactacggtggcaacgagtacatcgaccgcatagagctgctcgcccagcaacgcggacgcgagctgttcaacctggacgatgagaagtggggcgttaatgtgcagccttattccggatccccggccaatctggctgtctacacgggcgtctgccggccccacgatcgcatcatgggcctggatctgcccgatggcggtcacttgacgcacggtttcttcacgcccaccaagaagatatcggccacatcgatcttcttcgagagcatgccgtacaaagtgaacccggagacgggcatcatcgattacgataagttggcggaggcggcgaagaatttccggccgcagatcatcattgctggcatatcgtgctactcccgtctgctggactatgcgcgtttccgacagatttgcgatgatgtgggcgcctacctgatggccgacatggcccatgtggcgggcattgtggccgcgggattgataccatcgccgttcgaatgggccgacattgtgaccaccaccacgcacaagacactgcgaggtccgcgcgccggcgtgatcttcttccgcaagggcgtgcgcagcaccaaggccaatggagacaaggtactctacgatctggaggagcgcatcaaccaggcggtgtttccatcactccagggtggtccgcacaacaacgccgtggctggcattgccaccgccttcaagcaggccaagagtcccgaattcaaggcctaccagacgcaggtgctcaagaatgccaaggccctgtgcgatggcctcatttcgcgaggctatcaggtggccaccggcggcaccgacgtccatttggtgctggtcgatgtgcgtaaggctggcctgaccggcgccaaggccgagtacatcctcgaggaggtgggcatcgcgtgcaacaagaacactgtgcccggcgacaagtccgccatgaatccctccggcatccggctgggcacaccggccctgaccactcgcggccttgccgagcaggacatcgagcaggtggtggccttcatcgatgctgccctaaaggttggcgtccaggcagccaagctggccggcagtcccaagataaccgattaccacaagacgctggccgagaatgtggagctcaaggcccaggtggacgagatccgcaagaatgtggcccagttcagcaggaaattcccgctgcccggcctggagaccctgtag

SEQ ID NO: 3865 - protein, 467 aa, Drosophila melanogaster
MADQKLLQTPLAQGDPELAELIKKEKERQREGLEMIASENFTSVAVLESLSSCLTNKYSEGYPGKRYYGGNEYIDRIELLAQQRGRELFNLDDEKWGVNVQPYSGSPANLAVYTGVCRPHDRIMGLDLPDGGHLTHGFFTPTKKISATSIFFESMPYKVNPETGIIDYDKLAEAAKNFRPQIIIAGISCYSRLLDYARFRQICDDVGAYLMADMAHVAGIVAAGLIPSPFEWADIVTTTTHKTLRGPRAGVIFFRKGVRSTKANGDKVLYDLEERINQAVFPSLQGGPHNNAVAGIATAFKQAKSPEFKAYQTQVLKNAKALCDGLISRGYQVATGGTDVHLVLVDVRKAGLTGAKAEYILEEVGIACNKNTVPGDKSAMNPSGIRLGTPALTTRGLAEQDIEQVVAFIDAALKVGVQAAKLAGSPKITDYHKTLAENVELKAQVDEIRKNVAQFSRKFPLPGLETL

SEQ ID NO: 3866 - DNA, 1290 bp, Zea mays
  CDS (1)..(1290)
atgcaaaataaatactcggagggataccccggcgccagatactatggtggaaacgaacacattgacgcctctgaacggctatgccagcagcgtgcgctcgagacctttggccttaaccccgaagaatggggtgtgaacgtgcaaccgctatccggctcgcccgctaacctttacgccatttccgccatcctcaacacccacgaccgcttgatgggcctggacctgccccatggcggtcacctgtcccacggctaccagacccccaccaagaagatctcgttcatctcgaagtacttcgaaacgctgccctaccggctagatgagtctaccggtctcattgactacgacgccctggagaagcaggcgcttctctaccgccccaagctcatcatcgccggtacctcggcctacagccgcttgattgactaccctcgcatgcgccagatcgcagacgccgccggcgcatatttgctgagcgacatggcccacatctccggtcttgtggccgcggacgtcctcccgtcgcccttcgcccactcagatgtggtgactaccacgacccacaaatcgctgcggggtccccgcggcgcgatgatcttcttccgcaagggtgtccgccggacggacaagaagggcaatccggagatgtatgacctggagggcccgatcaacgcgtccgtgttcccaggtcaccagggtggcccccacaaccacactatcaccgccttggctgtggcgctgaagcaggcgcagtcgcctgagttcaagacctaccagcagacggtgttggccaatgcgaaggccctggcagaccgtcttggcagcccgcttagcaacggaggcctgggatacaacatcgtctctggcggcaccgacaaccacctggtgttggtggacctgaagaaccgcggggtggacggcgcgcgcgtcgagcgggtgctggagctgtgcggtgtggccagcaacaagaacacggtgccgggtgacaagtcggctctgaagcccggtggtctacgtctgggcacgccggccatgacgacgcgaggcttccagccggaggacttccgccgcgtcgcagacattgtggaccgggcggtgatcatcacacagaaactggacaaggcagccaaggagagcgcggcggcaaagggtgtgaagaacccgaacaccgtcaaggctttcttggaatatgtgcgcgagggcgaggagattccggagattgtgctcctgcggcaggaggtggaggactgggcgggaacatttagtctgccttgggctaaggatgagtag

SEQ ID NO: 3867 - protein, 429 aa, Zea mays
MQNKYSEGYPGARYYGGNEHIDASERLCQQRALETFGLNPEEWGVNVQPLSGSPANLYAISAILNTHDRLMGLDLPHGGHLSHGYQTPTKKISFISKYFETLPYRLDESTGLIDYDALEKQALLYRPKLIIAGTSAYSRLIDYPRMRQIADAAGAYLLSDMAHISGLVAADVLPSPFAHSDVVTTTTHKSLRGPRGAMIFFRKGVRRTDKKGNPEMYDLEGPINASVFPGHQGGPHNHTITALAVALKQAQSPEFKTYQQTVLANAKALADRLGSPLSNGGLGYNIVSGGTDNHLVLVDLKNRGVDGARVERVLELCGVASNKNTVPGDKSALKPGGLRLGTPAMTTRGFQPEDFRRVADIVDRAVIITQKLDKAAKESAAAKGVKNPNTVKAFLEYVREGEEIPEIVLLRQEVEDWAGTFSLPWAKDE

SEQ ID NO: 3868 - DNA, 1401 bp, Zea mays
  CDS (1)..(1401)
atgagtgatatcaaagtgttgaacgcctccctggccgactccgatccggagctgtacgatttaatcaaaaaagagaaaaaacgtcagctgtccggcttagagatgatcgcctcggagaatttcaccaccatgccagtattacagtgcctgagtacgtgcctgcacaataaatactccgaaggtctgccggggcagcgctactacggcggcaatgagttcattgatgagatcgaggtgctggcacagaagagggcgctgcagacgtacaaattggacgccgacaagtggggcgtgaatgttcagccgtattccggatcgcctgggaattttgctgtttacactggtattgtcgagccacatggtcgtattatgggtcttgacctacccgatggtggtcatttgacgcacggtttcttcacgccaacgaaaaaaatctcagctacgtcgattttcttcgaatctatgccttacaaggttaatcctgacactggcttaattgattatgaccaactagccaaatccgctcgacttttccgcccaaaagtcatcatcgccggcgtgagctgttattcgcgcccattggactacaaacgcttccgcgaaatctgcgacgaagtcggcgcttacttagtcagcgacatggcgcacatttccggtcttgtagccgctggcgtcacgcccagccccttcgagtactccgacgtcgtcaccacaacaacgcacaaaagcctacggggtccgcgcgcaggcgtcattttcttccgcaaaggcgtgcgcagcgtcaacgccaaaggcgacaaaatcatgtacgacctcgagagtcgcatcaaccaagccgtgtttccgggcctgcaaggcggcccgcacaacaacaccatcgccgctattgccaccgccatgaaacaagccgccacgccgcagtttgtcgagtacgctaagcaaattgtggcgaatgcgcagcggctttcggaccgcctccaggaagcggggtacaaagtcgttactggcggcacggaagtgcacatgcttttagtggacttgcgctccaaaggcttgaccggcgcgaaaggggaattcattctagaggagattaacattgcgtgcaataaaaacacagttccaggagataaaagcgcgttaaatccgtctggaattcggttgggaacgccagcgctgaccactcgaggcttgaaagaagccgatattgatcaagttgttaagttaatggatgatgccttgaaattgggcaaagaaatcagcgataagtccggaccgaagttggtggactttaaaaaattgtgccatgaagatgccactttctcgaagaaaattcgggagctgaaagagcgcgtggcgcagttcagtactaaattcccgcttccgggatatgatgaatgttaa

SEQ ID NO: 3869 - protein, 466 aa, Zea mays
MSDIKVLNASLADSDPELYDLIKKEKKRQLSGLEMIASENFTTMPVLQCLSTCLHNKYSEGLPGQRYYGGNEFIDEIEVLAQKRALQTYKLDADKWGVNVQPYSGSPGNFAVYTGIVEPHGRIMGLDLPDGGHLTHGFFTPTKKISATSIFFESMPYKVNPDTGLIDYDQLAKSARLFRPKVIIAGVSCYSRPLDYKRFREICDEVGAYLVSDMAHISGLVAAGVTPSPFEYSDVVTTTTHKSLRGPRAGVIFFRKGVRSVNAKGDKIMYDLESRINQAVFPGLQGGPHNNTIAAIATAMKQAATPQFVEYAKQIVANAQRLSDRLQEAGYKVVTGGTEVHMLLVDLRSKGLTGAKGEFILEEINIACNKNTVPGDKSALNPSGIRLGTPALTTRGLKEADIDQVVKLMDDALKLGKEISDKSGPKLVDFKKLCHEDATFSKKIRELKERVAQFSTKFPLPGYDEC

SEQ ID NO: 3870 - DNA, 1752 bp, Zea mays
  CDS (1)..(1752)
atggatctctcgcggcccgcatcgtcagacctctcgctcgggctgcactctcatgcccacgcccacgctcgcgtgcatgcggcagccgcgccgctgcgcctgttcgacgacgcgaagccggagcgcctcgtggccggggaggccgacgcggagagggacgacggggacggtggcgaccagcacttctccctcctcgggcactccctctgcgtcaagcgcccgcgccgcgccgtcaacggcggtgggggcgggggtggagagacgtcatcctgctcgtccccggcgctgcgccccgccaagcggcaggcggcgggggaagatagcggcgcggatctggagacccgccgcgccgcggtccgttcctggggcaaccagtcgctggcggaggccgacccggatgtgcacgcgctgatggagcaggagctgtcccgccaggtgcgtggcatcgagctcatagcgtcggagaacttcgtctgccgcgcggtgctcgacgcgctcggcagccacctcaccaacaagtactctgagggggccccgggtgctcgctactacggcgggaatcagcacatcgatgccatcgagcggctctgccatgagcgcgccctcactgccttcggtctcgaccctgcctgctggggcgtcaacgtgcagccgtactcgtgcacgtctgccaatttggctgtctacactggtcttcttcaacccaaggaccgcatcatggggctggagccaccgtcgggcggccatgttagccatggttactacacgcccagtggcaagaaggtgtcaggtgcctctattttcttcgaaagcatgtcgtacaaggtgaacccacaaactgggtatattgattacgacaagctcgaggagagagcaatggatttccacccgaaaattctcatatgtggtgggagctcttaccccagagagtgggactttgctcggatgagattgattgctgataagtgtggtgcagtgcttctttgcgatatggcacatatcagtgggcttgttgcagcaaaggaatgtcgtagccctttcgactactgtgatgttgttacgtcaactactcacaagaatcttaggggccctagaggtggtataatattcttcaggaaagggaaaaatttaaggaaacgagctggatctttttctcaaggagatgagaatgaatacgacttcgaggataggataaattttggtgtttttccttcaatgcaaggggggccccataataatcatattgctgccttggctattactctgaagcaagtcgcaactcctgagtataaagcgtacattcaacaagtcaagaaaaatgctcaggctctagcatcagcgttgctcagaagaaaatgcagattggttactggtggcacagataatcacttaatactttgggatctcagaactcttggcttgactggtaagatctttgagaaggtctgtgaggcatgccacatatctatcaacaagacaccaatttatggggataatggctcgatatcccctgggggtgtgcggatcggaacacctgcaatgactactagaggttgcctagaagaggacttcgagtcgattgcagacttcctcataagggctactcagattgctagcaatgttctgaaagaacatggcaaagtgcaaaaggagtttctaagaggcctaatgaacaataaggatgttatggaactccgaaatcaggttgaggcatttgcgtcacagtttgctatgccaggttttgatgtatga

SEQ ID NO: 3871 - protein, 583 aa, Zea mays
MDLSRPASSDLSLGLHSHAHAHARVHAAAAPLRLFDDAKPERLVAGEADAERDDGDGGDQHFSLLGHSLCVKRPRRAVNGGGGGGGETSSCSSPALRPAKRQAAGEDSGADLETRRAAVRSWGNQSLAEADPDVHALMEQELSRQVRGIELIASENFVCRAVLDALGSHLTNKYSEGAPGARYYGGNQHIDAIERLCHERALTAFGLDPACWGVNVQPYSCTSANLAVYTGLLQPKDRIMGLEPPSGGHVSHGYYTPSGKKVSGASIFFESMSYKVNPQTGYIDYDKLEERAMDFHPKILICGGSSYPREWDFARMRLIADKCGAVLLCDMAHISGLVAAKECRSPFDYCDVVTSTTHKNLRGPRGGIIFFRKGKNLRKRAGSFSQGDENEYDFEDRINFGVFPSMQGGPHNNHIAALAITLKQVATPEYKAYIQQVKKNAQALASALLRRKCRLVTGGTDNHLILWDLRTLGLTGKIFEKVCEACHISINKTPIYGDNGSISPGGVRIGTPAMTTRGCLEEDFESIADFLIRATQIASNVLKEHGKVQKEFLRGLMNNKDVMELRNQVEAFASQFAMPGFDV

SEQ ID NO: 3872 - DNA, 1473 bp, Nasonia vitripennis
  CDS (1)..(1473)
atgcttgtatattttttaaaaaatcagaagatatcagttataacttatcggttttattgtgtttatttaaaaaagaaaatggatagcatgatacataagaatgtttgggaaactgaccaagaactttttgaacttatgaaaaaagaaaagattcgtcaagaatcaggacttgaaatgatagctagtgaaaattttacatctttaagtgttttacaatgtcttagttcatgtcttcataataagtatagtgagggcctgccaggacaaagatattatggtggtaacgaatatattgatgaaatagaattgttagctcaaaaaagatgtttagaggcgtttcgtttaaatcctgaagaatggggttgtaacgtccaaccatactctggaagtcctgctaattttgctgtctatacaggtttaatagagcctcatggacgtataatgggattagatcttcccgacggtggtcatttaactcatggatttttcacgaataataaaaaaatttcagctacttctatatttttcgaatcaatgccttacaaagttaaaccagacaccggtctaattgactataataagcttgcagaagatgcaaagttatttaaaccaaaaatcattattgctggagtctcgtgttacagcagatgtctcgattacaaaaaatttagagaaatagctgatgaaaataatgcttatctttttagtgatatggcacacatatctggattagtagctgctggcataatagctagtccttttgaatacagtgatgtagtttcaacaacaacgcataaaacgttaagaggccctcgtgccggagtgatttttttccgtaaaggtataaaaaatattgcaaaaaatggagaaaaaataatgtacgatctggaaaacaagattaatcaagcagtatttccgggactacagggtggtccacataatcatgctatagctggtatagctacatcaatgaaacaagttaccaggccagagtttgtaacttatcaaaaacaagtgattgctaatgcaaaaagactgtgtagtcaattacaggaattcggttataaaattagtacaggtggtacagatgtacacatgctcttggttgatttgcgacctgtgagtttaacagggtcaaaggctgaaaaaatattagaggaaatttcaatagcatgtaataagaatacagtccctggtgatagaagtgcctttaatccaagtggaatcaggcttggaactccagcattgacaactcgaggtttgaaagaaaacgatattgatcaagttgctgcatttattcataaaggtttgatattagctaaagaaattactattaaatcaggacctaagcttgttgacttcaaaagtacattggagaacgatgatcattttcgaaaacaaataagcgcattaaaagcggaagtggaaaagtttgcacaaagttttcctatacccggtcatgaaaattattga

SEQ ID NO: 3873 - protein, 490 aa, Nasonia vitripennis
MLVYFLKNQKISVITYRFYCVYLKKKMDSMIHKNVWETDQELFELMKKEKIRQESGLEMIASENFTSLSVLQCLSSCLHNKYSEGLPGQRYYGGNEYIDEIELLAQKRCLEAFRLNPEEWGCNVQPYSGSPANFAVYTGLIEPHGRIMGLDLPDGGHLTHGFFTNNKKISATSIFFESMPYKVKPDTGLIDYNKLAEDAKLFKPKIIIAGVSCYSRCLDYKKFREIADENNAYLFSDMAHISGLVAAGIIASPFEYSDVVSTTTHKTLRGPRAGVIFFRKGIKNIAKNGEKIMYDLENKINQAVFPGLQGGPHNHAIAGIATSMKQVTRPEFVTYQKQVIANAKRLCSQLQEFGYKISTGGTDVHMLLVDLRPVSLTGSKAEKILEEISIACNKNTVPGDRSAFNPSGIRLGTPALTTRGLKENDIDQVAAFIHKGLILAKEITIKSGPKLVDFKSTLENDDHFRKQISALKAEVEKFAQSFPIPGHENY

SEQ ID NO: 3874 - DNA, 1497 bp, Acyrthosiphon pisum
  CDS (1)..(1497)
atgtacttacgtccaataatacgtaccttggttaatgctcaacggcttcatttcaacaacaaatttgtaaccatgtcagcaatggaagcaaaatatagcactaaaatatcggatccaacattaagtctcccattggagacagctgatcctgagttgtatgctttagttagtcaagagtctcaacgacagaagaaaggacttgaacttatagcatcagaaaattttacctcagtttctgttttacaatgtttaggatcttgtttaactaacaaatattctgaaggtctaccgggtgcaagatactatggcggtaatcaagtaattgatcagatagaagttttatgccaaaaaaggtgtcttgaagcattttctttggatccaaatctatggggtgtcaatgtccaaccatattctggttcacccgcgaatgttgaagcttacactgctcttattggaggaggcaaaggacgaataatgggcttggatttaccagatggtggtcatatcagtcatggtctgatggctcaaaaaaaaagattgtctgcagcatcaatattttttgaaactttaccatatcacgtaaatatggaaactggtttaattgattatgacgagttagaaaaatctgcaaagaattttaagcctgatattattattgctggcgtaacttcctacccaaggacattggactataaacgttttagaacaatagctcaggctagtgattcttacttgatggctgatatgtcacatattagtggtttagttgctgctggtgttattccttcaccttttgaatattgtgatgtggtcacttctactactcataaaacattaagaggtcctcgagctggagtcatattttatcgtaaaggagttaaatcagtatcaaaaactggtgaaaatgtcatgtatgacttggaagaccgtgtaaatgctgctgttttcccaggatttcaaggaggacctcacaataatgctattggaggaatagcagctgctatgcgtttggcaactacccaggaattcaaagactaccaaaaaagagttttgagcaattgtaaacaattagctgaatctctaaaacagcttggatacaaaatatccactgatggtacagatgtgcatatgttgttagttgatcttcggccaattaatttgactggttctaaagcagagtttacattacaaactgtagaaattgtgtgtaataaaaacaccgttcctggtgacaaaagtgcaatgaatccttatggtattcgtttgggtacaccagctcttactacacgaggaatggtggaaaatgatatcattaaagttgctgaattaattcacaaaggtttgaccttggcgttggatgctcaaaaagtatctggtccaaaattagtgaacttcaaatccactcttacttcagatccagtgtttgttaatcgtgtaaaagaaattacgaaagaagtagaagatttcgcagtaaacttttatattcctgaacaataa

SEQ ID NO: 3875 - protein, 498 aa, Acyrthosiphon pisum
MYLRPIIRTLVNAQRLHFNNKFVTMSAMEAKYSTKISDPTLSLPLETADPELYALVSQESQRQKKGLELIASENFTSVSVLQCLGSCLTNKYSEGLPGARYYGGNQVIDQIEVLCQKRCLEAFSLDPNLWGVNVQPYSGSPANVEAYTALIGGGKGRIMGLDLPDGGHISHGLMAQKKRLSAASIFFETLPYHVNMETGLIDYDELEKSAKNFKPDIIIAGVTSYPRTLDYKRFRTIAQASDSYLMADMSHISGLVAAGVIPSPFEYCDVVTSTTHKTLRGPRAGVIFYRKGVKSVSKTGENVMYDLEDRVNAAVFPGFQGGPHNNAIGGIAAAMRLATTQEFKDYQKRVLSNCKQLAESLKQLGYKISTDGTDVHMLLVDLRPINLTGSKAEFTLQTVEIVCNKNTVPGDKSAMNPYGIRLGTPALTTRGMVENDIIKVAELIHKGLTLALDAQKVSGPKLVNFKSTLTSDPVFVNRVKEITKEVEDFAVNFYIPEQ

SEQ ID NO: 3876 - DNA, 1425 bp, Acyrthosiphon pisum
  CDS (1)..(1425)
atgtcagcaatggaagcaaaatatagcactaaaatatcggatccaacattaagtctcccattggagacagctgatcctgagttgtatgctttagttagtcaagagtctcaacgacagaagaaaggacttgaacttatagcatcagaaaattttacctcagtttctgttttacaatgtttaggatcttgtttaactaacaaatattctgaaggtctaccgggtgcaagatactatggcggtaatcaagtaattgatcagatagaagttttatgccaaaaaaggtgtcttgaagcattttctttggatccaaatctatggggtgtcaatgtccaaccatattctggttcacccgcgaatgttgaagcttacactgctcttattggaggaggcaaaggacgaataatgggcttggatttaccagatggtggtcatatcagtcatggtctgatggctcaaaaaaaaagattgtctgcagcatcaatattttttgaaactttaccatatcacgtaaatatggaaactggtttaattgattatgacgagttagaaaaatctgcaaagaattttaagcctgatattattattgctggcgtaacttcctacccaaggacattggactataaacgttttagaacaatagctcaggctagtgattcttacttgatggctgatatgtcacatattagtggtttagttgctgctggtgttattccttcaccttttgaatattgtgatgtggtcacttctactactcataaaacattaagaggtcctcgagctggagtcatattttatcgtaaaggagttaaatcagtatcaaaaactggtgaaaatgtcatgtatgacttggaagaccgtgtaaatgctgctgttttcccaggatttcaaggaggacctcacaataatgctattggaggaatagcagctgctatgcgtttggcaactacccaggaattcaaagactaccaaaaaagagttttgagcaattgtaaacaattagctgaatctctaaaacagcttggatacaaaatatccactgatggtacagatgtgcatatgttgttagttgatcttcggccaattaatttgactggttctaaagcagagtttacattacaaactgtagaaattgtgtgtaataaaaacaccgttcctggtgacaaaagtgcaatgaatccttatggtattcgtttgggtacaccagctcttactacacgaggaatggtggaaaatgatatcattaaagttgctgaattaattcacaaaggtttgaccttggcgttggatgctcaaaaagtatctggtccaaaattagtgaacttcaaatccactcttacttcagatccagtgtttgttaatcgtgtaaaagaaattacgaaagaagtagaagatttcgcagtaaacttttatattcctgaacaataa

SEQ ID NO: 3877 - protein, 474 aa, Acyrthosiphon pisum
MSAMEAKYSTKISDPTLSLPLETADPELYALVSQESQRQKKGLELIASENFTSVSVLQCLGSCLTNKYSEGLPGARYYGGNQVIDQIEVLCQKRCLEAFSLDPNLWGVNVQPYSGSPANVEAYTALIGGGKGRIMGLDLPDGGHISHGLMAQKKRLSAASIFFETLPYHVNMETGLIDYDELEKSAKNFKPDIIIAGVTSYPRTLDYKRFRTIAQASDSYLMADMSHISGLVAAGVIPSPFEYCDVVTSTTHKTLRGPRAGVIFYRKGVKSVSKTGENVMYDLEDRVNAAVFPGFQGGPHNNAIGGIAAAMRLATTQEFKDYQKRVLSNCKQLAESLKQLGYKISTDGTDVHMLLVDLRPINLTGSKAEFTLQTVEIVCNKNTVPGDKSAMNPYGIRLGTPALTTRGMVENDIIKVAELIHKGLTLALDAQKVSGPKLVNFKSTLTSDPVFVNRVKEITKEVEDFAVNFYIPEQ

SEQ ID NO: 3878 - DNA, 1473 bp, Saccharomyces cerevisiae
  CDS (1)..(1473)
atgtttcccagagcttctgcattggccaaatgtatggcaactgttcatcgtcgtgggctactcaccagtggtgcacaatcgctagtctccaaaccagtctcggagggagatccagagatgtttgacatcttgcaacaagaacgtcacagacaaaaacactctatcacccttatcccatcagaaaacttcacctcgaaggccgttatggatttgctaggttctgagctccaaaacaagtattctgaaggttatccaggtgaaagatactacggaggtaacgaaatcatcgataagtccgaatccttgtgtcaagcaagagctctggaactgtacggattagaccctgccaagtggggagttaatgttcaaccattaagcggggcacctgccaatttgtatgtttactccgctatcatgaacgttggtgaaagattaatgggattggatttgccagatggtggtcacttgtctcacgggtaccaacttaagtcaggaacgccaatttctttcatttccaaatacttccaaagtatgccataccatgtcgaccacactacggggctaatcgattacgataacttgcaagtattggccaaggcattcagaccaaaggtgatcgtggccggtacttccgcgtactcgagattaatagactacgctagattcaaggaaatttcccaaggatgcggcgcatatttgatgagtgatatggcacacatatccggtttggtggcagccaatgttgtcccatctccatttgaacattccgatatagttaccacaaccactcacaagtccttgagaggcccaagaggtgctatgattttcttcagaaagggtatcaagtctgtcaccaaaaagggcaaggaaatcccatatgagttagaaaagaaaatcaacttctcagttttcccaggacatcaaggtggtcctcacaaccatactatcggtgcaatggcagtggcattaaagcaagcgatgtctccagaattcaaagaataccaacaaaaaattgtcgacaacagcaaatggtttgctcaggaactaaccaagatgggttataagttggtttccggcggtaccgataaccacttgattgttattgacttatccggtactcaggtagacggtgctcgtgtcgagacaattttaagtgccttgaacattgctgctaacaagaacaccatcccaggtgataagagtgctcttttcccctctggtctaagaatcggtactccagcaatgaccacgagaggatttggccgtgaagagttttctcaagtcgcaaagtacattgattctgccgttaagctcgctgaaaatttgaaaactttggaaccaacaacgaaactagatgcaagatcaagactcaatgagttcaagaagttgtgtaatgaatctagtgaagtcgctgctttgtctggcgagatttccaagtgggtcggtcaataccctgtcccaggtgatatctaa

SEQ ID NO: 3879 - protein, 490 aa, Saccharomyces cerevisiae
MFPRASALAKCMATVHRRGLLTSGAQSLVSKPVSEGDPEMFDILQQERHRQKHSITLIPSENFTSKAVMDLLGSELQNKYSEGYPGERYYGGNEIIDKSESLCQARALELYGLDPAKWGVNVQPLSGAPANLYVYSAIMNVGERLMGLDLPDGGHLSHGYQLKSGTPISFISKYFQSMPYHVDHTTGLIDYDNLQVLAKAFRPKVIVAGTSAYSRLIDYARFKEISQGCGAYLMSDMAHISGLVAANVVPSPFEHSDIVTTTTHKSLRGPRGAMIFFRKGIKSVTKKGKEIPYELEKKINFSVFPGHQGGPHNHTIGAMAVALKQAMSPEFKEYQQKIVDNSKWFAQELTKMGYKLVSGGTDNHLIVIDLSGTQVDGARVETILSALNIAANKNTIPGDKSALFPSGLRIGTPAMTTRGFGREEFSQVAKYIDSAVKLAENLKTLEPTTKLDARSRLNEFKKLCNESSEVAALSGEISKWVGQYPVPGDI

SEQ ID NO: 3880 - DNA, 1410 bp, Saccharomyces cerevisiae
  CDS (1)..(1410)
atgccttacactctatccgacgctcatcataagttgatcacctctcatttggtggacaccgaccctgaagtggactccattatcaaggatgaaattgaaagacaaaagcactccatcgatttgattgcttctgaaaatttcacctcaacctccgttttcgatgcccttggaactccattgtccaacaaatactctgaaggttatccaggtgctcgttactacggtggtaatgaacacattgacagaatggaaattctatgtcaacaaagagctttgaaagctttccatgttactccagacaaatggggtgttaacgtccaaactttatctggttctcctgctaacttgcaggtttatcaagctattatgaagcctcatgaaagattgatgggtctatacctaccagatggtggtcatttgtctcacggttacgctactgaaaacagaaaaatttctgctgtttccacatacttcgaatctttcccatacagagttaacccagaaaccggtattatcgactacgatactttagaaaagaacgccatcctatatagaccaaaggttcttgttgctggtacttcagcatactgtcgtttaattgactacaagagaatgagagaaatcgccgacaaatgtggtgcttacttgatggtagacatggcccacatttctggtttgatcgccgcaggtgtcatcccatctcctttcgaatacgctgatatcgttaccaccaccactcacaagtctttgagaggtccacgtggtgctatgattttcttcagaagaggtgtgagatctatcaaccctaagaccggtaaggaagttctatacgacttggaaaacccaattaacttctctgttttcccaggtcaccaaggtggtccacacaaccataccattgctgctttggccactgctttgaagcaagctgccactccagaattcaaggaataccaaactcaagtcttgaagaatgctaaggctttggaaagtgaatttaagaacttgggctacagattagtttccaacggtaccgattctcacatggttctagtatccttgagagaaaagggtgttgatggtgctcgtgttgaatacatttgtgaaaagattaacattgctttgaacaaaaactctattccaggtgacaaatctgctttggttccaggtggtgtccgtattggggctccagccatgaccactagaggaatgggtgaagaagatttccacagaattgttcaatacattaacaaggctgtagaattcgctcaacaagttcaacaaagcttgccaaaggatgcttgtagattaaaggacttcaaagccaaggtcgacgaaggctctgatgttttgaacacctggaaaaaggaaatttacgactgggctggcgaatacccattggctgtgtaa

SEQ ID NO: 3881 - protein, 469 aa, Saccharomyces cerevisiae
MPYTLSDAHHKLITSHLVDTDPEVDSIIKDEIERQKHSIDLIASENFTSTSVFDALGTPLSNKYSEGYPGARYYGGNEHIDRMEILCQQRALKAFHVTPDKWGVNVQTLSGSPANLQVYQAIMKPHERLMGLYLPDGGHLSHGYATENRKISAVSTYFESFPYRVNPETGIIDYDTLEKNAILYRPKVLVAGTSAYCRLIDYKRMREIADKCGAYLMVDMAHISGLIAAGVIPSPFEYADIVTTTTHKSLRGPRGAMIFFRRGVRSINPKTGKEVLYDLENPINFSVFPGHQGGPHNHTIAALATALKQAATPEFKEYQTQVLKNAKALESEFKNLGYRLVSNGTDSHMVLVSLREKGVDGARVEYICEKINIALNKNSIPGDKSALVPGGVRIGAPAMTTRGMGEEDFHRIVQYINKAVEFAQQVQQSLPKDACRLKDFKAKVDEGSDVLNTWKKEIYDWAGEYPLAV

SEQ ID NO: 3882 - DNA, 1800 bp, Arabidopsis thaliana
  CDS (1)..(1800)
atggaccgtatagctcaatcagatctctctttaggattcggtagctcccacgctttacctctacctcatcctcctagaatcccaatcgctgatgactcaatcacgcttcagattgattccagcttccgtccttcgtctaatcctatgcctcctgttcctcttcagttacttgagcagagattcgatgtcaccggatcctgtagccgagttgttgaggaggacgatgaggttgttggtgataatgatgatgatgatcaaagagaagaggagcaatttattctcttgggtcatcctatgaagttgaaacgaggtagaggtgggaattcgtattcattggcatcatcaagtccttgtaagagatttgtagttgattcagggattgaaagtaggcgagctgttgttagagcttggggtaatcagtcgattgaagaagctgatcctgagattcatgagtttatggaaaaggagaagcagagacaatttagaggtattgagcttatagcttctgagaatttcgtgtgtagagctgtgatggaagctttaggaagtcatttgactaataagtactctgaaggaatgcctggagctagatactatacggggaatcagtatattgatcagattgagattctttgccaagagcgtgcgcttgcagcttttggactaaatcatgagaaatggggagttaatgtgcagccttattcgtgcacttctgccaatttcgctgttttcactggtcttttgatgcccggtgaacgaattatgggattggattctccctcaggtggtcatatgagtcatgggtattatacaccaggtgggaagaaagtctctggtgcgtctatattctttgagagctttccatataaggttgaccctcgtacagggtatattgattacgataagcttgaggaaaaggcgcttgactatcgtcctaagatacttatttgtggtgggagttcatatccgagggactgggaattccctaggtttaggcatattgcagacaaatgtggagctgttttgatgtttgacatggcacagattagtggtcttgtcgctgccaaggaaagtccaaatccattcgattattgcgatattgttacctcaacaacacacaagtctctccgtggccctaggggcggcatcatattttacaagagaggcttgaagcccaagaagcaaagcataaatcttaatcactgtgagagcaatatccagtatgattttgaagaaaaaatcaacttttctgtctttccatcgttgcaaggggggcctcacaataaccatatagctgctctagccattgccctcaagcaggccgcttcaccagagtacaagctttacatgcgacaggtcaaaaaaaatgctaaggctttagcatctgctttgataagcagaaagtgcaagctgataacaggtggcaccgataatcatttgcttctctgggatctgactcctttgggcttgacaggcaaggtgtatgagaaagtttgcgagatgtgccatatcacggtcaacaaagtggccattttcagcgaaaacggtgttatttcccctggaggagtgagaataggcagtccggctatgacctcaagaggttgtttagaaccagaatttgagacaatggctgattttctatatagagctgctcagatagctagtgctgcacaaagggaacacgggaagttgcaaaaggaaccgctcaaaagcatctatcactgtaaagagattgcagatcttcggaaccaagtcgaagcttttgctactcagtttgcaatgcctgcctttgacatgtga

SEQ ID NO: 3883 - protein, 599 aa, Arabidopsis thaliana
MDRIAQSDLSLGFGSSHALPLPHPPRIPIADDSITLQIDSSFRPSSNPMPPVPLQLLEQRFDVTGSCSRVVEEDDEVVGDNDDDDQREEEQFILLGHPMKLKRGRGGNSYSLASSSPCKRFVVDSGIESRRAVVRAWGNQSIEEADPEIHEFMEKEKQRQFRGIELIASENFVCRAVMEALGSHLTNKYSEGMPGARYYTGNQYIDQIEILCQERALAAFGLNHEKWGVNVQPYSCTSANFAVFTGLLMPGERIMGLDSPSGGHMSHGYYTPGGKKVSGASIFFESFPYKVDPRTGYIDYDKLEEKALDYRPKILICGGSSYPRDWEFPRFRHIADKCGAVLMFDMAQISGLVAAKESPNPFDYCDIVTSTTHKSLRGPRGGIIFYKRGLKPKKQSINLNHCESNIQYDFEEKINFSVFPSLQGGPHNNHIAALAIALKQAASPEYKLYMRQVKKNAKALASALISRKCKLITGGTDNHLLLWDLTPLGLTGKVYEKVCEMCHITVNKVAIFSENGVISPGGVRIGSPAMTSRGCLEPEFETMADFLYRAAQIASAAQREHGKLQKEPLKSIYHCKEIADLRNQVEAFATQFAMPAFDM

SEQ ID NO: 3884 - DNA, 1413 bp, Arabidopsis thaliana
  CDS (1)..(1413)
atggaaccagtctattcttggggaaacacgcatcttgacttcgtcgatccggagatctacgacctaatcgagaaggagaaacatcgtcaatgtcgaggaatcgaactcatagcagccgagaatttcacttccgtggccgtcatggaagctctcggaagttgcttaaccaacaaatactcggaaggtatgcctggtaatcgttactacggaggtaccgagttcatcgatgagatagagagtctctgccgctcacgctctctcgaagccttccattgcaatccagagaaatggggcgttaacgttcagccttactctggttcccctgcgaatttcgcagcctacaccgccttgctccagcctcatgatcgtatcatggggcttgatttgccatcaggtggtcatataacgcatggttactatagctctggtgggaagaacatctccgcgacctcgatctactttgaaaaccttccctacaaggtggattccaagactggttacattgattacgacaaacttgaggagaaagctatggattttaggcctaagttaattatctgtggaggcacttcttaccctagggaatgggattacgcgagattcagggctgtcgccgacaaggttggagcttttttgctctgtgatatggctcataacagtgccctcgttgctgctcaggaagccgcagacccgttcgagtactgtgacgttgtgacaacgtcaactcacaagagcttgagaggtccaagggctggtatgatcttttatagaaagggaccaaaaccagccaagaagggccaacccgagggtgaagtctacgatttcgacgcaaaaatcaactctgcggtattccctgcgcttcaaagtggtcctcacaataacaagattggtgctctagctgttgcgttgaagcaggttatggctcctagcttcaaagtttatgcaaaacaggtgaaagctaatgctgcttgccttgcaagctacctaataaataagggatatactcttgtaaccgatggaactgataaccaccttattctttgggatcttcgccctcttggattgaccggtaacaaggttgagaaggtttgtgaattgtgctacattactttgaacaggaatgcggtattcggagacactagttttcttgctcccggaggtgtaagaatcggtacaccggcgatgacatcgagaggattggtggagaaggactttgagaagataggagagttcctgcaccgtgccgtgacaatcacgttggacatccaggagcagtacggtaaggtgatgaaggacttcaacaagggtttggtgaacaacaaggagatcgatgagataaaggctgacgttgaggagttcacgtacgattttgatatgcctggatttttcatctctgagtcaaggaacgattag

SEQ ID NO: 3885 - protein, 470 aa, Arabidopsis thaliana
MEPVYSWGNTHLDFVDPEIYDLIEKEKHRQCRGIELIAAENFTSVAVMEALGSCLTNKYSEGMPGNRYYGGTEFIDEIESLCRSRSLEAFHCNPEKWGVNVQPYSGSPANFAAYTALLQPHDRIMGLDLPSGGHITHGYYSSGGKNISATSIYFENLPYKVDSKTGYIDYDKLEEKAMDFRPKLIICGGTSYPREWDYARFRAVADKVGAFLLCDMAHNSALVAAQEAADPFEYCDVVTTSTHKSLRGPRAGMIFYRKGPKPAKKGQPEGEVYDFDAKINSAVFPALQSGPHNNKIGALAVALKQVMAPSFKVYAKQVKANAACLASYLINKGYTLVTDGTDNHLILWDLRPLGLTGNKVEKVCELCYITLNRNAVFGDTSFLAPGGVRIGTPAMTSRGLVEKDFEKIGEFLHRAVTITLDIQEQYGKVMKDFNKGLVNNKEIDEIKADVEEFTYDFDMPGFFISESRND

SEQ ID NO: 3886 - DNA, 1416 bp, Arabidopsis thaliana
  CDS (1)..(1416)
atggaaccagtctcttcatggggtaacacctctctcgtctccgtagatccagagatccacgacctaatcgagaaggagaaacgtcggcaatgtcgaggaatcgaacttatcgcttccgagaatttcacttccttcgccgtcatcgaagctctcggaagtgccttaaccaacaaatactccgaaggtattcctggtaatcgttattacggaggtaacgaattcatcgatgagatcgagaatctttgccgttcaagagctctcgaagctttccattgtgatccagcagcgtggggcgttaatgttcagccgtattctggatctccggcaaatttcgctgcttacacggctttgcttcagcctcacgatcgtatcatggggcttgatttgccttcaggtggtcatttgactcatggttactatacatctggtggtaagaagatctctgcgacttcgatctactttgagagtcttccgtataaggtgaatttcaccactggttacattgattacgataagcttgaagagaaggcgttggatttcaggcctaagttgcttatctgtggtggtagtgcgtatcctagggattgggattacgctagatttagagctattgctgataaggttggagctcttttgctttgtgacatggctcacatcagtggtctcgttgctgctcaggaagctgcaaacccatttgagtactgtgacgttgtgacaaccacaacccacaagagtttgaggggtccaagggctggtatgattttctacaggaagggtccaaaaccaccaaagaagggtcaacccgagggtgcagtctatgattttgaggacaaaatcaactttgctgtattccctgcgcttcaaggtggtcctcacaatcaccagattggtgctctagctgttgcgttgaagcaggctaatactcctgggttcaaggtctacgcaaaacaagtgaaagccaatgctgttgcccttggaaactacctaatgagcaagggttaccagattgtgaccaatggaactgagaaccaccttgttctctgggatcttcgccctcttggattgaccggaaacaaggttgagaagctctgcgatctgtgcagcattacattgaacaagaacgcagtatttggagacagtagtgctcttgctcctggaggtgtaagaatcggtgcacccgcgatgacatcgagaggattggtggagaaggactttgagcagataggagaattcctgagccgtgcagtgacactgacgttggacatccaaaagacatacggtaagttgttgaaggacttcaacaagggtttggtgaacaacaaagatctcgatcagctcaaggctgatgtcgagaagttctcggcgtcttatgagatgcctggattcctcatgtctgagatgaagtacaaggattag

SEQ ID NO: 3887 - protein, 471 aa, Arabidopsis thaliana
MEPVSSWGNTSLVSVDPEIHDLIEKEKRRQCRGIELIASENFTSFAVIEALGSALTNKYSEGIPGNRYYGGNEFIDEIENLCRSRALEAFHCDPAAWGVNVQPYSGSPANFAAYTALLQPHDRIMGLDLPSGGHLTHGYYTSGGKKISATSIYFESLPYKVNFTTGYIDYDKLEEKALDFRPKLLICGGSAYPRDWDYARFRAIADKVGALLLCDMAHISGLVAAQEAANPFEYCDVVTTTTHKSLRGPRAGMIFYRKGPKPPKKGQPEGAVYDFEDKINFAVFPALQGGPHNHQIGALAVALKQANTPGFKVYAKQVKANAVALGNYLMSKGYQIVTNGTENHLVLWDLRPLGLTGNKVEKLCDLCSITLNKNAVFGDSSALAPGGVRIGAPAMTSRGLVEKDFEQIGEFLSRAVTLTLDIQKTYGKLLKDFNKGLVNNKDLDQLKADVEKFSASYEMPGFLMSEMKYKD

SEQ ID NO: 3888 - DNA, 1554 bp, Arabidopsis thaliana
  CDS (1)..(1554)
atggcgatggccatggctcttcgaaggctttcttcttcaattgacaaacccattcgtcctcttattcgatccacttcatgttacatgtcttctttgcccagtgaagctgttgatgagaaggaaagatctcgtgtcacttggccaaaacagcttaacgcacctttagaggaggttgatcctgagattgctgacattattgagcatgagaaagctagacaatggaagggacttgaacttattccatctgagaacttcacatctgtgtcggtgatgcaagctgttgggtctgtcatgactaacaaatacagtgaaggctatcctggtgccagatactatggaggaaatgagtatatagacatggcagaaaccttatgccagaagcgcgctcttgaagctttccggttagatcctgaaaagtggggagtgaatgttcaacctttgtctggatctcctgccaacttccatgtgtacactgcattgttaaagcctcatgaaagaatcatggcacttgatcttcctcatggtggtcatctttctcatggttatcagactgacaccaagaagatatcagctgtgtctatcttctttgaaacaatgccctatagattggacgagagcactggctacatcgactacgatcagatggagaaaagtgctactcttttcaggccaaaattgattgttgctggtgcaagtgcttatgctagattgtatgactatgcccgcatcagaaaggtctgtaacaagcaaaaagctgtaatgctagcagatatggcacacatcagtggtttggttgctgctaatgtaatcccttcaccgttcgactatgctgatgttgtaaccaccacaactcacaagtcacttcgtggaccccgtggagccatgattttcttcagaaagggtgttaaggaaattaacaagcaagggaaagaggttttgtatgattttgaagacaagatcaaccaagctgtcttccctggtcttcaaggtggtccacacaaccacactatcacaggactagctgttgctttgaaacaggcaactacttcagagtacaaagcataccaagaacaagtcctgagtaacagtgcaaagtttgctcagactctaatggagagaggatatgaacttgtttctggtggaactgacaaccatctggttctagtgaatctaaagcccaagggaattgatggatctagagttgagaaagtgttggaagctgttcacattgcatccaacaaaaacactgttcctggagatgtttctgccatggttcctggtggaatcagaatgggtactcctgctctcacttccagaggctttgttgaggaagactttgccaaagtagctgaatacttcgacaaagctgtgacaatagctctcaaagtcaaatctgaagctcaaggaaccaagttgaaggatttcgtgtcagcaatggaatcctcttcaaccatccaatccgagattgcgaaactgcgccatgaagtcgaggaattcgctaagcagttcccaacaattgggtttgagaaagaaaccatgaagtacaagaactaa

SEQ ID NO: 3889 - protein, 517 aa, Arabidopsis thaliana
MAMAMALRRLSSSIDKPIRPLIRSTSCYMSSLPSEAVDEKERSRVTWPKQLNAPLEEVDPEIADIIEHEKARQWKGLELIPSENFTSVSVMQAVGSVMTNKYSEGYPGARYYGGNEYIDMAETLCQKRALEAFRLDPEKWGVNVQPLSGSPANFHVYTALLKPHERIMALDLPHGGHLSHGYQTDTKKISAVSIFFETMPYRLDESTGYIDYDQMEKSATLFRPKLIVAGASAYARLYDYARIRKVCNKQKAVMLADMAHISGLVAANVIPSPFDYADVVTTTTHKSLRGPRGAMIFFRKGVKEINKQGKEVLYDFEDKINQAVFPGLQGGPHNHTITGLAVALKQATTSEYKAYQEQVLSNSAKFAQTLMERGYELVSGGTDNHLVLVNLKPKGIDGSRVEKVLEAVHIASNKNTVPGDVSAMVPGGIRMGTPALTSRGFVEEDFAKVAEYFDKAVTIALKVKSEAQGTKLKDFVSAMESSSTIQSEIAKLRHEVEEFAKQFPTIGFEKETMKYKN

SEQ ID NO: 3890 - DNA, 1287 bp, Aquifex aeolicus VF5
  CDS (1)..(1287): transl_table=11
atggaacaccttctgaaaacggaccccgaggtttttgacgctgttgtaaaggagtacgaaaggcagttttataacctggaaatgatagcctcagagaacttcacttccctcgcggtaatggaagcgacgggaagcgtcctcacgaacaagtacgcggaaggacttccgggaaagaggtattacggaggctgtgagtacgtagatgtagttgaaaatctcgccatagaaagagcaaaaaaactcttcggagcggagcacgcaaacgttcagccccactcgggttctcaggcgaacatggcggtgtactttgccgttctaaaccccggtgacaccataatgggaatggatttggcccacggaggacatctaacccacggagccaaggtaaacttcagcgggaaactctacaacgtaatccactacggtgtaaatccggaaacggagctcatagattacgaccagttgtacaaactggcaaaggagcacaaaccgaagttaatagtgggaggagcctcggcctatccacgcgtgtttgactgggcaaagatgagggaaatagcggacgaagtgggtgccctctttatggtcgacatggcacactacgctggtctcatagcgggaggcgtttaccccaatcccgtcccttacgcccagtttgtgacctcaacgacccataaaactctcaggggaccaaggagcggttttatcctaactacaaaggaatacgcaaaagccgtagacaagagcgtctttcccggaattcaaggtggtccattaatgcacgttatagcggcaaaggctgtagcttttaaagaggctatgagcgaagagttcaaggagtacgcaaaacaggttgtagaaaacgcaagggttctcgccgaagaactgaaaaagtacgggtttaagatagtcacgggaggaacggactctcacatagtcctcgttgacctcaggaataaaaacattatcggaaaagacgcggaaaaggctctggaaaaggctggaataacggtaaacaaaaacgcggtgccttttgaccctctaccgcctacaaagactagcgggataaggataggaacggctgcactcacaacgagggggatgaaggaagacgaaatgagaaagatagcaggctggataaatgaagtactttcaaacatggacgacgagaagaccatacagagagtaaggcaggaagtaagagagctgtgtgaaacttttcctttatatccggaactcaagaggagaatagatgagcttcgtagtggcaaggcaaccgatctttga

SEQ ID NO: 3891 - protein, 428 aa, Aquifex aeolicus VF5
MEHLLKTDPEVFDAVVKEYERQFYNLEMIASENFTSLAVMEATGSVLTNKYAEGLPGKRYYGGCEYVDVVENLAIERAKKLFGAEHANVQPHSGSQANMAVYFAVLNPGDTIMGMDLAHGGHLTHGAKVNFSGKLYNVIHYGVNPETELIDYDQLYKLAKEHKPKLIVGGASAYPRVFDWAKMREIADEVGALFMVDMAHYAGLIAGGVYPNPVPYAQFVTSTTHKTLRGPRSGFILTTKEYAKAVDKSVFPGIQGGPLMHVIAAKAVAFKEAMSEEFKEYAKQVVENARVLAEELKKYGFKIVTGGTDSHIVLVDLRNKNIIGKDAEKALEKAGITVNKNAVPFDPLPPTKTSGIRIGTAALTTRGMKEDEMRKIAGWINEVLSNMDDEKTIQRVRQEVRELCETFPLYPELKRRIDELRSGKATDL

SEQ ID NO: 3892 - DNA, 1284 bp, Thermotoga maritima MSB8
  CDS (1)..(1284): transl_table=11
gtgtggaagcatgtaaaacaggttgatcccgaaatatacgaagttcttgtgaacgagttgaagcgtcaggagtacggcctggagctgatcgcctctgagaacttcgcgtcactcgctgtcatagaaaccatgggaagcatgctcaccaacaagtatgcggaaggatacccgaagaagagatactacggtggctgcgagtgggtggatcgagcagaagaacgtgctatagagagagcgaagaggttgtttggagccaaatttgcgaacgttcagccgcactccggttctcaggcgaacatggcggtttatctggcactcgcccagcccggagacacgatcatgggaatgtccctgtcacacgggggacatctcacccatggagcaccggtgaatttctcagggaagatcttcaaggtggtaccttacggagtcaatctggaaacggaaacgatagattacgatgaggtcagaagactcgctctggaacacaagccgaagataatcgttgcgggtggaagtgcttacgccaggatcatcgatttcaaaagattcagagagatagccgatgaggtgggagcatatttgatggtggatatggctcactttgccggactcgtcgctgctggaattcatccaaatcccttggaatacgcccacgtggtgacttccaccacacacaagactctcaggggccccagaggtggtttgatactcacgaacgatccggagatcgccaaagccgtggataaaactatcttccccggtatccagggtggtcctctcatgcacgtcatagcggcgaaagctgtctgtttcaaagaagccatgacggaggagttcaaagagtaccagaagcaggtggtcaaaaatgctaaaaagatggctgaagagttccagaaacgaggttacaggatcgtttctggaggaactgatacacacctgttcctggtggatctcacaccaaaagacataacgggtaaagcggcggaaaaggccctggaaagctgtggtatcacagtgaacaaaaacaccattcccaacgaaaagagatctccgttcgtggcgagcggtatcagaataggaacacccgctgttacaacccgcggaatgaaggaagaagagatggaagagatcgccgagatgatagatctggttctttcgaacgtgatcgatgaaaacggaacggtgaaaccagaggtgagggaagaggtttcaaagaaggtaagggagctctgcgaaaggtttcctctgtaccgtgacaagatcgaaggggtggaaatatga

SEQ ID NO: 3893 - protein, 427 aa, Thermotoga maritima MSB8
MWKHVKQVDPEIYEVLVNELKRQEYGLELIASENFASLAVIETMGSMLTNKYAEGYPKKRYYGGCEWVDRAEERAIERAKRLFGAKFANVQPHSGSQANMAVYLALAQPGDTIMGMSLSHGGHLTHGAPVNFSGKIFKVVPYGVNLETETIDYDEVRRLALEHKPKIIVAGGSAYARIIDFKRFREIADEVGAYLMVDMAHFAGLVAAGIHPNPLEYAHVVTSTTHKTLRGPRGGLILTNDPEIAKAVDKTIFPGIQGGPLMHVIAAKAVCFKEAMTEEFKEYQKQVVKNAKKMAEEFQKRGYRIVSGGTDTHLFLVDLTPKDITGKAAEKALESCGITVNKNTIPNEKRSPFVASGIRIGTPAVTTRGMKEEEMEEIAEMIDLVLSNVIDENGTVKPEVREEVSKKVRELCERFPLYRDKIEGVEI

SEQ ID NO: 3894 - DNA, 1236 bp, Clostridium acetobutylicum ATCC 824
  CDS (1)..(1236): transl_table=11
atggattttgaaaatataaaagtaagtgattctgaagtctattctatcatagaagaagaaaatgcgagacaagaaaataatatagaacttattgcatctgaaaacttcacaagcaaagctgtaatggaagctatgggttcatatttaactaataagtatgcagaaggatatccaggaaaaagatattatggtggatgttacgtagttgataaagttgaagagcttgcacgtgaaagggcaaaaaaactttttaaagcagagcatgctaatgtacagccacattcaggttcacaagctaatatggctgtttactttgcagtattgaagccgggagacactataatgggaatgaacctaacagatggaggtcatttaactcatggaagtccagttaatttttcaggaaaactctttaatataattgcctatggtgtaagtgatgaaacagaacaaatagattatgaagcgtttagaaaaaaagccttggagtgtaagccaaagatgatagtatctggtgctagtgcatattcaagaattattgattttaagaaaataagagaaatatgcgatgaagtaggagcatatatgatggtagatatggctcatatagcaggacttgtagcagcaggacttcatccgtcaccaattccatatgctgattttgtaacaacaactactcataagactttaaggggaccaagaggcggagcaattttctgcaaggaaaagtatgcaaaggacattgataaatctgtattccctggaatgcaggggggacctttaatgcacataattgcaggaaaagcagtatgctttggagaagctttaaaggatgattttaaagattatgcacagcaaatagtaaataatgcaaaagtgtttgcagatgaacttacaaaatacggttttagaatagtttcaggtggaactgataatcaccttttattagttgatttaacgaacaaaaatataacaggaaaagatgcagaacatcttcttgattcagttggaataactgcaaacaaaaatactataccatttgagaaaaagagtccttttataacaagtggaataagaatgggtacaccttcagttacaactagaggatttaaggaagaggaaatgaaaaaagtagcgtatttcataaactatgttatagagcatagagatgaagatttaagtgaaataaggaaacaagtttcagaattatgtagtggatttcctatatataagtaa

SEQ ID NO: 3895 - protein, 411 aa, Clostridium acetobutylicum ATCC 824
MDFENIKVSDSEVYSIIEEENARQENNIELIASENFTSKAVMEAMGSYLTNKYAEGYPGKRYYGGCYVVDKVEELARERAKKLFKAEHANVQPHSGSQANMAVYFAVLKPGDTIMGMNLTDGGHLTHGSPVNFSGKLFNIIAYGVSDETEQIDYEAFRKKALECKPKMIVSGASAYSRIIDFKKIREICDEVGAYMMVDMAHIAGLVAAGLHPSPIPYADFVTTTTHKTLRGPRGGAIFCKEKYAKDIDKSVFPGMQGGPLMHIIAGKAVCFGEALKDDFKDYAQQIVNNAKVFADELTKYGFRIVSGGTDNHLLLVDLTNKNITGKDAEHLLDSVGITANKNTIPFEKKSPFITSGIRMGTPSVTTRGFKEEEMKKVAYFINYVIEHRDEDLSEIRKQVSELCSGFPIYK

SEQ ID NO: 3896 - DNA, 1290 bp, Agrobacterium tumefaciens str. C58
  CDS (1)..(1290): transl_table=11
atgtcgaacacagatgctttcttctcccgtccgcttgccgaagtcgatccggatattttcggcgcgatcgagaaggaactgggtcgccagcgccacgagatcgaactgatcgcctcggaaaacatcgtttcccgcgctgtgcttgaagcgcagggttcgatcatgaccaacaaatatgcggaaggttatccgggcaagcgttattacggcggctgccagttcgtcgatatcgctgaagagcttgccatcgagcgcgccaagaagctgttcggcgtcaacttcgccaacgttcagccgaactccggttcgcagatgaatcaggccgtgttcctcgcgcttttgcagccgggcgataccttcatgggtctcgatctgaactcggggggccacctgacgcatggttcgccggtcaacatgtccggtaaatggttcaacgtcgtgtcctacggcgtgcgtgaaggcgacaacctgctcgacatggacgaagtggagcgcaaggccaaggaaacccggccgaagctgatccttgccggcggcaccgcctattcgcgcgtctgggactggaagcgcttccgcgagatcgccgatgaagtcggcgcctatctgatggtcgacatggcccacatcgccggtctcgttgccggtggccagcacccgtcgccgttcccgcattgccatgttgccaccaccacgacgcacaagtctctgcgcggcccgcgtggcggcatgatcctcaccaatgacgaggatctggccaagaagttcaactcggccgtattccccggcctgcagggtggcccgctgatgcatgtcatcgccgccaaggccgttgccttcggcgaagcgctgcagccggaattcaaggactatgccgcgcaggtcgtgaagaacgccaaggcgctggccgaaaccctgatcgaaggcggtctcgatgtcgtctccggcggcaccgacaaccacctgatgctggtcgatcttcgcaagaagaacgccaccggcaagcgcgcggaagcagcccttggccgcgcttacatcacctgcaacaagaacggcattcctttcgacccggaaaaacccttcgtcacgtcgggtgtccgtctcggcacgccggccggcacgacgcgcggtttcaaggaagcggaattccgcgaaatcggcaagctgatcgtcgaggttctcgacggcctgaaggttgccaattcggatgaaggtaatgcctccgtcgaggctgccgtgcgcgaaaaggtcgtcggtttgaccgaccgtttcccgatgtatccgtacatgtaa

SEQ ID NO: 3897 - protein, 429 aa, Agrobacterium tumefaciens str. C58
MSNTDAFFSRPLAEVDPDIFGAIEKELGRQRHEIELIASENIVSRAVLEAQGSIMTNKYAEGYPGKRYYGGCQFVDIAEELAIERAKKLFGVNFANVQPNSGSQMNQAVFLALLQPGDTFMGLDLNSGGHLTHGSPVNMSGKWFNVVSYGVREGDNLLDMDEVERKAKETRPKLILAGGTAYSRVWDWKRFREIADEVGAYLMVDMAHIAGLVAGGQHPSPFPHCHVATTTTHKSLRGPRGGMILTNDEDLAKKFNSAVFPGLQGGPLMHVIAAKAVAFGEALQPEFKDYAAQVVKNAKALAETLIEGGLDVVSGGTDNHLMLVDLRKKNATGKRAEAALGRAYITCNKNGIPFDPEKPFVTSGVRLGTPAGTTRGFKEAEFREIGKLIVEVLDGLKVANSDEGNASVEAAVREKVVGLTDRFPMYPYM

SEQ ID NO: 3898 - DNA, 1284 bp, Synechocystis sp. PCC 6803
  CDS (1)..(1284): transl_table=11
gtgaatcaaaccaacctcgactttttagccaccagcgaccccgcccttgcggccatcattgaccgggaattacaacggcaacgcacccacattgaattgattgccagcgaaaatttcacttcagcagcagtaatggcggcccagggttccgtcttaaccaataagtatgccgaaggtctgccgggtaaacgctattacggcggctgtgaatttgtggaccaagcggaaacgctagccatcagtcgagtcaaagagttatttggggctgcccacgccaacgtccaaccccactccggggcccaggccaattttgccgtatttttaaccctgctccagcccggcgacaccattatgggcatggacctttcccacggcggccatttaacccacggttcccctgtcaacgtttctggtaaatggttcgaagtggcccactacggtgtggaaaaggaaacgggtcggttagattacgacaaaatccgccaacaggctctggaagttaaacccaaactgttgatttgtggctactctgcctatccccgacaaatcgagtttgataaattccgggcgatcgccgacgaagtgggagcatacctaatggcagacattgcccacattgccggtttagtggcttcaggacaccatcccagtcccttgccctattgcgatgtcgtcaccaccaccacccataaaaccctgcggggtccccggggtggtttgatcatgaccaataatgaggaattaggcaaaaaattcgacaaatccgtctttcctggcacccagggcggccctttggagcacgtcattaccgctaaagcagtggcctttggggaagcgctgaaaccagaatttaaggtttattctggccaggtaatcgccaacgcccaagccatggccgaccagttacaaaaacggggctttgacctggtatccggcggcaccgataaccatttaatgttggtagacctgcgctcaatcgccatgaccggcaaagtgggcgatcaactgttgggagaaatcaacatcaccgccaacaaaaacacggtgccctttgaccccgaatctccctttgtcaccagtggtttgcgcctgggctcccctgccatgaccaccaggggtatgcaggaagacgaattccgcaccattgccaacatcattgccgatcgcctgttgtccccggaagatgaaggcgtaaaagcggattgtctgcgccgggtcagtgaactttgtgctggtttccccctctatgatcatctccgcattcccgtagcggtgatcgcctga

SEQ ID NO: 3899 - protein, 427 aa, Synechocystis sp. PCC 6803
MNQTNLDFLATSDPALAAIIDRELQRQRTHIELIASENFTSAAVMAAQGSVLTNKYAEGLPGKRYYGGCEFVDQAETLAISRVKELFGAAHANVQPHSGAQANFAVFLTLLQPGDTIMGMDLSHGGHLTHGSPVNVSGKWFEVAHYGVEKETGRLDYDKIRQQALEVKPKLLICGYSAYPRQIEFDKFRAIADEVGAYLMADIAHIAGLVASGHHPSPLPYCDVVTTTTHKTLRGPRGGLIMTNNEELGKKFDKSVFPGTQGGPLEHVITAKAVAFGEALKPEFKVYSGQVIANAQAMADQLQKRGFDLVSGGTDNHLMLVDLRSIAMTGKVGDQLLGEINITANKNTVPFDPESPFVTSGLRLGSPAMTTRGMQEDEFRTIANIIADRLLSPEDEGVKADCLRRVSELCAGFPLYDHLRIPVAVIA

SEQ ID NO: 3900 - DNA, 1284 bp, Nostoc sp. PCC 7120
  CDS (1)..(1284): transl_table=11
gtgactagaacaaattcagattttctcactaattctgatccagcgatcgccggattgattaatcaagaactccaacgtcaacgcgaccacttggagttaatcgccagtgaaaacttcacctctgcggctgtcttggcggctcagggttcagtattgacaaataaatacgctgagggactgcctgggaagcgctactacggtggttgtgagtttatcgataaaattgagcaaatagctattgatcgtgctaaacagctatttggtgcagatcatgccaacgtccaaccccattctggcgcacaagccaattttgccgtcttcctgactttactcaaaccaggagacaaaatcatggggatggatttgtctcatggtggacacctcacccacggttccccggtgaatgtttccgggaagtggttccaagtttgtcactacggtgtgagccaacaaacagaacaattagactacgaccaaattcgtgagctggcgctgagggagcgtcctaagcttttgatttgcggttattctgcttatccccggattattgactttgaaaaattccgcagcatcgccgatgaagttggtgcttacttgctggctgatattgcccacattgcaggtttagtcgcaactggactgcatcctaacccactaccttattgtgatgtagtcacaaccaccacccataaaaccctccgtggccccagaggtggtttaattttgacccgtgacgcagaactcggtaaaaaattggataaatccgttttccctggaactcaaggcggccctttagaacacgtcattgctgggaaagcagttgcttttggtgaagccttaaaaccagaatttcaaggctattcagcccaagtaattgataatgcccgtacattagccaatcaactccagactcgcggattgaagctggtatctgatggtacggataaccatttaatgctcgtagatttacggtctgtgaacatgacgggtaaacgagcagaccagctagtgagtgaagtaaatatcaccgctaataaaaatacggttcccttcgatccccaatcaccatttgttaccagtggtttgcgcttgggttcaccagccatgaccacacggggaatgggagaggcggaatttaccgaaattggtaacattatcgccgatcgcctactcaacccagattcagacacagtcgctcaagattgtaaacgtcgggtagccgcattgtgcgatcgcttccccttatatccgcacttagaaattcctgtaccagtcttagcgtag

SEQ ID NO: 3901 - protein, 427 aa, Nostoc sp. PCC 7120
MTRTNSDFLTNSDPAIAGLINQELQRQRDHLELIASENFTSAAVLAAQGSVLTNKYAEGLPGKRYYGGCEFIDKIEQIAIDRAKQLFGADHANVQPHSGAQANFAVFLTLLKPGDKIMGMDLSHGGHLTHGSPVNVSGKWFQVCHYGVSQQTEQLDYDQIRELALRERPKLLICGYSAYPRIIDFEKFRSIADEVGAYLLADIAHIAGLVATGLHPNPLPYCDVVTTTTHKTLRGPRGGLILTRDAELGKKLDKSVFPGTQGGPLEHVIAGKAVAFGEALKPEFQGYSAQVIDNARTLANQLQTRGLKLVSDGTDNHLMLVDLRSVNMTGKRADQLVSEVNITANKNTVPFDPQSPFVTSGLRLGSPAMTTRGMGEAEFTEIGNIIADRLLNPDSDTVAQDCKRRVAALCDRFPLYPHLEIPVPVLA

SEQ ID NO: 3902 - DNA, 1248 bp, Ralstonia solanacearum GMI1000
  CDS (1)..(1248): transl_table=11
atgttcgaacgcaaccgctatacgatcgaccagatcgacccagaagtcttcgccgccatccagcaggaaaaccagcgccaggaagaccacatcgagctgatcgcctccgagaactacacctcgccggccgtgatggccgcccagggctcgcagctgaccaacaagtatgccgagggctatcccggcaagcgctactacggtggctgcgaatacgtggacgtggtcgagcagctcgccatcgaccgcgtgaagcaactgttcggcgccgaggccgccaacgtgcagccgaactccggctcgcaggccaaccagggcgtgttcttcgccatgctcaagccgggcgacaccatcatgggcatgagcctggccgaaggcggccacctgacgcacggcatggcgctcaacatgagcggcaagtggttcaacgtcgtcagctacggcctgaacgcgcaggaagacatcgactacgatgccctcgaagcgctggcacaagagaagaagcccaagctgatcatcgccggcgcctccgcgtttgcgctgcgcatcgacttcgagcgcatcgccaaggtggccaaggccgtcggcgcgtacttcatggttgacatggcccactacgccggcctgatcgccgcgggcgtctacccgaacccggtgccgcacgccgatttcgtgaccaccaccacccacaagagcctgcgcggcccgcgcggcggcgtgatcctgatgaaggccgagcacgagaaggccatcaactcggcgatcttccccggcatccagggcggcccgctgatgcacgtgatcgccggcaaggcggtggcgttcaaggaagcccagtcgcccacgttcaaggcctaccaggaacaggtggtgaaaaacgcccgcgccatggccgaaacgctgatggcccgcggcctgcgcatcgtctccggccgcaccgaaagccacgtgatgctggtcgacctgcgcgcgaagagcattaccggcaaggaagccgagaaggtgctgggcgacgcgcatatcaccgtcaacaaaaacgccatcccgaacgatccggagaagcccttcgtgacctcgggcatccgcctgggctcgccggccatgaccacgcgaggcttcaaggagggtgaggccgtgaaggtagcccacctgatcgccgatgtgcttgataatccgcatgacgaagccaacatcgcggccgtgcgcgccaaggtggccgagctgaccaagcagttcccggtctacgcatga

SEQ ID NO: 3903 - protein, 415 aa, Ralstonia solanacearum GMI1000
MFERNRYTIDQIDPEVFAAIQQENQRQEDHIELIASENYTSPAVMAAQGSQLTNKYAEGYPGKRYYGGCEYVDVVEQLAIDRVKQLFGAEAANVQPNSGSQANQGVFFAMLKPGDTIMGMSLAEGGHLTHGMALNMSGKWFNVVSYGLNAQEDIDYDALEALAQEKKPKLIIAGASAFALRIDFERIAKVAKAVGAYFMVDMAHYAGLIAAGVYPNPVPHADFVTTTTHKSLRGPRGGVILMKAEHEKAINSAIFPGIQGGPLMHVIAGKAVAFKEAQSPTFKAYQEQVVKNARAMAETLMARGLRIVSGRTESHVMLVDLRAKSITGKEAEKVLGDAHITVNKNAIPNDPEKPFVTSGIRLGSPAMTTRGFKEGEAVKVAHLIADVLDNPHDEANIAAVRAKVAELTKQFPVYA

SEQ ID NO: 3904 - DNA, 1797 bp, Arabidopsis thaliana
  CDS (1)..(1797)
atggatttgagtcgttctcaaacaaattttcaattagggtttggttgttcacacgcatcaatgactccaacaccaacaccaagagctccaatcgcagacgattcgattaatctacaagtcgatcaaagtttccgatcattaccaacaactttctctccgattccgttacaattactcgaacaaaaagccgagaagaccaccaccgttgatgagccaaagaaagatggaggaggaggaggagatcaaaaggaagacgagcatttcagaatcttaggtcaccatatgtgtctcaaaaggcaaagagattgtccacttttgttaacgcaatcaaagcatccgaagagaagttccatcggtgattcagatctggaatcgcgacgtgctgctgtacgagcttggggtgatcaaccgattcatttggcggatcctgatattcatgagcttatggagaaagagaagcaacgacaagtaagaggaattgaattgattgcttctgagaatttcgtgtgtagagctgtaatggaagctttaggtagtcatttaacgaataaatactctgaaggtatgcctggagctagatactatactgggaatcaatatattgatcagattgagaatctctgtattgagcgtgctcttactgcgtttggtcttgaatctgataaatggggtgttaatgttcagccttattcttgtacttctgctaacttcgcggtgtataccggacttttattgcccggtgaacggattatggggcttgattcgccttctggtggtcatatgagtcatggttattgtactcctggtgggaagaagatttcggctgcttccatcttctttgagagttttccttataaagtgaatcctcaaactgggtatattgattatgataagcttgaagataaggcgcttgattaccgtcctaagattcttatttgtggtgggagttcttatcctagggattgggattttgcaagggttagacagattgcagataagtgtggagctgttttgatgtgtgatatggctcatattagcggtcttgttgcaactaaggaatgttcaaatccatttgatcactgtgacatagtaacctccactactcacaaaggtctacgtggtcctagaggaggtatcatcttctacaggagaggcccaaagataagaaagcagggccatcactctagccattgtgacacttccacgcattacgatctagaggaaaagatcaactttgctgtttttccatctctacaaggaggtccacacaacaaccatatcgctgctcttgccattgcattgaaacaagtggccactccagagtacaaagcttacatacaacagatgaagaaaaacgcccaagctttagcagcagctcttcttagaagaaaatgcagactggttactggtggtacagacaaccatttgttgctgtgggatctcactcctatgggcttaacagggaaagtctacgagaaagtgtgtgagatgtgccatatcactttaaacaagacggctatattcggggacaatggtacaatatctcctggaggtgtaagaatagggacacctgcaatgacaacccgaggctgtatagagtctgatttcgagacaatggcggattttctgataaaggcggctcagataacaagtgcgttgcagagagagcatggaaagtcacacaaggagtttgtgaaaagtttatgcaccaacaaagacatagctgagcttagaaaccgagtcgaagcatttgctttgcagtatgagatgcctgcttctcttattcgaattgaatga

SEQ ID NO: 3905 - protein, 598 aa, Arabidopsis thaliana
MDLSRSQTNFQLGFGCSHASMTPTPTPRAPIADDSINLQVDQSFRSLPTTFSPIPLQLLEQKAEKTTTVDEPKKDGGGGGDQKEDEHFRILGHHMCLKRQRDCPLLLTQSKHPKRSSIGDSDLESRRAAVRAWGDQPIHLADPDIHELMEKEKQRQVRGIELIASENFVCRAVMEALGSHLTNKYSEGMPGARYYTGNQYIDQIENLCIERALTAFGLESDKWGVNVQPYSCTSANFAVYTGLLLPGERIMGLDSPSGGHMSHGYCTPGGKKISAASIFFESFPYKVNPQTGYIDYDKLEDKALDYRPKILICGGSSYPRDWDFARVRQIADKCGAVLMCDMAHISGLVATKECSNPFDHCDIVTSTTHKGLRGPRGGIIFYRRGPKIRKQGHHSSHCDTSTHYDLEEKINFAVFPSLQGGPHNNHIAALAIALKQVATPEYKAYIQQMKKNAQALAAALLRRKCRLVTGGTDNHLLLWDLTPMGLTGKVYEKVCEMCHITLNKTAIFGDNGTISPGGVRIGTPAMTTRGCIESDFETMADFLIKAAQITSALQREHGKSHKEFVKSLCTNKDIAELRNRVEAFALQYEMPASLIRIE

SEQ ID NO: 3906 - DNA, 1590 bp, Arabidopsis thaliana
  CDS (1)..(1590)
atgcaagcttgttgtggtggtaattcgatggcttctcttcagcaacctggacgggttcaaggatctgtctttcccccaattatgcctccagtgaccaaattttctcagcagttgaagttcaatatttcaaaacctttccgttcttcatttctgaaaagaaacctggtctctgaaatgagagcatcttcagtctcgctacctaatgtcgagataagcagcaaagaaatcccttttgaggactatggtcttggtgaagttgatccagaggtccgaaccatcatcacaaaggagaaagatagacaattcaggagcttggagcttattgcatctgagaatttcacgtctcgagcagttatggaggcggttggctcatgccttaccaacaagtattctgagggactgcctggtaaaagatattatggtggcaatgagtacattgatcagttggagacgctttgccagaaccgggctttggcagccttccgcttagattctacgaaatggggggttaatgttcagccgttatctggttcacctgcaaactttgctgtctacactgcgatacttagccctcatgatcggatcatgggtttggatttacctcacggtggtcatctgtcgcatgggttcatgaccgctaaaaggcgtgtatctggaacttcaatatactttgagtccatgccttatcgacttgatgaatcaacaggcattgttgactacgatatgctcgagaaaactgctacacttttcagaccaaagcttattatcgcaggagctagtgcatacagccgagattttgactatcctcgcatgaggaagatcgcagactcagttggtgcttttctgatgatggatatggctcatatcagtgggcttgtggctgcttctgtggtagctgacccttttgagtattgtgatattgttacaacaacaactcacaagtctttgagaggtccgagaggtggcatgatcttcttcaggaaggatccaattaatggggttgatcttgaatctgccgtgaacaatgctgtcttccctggtttgcagggtggccctcataaccacacaattggaggattagcagtctgcttgaaacacgcacaatcaccggaattcaaggcgtaccagaaaagagttgtgtctaactgtagagctctagctaaccgattggttgaactcgggtttaagctagtttctggtggcagcgataaccacttggttctcgtcgatcttagacccatgggtatggatggtgcgcgggttgagaaaatcttagacatggcatctattactctcaacaagaactctgtccctggggacaaaagtgcgttggtaccagggggaataaggataggatcccccgcgatgacgacaagaggactgtcagagaaagactttgtagtagtggctgacttcatcaaggaaggtgtggagataacaatggaagccaagaaagccgcgccgggttcaaagcttcaagatttcaacaagttcgtgacatctcctgagtttccattgaaagagagagtgaagagtctaaaggagagagtggaaaccttcacatctcgttttcccattcctggcgtttaa

SEQ ID NO: 3907 - protein, 529 aa, Arabidopsis thaliana
MQACCGGNSMASLQQPGRVQGSVFPPIMPPVTKFSQQLKFNISKPFRSSFLKRNLVSEMRASSVSLPNVEISSKEIPFEDYGLGEVDPEVRTIITKEKDRQFRSLELIASENFTSRAVMEAVGSCLTNKYSEGLPGKRYYGGNEYIDQLETLCQNRALAAFRLDSTKWGVNVQPLSGSPANFAVYTAILSPHDRIMGLDLPHGGHLSHGFMTAKRRVSGTSIYFESMPYRLDESTGIVDYDMLEKTATLFRPKLIIAGASAYSRDFDYPRMRKIADSVGAFLMMDMAHISGLVAASVVADPFEYCDIVTTTTHKSLRGPRGGMIFFRKDPINGVDLESAVNNAVFPGLQGGPHNHTIGGLAVCLKHAQSPEFKAYQKRVVSNCRALANRLVELGFKLVSGGSDNHLVLVDLRPMGMDGARVEKILDMASITLNKNSVPGDKSALVPGGIRIGSPAMTTRGLSEKDFVVVADFIKEGVEITMEAKKAAPGSKLQDFNKFVTSPEFPLKERVKSLKERVETFTSRFPIPGV

SEQ ID NO: 3908 - DNA, 1614 bp, Drosophila melanogaster
  CDS (1)..(1614)
atgcagcgggcgcgctctacactgacacaaaagcttcggttttgccttagtcgggacctgaacaccaaagttggcaacccggttaacttcgagactggaaagcttagcggagctttaactcgcatcgccgccaaaaaacaaccatcaccaacgccattcttaccggcgatcagacgatattcggactccaagcagagcactttgaagaatatggccgatcagaaactgctgcaaaccccgctggcacagggcgatccggagctggccgagctgatcaagaaggagaaggagcgccagcgcgaaggactcgagatgatcgccagtgagaacttcacctcggtggcggttctcgagagcctgagctcctgcctgaccaacaagtactccgagggatatcccggcaagaggtactacggtggcaacgagtacatcgaccgcatagagctgctcgcccagcaacgcggacgcgagctgttcaacctggacgatgagaagtggggcgttaatgtgcagccttattccggatccccggccaatctggctgtctacacgggcgtctgccggccccacgatcgcatcatgggcctggatctgcccgatggcggtcacttgacgcacggtttcttcacgcccaccaagaagatatcggccacatcgatcttcttcgagagcatgccgtacaaagtgaacccggagacgggcatcatcgattacgataagttggcggaggcggcgaagaatttccggccgcagatcatcattgctggcatatcgtgctactcccgtctgctggactatgcgcgtttccgacagatttgcgatgatgtgggcgcctacctgatggccgacatggcccatgtggcgggcattgtggccgcgggattgataccatcgccgttcgaatgggccgacattgtgaccaccaccacgcacaagacactgcgaggtccgcgcgccggcgtgatcttcttccgcaagggcgtgcgcagcaccaaggccaatggagacaaggtactctacgatctggaggagcgcatcaaccaggcggtgtttccatcactccagggtggtccgcacaacaacgccgtggctggcattgccaccgccttcaagcaggccaagagtcccgaattcaaggcctaccagacgcaggtgctcaagaatgccaaggccctgtgcgatggcctcatttcgcgaggctatcaggtggccaccggcggcaccgacgtccatttggtgctggtcgatgtgcgtaaggctggcctgaccggcgccaaggccgagtacatcctcgaggaggtgggcatcgcgtgcaacaagaacactgtgcccggcgacaagtccgccatgaatccctccggcatccggctgggcacaccggccctgaccactcgcggccttgccgagcaggacatcgagcaggtggtggccttcatcgatgctgccctaaaggttggcgtccaggcagccaagctggccggcagtcccaagataaccgattaccacaagacgctggccgagaatgtggagctcaaggcccaggtggacgagatccgcaagaatgtggcccagttcagcaggaaattcccgctgcccggcctggagaccctgtag

SEQ ID NO: 3909 - protein, 537 aa, Drosophila melanogaster
MQRARSTLTQKLRFCLSRDLNTKVGNPVNFETGKLSGALTRIAAKKQPSPTPFLPAIRRYSDSKQSTLKNMADQKLLQTPLAQGDPELAELIKKEKERQREGLEMIASENFTSVAVLESLSSCLTNKYSEGYPGKRYYGGNEYIDRIELLAQQRGRELFNLDDEKWGVNVQPYSGSPANLAVYTGVCRPHDRIMGLDLPDGGHLTHGFFTPTKKISATSIFFESMPYKVNPETGIIDYDKLAEAAKNFRPQIIIAGISCYSRLLDYARFRQICDDVGAYLMADMAHVAGIVAAGLIPSPFEWADIVTTTTHKTLRGPRAGVIFFRKGVRSTKANGDKVLYDLEERINQAVFPSLQGGPHNNAVAGIATAFKQAKSPEFKAYQTQVLKNAKALCDGLISRGYQVATGGTDVHLVLVDVRKAGLTGAKAEYILEEVGIACNKNTVPGDKSAMNPSGIRLGTPALTTRGLAEQDIEQVVAFIDAALKVGVQAAKLAGSPKITDYHKTLAENVELKAQVDEIRKNVAQFSRKFPLPGLETL

SEQ ID NO: 3910 - DNA, 1419 bp, Schizosaccharomyces pombe
  CDS (1)..(1419)
atgaagtgttctaataaagttctaacgataattaagttactcaaagcaccattggcagaatgtgatccgacagtgtataagattttggaatctgagaaaagccgtcagaaagagtcgatagctttaattgctagcgaaaactttacttcaagagctgtgatggatgcactcggaagtattatgcaaaacaaatatagtgaaggctatcctggtgcaagatattatggtggtaatgaatttatagatcaagctgaaagactatgtcaaacgagagctttagaagcttttcatttggatggggaaaaatggggagtaaatgtacaaccccattctgggtctccggccaacttacaggcttatcaagcagtaatgaagccacacgatcgcctaatgggtttagatttaccccatggcggtcatttatctcatggtttctctactccccagaaagctatttcagctgtctcgacttatttttccaccatgccatataacgtaaataaggaaactggtattattgactatgatagtttggaaaaggctgcgatacaatttcgtcctaaagttatagttgcaggcgctagtgcttatgcacgactcgttgattacaagcgtatgcgtaaaattacggaaatgtgcaatgcctatttgctttgtgatatggctcacatatccggtttagtagctgccggtgtaattccttctccgtttgaatacgccgatattgttactacgacgactcataagtctttacgtggaccgagaggagctatgatattttatcgaaaaggtactcgttctcacgataaacgtggtaatccaattttatatgaattagaggataaaatcaatttctcagtttttcctggacatcaaggcggcccccataatcatacaattactgcgttagctgtcgcccttggacaagcaaaaactcctgaattctatcaataccaaaaggacgttctaagtaacgccaaggcaatggccaatgcatttattactcgtggctataagttagtttcaggtggcacggatactcacttggttcttgttgatttgaccgacaaaggtgtagatggtgcccgtgtcgaacgtattttagagcttgtaaatatttctgccaacaagaatactgtgcccggagataagtctgctttaattccacgtggattacgtctgggaactccagcttgcactactcgcggttttgatgagaaggattttgagagagtggtagagctaattgatgaagttgtatctttgaccaagaaaataaatgaagctgctttgaaggaaggaaaatcgaagtttagagacttcaaagcatatgtgggtgatggttctaaattctctgaaatcgccaaactgaagaaagaagttataacttgggctggaaaatttgatttccccgtttaa

SEQ ID NO: 3911 - protein, 472 aa, Schizosaccharomyces pombe
MKCSNKVLTIIKLLKAPLAECDPTVYKILESEKSRQKESIALIASENFTSRAVMDALGSIMQNKYSEGYPGARYYGGNEFIDQAERLCQTRALEAFHLDGEKWGVNVQPHSGSPANLQAYQAVMKPHDRLMGLDLPHGGHLSHGFSTPQKAISAVSTYFSTMPYNVNKETGIIDYDSLEKAAIQFRPKVIVAGASAYARLVDYKRMRKITEMCNAYLLCDMAHISGLVAAGVIPSPFEYADIVTTTTHKSLRGPRGAMIFYRKGTRSHDKRGNPILYELEDKINFSVFPGHQGGPHNHTITALAVALGQAKTPEFYQYQKDVLSNAKAMANAFITRGYKLVSGGTDTHLVLVDLTDKGVDGARVERILELVNISANKNTVPGDKSALIPRGLRLGTPACTTRGFDEKDFERVVELIDEVVSLTKKINEAALKEGKSKFRDFKAYVGDGSKFSEIAKLKKEVITWAGKFDFPV

SEQ ID NO: 3912 - DNA, 1404 bp, Schizosaccharomyces pombe
  CDS (1)..(1404)
atgtcttccaacgacagtattatgttgactcctcttaaggaacaggatcccactgttgccgaaattatgagacacgaagctgatcgtcaacgttcttctgttgttcttatcgcctctgagaacttcacctctcgtgctgttatggatgctcttggaagtgtcatgagcaacaagtattcagagggttatcctggtgctcgttactatggtggtaacaagtttatcgatcaaattgaaactctttgccaagagcgtgcacttgctgccttcaatcttgatcctgctaaatggggtgtcaacgttcaatgtctttccggttcccccgctaacatgcaagtttatcaagccattatgcctcctcacggtcgtttaatgggtcttgacttgccttcaggtggccatctttctcacggttatcaaactgataccaagaagattagtgctgtttctacttactttgagtctatgccctaccgtgttgatcctaacaccggtttgattgactatgacatgttggagcacgacgctcagttattccgtcccaagatccttgttgctggtacttctgcttattgccgtctcattgactacgctcgtatgcgacaaattgctgacagcgttaacgcatacttggtcgttgacatggctcatatttctggtcttgtctcagctggtgttatcccttccccctttgaatatgctgatgttgttactaccaccactcacaagtctctacgtggacctcgtggtgctatgatcttcttccgtcgtggtcttcgtaagcatgacaagaagggtaaccccatttactatgacttggaggataagatcaacttctccgttttccctggccatcaaggtggtccccacaaccacaccatcactgctttggctgttgcattgaagcaatgccaagagcccgcttacaaggagtatcaagctcaagttgttaaaaatgctaaggtctgcgaagaggaattcaaaaagcgtggttacaaacttgctgctgacggtactgacagtcacatggttttggttgatgtcaagagcaagggtgttgacggtgctcgtgctgagcgcgtgttggaattgatcaacattgttaccaacaagaatactgtaccttctgacaaatctgctttctctccctctggtattcgtgtcggaacccctgccatgactactcgtggattcaaggaacaagactttgttcgtgttgttgactacattgaccgtgctcttacttttgccgccaacttacaaaaggagcttcccaaggacgccaacaagctcaaagacttcaaggctaaacttggtgaaggtgaacaataccccgagcttgttcaacttcaaaaagaagtcgctgagtgggcttctagcttccctcttgctgataagtggtaa

SEQ ID NO: 3913 - protein, 467 aa, Schizosaccharomyces pombe
MSSNDSIMLTPLKEQDPTVAEIMRHEADRQRSSVVLIASENFTSRAVMDALGSVMSNKYSEGYPGARYYGGNKFIDQIETLCQERALAAFNLDPAKWGVNVQCLSGSPANMQVYQAIMPPHGRLMGLDLPSGGHLSHGYQTDTKKISAVSTYFESMPYRVDPNTGLIDYDMLEHDAQLFRPKILVAGTSAYCRLIDYARMRQIADSVNAYLVVDMAHISGLVSAGVIPSPFEYADVVTTTTHKSLRGPRGAMIFFRRGLRKHDKKGNPIYYDLEDKINFSVFPGHQGGPHNHTITALAVALKQCQEPAYKEYQAQVVKNAKVCEEEFKKRGYKLAADGTDSHMVLVDVKSKGVDGARAERVLELINIVTNKNTVPSDKSAFSPSGIRVGTPAMTTRGFKEQDFVRVVDYIDRALTFAANLQKELPKDANKLKDFKAKLGEGEQYPELVQLQKEVAEWASSFPLADKW

SEQ ID NO: 3914 - DNA, 1254 bp, Xanthomonas axonopodis pv. citri str. 306
  CDS (1)..(1254): transl_table=11
atgttctcgcgcgatgtccgactggaaacctacgaccccgaactggccaaggccatcgctgctgaagccggccgccaggaggatcacgtcgagctgatcgccagcgaaaactactgcagcccgttggtgatggaagcgcagggcagccagctgaccaacaagtacgccgaaggctatccgggcaagcgctactacggcggctgcgagttcgtggatattgccgaacaactggcgatcgagcgcatcaagcaggtatttggcgccgattacgcgaacgtccagccgcacagcggttcgcaggccaatcaggcggtgtatctggcactgctgcagccgggcgacaccatcctggggatgagcctggcgcatggcggccacctgacccacggcgcgaaggtcaacgtctccggcaagctgttcaacgcggtgcagtacggcgtcaacgagcagggcctgatcgattacgacgaggtccagcgcctggcgaccgagcacaagccgaagatggtggtggccggtttctctgcgtattcgcagaagatcgactgggcccgcttccgcgccatcgccgacagcgtcggtgcctacctgttcgtggacatggcgcacatcgccggcctggtcgccgccggggtgtatcccagcccgatggaacatgcgcacgtggtcacctcgaccacgcacaagacactgcgtggcccgcgtggcggcatcatcgtcgccaagggcgccagcgaagagctgcagaaaaagctgcagtcgatcgtgttccccggcatccagggcggcccgctgatgcatgtcatcgcggccaaggcggtggcgttcaaggaggcgctggagccggcgttcaagacctatcagcaacaagtggtcaagaacgcccaggcgatggccaatacgctgatcgcgcgcggctacaagatcgtttccggcggcaccgagaaccatctgatgctggtggacatgatcggtcgcgacgtctccggcaaggatgccgaagccgcgcttggcaaggcgcacatcaccgtcaacaagaattcggtccccaacgacccgcgctcgccgttcgtcacctccggtctgcgcctgggcaccccggcgatcaccacgcgcggttaccaggaacaggacagcatcgatctggccaactggatcgccgacgtgctcgacgcgccaaccgacgaagccgtgctggcgaaggtgcgcgacgcggtgactgcgcagtgcaagcgctatccggtgtatggctga

SEQ ID NO: 3915 - protein, 417 aa, Xanthomonas axonopodis pv. citri str. 306
MFSRDVRLETYDPELAKAIAAEAGRQEDHVELIASENYCSPLVMEAQGSQLTNKYAEGYPGKRYYGGCEFVDIAEQLAIERIKQVFGADYANVQPHSGSQANQAVYLALLQPGDTILGMSLAHGGHLTHGAKVNVSGKLFNAVQYGVNEQGLIDYDEVQRLATEHKPKMVVAGFSAYSQKIDWARFRAIADSVGAYLFVDMAHIAGLVAAGVYPSPMEHAHVVTSTTHKTLRGPRGGIIVAKGASEELQKKLQSIVFPGIQGGPLMHVIAAKAVAFKEALEPAFKTYQQQVVKNAQAMANTLIARGYKIVSGGTENHLMLVDMIGRDVSGKDAEAALGKAHITVNKNSVPNDPRSPFVTSGLRLGTPAITTRGYQEQDSIDLANWIADVLDAPTDEAVLAKVRDAVTAQCKRYPVYG

SEQ ID NO: 3916 - DNA, 1323 bp, Chlorobium tepidum TLS
  CDS (1)..(1323): transl_table=11
atggacaacgatattctgaaacggctcgaccccgaggtcttcgaggcgattgccaatgaaacaaaacgccaaaccgaaacgctcgaactgatcgcttcggagaacttcaccagcaaggcggtcatggaagcttgcggctcggtgatgaccaacaagtacgccgagggctaccccggcaagcgctactacggcggctgcgaatttgttgatgtggccgagaacctcgcccgcgaccgcgccaagaagcttttcggctgtgagtacgtcaacgtgcagccgcactccggttccagcgccaacatggcggtgcttttcgccgtgctcaagccgggcgacgccatcatgggcctcgacctctcccacggcggccacctgactcacggcagcaaggtgaacttctccggccagttctttgatgcccactcttacggcgttgacaaagagactggcatcatcgacatgaacaaggtcgaagagatggccaggcgagtcaagccgaagctcatcatcaccggcgcgagtgcctactcgcagggctttgacttcaaggcgttccgcgaagtcgccgacaaagtcggtgcgctgctcatggccgacatcgcccacccggcgggcctcgttgctgcgggcctttctgccaacccgatgccgcattgccacttcgtgaccaccaccacgcacaagaccctgcgcggcccacgcggcggcatgatcatgatgggcaaggatttcgagaatccgctcggcctgactatcaacaccaagaacggctcgcgcgtcaagatgatgtccgaggtgatcgacgccgaggtgatgcccggcatccagggcggcccgctcatgcacatcatcgccggcaaggcggttgccttcggcgaagcgctccagcccgagtttaaagcctatgcgcagcagatcaaggacaacgccgctgcaatggccgcgaagttcctcgcggcgggctaccacatcgtcagcggtggtacgaaaaaccacctcatgctgctcgacctgcgcaacaagaacgtcaacggcaaggtagccgaaaacctcctgcacgaagccggaatcacggttaacaaaaacatggtgcctttcgacgacaaatcgccgttcgtcaccagcggcatccgcatcggcaccccggcgatgaccactcgtgggatgaaggttgccgaagctgaaaagatcgttgaattcatcgatcgcgtcatcagcgctgccaacgacgccaacgtcgccgatgtctgcaaggccgtcagggctgaagttcgcgagctgtgccttggcttcccgctcaacaactacggttctctcgtctaa

SEQ ID NO: 3917 - protein, 440 aa, Chlorobium tepidum TLS
MDNDILKRLDPEVFEAIANETKRQTETLELIASENFTSKAVMEACGSVMTNKYAEGYPGKRYYGGCEFVDVAENLARDRAKKLFGCEYVNVQPHSGSSANMAVLFAVLKPGDAIMGLDLSHGGHLTHGSKVNFSGQFFDAHSYGVDKETGIIDMNKVEEMARRVKPKLIITGASAYSQGFDFKAFREVADKVGALLMADIAHPAGLVAAGLSANPMPHCHFVTTTTHKTLRGPRGGMIMMGKDFENPLGLTINTKNGSRVKMMSEVIDAEVMPGIQGGPLMHIIAGKAVAFGEALQPEFKAYAQQIKDNAAAMAAKFLAAGYHIVSGGTKNHLMLLDLRNKNVNGKVAENLLHEAGITVNKNMVPFDDKSPFVTSGIRIGTPAMTTRGMKVAEAEKIVEFIDRVISAANDANVADVCKAVRAEVRELCLGFPLNNYGSLV

SEQ ID NO: 3918 - DNA, 1278 bp, Thermosynechococcus elongatus BP-1
  CDS (1)..(1278): transl_table=11
atgacccatattgattggcttgtgcaaacggatccgttggtcgctgaaatggtacagcgggaagtccagcggcagcagcaacacctcgaactgattgccagtgaaaactttacttcccctgcggtgatggccgctcaagggacagttctcaccaataaatacgccgagggattgccgggcaaacgctactacggtggctgcgagtttgtggatgaagtggagcaactggccatcgatcgcgccaaggaactctttggtgctgcccacgccaacgttcagcctcactccggtgcccaagccaattttgccgtctttttggccctcctcaatcccggggacacgattatggggatggatttgtcccacggtggccatctaacccacggttcccccgtcaacgtttccggtaaatggtttaacgtcgttcactatggtgttcatcctgaaacggaacgcctcgatatggatcaggtgcgggatttagcacggcagcaccgtcccaagctaattatctgtggctattccgcctatcctcgcgtcattccctttgctgagtttcgccaaattgccgatgaagtgggtgcctatctcatggctgatattgcccacattgccggtttagtcgccagtggttaccatcccaatcccgtccccctctgcgatgtcgtgacaaccaccacccataaaaccctgcgcggtcctcgcggcggcctgattctgacccgtgatgaagacttaggcaaaaagttggataaagcggtttttcccggtacccaaggggggccactggagcatgtgattgccgctaaggccgtggcctttggtgaggctctcaaaccagaattcaaagcctattgtgggcaagtgattcgcaacgcccaagccctcgctgcggggctgcaagcgcggcaactgcgccttgtttcaggaggcaccgataaccatttgatgctcattgacctgcgatcggtgaatctaacgggcaaagaggccgatcgccttatgggggaaatccatatcaccaccaataaaaacaccattccctttgaccccgcctccccttttgttaccagtggtctgcgtttgggaacgccagccttgacaacccgtggcttcacagaagtcgagtttgcagaagtagctgaaatcattagcgatcgcctgcatgccccagaggatgaagccatcaaaaatcgctgccgcgagcgggtggctgccctctgcgctcaatttcccctctatccccacttgcaattcccgcaaccagtgctagcctaa

SEQ ID NO: 3919 - protein, 425 aa, Thermosynechococcus elongatus BP-1
MTHIDWLVQTDPLVAEMVQREVQRQQQHLELIASENFTSPAVMAAQGTVLTNKYAEGLPGKRYYGGCEFVDEVEQLAIDRAKELFGAAHANVQPHSGAQANFAVFLALLNPGDTIMGMDLSHGGHLTHGSPVNVSGKWFNVVHYGVHPETERLDMDQVRDLARQHRPKLIICGYSAYPRVIPFAEFRQIADEVGAYLMADIAHIAGLVASGYHPNPVPLCDVVTTTTHKTLRGPRGGLILTRDEDLGKKLDKAVFPGTQGGPLEHVIAAKAVAFGEALKPEFKAYCGQVIRNAQALAAGLQARQLRLVSGGTDNHLMLIDLRSVNLTGKEADRLMGEIHITTNKNTIPFDPASPFVTSGLRLGTPALTTRGFTEVEFAEVAEIISDRLHAPEDEAIKNRCRERVAALCAQFPLYPHLQFPQPVLA

SEQ ID NO: 3920 - DNA, 1524 bp, Caenorhabditis elegans
  CDS (1)..(1524)
atgtttgcaaggatagtgagcagaagagcagcaactggattatttgccggagccagctcccagtgtaaaatggctgatcgtcaagtgcacacaccattggctaaagttcagcgccacaagtacaccaacaacgagaacattttggtggaccatgttgagaaagttgatccagaagttttcgatatcatgaaaaatgagaagaagcggcagcgtcgtggacttgagctcatcgcttccgagaacttcacaagcaaggctgttatggatgctcttggctcggcaatgtgcaacaaatacagtgaaggataccctggagctcggtattacggaggaaatgagttcatcgatcagatggagctcctttgccagaagagagctcttgaggtattcggacttgatccagccaagtggggagtcaatgtgcagccattgtccggatcaccagccaatttcgcagtctacactgccatcgttggatccaatggacgcattatgggcctcgatcttccagatggaggtcatttgactcatggattcttcaccccagctcgcaaagtctctgcgacttctgaattcttccagtctcttccatacaaggttgatccaacaactggattgatcgactatgacaagcttgagcagaatgcaatgcttttccgtccaaaagccatcattgccggagtttcctgctacgctcgtcatctcgattatgaacgtttccgtaagattgccacaaaggctggagcctatttgatgtctgatatggctcacatctccggacttgttgccgctggacttatcccatcaccattcgagtattctgatgttgtaaccacaacgacgcacaagtcgctcagaggaccacgtggagctttgatcttctacagaaagggtgtccgatctaccaacgcaaagggagttgacactttgtatgatttggaggagaagatcaactcggccgtgttcccaggacttcaaggtggaccacacaatcacactattgctggaattgccgttgctttgagacaatgcctttctgaagattttgttcagtacggagagcaagtgttgaagaatgccaaaaccttggccgagagaatgaagaagcatggatatgctttggcaaccggaggaaccgacaatcatttgttgcttgttgacttgcgcccaatcggagttgaaggagctcgtgctgagcatgtgcttgatctcgctcatattgcttgcaacaagaatacgtgcccaggagacgtttctgctttgagaccaggaggcattcgtctcggaactccagctctcacctcccgtggattccaggagcaagatttcgagaaagtcggagatttcattcatgagggtgttcaaatcgcaaagaagtacaatgctgaggctggaaagacattgaaagacttcaaatcattcactgagaccaatgaaccattcaagaaagacgtcgctgatctcgccaaacgtgttgaggagttctccacgaagttcgagattccaggaaacgaaactttctaa

SEQ ID NO: 3921 - protein, 507 aa, Caenorhabditis elegans
MFARIVSRRAATGLFAGASSQCKMADRQVHTPLAKVQRHKYTNNENILVDHVEKVDPEVFDIMKNEKKRQRRGLELIASENFTSKAVMDALGSAMCNKYSEGYPGARYYGGNEFIDQMELLCQKRALEVFGLDPAKWGVNVQPLSGSPANFAVYTAIVGSNGRIMGLDLPDGGHLTHGFFTPARKVSATSEFFQSLPYKVDPTTGLIDYDKLEQNAMLFRPKAIIAGVSCYARHLDYERFRKIATKAGAYLMSDMAHISGLVAAGLIPSPFEYSDVVTTTTHKSLRGPRGALIFYRKGVRSTNAKGVDTLYDLEEKINSAVFPGLQGGPHNHTIAGIAVALRQCLSEDFVQYGEQVLKNAKTLAERMKKHGYALATGGTDNHLLLVDLRPIGVEGARAEHVLDLAHIACNKNTCPGDVSALRPGGIRLGTPALTSRGFQEQDFEKVGDFIHEGVQIAKKYNAEAGKTLKDFKSFTETNEPFKKDVADLAKRVEEFSTKFEIPGNETF

SEQ ID NO: 3922 - DNA, 1455 bp, Caenorhabditis elegans
  CDS (1)..(1455)
atggctgatcgtcaagtgcacacaccattggctaaagttcagcgccacaagtacaccaacaacgagaacattttggtggaccatgttgagaaagttgatccagaagttttcgatatcatgaaaaatgagaagaagcggcagcgtcgtggacttgagctcatcgcttccgagaacttcacaagcaaggctgttatggatgctcttggctcggcaatgtgcaacaaatacagtgaaggataccctggagctcggtattacggaggaaatgagttcatcgatcagatggagctcctttgccagaagagagctcttgaggtattcggacttgatccagccaagtggggagtcaatgtgcagccattgtccggatcaccagccaatttcgcagtctacactgccatcgttggatccaatggacgcattatgggcctcgatcttccagatggaggtcatttgactcatggattcttcaccccagctcgcaaagtctctgcgacttctgaattcttccagtctcttccatacaaggttgatccaacaactggattgatcgactatgacaagcttgagcagaatgcaatgcttttccgtccaaaagccatcattgccggagtttcctgctacgctcgtcatctcgattatgaacgtttccgtaagattgccacaaaggctggagcctatttgatgtctgatatggctcacatctccggacttgttgccgctggacttatcccatcaccattcgagtattctgatgttgtaaccacaacgacgcacaagtcgctcagaggaccacgtggagctttgatcttctacagaaagggtgtccgatctaccaacgcaaagggagttgacactttgtatgatttggaggagaagatcaactcggccgtgttcccaggacttcaaggtggaccacacaatcacactattgctggaattgccgttgctttgagacaatgcctttctgaagattttgttcagtacggagagcaagtgttgaagaatgccaaaaccttggccgagagaatgaagaagcatggatatgctttggcaaccggaggaaccgacaatcatttgttgcttgttgacttgcgcccaatcggagttgaaggagctcgtgctgagcatgtgcttgatctcgctcatattgcttgcaacaagaatacgtgcccaggagacgtttctgctttgagaccaggaggcattcgtctcggaactccagctctcacctcccgtggattccaggagcaagatttcgagaaagtcggagatttcattcatgagggtgttcaaatcgcaaagaagtacaatgctgaggctggaaagacattgaaagacttcaaatcattcactgagaccaatgaaccattcaagaaagacgtcgctgatctcgccaaacgtgttgaggagttctccacgaagttcgagattccaggaaacgaaactttctaa

SEQ ID NO: 3923 - protein, 484 aa, Caenorhabditis elegans
MADRQVHTPLAKVQRHKYTNNENILVDHVEKVDPEVFDIMKNEKKRQRRGLELIASENFTSKAVMDALGSAMCNKYSEGYPGARYYGGNEFIDQMELLCQKRALEVFGLDPAKWGVNVQPLSGSPANFAVYTAIVGSNGRIMGLDLPDGGHLTHGFFTPARKVSATSEFFQSLPYKVDPTTGLIDYDKLEQNAMLFRPKAIIAGVSCYARHLDYERFRKIATKAGAYLMSDMAHISGLVAAGLIPSPFEYSDVVTTTTHKSLRGPRGALIFYRKGVRSTNAKGVDTLYDLEEKINSAVFPGLQGGPHNHTIAGIAVALRQCLSEDFVQYGEQVLKNAKTLAERMKKHGYALATGGTDNHLLLVDLRPIGVEGARAEHVLDLAHIACNKNTCPGDVSALRPGGIRLGTPALTSRGFQEQDFEKVGDFIHEGVQIAKKYNAEAGKTLKDFKSFTETNEPFKKDVADLAKRVEEFSTKFEIPGNETF

SEQ ID NO: 3924 - DNA, 1275 bp, Xylella fastidiosa Temecula1
  CDS (1)..(1275): transl_table=11
gtgtttttttccggagttgccatgttcccgcgtgatgctcgtcttgatatgtacgatcccgagttggctaaggccatcgctgctgaagtgaggcgtcaggaggatcacgttgagttgattgccagtgaaaattattgcagtacgttggtgatgcaggtgcaggggagtcaactgactaataagtatgctgaagggtattctggaaagcgttactacggtggttgtgagtatgtcgatatcgctgagcaattggcgattgagcgtgccaaaaaactgtttggtgccgattatgccaatgtgcagccccatagcggttcacaagccaatcaagcggtgtactttgccttgttgcagccaggcgatacgatcctcgggatgagcttggcgcatggcggtcacttgactcacggcgccaatgttaatgtgtctggcaagttgttcaatgcggttcagtacggagtgaatgctcaagggttgattgattacgaggctgttgaatcgcttgcgttagagcatcggccgaagatggttgtggcgggcttttcggcgtattcgcagaaaattgattgggcgcgcttccgtgccattgctgatcaggtgggcgcttacttgcttgttgatatggcacatgtggctggcttggtggcggctggtgtctatccgagtccgctgccgcatgcgcatgttgtgacttcgacgacgcataagacactgcgcggcccacgtggcggcattattgttgcgcaggctccgcaggaggcgttggttaagaagttgcagtcgatagtgtttcctgggatccagggtggtccattgatgcatgtgatcgcggccaaagcggttgcttttaaggaggcgttggagcctgcgtttaaggtgtatcagcagcaggtggtgaagaatgcgaaggcgatggctgggaccctcatgttacgcggctataagattgtctctggtggtacagaaaatcatttgatgttggttgacatgatcggtagggatgtctctgggaaggacgctgagggcgcattgggtcaggttcatatcactgtcaataagaatgcggtaccggatgatccgcgctctccgttcgtaacctccgggttacgcttggggactccagcagtcacgacacggggttaccaggagcaggattgtgtggacttagcgcactggattgctgatgtgcttgacgcgcctgcagatgtgacggtcattgccgcagtccgtgagaaggttgcggcgcagtgcaagaagtatcctgtgtatcgctga

SEQ ID NO: 3925 - protein, 424 aa, Xylella fastidiosa Temecula1
MFFSGVAMFPRDARLDMYDPELAKAIAAEVRRQEDHVELIASENYCSTLVMQVQGSQLTNKYAEGYSGKRYYGGCEYVDIAEQLAIERAKKLFGADYANVQPHSGSQANQAVYFALLQPGDTILGMSLAHGGHLTHGANVNVSGKLFNAVQYGVNAQGLIDYEAVESLALEHRPKMVVAGFSAYSQKIDWARFRAIADQVGAYLLVDMAHVAGLVAAGVYPSPLPHAHVVTSTTHKTLRGPRGGIIVAQAPQEALVKKLQSIVFPGIQGGPLMHVIAAKAVAFKEALEPAFKVYQQQVVKNAKAMAGTLMLRGYKIVSGGTENHLMLVDMIGRDVSGKDAEGALGQVHITVNKNAVPDDPRSPFVTSGLRLGTPAVTTRGYQEQDCVDLAHWIADVLDAPADVTVIAAVREKVAAQCKKYPVYR

SEQ ID NO: 3926 - DNA, 1281 bp, Bacteroides thetaiotaomicron VPI-5482
  CDS (1)..(1281): transl_table=11
atgaaaagagacgacttaattttcgacatcatcgaaaaagagcaccaacgtcagctgaaaggtatcgagctgattgcatctgaaaactttgtaagtgaccaggtaatgcaggcaatgggttcttgcctgactaacaagtacgcagaaggttatccgggcaaacgttactacggaggttgtgaagtagttgaccaaagcgaacaaatcgctatcgaccgcctgaaagaaatcttcggtgccgaatgggcaaacgtacaaccgcattcaggagcacaagccaatgcagccgtatttctggctgttttgaatccaggcgacaagtttatgggattaaacctcgcacacggcggacacctttctcacggttcattagtaaacacttccggcattatctacactccttgcgaatacaatctgaatcaggaaaccggccgtgtagactacgaccagatggaagaagttgctttgcgcgaaaagccgaaaatgattatcggcggcggctctgcttattcccgcgaatgggactacaaacgtatgcgtgaaatcgcagataaagtaggcgctatcctgatgatcgacatggctcaccctgcgggtctgatcgctgccggactgttggagaacccggttaaatatgcacacatcgtcacttcgactacacataaaacacttcgcggacctcgtggtggggtcatcatgatgggaaaagatttccctaatccttggggaaagaaaactccgaagggtgaaatcaaaatgatgtctcaattactggattcagctgtattcccaggtgtacagggcggaccgttggaacacgtaatcgctgccaaagccgtagctttcggtgaaatcctgcaaccggaatacaaggaatatgcaaaacaggttcagaagaatgctgccatactggcacaggccttgatagaccgtggttttacaatcgtttccggtggtacggacaatcactccatgctggttgacctgcgtagcaaataccctgatctgacaggtaaggtagcagaaaaagcattagtttctgctgacattaccgtgaataagaacatggttccgtttgacagccgttctgctttccaaacttccggtatccgtctgggtactcctgccatcacaacccgtggtgcgaaagaagacctgatgatcgaaattgccgaaatgatcgaaacagttctgtctaacgtggaaaatgaagaggtgatcgcacaagtacgtgcacgtgtcaatgagacaatgaagaaatatcctctttttgctgattaa

SEQ ID NO: 3927 - protein, 426 aa, Bacteroides thetaiotaomicron VPI-5482
MKRDDLIFDIIEKEHQRQLKGIELIASENFVSDQVMQAMGSCLTNKYAEGYPGKRYYGGCEVVDQSEQIAIDRLKEIFGAEWANVQPHSGAQANAAVFLAVLNPGDKFMGLNLAHGGHLSHGSLVNTSGIIYTPCEYNLNQETGRVDYDQMEEVALREKPKMIIGGGSAYSREWDYKRMREIADKVGAILMIDMAHPAGLIAAGLLENPVKYAHIVTSTTHKTLRGPRGGVIMMGKDFPNPWGKKTPKGEIKMMSQLLDSAVFPGVQGGPLEHVIAAKAVAFGEILQPEYKEYAKQVQKNAAILAQALIDRGFTIVSGGTDNHSMLVDLRSKYPDLTGKVAEKALVSADITVNKNMVPFDSRSAFQTSGIRLGTPAITTRGAKEDLMIEIAEMIETVLSNVENEEVIAQVRARVNETMKKYPLFAD

SEQ ID NO: 3928 - DNA, 1602 bp, Arabidopsis thaliana; identical to SEQ ID NO: 3828
  CDS (1)..(1602)

SEQ ID NO: 3929 - protein, 533 aa, Arabidopsis thaliana
MALALRRLSSSVKKPISLLSSNGGSLRFMSSLSTAAMAESEKSRSSWIKQLNASLDEIDPEVADIIELEKARQWKGFELIPSENFTSLSVMQAVGSVMTNKYSEGYPGARYYGGNEYIDMAETLCQKRALEAFQLDPSKWGVNVQSLSGSPANFQVYTALLKPHERIMALDLPHGGHLSHGYQTDTKKISAVSIFFETMPYRLDENTGYIDYDQLEKSAVLFRPKLIVAGASAYARLYDYARIRKVCNKQKAVMLADMAHISGLVAAGVIPSPFEYADVVTTTTHKSLRGPRGAMIFFRKGLKEINKQGKEVMYDYEDRINQAVFPGLQGGPHNHTITGLAVALKQARTPEYKAYQDQVLRNCSKFAELDIRPTVIISYGLSMQTLLAKGYDLVSGGTDNHLVLVNLKNKGIDGSRVEKVLELVHIAANKNTVPGDVSAMVPGGIRMGTPALTSRGFIEEDFAKVAEYFDLAVKIALKIKAESQGTKLKDFVATMQSNEKLQSEMSKLREMVEEYAKQFPTIGFEKETMRYKE

SEQ ID NO: 3930 - DNA, 1281 bp, Porphyromonas gingivalis W83
  CDS (1)..(1281): transl_table=11
atgaaaaaagacagcgtaattttcgatctgatcgaaaaagaacatcagcgccagctcaaaggcatcgagctgatcgcatcggaaaactttgtaagcgaacaagttatgcaggctatgggtagctgtatgaccaataagtatgccgaaggttatcccggcaaacgctattacggtggttgtgaagtggtagaccaaagcgagcaaatcgccatcgaccgtatcaaacaactctacggagccgaatgggccaacgtacagcctcactccggagcacaggccaatatggccgttcttctggcttgcctcgaagcaggcgatacgttcatgggactgaacctcgaacacggcggccacctatcgcacggctcactcgtcaatagctcgggtatcctctaccgtcccatcggctacaatctgagcgaagagacgggaatggtggattacgaccacatggagaaaatggccatcgagcacaaacccaagctgatcatcggcggtggttcggcctattctcgtgagtgggactacaagcgtatgcgtgagatcgctgacaaggtgggtgccttgttgatgatcgatatggcacaccctgccggtctgatcgctgccggtctgctggagaaccccgtgaagtatgctcatatcgttacttctacgactcacaagacactgcgtggcccccgtggcggtatcatccttatgggcaaggacttcgacaatccttggggcaagaaaaccccgaagggcgagatcaagaagatgagcgcactcctcgactctgccgtattccccggtgtacagggtggtccgctcgagcacgttatagctgctaaggctgtagctttcggagaagcactggatccttcgttcaaggaataccaaacgcaggtgaaaaagaatgctgccgttttggctcaggctttcatggacaaaggctataaagtgatttccggtggtacggacaaccacagtatgctgatcgatcttcgtccgaagttccccgaactgacaggtaaagtggcagagaaagccctcgtggcagcggatattaccgtcaataagaacatggtaccgttcgattctcgctctgcattccagacatcgggcttccgcgtgggtactccggccatcaccactcgtggcgtaaaagaagataagatgggctatatcgtggagttgatagaccgtgtgctctccgcaccggaggacgaagccgtaatagcatcggttcgtaccgaagtcaaccggatgatggccgattatcctctctttgcttggtaa

SEQ ID NO: 3931 - protein, 426 aa, Porphyromonas gingivalis W83
MKKDSVIFDLIEKEHQRQLKGIELIASENFVSEQVMQAMGSCMTNKYAEGYPGKRYYGGCEVVDQSEQIAIDRIKQLYGAEWANVQPHSGAQANMAVLLACLEAGDTFMGLNLEHGGHLSHGSLVNSSGILYRPIGYNLSEETGMVDYDHMEKMAIEHKPKLIIGGGSAYSREWDYKRMREIADKVGALLMIDMAHPAGLIAAGLLENPVKYAHIVTSTTHKTLRGPRGGIILMGKDFDNPWGKKTPKGEIKKMSALLDSAVFPGVQGGPLEHVIAAKAVAFGEALDPSFKEYQTQVKKNAAVLAQAFMDKGYKVISGGTDNHSMLIDLRPKFPELTGKVAEKALVAADITVNKNMVPFDSRSAFQTSGFRVGTPAITTRGVKEDKMGYIVELIDRVLSAPEDEAVIASVRTEVNRMMADYPLFAW

SEQ ID NO: 3932 - DNA, 1251 bp, Wolinella succinogenes DSM 1740
  CDS (1)..(1251): transl_table=11
atgaattacgcactagaaaccaatgacaaagagatttttgacctcattcatgaagagcttgatcgacaaaacacccaccttgagatgattgccagcgaaaacttcacctttcctgcggtcatggaggcgatggggagcgtgctcactaataagtatgctgagggctatccctataagcgctattacggcggttgtgagtttgttgatagagtcgaagagattgcgattgagcgagccaagaagctctttggatgtggttttgccaatgttcagccccacgcggggagccaagccaatgtcgcagtctataatgctctacttaagccctacgacaaaattttgggaatggatctaagccatgggggacatctcacgcatggagccaaagtgagtgtgacgggtcagacctatcagagcttcttttatggggtggagctggatggctatatcaactatgacaaggttgaagagatcgctaaaatcgtgaaacctcagatgattgtctgcggatttagtgcctatgccagggagcttgatttcaaacgattccgagagattgccgatagcgtgggcgctctgctcttgggtgatgtggcgcatgtggcgggattgattgtggcgggtgagtatcccaatcccttcccccactgccatattgtcaccaccaccacccacaagacgcttcgaggacctaggggtgggatgattctcaccaacgacgaagagatcgccaagaagattgacaaggcggtattccctggaatgcaaggggggcctttgatgcatgtgattgcagccaaggcggtgggctttggagagaatcttaagcctgagtggaaagagtatgccaagcaggtcaaagccaatgccaaagtgctcgctaaagtgctcatggccagaggctacacgctcgtgagtggaggcacagataatcatttgattctagtctctctgctggacaaagagtttagcggcaaagatgccgacagggcactaggcgaggcaggaatcacggtcaacaaaaacaccgttcctggagagactcgaagtccttttgtgaccagcggagtgagaatcggaagcgccgcgcttaccgctaggggcatgagagagaaggagtttgagttcattgcaaccaaaattgccgatgttctagatgatgtcaataacgccgctaaacacgcggagatcaaaaaagagatcgctgagtttgccaagggattccctgtctacaccaaggctattttttaa

SEQ ID NO: 3933 - protein, 416 aa, Wolinella succinogenes DSM 1740
MNYALETNDKEIFDLIHEELDRQNTHLEMIASENFTFPAVMEAMGSVLTNKYAEGYPYKRYYGGCEFVDRVEEIAIERAKKLFGCGFANVQPHAGSQANVAVYNALLKPYDKILGMDLSHGGHLTHGAKVSVTGQTYQSFFYGVELDGYINYDKVEEIAKIVKPQMIVCGFSAYARELDFKRFREIADSVGALLLGDVAHVAGLIVAGEYPNPFPHCHIVTTTTHKTLRGPRGGMILTNDEEIAKKIDKAVFPGMQGGPLMHVIAAKAVGFGENLKPEWKEYAKQVKANAKVLAKVLMARGYTLVSGGTDNHLILVSLLDKEFSGKDADRALGEAGITVNKNTVPGETRSPFVTSGVRIGSAALTARGMREKEFEFIATKIADVLDDVNNAAKHAEIKKEIAEFAKGFPVYTKAIF

SEQ ID NO: 3934 - DNA, 1248 bp, Geobacter sulfurreducens PCA
  CDS (1)..(1248): transl_table=11
atgtcgattctcgaaacctttgacccgcaggtagctgaggcgatccgccatgaaaccgaacggcaggagtacaacctggagttgatcgcttccgaaaactttgtttccgaggcggtactggaagcccagggctcggtgatgaccaataagtatgccgagggataccccggtaagcgctactatggtggatgccaccatgtggacgtggtggaaaatctcgctattgagcgggccaaggagcttttcggtgccgatcatgccaacgtccagccccattcgggctcccaggcaaatatggcggtctatttttcggtgctcaagcccggcgacaccattcttgggatgaatctgtcccacggcggccacctgacccacggcagccccgtgaacttctccggccgtttcttcaacgtggttccctacggcgtgtcccaggagaccgaaacgatcgacttcaatgaggtggagcgtcttgcccttgagcataagccgaagatgatagttgtgggggcaagcgcctatccccgaaccatcgattttgccgccttccgcatcattgccgataaggtcggcgcggttatcatggttgatatggctcacattgcgggcctggttgcggccggtctccatccgagccctgttccctacgctgaattcgtgaccaccactacccataagaccctcagaggtccccgcggcgggatgatcctgtgccgtgaggagtacgccaagacgctcaattccaacatcttccccggtatccagggggggccgctcatgcatgtcatcgcggccaaggccgttgccctcaaggaggccctccagcccgagttcaaagcgtatcaggcccagatcgtgaaaaatgccaaggcccttgccgacgagctggtaaagcgcgggttccggcttgtgtccggcggcaccgataaccatctgatgctggttaacctaaccggcaccgaactgaccggcaaggtggcggaagagtctctggataaggccggcatcacggtgaacaagaacacggtgcctttcgagacccgttcaccctttgtcacctccggtttccggatcggcactcccgcagccactacccacggtctcaaggaagctgaaatggccgacgtggcgggctttatcgcagaggccctggccaacgtggacaatgatgccaaactcgccgagattaaggggagggtcaatgtgcttatgaaacgcttccccctctatgctcaccgtctttcataa

SEQ ID NO: 3935 - protein, 415 aa, Geobacter sulfurreducens PCA
MSILETFDPQVAEAIRHETERQEYNLELIASENFVSEAVLEAQGSVMTNKYAEGYPGKRYYGGCHHVDVVENLAIERAKELFGADHANVQPHSGSQANMAVYFSVLKPGDTILGMNLSHGGHLTHGSPVNFSGRFFNVVPYGVSQETETIDFNEVERLALEHKPKMIVVGASAYPRTIDFAAFRIIADKVGAVIMVDMAHIAGLVAAGLHPSPVPYAEFVTTTTHKTLRGPRGGMILCREEYAKTLNSNIFPGIQGGPLMHVIAAKAVALKEALQPEFKAYQAQIVKNAKALADELVKRGFRLVSGGTDNHLMLVNLTGTELTGKVAEESLDKAGITVNKNTVPFETRSPFVTSGFRIGTPAATTHGLKEAEMADVAGFIAEALANVDNDAKLAEIKGRVNVLMKRFPLYAHRLS

SEQ ID NO: 3936 - DNA, 1410 bp, Ashbya gossypii ATCC 10895
  CDS (1)..(1410)
atgccataccacctatccgaatcgcacaagaagctcatctcctcgcacctgagcgagagcgacccagaggtggacgcgatcatcaaggatgaaattgacaggcaaaagcactcgattgtgctgattgcgtcggagaacttgacgtcgaccgccgtgttcgacgcgctaggaacgccgatgtgcaacaagtactcggagggctaccccggcgcgcgctactacggcgggaaccagcacatcgaccgcatggagctgctgtgccagcgccgcgcgctggaggcgttccacgtgacgccggaccgctggggcgtcaacgtgcagtcgctgtccgggtcgcccgcgaacctgcaggtgtaccaggcgctgatgaagccgcacgagcggctgatgggtctgcacctgcccgacggcgggcacctgtcgcacggctaccagacggagacgcgcaagatctccgcggtatcgacgtacttcgagtcgttcccgtaccgcgtggacccggagaccggcatcatcgactatgacacgctcgagaagaacgcggtgctgtaccggcccaagatccttgtggcgggcacctccgcgtactgccggctgatcgactacaagcggatgcgcgagatcgccgacaaggtcggtgcgtacctgatggtcgacatggcgcacatctcggggctggtcgccgcaggcgtcatcccctcgcccttcgagtacgccgacatcgtcaccaccaccacccacaagtcgctcagaggcccacggggagccatgatcttcttcaggagaggcgtgcgctccgtgcacccaaagaccggcgaggaggtaatgtacgacctcgagggccctatcaacttctccgtcttccccggccaccagggcggcccccacaaccacaccatctccgccctggccaccgcgctcaagcaggcgacgacccccgagttcagggagtaccaggagctcgtgttgaagaacgccaaggtcctggagaccgagttcaaaaagctcaactaccgcctcgtctccgacggcaccgactcccacatggtcctcgtctccttgcgcgagaagggcgtcgacggcgcccgcgtcgagcacgtctgcgagaagatcaacatcgccctcaacaagaactccatcccaggcgacaagtccgcgctcgtgcccggcggcgtccgcatcggcgcccccgccatgaccaccaggggcatgggcgaggaggacttcgcccgcatcgtcggctacatcaaccgtgctgtcgagatcgcccgttccatccagcagtcgctgcccaaggaggccaacaggctcaaggacttcaaggccaaggtcgagggcggcaccgacgagatagcacagctcgcccaggagatctacagctggactgaggagtaccctctgcctgtctaa

SEQ ID NO: 3937 - protein, 469 aa, Ashbya gossypii ATCC 10895
MPYHLSESHKKLISSHLSESDPEVDAIIKDEIDRQKHSIVLIASENLTSTAVFDALGTPMCNKYSEGYPGARYYGGNQHIDRMELLCQRRALEAFHVTPDRWGVNVQSLSGSPANLQVYQALMKPHERLMGLHLPDGGHLSHGYQTETRKISAVSTYFESFPYRVDPETGIIDYDTLEKNAVLYRPKILVAGTSAYCRLIDYKRMREIADKVGAYLMVDMAHISGLVAAGVIPSPFEYADIVTTTTHKSLRGPRGAMIFFRRGVRSVHPKTGEEVMYDLEGPINFSVFPGHQGGPHNHTISALATALKQATTPEFREYQELVLKNAKVLETEFKKLNYRLVSDGTDSHMVLVSLREKGVDGARVEHVCEKINIALNKNSIPGDKSALVPGGVRIGAPAMTTRGMGEEDFARIVGYINRAVEIARSIQQSLPKEANRLKDFKAKVEGGTDEIAQLAQEIYSWTEEYPLPV

SEQ ID NO: 3938 - DNA, 1494 bp, Ashbya gossypii ATCC 10895
  CDS (1)..(1494)
atgtttattcgtcggttgcataccagttcgcgaaggttaacatgcggcgaggctcttcgtgcgtgccagcaaacaggcgctagaagtgctaatggccagctgatgctgtcgcagcatgtacaggaattcgacccggagatgtacgatatattaactaaggaacgctcaagacagaagcgtagtatcactttgattccaagcgagaacttcacatcagtggctgttatgaacttgctcggaagtgaaatgcaaaacaagtactcggaagggtatccgggtcagcggtattatgggggtaaccagtacatcgatatggcagagtccctgtgccaaaagcgcgctctggagctatatgggctagatcccgccaaatggggcgtcaatgtacagtcattgtccggagcaccagcgaacctctatgcttactcagccattatggaggttggcgatcgcatgatgggtctagatcttcctcacggtggccatctgtcccacggttaccagctacaaaatggaaacaaaatttcgtacatctccaagtacttccagaccatggcgtaccgtgtggaccctgccacaggcttggtcgactatgataccctgtctgagacctcgaaactcttcagacctaaggtgattgttgctggtacatcagcatatgcgcgggtcctggattataagcggtttagggagattgccgatgcctgtggcgcgtatctcctctctgatatggcgcatgtttctggtttggttgcagctggtgtgcacccatctcccttcgagtactccgacattgtcaccactaccacacacaaatccctaagaggaccaagaggtgccatgattttctaccggaaaggcattagaaaggtgaccaagaagggaaccgagatcatgtatgacttggacaagcgcatcaacttctcggttttcccagctcaccagggcgggccacataaccataccatttccgcacttgccgtcgcgttgaagcaggctgctactccagagttcaagaactatcaaaccgctgtggtagagaatgccaaagtttttggcgaagaactaagtaagcgtggctttagtcttgtctccggaggaactgatacacatctgctattgatcgacttgtcccccatgggcattgacgggtctaggcttgaaactatactggaacgactaaatattgcggccaacaagaacaccatcccaggcgacaagtccgctctatatccttctggcctgagagtcggtacgcctgcaatgaccacccgtgggtttggcccggccgaatttggccgggttgcagcgtatatcaacgaggctgttaaactggcaattggcttaaagtcacaagagccagtagacgctaaggacgccaagaccaggttggctcacttcaaaagtttttgcgcagaatcggaacaggtaaccaagctggccaacgaggtggcagactgggttgcacagtaccctgtgccaggagaattgtaa

SEQ ID NO: 3939 - protein, 497 aa, Ashbya gossypii ATCC 10895
MFIRRLHTSSRRLTCGEALRACQQTGARSANGQLMLSQHVQEFDPEMYDILTKERSRQKRSITLIPSENFTSVAVMNLLGSEMQNKYSEGYPGQRYYGGNQYIDMAESLCQKRALELYGLDPAKWGVNVQSLSGAPANLYAYSAIMEVGDRMMGLDLPHGGHLSHGYQLQNGNKISYISKYFQTMAYRVDPATGLVDYDTLSETSKLFRPKVIVAGTSAYARVLDYKRFREIADACGAYLLSDMAHVSGLVAAGVHPSPFEYSDIVTTTTHKSLRGPRGAMIFYRKGIRKVTKKGTEIMYDLDKRINFSVFPAHQGGPHNHTISALAVALKQAATPEFKNYQTAVVENAKVFGEELSKRGFSLVSGGTDTHLLLIDLSPMGIDGSRLETILERLNIAANKNTIPGDKSALYPSGLRVGTPAMTTRGFGPAEFGRVAAYINEAVKLAIGLKSQEPVDAKDAKTRLAHFKSFCAESEQVTKLANEVADWVAQYPVPGEL

SEQ ID NO: 3940 - DNA, 1605 bp, Strongylocentrotus purpuratus
  CDS (1)..(1605)
atggagtcgccagtagaaaagaaggcaaagctgaataacggagacgaaatggctactgttaacggaaccaagacagtgatcaagacagcgatgaatggtgatgggagtctaaagacagtcaccaatggcaatggtgatgggagtctcaagaaagttagcaatggcaatggcgatgggagtctcaagacagtcactaatagtgatgggagtccttggtttggacaccagtcgttggaagagaatgacccggagatgtatgctatcatcttaaaggagaaggatcgtcaaaggaaaggcttagaactgattgcatcagagaacttcccaagcagggctgttctagaggctctcggctcctgtctgcaaaataaatactgcgagggataccctggaaatagatactatggcggtacgcagttctttgatgaaatggaacttctgactcagaagagagccttagcagcatttggtttgaaggaggaggaatggggcgtcaatgtccagccgtattcaggctctccagcaaactttgccgtctacactggagtgattggcccccatggtcgtatcatgggtctggatctaccggacggtggtcaccttacacatggattcatgacggctaagaagaagatctctgcaacgtccttgttctttgagtcaatgccttacagggtgaatcctaaaacaggcctcattgattatgaagctctagctgtaaacgccagattgttccgtccacaaatgatcattgcaggtatgagctgttatcctaggaatctagactacaaacgtttcaaggagatagcagtagagaatgatgcttatcttctagctgatatggctcacgtgagtggattagttgctgctggagttgtagctaatccttttgagtactgtgacatcgttacaagcacaacacacaagacacttagaggacctcgatcaggcatcatcttcttccgtagaggtgtccgtaaggttctcaagaatggcactgaggtgatgtatgaccttgagaaaccgatcaacgaagccgtcttccctggtcttcaaggtggaccccatatgcatgctgtaggaggcgttggtgtagccttattgcaggcttcacaaccggagtttaagctgtatgcccgggatgtcgtcacaaacgcacaagccatggctgaagaacttatgaagagaggttatactatttcttcaggtggaacggacactcatcttctactccttgacctccgacccctgggactggatggagctcgtggagagttcgtgcttgagcgtgtaggaatcgttctcaataagaacacatgtcctggggacaagagcgcactcaagcctggcggtctaaggatcggtacaccagctctcacgtcaagaaacttcaaggttactgatttcatgatggtggttgactacattgatagaggtctgaagttgactgcagaggcaaacaagaagtgttcaagtacaacccttcgtgacttcaaggcttacgtcacaagtgattcagacttccaatccaaacttgctgcccttgaaaaggaggtcgaatcttttgctgtaaggttcccattacctggtcatgaagttctgtaa

SEQ ID NO: 3941 - protein, 534 aa, Strongylocentrotus purpuratus
MESPVEKKAKLNNGDEMATVNGTKTVIKTAMNGDGSLKTVTNGNGDGSLKKVSNGNGDGSLKTVTNSDGSPWFGHQSLEENDPEMYAIILKEKDRQRKGLELIASENFPSRAVLEALGSCLQNKYCEGYPGNRYYGGTQFFDEMELLTQKRALAAFGLKEEEWGVNVQPYSGSPANFAVYTGVIGPHGRIMGLDLPDGGHLTHGFMTAKKKISATSLFFESMPYRVNPKTGLIDYEALAVNARLFRPQMIIAGMSCYPRNLDYKRFKEIAVENDAYLLADMAHVSGLVAAGVVANPFEYCDIVTSTTHKTLRGPRSGIIFFRRGVRKVLKNGTEVMYDLEKPINEAVFPGLQGGPHMHAVGGVGVALLQASQPEFKLYARDVVTNAQAMAEELMKRGYTISSGGTDTHLLLLDLRPLGLDGARGEFVLERVGIVLNKNTCPGDKSALKPGGLRIGTPALTSRNFKVTDFMMVVDYIDRGLKLTAEANKKCSSTTLRDFKAYVTSDSDFQSKLAALEKEVESFAVRFPLPGHEVL

SEQ ID NO: 3942 - DNA, 1416 bp, Aspergillus terreus NIH2624
  CDS (1)..(1416)
atggcctcctacgctctctccccggcccaccgggatcaaatggagaagtctctcgttgagactgaccctgagatcgctcagatcatggaaaaagaaatccagcgtcagcgcgagtccattgtcctgatcgcttcggagaacttcacctcccacgccgtcttcgacgctctgggatctcccatgtccaacaagtactccgagggttaccccggtgctcgttactatggtggcaaccagcacatcgatgccattgagctcacttgccaggctcgtgccctcaaggccttcaacctggaccccgccaagtggggtgtcaacgtccagtgtctctctggaagcccggccaacttgcaggtctaccaggcgctcatgcgcccccatgaccgcctcatgggtctggatctcccccacggtggccatctgtcccacggctaccagacccccgcccgcaagatctctgctgtctctacctacttcgagaccttcccctaccgtgtcaacctcgagaccggtatcatcgactacgataccctggaggccaacgctgagctctaccgccccaagtgcctggtcgccggtacctccgcctactgccgtctaattgactatgcccgcatgcgcaagatcgccgacaaggtcggtgcctacctcattgtcgatatggctcacatctccggtctgatcgccgccggtgtcatcccctctcccttcgagtacgccgatgtggtcactaccaccacccacaagtctctccgtggtccccgtggtgccatgatcttcttccgcaagggtgtccgtagcaccgaccccaagaccggcaaggacatcatgtacgacctggagggtcctatcaacttctccgtcttccctggtcaccagggtggtccccacaaccacaccatcaccgctctggctgtcgccctcaagcaggccgccacccctgagttcaagcagtaccaggagcaggtcatcaagaacgccaaggctcttgagactgagttcaaggccatgggccacaagctcgtctctgacggtaccgacagccacatggtcctcctggacctccggcccaagtccctcgatggtgcccgtgttgaggctgtcctcgagcagatcaacattgcctgcaacaagaactccatccctggcgacaagtctgccctcaccccctgcggtatccgtatcggtgcccccgccatgaccacccgtggcatgggcgaggaggactttaagcgcatcgcccactacatcgaccaggccatcaacatctgcaagcaggtccagggtgagctgcccaaggaggccaacaagctcaaggacttcaaggccaaggttgcctctgagaccgtgccggagatcctcaacctccgcaaggaggttgccgcctgggccagcaccttccctctccccgtctaa

SEQ ID NO: 3943 - protein, 471 aa, Aspergillus terreus NIH2624
MASYALSPAHRDQMEKSLVETDPEIAQIMEKEIQRQRESIVLIASENFTSHAVFDALGSPMSNKYSEGYPGARYYGGNQHIDAIELTCQARALKAFNLDPAKWGVNVQCLSGSPANLQVYQALMRPHDRLMGLDLPHGGHLSHGYQTPARKISAVSTYFETFPYRVNLETGIIDYDTLEANAELYRPKCLVAGTSAYCRLIDYARMRKIADKVGAYLIVDMAHISGLIAAGVIPSPFEYADVVTTTTHKSLRGPRGAMIFFRKGVRSTDPKTGKDIMYDLEGPINFSVFPGHQGGPHNHTITALAVALKQAATPEFKQYQEQVIKNAKALETEFKAMGHKLVSDGTDSHMVLLDLRPKSLDGARVEAVLEQINIACNKNSIPGDKSALTPCGIRIGAPAMTTRGMGEEDFKRIAHYIDQAINICKQVQGELPKEANKLKDFKAKVASETVPEILNLRKEVAAWASTFPLPV

SEQ ID NO: 3944 - DNA, 1644 bp, Aspergillus terreus NIH2624
  CDS (1)..(1644)
atgctcagccgttgcggtcgtcccgtctcccgcgtgctcccgcgtgtcggaagctctcccggagctatcgccctctcctcccgcatccagctcccctccattccccaatcccgcggccttgaatatgcgctgaccgttctcgcacagctcctctccgctcatctgaaggaggaggaccccacgatctacaacattctccaaaatgagaaaaaacgtcagaagcatttcatcaacctcattccctccgagaacttcacctcccaggccgtcctcgatgccctcggcagtgtgatgcaaaataagtactctgaaggataccccggagccagatactacggtggaaacgagtacatcgacgagtcggagcgtctctgccagcagcgcgcgctcgagactttccgtctcaaccccgaagagtggggtgtcaatgtccagcccctctccggttctcccgccaacctctatgccatctccgccctcctcaacacccatgaccgtctcatgggtctggatctcccccacggtggccatctgtcgcacggctaccagacccccaccaagaagatctccttcatctccaagtacttcgagaccttcccctaccgtctcgacgagtccaccggtcttatcgactacgacgccctggagaagaatgctctcctctaccgtcccaagctcatcatcgccggtacctccgcctacagtcgtctgatcgattacccccgtatgcgccagatcgccgacgccgctggcgcctacctcctcagcgacatggcccacatctccggtctcgtggccgccggcgttcttccctcacccttcaaccactccgacgtggtgactaccaccacccacaagtctctgcgcggaccccgtggcgccatgatcttctaccgcaagggtgtccgccggacggacaagaagggtaaccccgagatgtacgatctggagggccccatcaacgcctccgtcttcccgggccaccagggtggcccccacaaccacaccatcaccgcgctggccgtcgccctgaagcaggcccagtcgaccgagttcaagacctaccaggagaccgtcctggccaacgcgcaggccctcgccgaacgcctgggcagccccctcagcagtggcggtctgggatacaacatcgtctccggcggcaccgacaaccacctcgtgctggtggacctgaagaaccgcggtgtggacggtgctcgcgtcgagcgcgtgctcgagctgtgcggcgtcgccagcaacaagaacaccgtgcccggggacaagtccgcactcaagcccggcggtctgcgtctgggtacccccgccatgaccacccgtggcttccagcccgaagacttccgccgggtggcggacattgtcgatcgcgccgtcatcatcacccagaagctggacaaggccgccaaggagagcgccgccgccaagggcgtcaagaaccccaacaccgtcaaggccttcctcgactacgtcggcgagggcgaggagatctccgatatcgtcctcttgagacaggaggtcgaggactgggtgggttctgtcatgttcgggcgttatggccattttatgaatatgaggatctacccatgtggcaaagtccccatggtctttcgctgtgtttgggccttttag

SEQ ID NO: 3945 - protein, 547 aa, Aspergillus terreus NIH2624
MLSRCGRPVSRVLPRVGSSPGAIALSSRIQLPSIPQSRGLEYALTVLAQLLSAHLKEEDPTIYNILQNEKKRQKHFINLIPSENFTSQAVLDALGSVMQNKYSEGYPGARYYGGNEYIDESERLCQQRALETFRLNPEEWGVNVQPLSGSPANLYAISALLNTHDRLMGLDLPHGGHLSHGYQTPTKKISFISKYFETFPYRLDESTGLIDYDALEKNALLYRPKLIIAGTSAYSRLIDYPRMRQIADAAGAYLLSDMAHISGLVAAGVLPSPFNHSDVVTTTTHKSLRGPRGAMIFYRKGVRRTDKKGNPEMYDLEGPINASVFPGHQGGPHNHTITALAVALKQAQSTEFKTYQETVLANAQALAERLGSPLSSGGLGYNIVSGGTDNHLVLVDLKNRGVDGARVERVLELCGVASNKNTVPGDKSALKPGGLRLGTPAMTTRGFQPEDFRRVADIVDRAVIITQKLDKAAKESAAAKGVKNPNTVKAFLDYVGEGEEISDIVLLRQEVEDWVGSVMFGRYGHFMNMRIYPCGKVPMVFRCVWAF

SEQ ID NO: 3946 - DNA, 1428 bp, Chaetomium globosum CBS 148.51
  CDS (1)..(1428)
atggcgacctatgcgctccccgagtcgcacaagcagatgcttgagaagtctctgcttgactccgaccccgagaaacatgagattcagcggcaacgcgagtccatcatcctcatcgcctccgaaaatgtcacgtctcgtgccgtcttcgatgctcttggctcccccatgtccaacaagtactctgagggttaccccggcgctcggtactatggtggcaaccagcacattgacgagatcgagcttctttgccagaagcgtgccctcgaggccttcaacgtcgatggtgccaagtggggcgtcaacgtccagtgcttgagtggcagccctgccaaccttcaggtttaccaggccatcatgcctccccacggaaggctgatgggcctggacctcccccacggtggccatctcagccacggctaccaaactccccagcggaagatctccgctgtctcgacctacttcgagaccatgccctaccgggtcgacctcgagaccggcatcatcgactacgacatgctcgagaagaatgcccagctcttccgccccaagattctcgttgccggtacctcggcctactgccgtctgattgactaccagcgcatgcgcaagattgctgactcggttggcgcctacctggttgtcgacattgcccacatctccggcctggtttcctccggcgtcatcccgtcgcccttcgactacgctgatgtcgtcaccaccaccacccacaagtccctccgtggcccccgtggtgccatgatcttcttccgcaagggtgtccgctctgtcgatgccaagaccggcaaggagacactctatgatctggaggacaagatcaacttctccgtcttccctggacaccagggtggcccccacaaccacaccatcaccgcccttgccgtcgcgctcaagcaggctgccacccctgagtttaaggagtaccagaagaaggtggtcgccaacgccaaggctctcgagaacaagttcaaggagcttggccacaagctcgtctccgacggcaccgactcgcacatggtcctcgtcgacctccgccccttgtcccttgatggcgctcgcgtggaggccgtccttgagcagatcaacatcgcctgcaacaagaacagcgttcccggcgacaagagcgccctcacccccggcggtctgcgtatcggcaccccggccatgaccagccgtggtttcggcgaggccgacttcgagcgcgttgcttcctacatcgacgctagcatcaagctctgcaaggagatccagggcgccctgcccaaggaggccaacaagctcaaggacttccggttcaagattgctagcggcgaggttgcccgcatcaacgagctcaagaaggagatctcggactggtgccacaccttccccctccccgttgagggctggcgtatggacgccggcatctaa

SEQ ID NO: 3947 - protein, 475 aa, Chaetomium globosum CBS 148.51
MATYALPESHKQMLEKSLLDSDPEKHEIQRQRESIILIASENVTSRAVFDALGSPMSNKYSEGYPGARYYGGNQHIDEIELLCQKRALEAFNVDGAKWGVNVQCLSGSPANLQVYQAIMPPHGRLMGLDLPHGGHLSHGYQTPQRKISAVSTYFETMPYRVDLETGIIDYDMLEKNAQLFRPKILVAGTSAYCRLIDYQRMRKIADSVGAYLVVDIAHISGLVSSGVIPSPFDYADVVTTTTHKSLRGPRGAMIFFRKGVRSVDAKTGKETLYDLEDKINFSVFPGHQGGPHNHTITALAVALKQAATPEFKEYQKKVVANAKALENKFKELGHKLVSDGTDSHMVLVDLRPLSLDGARVEAVLEQINIACNKNSVPGDKSALTPGGLRIGTPAMTSRGFGEADFERVASYIDASIKLCKEIQGALPKEANKLKDFRFKIASGEVARINELKKEISDWCHTFPLPVEGWRMDAGI

SEQ ID NO: 3948 - DNA, 1587 bp, Coccidioides immitis RS
  CDS (1)..(1587)
atgtcggtcaatcgctgcggccgccaagctgcaaagctgctccggttatctggcgggtattcgagagtggcctgtgggctcagatggagtcatcccgcaagacgagttgctcaatggcagagcgttgcgtctgtccacactgatggccatcagaatatgctagcggagaaactcgagcaagctgatccaactgtttataagattatccagaatgaaaaaagcaggcagaaacattttatcaacctgatcccctcagagaacttcacctcccaggctgtcctcgatgcgcttggcagtgtgatgcaaaataaatattctgagggataccccggtgctcggtactacggtgggaacgaattcattgaccaagctgagcgcctctgccagcagcgcgctctgcaggcatttgggttgaacccagaagagtggggagtgaacgtccaacccctatctggatctcccgccaacttctacgcatattccgccgtcctccagccccacgatcgccttatgggcttggacctccctcacggaggtcacctttctcatggctaccaaactcccacgaaaaagatctccgcagtgtctaagtacttcgagacgcttccttatcgtctagatgaatctactggtctcatagattatgccaaactggaggatttggccacattgtaccgaccaaaactcattgttgcaggaacatccgcatacagcaggctgattgattatccccgcatgaaaaagattgctgacagcgttggagcatatctgctcagtgacatggcccatatttctgggttggttgctgctggcgtcattccatcgccattcccacagtcagatatcgtcacaactacgacacacaaatcgctccgagggccacgcggcgccatgatcttctaccggaagggtgtccgtaaacacgatgctaaaggaaatcctatcatgtatgatttggaaaaccccatcaatgccgccgtgttccctggccaccaaggtgggccccacaaccacacaattaccgcccttgccgttgctttgaaacaagcccacagcccagaattcaaaacataccagcaaagtgtattggaaaacgcaaaggccttggcagcccgcctcggtaactctacaaatagcggtggcttgggctacaatatcgtgtctggtggtaccgataaccatcttgttctcgtcgacctgaagaaccgtggcgtcgatggtgcacgcgtggagagagttctcgagctctgtggtgtggcaagtaacaagaacaccgtgccaggtgataagtctgcaatgaagcccggtggtctccgaatgggcacaccggccatgacttcccgtggctttggaccggaggacttctctcgcgttgctgatattgttgaccgcgctgtcatcatcacgcagaagcttgacaaagccgccagagctgaagcggaggccaagaatcggaagaaccccacgagcttgaaggcattcttcgaatacctcggacaaggagaggaggtttcggagattgtacaattaagaaaagaggttgaggactgggtgggaacattcagccttccgtggactgaggaatag

SEQ ID NO: 3949 - protein, 528 aa, Coccidioides immitis RS
MSVNRCGRQAAKLLRLSGGYSRVACGLRWSHPARRVAQWQSVASVHTDGHQNMLAEKLEQADPTVYKIIQNEKSRQKHFINLIPSENFTSQAVLDALGSVMQNKYSEGYPGARYYGGNEFIDQAERLCQQRALQAFGLNPEEWGVNVQPLSGSPANFYAYSAVLQPHDRLMGLDLPHGGHLSHGYQTPTKKISAVSKYFETLPYRLDESTGLIDYAKLEDLATLYRPKLIVAGTSAYSRLIDYPRMKKIADSVGAYLLSDMAHISGLVAAGVIPSPFPQSDIVTTTTHKSLRGPRGAMIFYRKGVRKHDAKGNPIMYDLENPINAAVFPGHQGGPHNHTITALAVALKQAHSPEFKTYQQSVLENAKALAARLGNSTNSGGLGYNIVSGGTDNHLVLVDLKNRGVDGARVERVLELCGVASNKNTVPGDKSAMKPGGLRMGTPAMTSRGFGPEDFSRVADIVDRAVIITQKLDKAARAEAEAKNRKNPTSLKAFFEYLGQGEEVSEIVQLRKEVEDWVGTFSLPWTEE

SEQ ID NO: 3950 - DNA, 1416 bp, Coccidioides immitis RS
  CDS (1)..(1416)
atgcctacatacgctctttcacaggcccacaaggaccaactcgagaagtctctcgtcgagactgatcctgaggtttctgagatcatgaaaagagagatccagcgccagagggagtcgatcgtcctcattgcctcggagaatgtcacttctcgtgctgtttttgatgccttagggtctcccatgtccaacaaatactctgagggctatccgggagctcgttactatggtggtaatcagcacatcgatgagatcgagattctgtgccagcagagagctctcaaagccttcaatttggatcccgagaaatggggtgtcaacgtgcagtgtctcagtggtagtcctgccaacctgcaagtctaccaggctctgatgaggcctcatgatagacttatgggcttggacttgccccacggaggtcatctgagtcacggataccaaactcctcagaagaagatctctgcagtctccacctactttgagactttcccctacagagttaaccttgacacgggcatcattgactacgacaccctcgaggccaatgctcagctgtaccgaccaaagtgccttgttgctggaacatcggcatactgccgtctcattgactatgcgcgcatgcgtaagatcgccgactccgttggagcttacttgattgtcgatatggctcatatttctggattgatcgccgccggcgtcatcccgtccccattcgagtacgctgatgtcgtcactaccaccactcacaagtctctccgtggtcccagaggagctatgatcttctttagaaagggcgtgcgaagtgttgaccccaagaccggcaaggagatcatgtacgatctcgagaaccctatcaacttctccgtcttccctggtcaccagggcggccctcacaaccacactattactgccttggctgttgctctcaaacaagctgctactccggaattcagacagtaccaggagcaggttgtgaagaacgccaaggccgtcgagaccgaattcaagcgtctcggctacaagctcgttgccgacggaaccgacagccacatggttctcttggatttgaggcccaaggctcttgatggcgctcgtgtcgaagctgtccttgaggctatcaacattgcttgcaacaagaactccattcccggagacaagtccgccttgaccccatgcggtatcagaatcggcgctccagccatgaccagccgtggcatgggtgaggaggacttcaagcgtatcaccggatacatcgaccgtgcaatcaacatctgcaaggacatccaggctggtcttcccaaggaggccaacaagctcaaggacttcaaggccaaggttgccaccggtaccgtcccggagatcgttgatctcaagaaggagatcagcgaatgggccagctctttccctcttccagtataa

SEQ ID NO: 3951 - protein, 471 aa, Coccidioides immitis RS
MPTYALSQAHKDQLEKSLVETDPEVSEIMKREIQRQRESIVLIASENVTSRAVFDALGSPMSNKYSEGYPGARYYGGNQHIDEIEILCQQRALKAFNLDPEKWGVNVQCLSGSPANLQVYQALMRPHDRLMGLDLPHGGHLSHGYQTPQKKISAVSTYFETFPYRVNLDTGIIDYDTLEANAQLYRPKCLVAGTSAYCRLIDYARMRKIADSVGAYLIVDMAHISGLIAAGVIPSPFEYADVVTTTTHKSLRGPRGAMIFFRKGVRSVDPKTGKEIMYDLENPINFSVFPGHQGGPHNHTITALAVALKQAATPEFRQYQEQVVKNAKAVETEFKRLGYKLVADGTDSHMVLLDLRPKALDGARVEAVLEAINIACNKNSIPGDKSALTPCGIRIGAPAMTSRGMGEEDFKRITGYIDRAINICKDIQAGLPKEANKLKDFKAKVATGTVPEIVDLKKEISEWASSFPLPV

SEQ ID NO: 3952 - DNA, 1614 bp, Neosartorya fischeri NRRL 181
  CDS (1)..(1614)
atgtctctgagtcgttgcggacgacaggcctcgcgcctcatcccgcggtctggaagctcttccagagctaccactgctatcaccaccgcccgccgtccgggcttccagcttcagactcccactgctgcatccaggaatgtgcaatggcgaagcgtatcctcatccagccgcgatggccagcaacatttgctctccgcatccctcgaggaggaagatcccactgtctacaacattctgcaaaaggagaaaaaacgccaaaagcatttcatcaacctcatcccctccgagaactttacgtcacaggccgttctcgatgcgctggggagtgtgatgcaaaacaaatattccgaaggataccccggtgcaagatactatggaggaaacgagttcatcgacgagtccgagagactgtgccagcagcgtgccctcgagacctttagactccaccccgaggaatggggtgtcaacgtacagcctctctccggttctcccgctaacctttatgccatatccgccgtcctcaacacacacgaccgtctgatgggcttggatctgccccatggtggccacctgtcgcacggttaccaaacccccaccaagaagatctctttcatctccaagtacttcgagaccctgccttaccgcctggatgaatccaccggcctcattgactacgatggagcggagaagctggctctgctctaccgacccaagctgatcatcgccggcacttcggcctacagccggcttatcgactacccccgcatgcgccagatcgctgacgccgctggtgcgtacctgctgagcgatatggcccacatttcgggcttagtagccgccggcgtgctgccttcgcccttccctcactccgacattgtgacaactacaacccacaagtctttgcgcggtcctcgcggtgccatgatcttctaccgcaagggcgtccgccggacagacaagaagggcaacaaggagatgtacgatctcgagaacctcatcaacgcgtcggttttccctggtcaccagggtggtcctcacaaccacaccatcaccgcgctgtccgtcgccttgaagcaggctcaaacgccagaattcaaggcctaccaggaaaccgttttggccaatgccaaggcgctgtcggaaagactgggtggcccaatcaacaatggcggtctcggctacaacatcgtgtcgggaggcaccgacaatcacctggtccttgtcgacctgaagaatcgcggcgtcgacggtgcccgtgtcgagcgtgtcctcgagctctgtggcgtcgccagcaacaagaacactgtccctggcgaccagtccgccctgaagcccggcggcctgcgtctgggaactcctgccatgaccactcgtggcttccagcctgaggacttccgtcgtgtcgctgacattgtcgaccgggccgtgatcatcacccagaaactggacaaggctgccaaggagagtgctgccgccaagggagtcaagaaccccaacaccgtcaaggccttcctcgactacgttggtgagggtgaggagatctccgagattgtgctgctgagaaaggaggtggaagactgggtgggcactttcagccttccttgggatgattaa

SEQ ID NO: 3953 - protein, 537 aa, Neosartorya fischeri NRRL 181
MSLSRCGRQASRLIPRSGSSSRATTAITTARRPGFQLQTPTAASRNVQWRSVSSSSRDGQQHLLSASLEEEDPTVYNILQKEKKRQKHFINLIPSENFTSQAVLDALGSVMQNKYSEGYPGARYYGGNEFIDESERLCQQRALETFRLHPEEWGVNVQPLSGSPANLYAISAVLNTHDRLMGLDLPHGGHLSHGYQTPTKKISFISKYFETLPYRLDESTGLIDYDGAEKLALLYRPKLIIAGTSAYSRLIDYPRMRQIADAAGAYLLSDMAHISGLVAAGVLPSPFPHSDIVTTTTHKSLRGPRGAMIFYRKGVRRTDKKGNKEMYDLENLINASVFPGHQGGPHNHTITALSVALKQAQTPEFKAYQETVLANAKALSERLGGPINNGGLGYNIVSGGTDNHLVLVDLKNRGVDGARVERVLELCGVASNKNTVPGDQSALKPGGLRLGTPAMTTRGFQPEDFRRVADIVDRAVIITQKLDKAAKESAAAKGVKNPNTVKAFLDYVGEGEEISEIVLLRKEVEDWVGTFSLPWDD

SEQ ID NO: 3954 - DNA, 1416 bp, Neosartorya fischeri NRRL 181
  CDS (1)..(1416)
atggccacctacgctttgtcgcaggctcaccgcgagcaaatggagaggtctctggtcgactccgaccctgagattgctcagatcatggaaaaagagatccagcgtcagcgcgagtccatcctcctgattgcctctgagaacgtcacttcccgtgccgttttcgatgctctcggctctcccatgagcaacaagtactccgagggttaccccggtgctcgttactacggtggtaaccagcacattgatgccattgagctcacctgccaggctcgtgccctgaaggctttcaacctcgaccccgagaagtggggtgtcaatgttcagtgcctcagtggtagccctgccaacctgcaggtctaccaggctctcatgcgcccccatgagcgtctcatgggtctggatcttccccacggaggtcacctgagtcacggttaccagactccttccagaaagatttccgctgtttctacctactttgagaccttcccctaccgtgtcaacactgagaccggcatcattgactacgataccctcgaggccaacgctgagctctaccgtcccaagtgcttggttgctggtacttctgcctactgccgtctcattgactacgcccgtatgcgcaagattgccgacaaggttggcgcctacctgatcgtcgacatggcccacatctccggtctaattgccgccggtgtcattccttctcccttcgagtacgccgatgtcgttaccaccaccacccacaagtctctccgtggtccccgtggtgccatgatcttcttccgcaagggcgtgcgtagcactgaccccaagaccggcaaggacatcatgtatgatcttgagggtcccatcaacttctccgtcttccctggtcaccagggtggtccccacaaccacaccatcactgcgttggctgttgccctcaagcaggccgccacccctgagttccgtcagtaccaggagcaggttatcaagaacgccaaggctcttgaggttgagttcaaggctctcggccacaagctcgtctctgacggtactgacagccacatggtcctgctggacctccgccccaagggtcttgacggtgctcgtgtcgaggctgtcctcgagcagatcaacattgcctgcaacaagaactccattcctggcgacaagtctgccctgaccccctgcggtatccgcattggtactcccgctatgaccagccgtggtatgagcgaggaggacttcaagcgcgtcgctcgctacatcgaccaggtcatcaacctttgcaagagcatccaggctgacctgcccaaggaggccaacaagctcaaggacttcaaggccaaggttgcctccgactctgttcccgagatcctcgctctccgcaaggaggtcgccgagtgggccagcacctaccccctgcctgtttaa

SEQ ID NO: 3955 - protein, 471 aa, Neosartorya fischeri NRRL 181
MATYALSQAHREQMERSLVDSDPEIAQIMEKEIQRQRESILLIASENVTSRAVFDALGSPMSNKYSEGYPGARYYGGNQHIDAIELTCQARALKAFNLDPEKWGVNVQCLSGSPANLQVYQALMRPHERLMGLDLPHGGHLSHGYQTPSRKISAVSTYFETFPYRVNTETGIIDYDTLEANAELYRPKCLVAGTSAYCRLIDYARMRKIADKVGAYLIVDMAHISGLIAAGVIPSPFEYADVVTTTTHKSLRGPRGAMIFFRKGVRSTDPKTGKDIMYDLEGPINFSVFPGHQGGPHNHTITALAVALKQAATPEFRQYQEQVIKNAKALEVEFKALGHKLVSDGTDSHMVLLDLRPKGLDGARVEAVLEQINIACNKNSIPGDKSALTPCGIRIGTPAMTSRGMSEEDFKRVARYIDQVINLCKSIQADLPKEANKLKDFKAKVASDSVPEILALRKEVAEWASTYPLPV

SEQ ID NO: 3956 - DNA, 1632 bp, Aspergillus clavatus NRRL 1
  CDS (1)..(1632)
atgtctctcagtcggtgcggaccccaggtctcgcgcctgctcccgaggtccggaaactccagagctatcaccaccaccaccatcaccactttctcccgccgtccaggccagcttcttcagacttccacacctgctgtgtgcagcaactctctgcaatggcgcagtgtgtcgcactcgagccgggagagccagcaacatttgctctccgcatccctcgaggaggaggaccccaccgtctacaacatcctgcagaaggagaaaaaacgtcaaaagcacttcatcaacctcatcccctccgagaacttcacatcgcaagccgtcctcgatgcgctcggaagtgtgatgcagaacaagtactcggaaggataccccggtgcccgatactatggaggaaacgagttcatcgatgagtccgagagactgtgccagcagcgtgccttggagaccttcagactcagccccgaggaatggggtgtcaacgtgcagccactgtccggatcgcccgccaacctctacgccatctccgccatcctcaacacccacgaccgtctgatgggcttggacctgccccatgggggtcacctgtcgcacggctaccaaacccccaccaagaagatctccttcatctccaagtacttcgagaccctaccctatcgtctggacgagtccaccggtctcatcgattacgatggtgccgagaagttggctctcctctaccgcccgaagctcatcatcgccgggacctcggcctacagccgtctgatcgattacccccgcatgcgccagattgccgatgccgccggcgcatacctcttaaatgacatggcccacatctcgggtctggtcgccgccggtgtcgtcccctcgcccttcccccactccgacatcgtcaccaccaccactcacaagtcgctgcgcggccctcggggcgccatgatcttctaccgcaagggtctccgccggacggacaagaagggcaacaaggagatgtatgatctcgagaaccccatcaatgcctccgtcttccccggacaccagggcggcccgcacaaccacaccatcaccgccttgtccgtcgccttgaagcaggcgcagacgcccgagttcaaggcctaccaggagaccgtgctggccaacgcccaggcgctggccgaccggctcggtgggcccatcaacaatggcggtctcggctacaacatcgtctccggcggtacggacaaccacctcgtcctggtggacctgaagaaccggggcgtggacggagcccgggtggagcgcgtgctggagctgtgcggcgtggccagcaacaagaataccgttcccggcgacaggtccgcgctgaagcccggcggtctgcgcatcggcacccctgccatgaccacccgcggcttccagcccgaggacttccgccgggtggccgacatcgtggaccgggccgtgatcatcacccagaagctggacaaggcggccaaggagagtgccacggccaagggggtcaagaaccccaacaccgtcaaggccttcctggactacgtcggcgagggcgaggaaatttccgagattgtgctcctacgccaggaggtggaagactgggtgggaacctttagccttccctgggatgaggaaaagtga

SEQ ID NO: 3957 - protein, 543 aa, Aspergillus clavatus NRRL 1
MSLSRCGPQVSRLLPRSGNSRAITTTTITTFSRRPGQLLQTSTPAVCSNSLQWRSVSHSSRESQQHLLSASLEEEDPTVYNILQKEKKRQKHFINLIPSENFTSQAVLDALGSVMQNKYSEGYPGARYYGGNEFIDESERLCQQRALETFRLSPEEWGVNVQPLSGSPANLYAISAILNTHDRLMGLDLPHGGHLSHGYQTPTKKISFISKYFETLPYRLDESTGLIDYDGAEKLALLYRPKLIIAGTSAYSRLIDYPRMRQIADAAGAYLLNDMAHISGLVAAGVVPSPFPHSDIVTTTTHKSLRGPRGAMIFYRKGLRRTDKKGNKEMYDLENPINASVFPGHQGGPHNHTITALSVALKQAQTPEFKAYQETVLANAQALADRLGGPINNGGLGYNIVSGGTDNHLVLVDLKNRGVDGARVERVLELCGVASNKNTVPGDRSALKPGGLRIGTPAMTTRGFQPEDFRRVADIVDRAVIITQKLDKAAKESATAKGVKNPNTVKAFLDYVGEGEEISEIVLLRQEVEDWVGTFSLPWDEEK

SEQ ID NO: 3958 - DNA, 1416 bp, Aspergillus clavatus NRRL 1
  CDS (1)..(1416)
atggccacatacgctctgtcgcagtcccaccgggagcaaatggagaagtctctggtcgactccgaccctgagatcgctcagatcatggaaaaagagatccagcgccagcgcgagtccattctgctgattgcctcggagaacgtcacctcccgtgccgtcttcgatgctcttggctctcccatgtgcaacaagtactcggagggttaccccggtgctcgttactatggtggtaaccagcacatcgatgccatcgagctcacctgccaggctcgtgccctcaaggctttcaacctcgaccccgccaagtggggcgtcaacgttcagtgcctcagtggtagccctgccaacctgcaggtctaccaggcactcatgcgccctcacgaccgtctgatgggtcttgatctcccccacggtggccacttgagccacggctaccagaccccctccagaaagatctctgccgtctccacctacttcgagaccttcccctaccgtgtcaacaccgagaccggcatcatcgactacgataccctggaggccaacgctgagctctaccgtcccaagtgcctggttgccggtacctctgcctactgccgtctcattgactacgcccgcatgcgcaagatcgctgacaaggtcggcgcctacctcgttgtcgacatggctcacatctccggtctcatcgccgcgggtgtcattccttctcccttcgagcacgccgatgttgtcaccaccaccacccacaagtctctccgtggtccccgtggtgccatgatcttcttccgcaagggtgtgcgcagcactgaccccaagaccggcaaggagatcatgtacgacctggagggccccatcaacttctccgtcttccccggccaccagggcggcccccacaaccacaccatcaccgctctggccgttgccctcaagcaggctgctacccctgagttccgccagtaccaggagcaggtcatcaagaacgccaaggccctcgaggaggagttcaagcagctcggccacaagctcgtctcggacggtactgacagccacatggtcctggtggatctccgcgccaagggtctggatggtgcccgtgttgaggctgttctcgagcagatcaacattgcttgcaacaagaactccatccccggtgacaagtctgctctgaccccttgcggtatccgtattggtgcccccgccatgaccagccgtggtatgggtgaggaggatttcaagcgtgtcgctcgctacatcgaccaggtcatcaacctctgcaagaccatccagggtgacctgcccaaggacgccaacaagctcaaggacttcaaggccaaggtcgcctccgagtccgtgcccgagatcctggccctccgcaaggaggttgccgagtgggccagcaccttccctctgcccgtttaa

SEQ ID NO: 3959 - protein, 471 aa, Aspergillus clavatus NRRL 1
MATYALSQSHREQMEKSLVDSDPEIAQIMEKEIQRQRESILLIASENVTSRAVFDALGSPMCNKYSEGYPGARYYGGNQHIDAIELTCQARALKAFNLDPAKWGVNVQCLSGSPANLQVYQALMRPHDRLMGLDLPHGGHLSHGYQTPSRKISAVSTYFETFPYRVNTETGIIDYDTLEANAELYRPKCLVAGTSAYCRLIDYARMRKIADKVGAYLVVDMAHISGLIAAGVIPSPFEHADVVTTTTHKSLRGPRGAMIFFRKGVRSTDPKTGKEIMYDLEGPINFSVFPGHQGGPHNHTITALAVALKQAATPEFRQYQEQVIKNAKALEEEFKQLGHKLVSDGTDSHMVLVDLRAKGLDGARVEAVLEQINIACNKNSIPGDKSALTPCGIRIGAPAMTSRGMGEEDFKRVARYIDQVINLCKTIQGDLPKDANKLKDFKAKVASESVPEILALRKEVAEWASTFPLPV

SEQ ID NO: 3960 - DNA, 1620 bp, Drosophila pseudoobscura pseudoobscura
  CDS (1)..(1620)
atgcagcgcataagccatcatctaacacaaaagctcgtgccaggccttagcagagacttgaacaccaaaacggttagcttttctcttcgccagcggcagcagccggtcagagcttttacacagaaattattgccggcagcgctgctaacgccatcatttccattcgcgatcagacgatattcggaaggcaaaaaaaccacaactttgggctcgaaaatggaggatcaaaaactgctgcaggccacgctggaggatagcgatccggagctggcgaatctcatcaagcaggagaaggagcgacagcgcgagggactcgaaatgattgccagcgagaatttcacttcggtggccgttctggagagtcttggctcctgcctgaccaacaagtactcggagggatatcccggcaagcggtactatggcggcaacgagttcattgaccgcatcgagctgctggcccagaagcgcggccgtgagctcttcaatctgaacgagaaggagtggggcgtgaatgtccagccatactcgggctccccggccaatatggccgcctatgtgggcgtctgtcgtccgcacgaccgcatcatgggcctggatctgcccgatggcggtcatctgacgcacggcttcttcacggccaccaaacggatctcggccacctcgatcttcttcgagagcatgccttacaaggtgaaccccgtgacgggcattattgactacgacaagctggccgaggcggccaaggccttcaagcctcagatcatcatcgccggcatctcgtgctattctcgcctgctcgactacggacgcttccgtcagatctgcgacgatgtgggcgcctacctaatggccgatatggctcatgtggcaggtctggttgctgccggtcacataccatcgcccttccagtatgccgacattgtgaccacaaccacgcacaaaaccttgcgcggaccacgcgccggcgtcatcttttttcgcaagggtttgcgcagcgtaaagcccaacgggaccaaggtgctgtacgatctggaggatcgcatcaatcaggccgtcttcccatcgctgcagggcggaccacacaacaatgccatagccggcattgccaccgccttcaagcaggccaagtccgcggaattcaagagctaccagtcccatgtgatcaagaacgccaaggtgctgtgcgaggccctgattgccaagggctatcaggtggccaccggcggcactgatgtccatctcgtgctggtggatgtccgaaacgtcggccttaccggtgccagggcggagctaattctcgaggaggtaggaattgcctgcaacaagaacaccgttcccggggacaagtccgccatgaatccgtccggtatccgtttgggcacaccggcgttgaccacgcgcggccttgtcgagaaggacatcgaacaggtggtgaacttcatacatgcggccctcaagatcggcaccgaggccgcccaggctgcgggcagcaacaagatggtcgactttcagacggtcatcgctgaagatgcaacgatcaaggccaagatcgagcagatccacaagtgcgtgatcgcattcagcaaacagttccctctgcccggcctcaagactttttaa

SEQ ID NO: 3961 - protein, 539 aa, Drosophila pseudoobscura pseudoobscura
MQRISHHLTQKLVPGLSRDLNTKTVSFSLRQRQQPVRAFTQKLLPAALLTPSFPFAIRRYSEGKKTTTLGSKMEDQKLLQATLEDSDPELANLIKQEKERQREGLEMIASENFTSVAVLESLGSCLTNKYSEGYPGKRYYGGNEFIDRIELLAQKRGRELFNLNEKEWGVNVQPYSGSPANMAAYVGVCRPHDRIMGLDLPDGGHLTHGFFTATKRISATSIFFESMPYKVNPVTGIIDYDKLAEAAKAFKPQIIIAGISCYSRLLDYGRFRQICDDVGAYLMADMAHVAGLVAAGHIPSPFQYADIVTTTTHKTLRGPRAGVIFFRKGLRSVKPNGTKVLYDLEDRINQAVFPSLQGGPHNNAIAGIATAFKQAKSAEFKSYQSHVIKNAKVLCEALIAKGYQVATGGTDVHLVLVDVRNVGLTGARAELILEEVGIACNKNTVPGDKSAMNPSGIRLGTPALTTRGLVEKDIEQVVNFIHAALKIGTEAAQAAGSNKMVDFQTVIAEDATIKAKIEQIHKCVIAFSKQFPLPGLKTF

SEQ ID NO: 3962 - DNA, 1413 bp, Pichia stipitis CBS 6054
  CDS (1)..(1413): transl_table=12
atgccttacgccctctctgaatcgcacaagcaattggtctcgggccatttagccgaaaccgacccggaagtcgaccaaatcatcaaggatgaaatcgacagacaaagacactccatcgtgctcattgcttctgaaaacttcaccaccaccgccgttttcgacgccttgggaacgcccatgtgtaacaagtactccgaaggttaccctggtgccagatactacggtggtaacgaacacatcgacagaatcgagctcttgtgtcaggaaagagccttgaaggccttcaacgtcactgctgacaagtggggtgtcaatgttcagaccctttctggttctccagccaacttgcaagtctaccaggctatcatgaagccccacgaaagattgatgggtttggacttgcctcacggtggtcatttgtcccacggctaccaaaccgactccagaaagatctcggctgtttctacttattttgaaaccatgccatacagagttgatttggcaactggtttgatcgactacgacatgttggaaaagactgctgtcttgttcagaccaaaggttttggttgctggtacatctgcttactgtagattgatagactacaagagaatgagagaaatcgccgacaaggtcggtgcctaccttgttgtcgacatggcccacatctctggtttggtcgctgctggagtaattccatctcctttcgaatatgctgacatcgtcaccaccaccacccacaagtcgttgagaggcccaagaggtgccatgatcttcttcagaagaggtgtcagatctgtcaaccctaagactggtcaagaaatcttgtacgacttggaaaacccaatcaacttctcggttttccctggccaccaaggtggtccacacaaccacaccatcactgctttagctactgccttgaagcaagctgctactcctgagttcagagagtaccaggaacaggtattgaagaacgccaaggtgttggaaactgaattccttgctaagggataccagttggtttcccacggtaccgactcgcacatggtgttggtttccttgaaggataagaacatcgacggtgccagagttgaaaccgtctgtgaaaagatcaacattgccttgaacaagaactccattccaggcgacaaatctgccttagttccaggtggtgtaagaatcggtgctcctgccatgaccaccagaggcttgggtgaagaagacttcaagaagatcgtcacctacattgactttgccgtcaactacgccaaggagcttcaagcttcgttgccaaaggaagccaacaaattgaaggacttcaagagcgccgtgttgaacggtgacgacgaaaagttgaaggctgtaaaggccgaaatctcgcaatgggctggcgaattcccattgtctgtttaa

SEQ ID NO: 3963 - protein, 470 aa, Pichia stipitis CBS 6054
MPYALSESHKQLVSGHLAETDPEVDQIIKDEIDRQRHSIVLIASENFTTTAVFDALGTPMCNKYSEGYPGARYYGGNEHIDRIELLCQERALKAFNVTADKWGVNVQTLSGSPANLQVYQAIMKPHERLMGLDLPHGGHLSHGYQTDSRKISAVSTYFETMPYRVDLATGLIDYDMLEKTAVLFRPKVLVAGTSAYCRLIDYKRMREIADKVGAYLVVDMAHISGLVAAGVIPSPFEYADIVTTTTHKSLRGPRGAMIFFRRGVRSVNPKTGQEILYDLENPINFSVFPGHQGGPHNHTITALATALKQAATPEFREYQEQVLKNAKVLETEFLAKGYQLVSHGTDSHMVLVSLKDKNIDGARVETVCEKINIALNKNSIPGDKSALVPGGVRIGAPAMTTRGLGEEDFKKIVTYIDFAVNYAKELQASLPKEANKLKDFKSAVLNGDDEKLKAVKAEISQWAGEFPLSV

SEQ ID NO: 3964 - DNA, 1479 bp, Pichia stipitis CBS 6054
  CDS (1)..(1479): transl_table=12
atgctctcttctgtctccagtaccttgagggtacaatccaagagattgcccgttgcaattgccagaagctatgctctttcagcccacgctcaggcactcatctccaagccagttcaggaagtagacccggaaatggctgagatcttgtctcaagagaaagccagacaaaagaactccatcacgttgattccttccgaaaacttcacctcaaaggccgtgatggaccttttgggatcggaaatgcagaacaagtactccgaaggctacccaggcgagagatactatggtggaaatgaaattatcgacaaagctgagtcattatgtcagaaaagagcccttgaagcttttgacttagaccctgcacagtggggtgtcaatgtccagccattatcgggtgctccagccaacttgtacgcctactcagctgttcttgaagtcggagacagaattatgggtttagaccttcctcatgggggccatttgtcgcatggttaccaaaccccgtccgctaagatctcgtacatctccaagtacttccagacgatgccatatcgtttgaacgaggagacaggtatcatcgactacgacaccttggaggccaacgccattttgttcagacccaagatcattgttgctggtgcttctgcctactctcgtgtcattgactaccgtaggatgcgcgcaattgccgataaggtcggagcctacttgttgagcgatatggcccacatttccggtttggtctcggccggagtgactgattctccattcccatactcggatatcgtcaccacgaccacgcacaagtcattgagaggtcccagaggtgccatgatctttttcagaaagggtatcagaaaggtaaccaaaaaaggtaaagaaatcccctacgacttggaaagaaagatcaacttctctgtctttcctgcccaccagggtggtccacacaaccacaccatctctgcgttggctgtggccttgaagcagacacaataccctgaatacaaagagtaccagagagatgtcgttgccaatgctagctcatttgccaatgctcttgtgtcacgtggtttcaaattggtctctgatggaactgatacccacttgattcttgttgacttgagatccaaaaatattgacggagctcgtgttgaggctgttttggagagagccaatatcgctgccaacaaaaatactgttccaggcgataagtcggctttattcccctcgggcttgagagttggaaccccagcaatgactaccagaggcttcggccctgaggaatttgacaaggttgccaagttgatagaaaaggctgtagaaatctcgcttgccttgaaagctcaggaacaaggttctgtccctaaggagttgttggcttcgttcaagaagttggctgattctagtgctgaagtcaaggctttggccaaagaagtatcggactgggcctcgaccttccctgtcccaggcgacttgtaa

SEQ ID NO: 3965 - protein, 492 aa, Pichia stipitis CBS 6054
MLSSVSSTLRVQSKRLPVAIARSYALSAHAQALISKPVQEVDPEMAEILSQEKARQKNSITLIPSENFTSKAVMDLLGSEMQNKYSEGYPGERYYGGNEIIDKAESLCQKRALEAFDLDPAQWGVNVQPLSGAPANLYAYSAVLEVGDRIMGLDLPHGGHLSHGYQTPSAKISYISKYFQTMPYRLNEETGIIDYDTLEANAILFRPKIIVAGASAYSRVIDYRRMRAIADKVGAYLLSDMAHISGLVSAGVTDSPFPYSDIVTTTTHKSLRGPRGAMIFFRKGIRKVTKKGKEIPYDLERKINFSVFPAHQGGPHNHTISALAVALKQTQYPEYKEYQRDVVANASSFANALVSRGFKLVSDGTDTHLILVDLRSKNIDGARVEAVLERANIAANKNTVPGDKSALFPSGLRVGTPAMTTRGFGPEEFDKVAKLIEKAVEISLALKAQEQGSVPKELLASFKKLADSSAEVKALAKEVSDWASTFPVPGDL

SEQ ID NO: 3966 - DNA, 1605 bp, Aspergillus niger CBS 513.88
  CDS (1)..(1605)
atgttgagtcgctgtggacgtcaggcctcgcgcctgatcctgcgcacggcaagctccgctattcggtcgactgccatccctctccagcttcgtcctgcggcagcttctcctttgcgcctgccgggacaaggccgtagcgtgtcctcctcgacccgtgaaggacagcagactctgctctccgcacccctcgaggagtccgaccccgccatctatgacattctccagaaggagaaaaaacgtcagcagcatttcatcaacctcatcccatccgagaacttcacatcgcaagctgtccttgatgcgctgggcagtgtcatgcaaaataaatactcggagggataccccggtgccagatactacggtggaaacgaacacattgacgcctctgagcggctgtgccagcagcgtgcgctcgagacttttggccttaaccccgaagaatggggtgtgaacgtgcaaccgctgtccggctcgcccgctaacctctatgccatttccgccatcctcaacacccacgaccgcttgatgggcctggacctgccccacggcggtcacctgtcccacggctaccagacccccaccaagaagatttcgttcatctcgaaatacttcgaaacgctaccctaccggctagatgagtcgaccggtatcattgactacgacgccctggagaagcaggcgcttctctaccggcccaagctcatcatcgccggtacctcggcctacagccgcttgattgactaccctcgtatgcggcagatcgcagacgccgccggcgcatacttgttgagcgacatggcccacatctccggtctcgtggctgcgggtgtcctcccgtcgcccttcgcccattcggatgtggtgaccaccacgacccacaagtcgctgcggggtccccgcggcgcgatgatattcttccgcaagggtgttcgccggacggacaagaagggtaacccggagatgtatgatctagagggcccgatcaacgcgtccgtgttcccgggtcaccagggtggccctcacaaccatactatcaccgccttggctgtggcgctgaagcaggcgcaatcgcctgagttcaagacctaccagcagacagtgctggccaatgcgcaggccttggcagagcgtcttggtaacccgcttagcagtggaggcctgggatacaacatcgtttccggcggcaccgacaaccacctggtgctggtggatctgaagaaccgcggagtggacggcgcgcgcgtcgagcgggtgctggagctgtgcggtgtggccagcaacaagaacacggtgccgggcgacaagtcggccctgaagcccggtggtctgcgtctgggcacgccggccatgacgacgcgaggcttccagccggaggacttccgccgcgtcgcagacattgtggaccgggcggtgattatcacacagaagttggacaaggcagccaaggagagtgcggccgcaaagggtgtgaagaacccgaacacggtcaaggcgttcttggactatgtgcgcgagggcgaggagattccggagattgtgctgctacgacaggaggtggaggactgggcggggacgttcagtctgccctgggctaaggatgagtag

SEQ ID NO: 3967 - protein, 534 aa, Aspergillus niger CBS 513.88
MLSRCGRQASRLILRTASSAIRSTAIPLQLRPAAASPLRLPGQGRSVSSSTREGQQTLLSAPLEESDPAIYDILQKEKKRQQHFINLIPSENFTSQAVLDALGSVMQNKYSEGYPGARYYGGNEHIDASERLCQQRALETFGLNPEEWGVNVQPLSGSPANLYAISAILNTHDRLMGLDLPHGGHLSHGYQTPTKKISFISKYFETLPYRLDESTGIIDYDALEKQALLYRPKLIIAGTSAYSRLIDYPRMRQIADAAGAYLLSDMAHISGLVAAGVLPSPFAHSDVVTTTTHKSLRGPRGAMIFFRKGVRRTDKKGNPEMYDLEGPINASVFPGHQGGPHNHTITALAVALKQAQSPEFKTYQQTVLANAQALAERLGNPLSSGGLGYNIVSGGTDNHLVLVDLKNRGVDGARVERVLELCGVASNKNTVPGDKSALKPGGLRLGTPAMTTRGFQPEDFRRVADIVDRAVIITQKLDKAAKESAAAKGVKNPNTVKAFLDYVREGEEIPEIVLLRQEVEDWAGTFSLPWAKDE

SEQ ID NO: 3968 - DNA, 1416 bp, Aspergillus niger CBS 513.88
  CDS (1)..(1416)
atggctacctacgctctctctccggctcaccggaaccaaatggaggtgtccctcgtggacagcgatcctgagatcgctcagatcatggagaaggaaatccaacgtcagcgcgaatccatcgtcctgatcgcctcggagaacttcacctcccacgctgtcttcgatgctctgggttcccccatgagcaacaagtactccgagggttaccccggcgctcgctactacggtggcaaccagcacatcgatgccatcgagcttacctgccaggctcgtgccctcaaggctttcaacctggaccccgccaagtggggcgtcaacgttcagtgcctcagtggtagccctgccaacctgcaggtctaccaggccctcatgcgccctcacgaccgtctcatgggtcttgacctcccccacggtggtcacttgagtcacggttaccagactcccgccagaaagatctctgctgtctctacctacttcgagaccttcccctaccgtgtcaaccttgagaccggtatcattgactacgatcaactcgaggccaacgctgagctctaccgccccaagtgcttggtcgctggtacctccgcctactgccgcctgatcgactacgctcgcatgcgcaagatcgctgacaaggtcggcgcctacctcattgtcgacatggctcacatctctggtctgattgccgccggtgtcatcccctcccccttcgagtacgccgatgttgtcaccaccaccacccacaagtccctccgtggtccccgtggtgccatgatcttcttccgcaagggtgtccgcagcactgaccccaagaccggcaaggacatcatgtatgaccttgagggccccatcaacttctctgtcttccctggtcaccagggtggtccccacaaccacaccatcactgctctggctgttgcccttaagcaggttgatacccccgagttcaagcagtaccagcagcaggtcatcaagaacgccaaggccctcgaggaggagttcaaggctctcggtcacaagctcgtctctgacggcactgacagccacatggtccttgtcgacctccgcaacaagagcctggacggtgctcgtgtcgaggctgtcctcgagcagatcaacattgcttgcaacaagaactccatccccggtgacaagtctgctctgaccccctgcggtatccgtatcggtgcccccgccatgaccacccgtggtatgggtgaggaggacttcaagcgcattgcccgctacatcgaccagtccatcaacctctgcaagaaggtccagagcgagcttcccaaggaggccaacaagctcaaggacttcaaggctaaggttgcctccgagaccgtccctgagatcctcagcctccgcaaggaggtcgctgagtgggccagcaccttccccctccccgtctaa

SEQ ID NO: 3969 - protein, 471 aa, Aspergillus niger CBS 513.88
MATYALSPAHRNQMEVSLVDSDPEIAQIMEKEIQRQRESIVLIASENFTSHAVFDALGSPMSNKYSEGYPGARYYGGNQHIDAIELTCQARALKAFNLDPAKWGVNVQCLSGSPANLQVYQALMRPHDRLMGLDLPHGGHLSHGYQTPARKISAVSTYFETFPYRVNLETGIIDYDQLEANAELYRPKCLVAGTSAYCRLIDYARMRKIADKVGAYLIVDMAHISGLIAAGVIPSPFEYADVVTTTTHKSLRGPRGAMIFFRKGVRSTDPKTGKDIMYDLEGPINFSVFPGHQGGPHNHTITALAVALKQVDTPEFKQYQQQVIKNAKALEEEFKALGHKLVSDGTDSHMVLVDLRNKSLDGARVEAVLEQINIACNKNSIPGDKSALTPCGIRIGAPAMTTRGMGEEDFKRIARYIDQSINLCKKVQSELPKEANKLKDFKAKVASETVPEILSLRKEVAEWASTFPLPV

SEQ ID NO: 3970 - DNA, 1551 bp, Magnaporthe grisea 70-15
  CDS (1)..(1551)
atgtcattaccggcaatgaggcaggcggcttcgagggcgctgaggatgcgtgggcccgtgggccggcacgtcaggatggtgtcgacggcttcgcatgagagccagcagaggctgctctcctcgcacctgcaaaccgcagacccggccatgtacgatattgtcgagaaggagaagcagaggcagaagcactacatcaacctcattccgtcggaaaacttcacatcccaggccgtgctggatgctttaggaagcccgatgcagaacaagtattccgagggttaccccggggcgaggtattacggcggtaacgagttcatcgatcaatccgagaggctatgccagcaaagagcattggagacttttggtttggatgacaagcagtggggagtgaacgtgcaagctctctctggcgcccccgccaacttgtacgtatactcggccctcatgggcgtccacgaccgcatgatgggtctagacctgcctcacggcggccatctttcccacggataccagacgccgaccaagaagatctcgttcatctcaaagtactttgagacggtcccctaccggctggacgagtcgaccggctacatagactacgacaagctggaggagctggcacacatctaccgtcccaagatcatcgttgcgggcacctcggcctacagtcggtttatcgactacaagcgcatgcgtgagatctgcgacaaggtcaacgcatacatgctggccgacatggcacacatctcgggtatggtcgcggccaaggtcatcccgggaccttttggctacgccgacattgtgaccacgaccacccacaagtctctgaggggccctcgcggtgccatgatcttcttcaggaagggcgtgcgttcgacgaaccccaagaccaaggctgaggtcatgtacgaccttgagaaccccatcaaccagtccgtcttccccggtcaccagggcggacctcacaaccacaccattgcggccctggccgtggcgctcaagcaggcgcagatgcccgagttccgcgcgtaccaggagcaggtcctcgtcaacgccaaggcttttgcccgccgtctgggtgaggccaagggcaacggcggcggtctgggctacaagatcgtctcgggcggcacggacaaccacctggtcctggcggacctcaagccgcagggcatcgacggcgcccgcgtcgagcgcgtgctggagctggtcggcatcgccgccaacaagaacacggttccgggcgacaagtcggccctgaccccgggaggtctgcgcatgggaacgcccgccatgacgacgcgcggcttcggcgaagacgactttgtgcgcgtcgccgacattgtggaccgggcggtgaccatcgccgtgagggttgacaaggcggccaggaaggcggccgaggccaagggcgagaagagccccggcaagctcaagaacttcttggagtacctgggcaacggcgagacggagagcgagattgtgcagctcaggagcgaggtttccgactgggttgggacataccctctgccgtgggatgtgaagccttga

SEQ ID NO: 3971 - protein, 516 aa, Magnaporthe grisea 70-15
MSLPAMRQAASRALRMRGPVGRHVRMVSTASHESQQRLLSSHLQTADPAMYDIVEKEKQRQKHYINLIPSENFTSQAVLDALGSPMQNKYSEGYPGARYYGGNEFIDQSERLCQQRALETFGLDDKQWGVNVQALSGAPANLYVYSALMGVHDRMMGLDLPHGGHLSHGYQTPTKKISFISKYFETVPYRLDESTGYIDYDKLEELAHIYRPKIIVAGTSAYSRFIDYKRMREICDKVNAYMLADMAHISGMVAAKVIPGPFGYADIVTTTTHKSLRGPRGAMIFFRKGVRSTNPKTKAEVMYDLENPINQSVFPGHQGGPHNHTIAALAVALKQAQMPEFRAYQEQVLVNAKAFARRLGEAKGNGGGLGYKIVSGGTDNHLVLADLKPQGIDGARVERVLELVGIAANKNTVPGDKSALTPGGLRMGTPAMTTRGFGEDDFVRVADIVDRAVTIAVRVDKAARKAAEAKGEKSPGKLKNFLEYLGNGETESEIVQLRSEVSDWVGTYPLPWDVKP

SEQ ID NO: 3972 - DNA, 1395 bp, Ostreococcus lucimarinus CCE9901
  CDS (1)..(1395)
atgaatcgcgtcttccccgaagcgctcgcgccgctgaagagcgcggacaaggagatgtacgatctgattcaactcgaaaagcgccggcaaatcggtggcatcgagctcatcgcgagcgagaatttcacgtccgcgccggtgatggaagcgctgggaagcgcgttgacgaataaatactcggaagggttgccgggggcgaggtattacggtgggaacgaggtgatcgatcgagtggagacgctgtgccagaggcgagcgttggcggcgtatcgcctggacgagaaggaatggggggtgaacgtgcagccgtacagtggatcgccggcgaatatggcggtgtacacggcgttgttgaacccgcacgatcgaatcatgggattggatctgccgagcggtggacacctgacgcacggatattacaactcaaacgggaagaagatttcggcgacgtcaattttctttgaatctttgccgtacaaggtggacccgaagactgggtacatcgattacgataagctcgaagaaaaggcgatggatttccgaccgaagatgatcgtttgcggtggttcggcgtacgcgagagattgggattacgcacgtttccgggaaattgccgacaagtgcggggcgatgttgatgatggatatggcgcacatctccggtttggttgccgcggaagaacaagcacaaccgttcgaatactgtgacatcgtgacgacgacgacgcacaagtctcttcgcggtccgcgttcggggatgattttcttccgccgcggcgtcaacgcgaagacgggcaaggattacaactacgaatcgcgcatcaacatggccgtctttccagcgctgcaaggcggtccgcacaaccaccaaatcggcgcgttggcggtcgcgctcaagtatgcgcaaacccctgagttcaagacgtacatcaagcaagttaaggcgaacgccagagcgttgggcgaaacgttggtgtccaagggctacaacctcgtcactggcggtacggataaccacttggtgctttgggatttgcgcccgctcggtttgactgggagcaagatggaatacctgtgcgatcttttgcacattactttgaacaagaatgcggtgttcggcgacgcaagtgcgctttctccgggtggcgtgcgcatcggcgcccctgcgatgacgtctcgcggtctcgtggagtcggactttgtgcaaatcgccgaattcctctcccgcgccgccgatttgtgcttagaagtgcaaaagagccatggaaagatgctcaaagactggaagaaaggtctcgataacaaccccaaggtggccgccatgcgcgacgaagtcgaggcgttcgcctccgccttcgaaatgccggcttttacgaaggagtcgatcgacatttaa

SEQ ID NO: 3973 - protein, 464 aa, Ostreococcus lucimarinus CCE9901
MNRVFPEALAPLKSADKEMYDLIQLEKRRQIGGIELIASENFTSAPVMEALGSALTNKYSEGLPGARYYGGNEVIDRVETLCQRRALAAYRLDEKEWGVNVQPYSGSPANMAVYTALLNPHDRIMGLDLPSGGHLTHGYYNSNGKKISATSIFFESLPYKVDPKTGYIDYDKLEEKAMDFRPKMIVCGGSAYARDWDYARFREIADKCGAMLMMDMAHISGLVAAEEQAQPFEYCDIVTTTTHKSLRGPRSGMIFFRRGVNAKTGKDYNYESRINMAVFPALQGGPHNHQIGALAVALKYAQTPEFKTYIKQVKANARALGETLVSKGYNLVTGGTDNHLVLWDLRPLGLTGSKMEYLCDLLHITLNKNAVFGDASALSPGGVRIGAPAMTSRGLVESDFVQIAEFLSRAADLCLEVQKSHGKMLKDWKKGLDNNPKVAAMRDEVEAFASAFEMPAFTKESIDI

SEQ ID NO: 3974 - DNA, 1368 bp, Ostreococcus lucimarinus CCE9901
  CDS (1)..(1368)
atgacgcgaagcgccaagccggcgccgttcgaggacgaaggcgtggagacgctggacgcggaactgtactcgattctgttgaaggaaaagaagcgacaaagacttggattggagctcatcgcgagcgaaaactttacgtccaaggcggtgatggaggtcaatgggtcgtgcttgacgaacaaatactcggaaggcttgccgggacagcggtattacggtgggaacgagttcatcgacgagacggagcgcttgtgccaaaaccgtgcgttgagcgcgtatcgattgaacccggcggaatggggtgtgaatgtgcaagtgctttctggttctccggcgaacttttgcgtgtacacggcgatgttgcaaccgcatgaacgcatcatgggtttggacttgccgcacggcggtcacctcacgcacgggttttacacgccgaagaagaagatctccgccacgtccgtgtactttgaatccatgccgtaccgtttgaacgaagccactggattggtcgattacgacaagctcgaggagaatgcgatgttgttccgaccgaagatgatcatcgccggcgcctcggcgtacgctcgtaattttgattacaagcgcatgcgcgagatttgcgacaatgtcggcgcgtacctgatggctgacatggcgcacatctctggtctggtcgccgcgaaactcgcggacgatccgttcgagtacgctgacatcgtcaccacgaccacgcacaagtctcttcgaggtccgcgtgggggtatgatcttttacaagaaagagtacgagcaagccatcaactcggcggttttccctggtctccaaggtggtccgcacaaccacactatcggcgcgttggccgtggcgttgaagcaagctcaaactccgggcttcgtgaagtatcaagagcaagtcatcaagaactgcgccgccatggccaaccgcttgatggaactcggctacacgctcgtctccggcggcacggacaaccacttgatcttgtgcgacttgcgcccgaagggcgtggatggtgcgcgcgtggagaagatccttgacttgtctcacatcaccctcaataagaactcagttccgggcgacacctcggcgctgattcctggtggcattcgtattggaagccctgcgatgacgacgcgcggcatgacggaggctgacttcgttcgcgtcgccaatcttatcgaccaaggcgtccaaatcgcgatcgatatcaagaagaagacggagggtggtaagttgaaggacttcaaggcgtacttggacgaaaacgacgtcccggccatcgccgcgctcagagcagaggttgaagccttcgccgatgagttccacatgccgggaggcccggtcatttaa

SEQ ID NO: 3975 - protein, 455 aa, Ostreococcus lucimarinus CCE9901
MTRSAKPAPFEDEGVETLDAELYSILLKEKKRQRLGLELIASENFTSKAVMEVNGSCLTNKYSEGLPGQRYYGGNEFIDETERLCQNRALSAYRLNPAEWGVNVQVLSGSPANFCVYTAMLQPHERIMGLDLPHGGHLTHGFYTPKKKISATSVYFESMPYRLNEATGLVDYDKLEENAMLFRPKMIIAGASAYARNFDYKRMREICDNVGAYLMADMAHISGLVAAKLADDPFEYADIVTTTTHKSLRGPRGGMIFYKKEYEQAINSAVFPGLQGGPHNHTIGALAVALKQAQTPGFVKYQEQVIKNCAAMANRLMELGYTLVSGGTDNHLILCDLRPKGVDGARVEKILDLSHITLNKNSVPGDTSALIPGGIRIGSPAMTTRGMTEADFVRVANLIDQGVQIAIDIKKKTEGGKLKDFKAYLDENDVPAIAALRAEVEAFADEFHMPGGPVI

SEQ ID NO: 3976 - DNA, 1578 bp, Ostreococcus lucimarinus CCE9901
  CDS (1)..(1578)
atgcacgccgccgcccgaacgatcgcgcgacgatgcgcgcgacgcgcgtccgtctccacgtccgtcgcgcgtcaattcgcggccgtgccgcagggcgcaggaggcgcgacgagcaacgcggatgaatacgcgaagattcgcgcgacgcacgcgaacgtgacgtggccggaaattatcaataaaccgatcgaagaggtcgatccggagatgtcggagatcatcgagcgggaaaaggcgcgacagtggaaggggctcgaactcattccttcggaaaatttcgtgtcgaagtcggtgatggacgccgtggggtccatcatgacgaacaagtactctgagggttacccgggagcgcgttattacggtggtaacgagttcatcgatatggctgagtcgatgtgccaagagcgcgcgctcaaggcgttcaacctggacccggcgaagtggggggtgaacgtgcagtcgctctcgggttcgcccgcgaacttccaggtgtacaccgcgcttttgcagccgcacgataagatcatggcgctcgatttgccgcacggtggtcacttgtcgcacggttaccaaaccgacacgaagaagattagtgcgacgtccatctttttcacttccgtgccgtaccgcttggacgagtccaccggcttgattgactacgacgcgtgcgaaaagactgcggctttggttcgcccgaagttgatcgtcgccggtgcgtccgcctacgcgcgtttgtacgattacccgcgaatgcgcaagattgcggacaactccaacgccatcttgctcgccgacatggcgcacatttccggtttggtcgccgcgggcgaggtgccgtcgccgttcgactacgccgatgtcgtcaccacgaccacgcacaagtctctccgaggcccgcgtggtgcgatgatcttctaccgtaagggtgagaagggcaaggataagaaaggcaacccgatcatgtacgatttggagagcaagattgatttcgccgtcttcccgggtctccaagggggtccccacaaccacaccatcgccggtctcgcggtggcgctcaagcaagcggctagcccggagttcaaggcttaccaaaggcaagtcatgagcaacatgcaagccatggcgaaccgcctcgtccaacacggtatcaagcttgtgtctgggggtacggataaccatctcgctttgctcgacttgcgcccgatgggcgtcgacggctctcgcgtcgagcgcgtcttggagctcgcgcacatcgcgtgcaacaagaacaccgtcccgggtgacgtttctgccatggtgccgggtggtttgcgcatcggtactccggcgttgacctcgcgtggtttcaccgagaaggattttgaacaagtcgccgagttcatcgttcgcggcatcaaaatcgcgcaagacgtcaagtccaagtctgaaggcaccaagctcaaggacttccgcgccgcgctcgagtccaaggagtggccggagctcacgcaactgaccaaggatgtcgaggagttcgccacgcaattcccgaccatcggtttcgagaaggctgaaggcaagtacacgcagtctctgtga

SEQ ID NO: 3977 - protein, 525 aa, Ostreococcus lucimarinus CCE9901
MHAAARTIARRCARRASVSTSVARQFAAVPQGAGGATSNADEYAKIRATHANVTWPEIINKPIEEVDPEMSEIIEREKARQWKGLELIPSENFVSKSVMDAVGSIMTNKYSEGYPGARYYGGNEFIDMAESMCQERALKAFNLDPAKWGVNVQSLSGSPANFQVYTALLQPHDKIMALDLPHGGHLSHGYQTDTKKISATSIFFTSVPYRLDESTGLIDYDACEKTAALVRPKLIVAGASAYARLYDYPRMRKIADNSNAILLADMAHISGLVAAGEVPSPFDYADVVTTTTHKSLRGPRGAMIFYRKGEKGKDKKGNPIMYDLESKIDFAVFPGLQGGPHNHTIAGLAVALKQAASPEFKAYQRQVMSNMQAMANRLVQHGIKLVSGGTDNHLALLDLRPMGVDGSRVERVLELAHIACNKNTVPGDVSAMVPGGLRIGTPALTSRGFTEKDFEQVAEFIVRGIKIAQDVKSKSEGTKLKDFRAALESKEWPELTQLTKDVEEFATQFPTIGFEKAEGKYTQSL

SEQ ID NO: 3978 - DNA, 1455 bp, Pichia guilliermondii ATCC 6260
  CDS (1)..(1455): transl_table=12
atgttaaatcgtacacttttacaggttgccaggccattggtggcccgccggtatgttggaagtgcccaggcattgatgagcaagcctgtttctgaggtggacccagaaatggcgcaaattttggcagaagagcgcaacagacaaaagacttcggtgacgttaattccatcggaaaacttcacttcgaaggccgtgatggacctcttgggttcggagatgcagaacaagtactccgaggggtatcctggcgagagatattacggaggaaatgaaatcattgacaaggctgagtcattgtgccagaagagagcacttgaatcttttggtttagatccagaaaaatggggtgtcaacgtccagtcgttgtcgggagccccagcgaacttgtacgcctactctgctgttttggaagtgggtgacagaatcatgggtttggatcttcctcatggtggacatctttctcacggttaccagacccccaccaccaaaatctcgtacatttccaaatatttccaaaccatgccttatcgtttgaacgaggagactggtttgatcgactatgatacacttgaagctaatgctcaattgtttcgtcccaaggtaatcgttgctggtgcttcggcgtacctgagagtaattgactatgccagaatgagaaaaattgctgacaaggttggagcctatttgttaagtgatatggctcatatttccggtttggtagccgctggggtgacagcctctccttttgagtactcggacatcgttaccaccactacccacaagtccttgcgtggacctcgtggtgcgatgattttcttcagaaaaggtgtcagaaaggtcaccaagaagggaaaggaagtgttgtacgatttggagcgcaagatcaacttttccgtgttcccagctcatcaaggtggaccccacaaccacaccatctctgctttggctgttgccttgaaacaaacccagtacccagaatacaagcaatatcagcaaaatgtcattgataacgcttcgtctttcgcccaggcgttgcaatctcgtggtttcaagcttgtttctggcggaaccgacacccatttggtattaattgacttgagctcgaagaacattgacggtgctcgtgttgaaggattgttggaaaggatcaacattgctgccaacaaaaacaccgttcccggcgacaagtctgccctcttcccatctgggttgcgtgtgggaaccccagccatgactacccgtggatttggccaagctgagttcgagaaggttgcagagtacattaatcgtgctgttgaactttcgcttaaacttaagggccaggagcaaggttctgtaccaaaagagttgttggcatctttcaagcagttggcagacgagagcaccgaagtcaaggagttggccgaggaggttgcaaaatgggttggacagtatccagttccaggcgatttgtag

SEQ ID NO: 3979 - protein, 484 aa, Pichia guilliermondii ATCC 6260
MLNRTLLQVARPLVARRYVGSAQALMSKPVSEVDPEMAQILAEERNRQKTSVTLIPSENFTSKAVMDLLGSEMQNKYSEGYPGERYYGGNEIIDKAESLCQKRALESFGLDPEKWGVNVQSLSGAPANLYAYSAVLEVGDRIMGLDLPHGGHLSHGYQTPTTKISYISKYFQTMPYRLNEETGLIDYDTLEANAQLFRPKVIVAGASAYLRVIDYARMRKIADKVGAYLLSDMAHISGLVAAGVTASPFEYSDIVTTTTHKSLRGPRGAMIFFRKGVRKVTKKGKEVLYDLERKINFSVFPAHQGGPHNHTISALAVALKQTQYPEYKQYQQNVIDNASSFAQALQSRGFKLVSGGTDTHLVLIDLSSKNIDGARVEGLLERINIAANKNTVPGDKSALFPSGLRVGTPAMTTRGFGQAEFEKVAEYINRAVELSLKLKGQEQGSVPKELLASFKQLADESTEVKELAEEVAKWVGQYPVPGDL

SEQ ID NO: 3980 - DNA, 1410 bp, Pichia guilliermondii ATCC 6260
  CDS (1)..(1410): transl_table=12
atgccttacgccttgtctaaatcacaccaagaattggtagagggacacttaaaggacattgatcctgaagtcgatcaaatcatcaaagctgaaatcgatagacaaaagcactctatcgttttaattgcctctgagaatttcacttcgagggctgtcttcgatgctttgggaacgcctatgtctaacaagtactccgagggttaccctggtgctagatactatggtggtaatgagcagattgacaaaatggaaattttgtgtcaagagagagccttgaaggctttcaatgtaactcctgataaatggggtgttaatgtccaaactttgtccggctccccagccaatttacaagtttaccaggctttgatgaagcctcacgaaagattgatgggcttggacttgccccatggtggacacttgtctcatggatatcaaactgattccagaaagatctctgccgtttctacatacttcgagaccatgccttacagagttgacttgagtactggcttgattgactacgatatgttggaaaagacagcaattttgtacagacccaagattttggtagctggtacttctgcctactgtcgtttgatcgactacaagaagatgagggagattgccgacaaagtcggagcttacttggttgttgatatggcacatatctctggtcttattgcagctggtgtgattccatcacctttcgaatacgcagatgtggttacaaccactactcacaagtctttgagaggtcccagaggtgcaatgatctttttcagaagaggagttagatctgttaatccaaagaccggtcaagaaattatgtacgacttggaaaaccctatcaacttctcagtcttccctggtcatcaaggtggaccacacaaccacaccattgccgctttggcaaccgcgttgaagcaggcagctaccccagagttcaagcagtatcaagaattggttttgaagaatgcgaaggtcttggagcaggaattcaaagctaaaggatacaatttggtttctgatggaactgattctcatatggtcttggtgtctttgaaagacaagcaaatcgatggtgccagagttgagaccatttgtgagaacatcaacattgccttgaacaagaactctattcctggcgataagtccgcgttggttcctggtggagtgagaattggtgctggtgctatgaccagtagaggcatgggtgaggaggagttcaaaaagattgtgtcctatattgatttcgcagtttcctatgctaaggagttgcaatcaagcttaccaaaagaagccaacaaattgaaggacttcaaagcaaaagcatcggaaggcgatccaaaattggactctgttaagcaagaaatctatgcttgggttggcgatttcccacttgctgtttag

SEQ ID NO: 3981 - protein, 469 aa, Pichia guilliermondii ATCC 6260
MPYALSKSHQELVEGHLKDIDPEVDQIIKAEIDRQKHSIVLIASENFTSRAVFDALGTPMSNKYSEGYPGARYYGGNEQIDKMEILCQERALKAFNVTPDKWGVNVQTLSGSPANLQVYQALMKPHERLMGLDLPHGGHLSHGYQTDSRKISAVSTYFETMPYRVDLSTGLIDYDMLEKTAILYRPKILVAGTSAYCRLIDYKKMREIADKVGAYLVVDMAHISGLIAAGVIPSPFEYADVVTTTTHKSLRGPRGAMIFFRRGVRSVNPKTGQEIMYDLENPINFSVFPGHQGGPHNHTIAALATALKQAATPEFKQYQELVLKNAKVLEQEFKAKGYNLVSDGTDSHMVLVSLKDKQIDGARVETICENINIALNKNSIPGDKSALVPGGVRIGAGAMTSRGMGEEEFKKIVSYIDFAVSYAKELQSSLPKEANKLKDFKAKASEGDPKLDSVKQEIYAWVGDFPLAV

SEQ ID NO: 3982 - DNA, 1461 bp, Lodderomyces elongisporus NRRL YB-4239
  CDS (1)..(1461)
atgttatcaagatcattcaaatcagcaagaacagtaagggcattgatgtcctctactgcttctgtgcgttcattatcgttcctttcgaaacctgttagcgaagtagacccagagatggctagcattttagaacaagaaagaactagacaacgtcaatgtatcagtttgattccctcggaaaactatacttccaagtcagtaatggagttgcttggatcggagatgcaaaacaagtatagtgaggggtatccaggtgagcgttactatggaggtaacaagattatcgataaatctgagtcgctttgtcaacaacgtgcattggaagcttttggattgaaccctgaagagtggggagttaatgtgcaagcattatccggtgcaccagcaaatctttacacatactcagcaatcttggaagttggtgacagaatcatgggattggacttgcctcatggtggacatttgtctcatggttaccaaaccaatactgcaaagatttcatttatttcaaagtatttccaaaccatgccatacagattggatgagctgactggattaattgattatgacacattggaaaagaatgctcaattgtttagaccaaaagttattgttgctggtgcatctgcatactcaagagtgattgactacaaaagaatgaaacaaattgccgacaaggttggtgcttacttgatgtctgatatggcgcacatttctggattggtttctgcaggagttactgagtccccattcccatactccgatattgttaccaccaccacacacaaatcattaaggggaccaagaggtgccatgatctttttcagaaaaggtattagaaaagttaccaaaaagggtaaagaaatcccatatgagttggaaagaaagattaacttttcagttttccctggtcatcaaggtggtccacacaaccacaccatttccgccttggctgttgccttgaagcaatgtgcagagccagactacaaaaaataccaacaagctgttgttgacaatgcaaagcattttgccaatgaattacaaagcaaaggctttgacttggtgtcaggtggtacagatacccatttgatcttggttgacttgagctcgaaaaagattgatggtgcacgtgtagaagctgttttggaaagagccaatattgctgcaaataaaaacaccatccctggtgacactagtgctctcttcccctctggtttaagagttggaacacccgcaatgaccactagaggatttggttttgatgaatttaccaaagttgctgagctcatggacgaagctgttgcaattgcaattgaattgaaggcaaaggaacaaggtaaagtgcctaaagaattgttggcttcattcaaaaaattggctgacgaaagtgacaaagtcaaggagcttggacaaagagtagctgagtggacaacaacatacccagtgccaggtgatttgtaa

SEQ ID NO: 3983 - protein, 486 aa, Lodderomyces elongisporus NRRL YB-4239
MLSRSFKSARTVRALMSSTASVRSLSFLSKPVSEVDPEMASILEQERTRQRQCISLIPSENYTSKSVMELLGSEMQNKYSEGYPGERYYGGNKIIDKSESLCQQRALEAFGLNPEEWGVNVQALSGAPANLYTYSAILEVGDRIMGLDLPHGGHLSHGYQTNTAKISFISKYFQTMPYRLDELTGLIDYDTLEKNAQLFRPKVIVAGASAYSRVIDYKRMKQIADKVGAYLMSDMAHISGLVSAGVTESPFPYSDIVTTTTHKSLRGPRGAMIFFRKGIRKVTKKGKEIPYELERKINFSVFPGHQGGPHNHTISALAVALKQCAEPDYKKYQQAVVDNAKHFANELQSKGFDLVSGGTDTHLILVDLSSKKIDGARVEAVLERANIAANKNTIPGDTSALFPSGLRVGTPAMTTRGFGFDEFTKVAELMDEAVAIAIELKAKEQGKVPKELLASFKKLADESDKVKELGQRVAEWTTTYPVPGDL

SEQ ID NO: 3984 - DNA, 1413 bp, Lodderomyces elongisporus NRRL YB-4239
  CDS (1)..(1413)
atgtcttacgcattatcacaaactcacagacaattaactgaaggtcacttgaaagagacagacccagaagtcgatcaaatcattaaggatgaagttgacagacaaaagcattcgattgtgttgattgcttctgagaatttcaccaccactgccgtatttgatgccttaggaactccaatgtccaacaaatactctgaaggctacccaggtgcaagatactatggtggtaatgagcacattgacagaatggaaaccttgtgtcaagaaagagccttgaaggcatttcacttgaccccggaccgttggggtgttaatgtgcaaacattaagtggatctccggccaacttgcaagtttaccaagccatcatgaaaccgcacgagagattaatgggtttggatttacctcacggtggtcacttgagtcacggttatcaaactgattctaggaaaatcagtgctgtttcaacttattttgagaccatgccatacagagttgatttggaaactggtttgattgactacgatatgttggaaaagactgctgtattgtacagacccaaggttttggttgctggtaccagtgcttattgtagattgattgactataagagaatgagggagattgcggacaaggttggtgcttaccttgttgttgatatggcccacatttcaggtttggttgctgctggtgttatcccttcaccatttgaatatgccgatattgttaccactactacacacaagtcattgaggggtccaagaggtgccatgatcttctttagaagaggtgtgagatccaccaacccaaagactggacaagagatttactatgatttggaaaacccaataaacttttctgtattccccggtcatcaaggtggtccccataaccacaccattgctgctttgtcgactgctttgaagcaagctgctactcctgagttcaaagagtaccaagaacaagtgttgaagaatgccaaggctttggaagaagcattcactgccaagggatacaaattggttagcaatggtaccgactcgcacatggttttggtttctcttaaggacaaacaaattgatggtgctagagtggaaactgtttgcgaaaagatcaatatcgcattgaataaaaattctattccaggtgacaaatcggctttagtcccgggtggtgttagaattggtgcaccagctatgactactagaggtttaggcgaagaggatttcaagagaattgttgactacattgactttgcagtcaatttcgccaaaaagactcaagaatctttgcccaaggatgctaacaaattgaaggatttcaaaaacaagattttgaacgaatcagacgagactttggaaaaggtcaaactggagattagcgaatgggctggctctttcccattagctgtttag

SEQ ID NO: 3985 - protein, 470 aa, Lodderomyces elongisporus NRRL YB-4239
MSYALSQTHRQLTEGHLKETDPEVDQIIKDEVDRQKHSIVLIASENFTTTAVFDALGTPMSNKYSEGYPGARYYGGNEHIDRMETLCQERALKAFHLTPDRWGVNVQTLSGSPANLQVYQAIMKPHERLMGLDLPHGGHLSHGYQTDSRKISAVSTYFETMPYRVDLETGLIDYDMLEKTAVLYRPKVLVAGTSAYCRLIDYKRMREIADKVGAYLVVDMAHISGLVAAGVIPSPFEYADIVTTTTHKSLRGPRGAMIFFRRGVRSTNPKTGQEIYYDLENPINFSVFPGHQGGPHNHTIAALSTALKQAATPEFKEYQEQVLKNAKALEEAFTAKGYKLVSNGTDSHMVLVSLKDKQIDGARVETVCEKINIALNKNSIPGDKSALVPGGVRIGAPAMTTRGLGEEDFKRIVDYIDFAVNFAKKTQESLPKDANKLKDFKNKILNESDETLEKVKLEISEWAGSFPLAV

SEQ ID NO: 3986 - DNA, 1560 bp, Ajellomyces capsulatus NAm1
  CDS (1)..(1560)
atgtcgctcaatatttgctccagacgggccagcatccgacttcttctcttgcgggggagctccagaactcgtctcggccgtgcgaatcatcccgacggattgctgccaatcctttgccgtggcatctcctctgctcactctgatggacatcaaaagatcctatccgagaaccttaaagaggccgaccctgccgtttacaaaattatccagcaagagaaaagccgccaaaaacattttatcaatttgatcccatccgagaacttcacgtcccaggcggttctcgatgccttgggaagtgtcatgcagaataaatattcagaaggctaccctggagcacggtattatggtggtaaccagttcattgaccaggcggagagactttgtcagcagcgggctctcaaggcgttcggtctcaaggaagaggaatggggggtcaacgtgcaaccactctctggttctccggcgaacctctacgcatattccgcactccttaatacccatgaccgtatcatgggcttggatcttccccacggcggccatctttcccacggatatcaaaccccaacgaagaaaatttccgctgtgtctaaatatttcgagacactcccatataggttagatgaatcaaccggcctcatcgactatgacaaactagcagacttggcccagctctatcgaccaaagctcatcattgccggcacatccgcatatagcagactcatcgattacccgcgcatgcgcaaaattgctgatagcgtcggtgcttacttactctgtgatatggcccatatttccggattagttgctgctggcgttataccctcgccatttgtacactcggacgtcgttacaactacaacccataaatccctccgaggaccccgtggcgccatgattttcttccgcaagggagtccgccacaccgacgccaagggcaacccagtgatgtatgacctcgagaaccccatcaatgcgtccgttttccccggtcaccagggcgggccccacaaccacaccatcagcgcgctcgccgtagccctgcagcaggcgaccaccccagaattcaaaacataccaagaaaccgttcttgagaacgccaaagcactggcggaccggcttggcaagcccaccaacagtggcgggctgggctacaacatcgtttccggcggcacagacaaccatcttgtgctcgtcgatctgaagaaccgcggcgtggacggggcgcgtgtggagcgggtgcttgaactgtgcggcgtggcgagcaacaaaaacaccgtgcccggtgataagtctgcgatgaaacccggcggcctacgaatcgggacaccggcgatgacatcgcgtggcttcgggccagaggactttgtgcgagttgcggacatcgtcgaccgtgcggtgacgattacgcagaaactggataagaccgccaaagcggatgcggaggcaaagaagaagaagaaccctggcagcgtgaaagcgttcctggagtatctgggcgaaggacaggcgatccctgagatcacgacattgagacaggaggttgaggattggtgcccatga

SEQ ID NO: 3987 - protein, 519 aa, Ajellomyces capsulatus NAm1
MSLNICSRRASIRLLLLRGSSRTRLGRANHPDGLLPILCRGISSAHSDGHQKILSENLKEADPAVYKIIQQEKSRQKHFINLIPSENFTSQAVLDALGSVMQNKYSEGYPGARYYGGNQFIDQAERLCQQRALKAFGLKEEEWGVNVQPLSGSPANLYAYSALLNTHDRIMGLDLPHGGHLSHGYQTPTKKISAVSKYFETLPYRLDESTGLIDYDKLADLAQLYRPKLIIAGTSAYSRLIDYPRMRKIADSVGAYLLCDMAHISGLVAAGVIPSPFVHSDVVTTTTHKSLRGPRGAMIFFRKGVRHTDAKGNPVMYDLENPINASVFPGHQGGPHNHTISALAVALQQATTPEFKTYQETVLENAKALADRLGKPTNSGGLGYNIVSGGTDNHLVLVDLKNRGVDGARVERVLELCGVASNKNTVPGDKSAMKPGGLRIGTPAMTSRGFGPEDFVRVADIVDRAVTITQKLDKTAKADAEAKKKKNPGSVKAFLEYLGEGQAIPEITTLRQEVEDWCP

SEQ ID NO: 3988 - DNA, 1434 bp, Botryotinia fuckeliana B05.10
  CDS (1)..(1434)
atgtcttctacatacgccctcccaaagtctcaccaagagatgttggaaaagtctttggttgagactgatcctgagatcgctgagatcatgaaactcgagatccaacgtcagcgtgaatcgattattcttattgcctccgagaatgttacctcccgtgccgttttcgatgctttgggatcacccatgtcaaacaaatactctgagggatacccaggtgccagatactatggtggaaaccagcacattgactctattgagttgacctgccaagctcgtgctctcaaggcattcaacttggattccgagaaatggggtgtcaatgttcaatgcttgtctggttccccagcaaacctccaagtttaccaagctatcatgagacctcatgacagactcatgggtcttgatctcccacacggtggccatttgtcccacggttaccaaaccccccagagaaaaatctctgccgtatcaacatactttgagaccttcccataccgtgtcaacttggagactggtatcattgactatgatcaactcgaggccaacgctttgatgtacagaccaaaggttctcgttgctggaacatctgcttactgccgtcttatcgattacgcccgtatgcgcaagatcgctgatctcgttggtgcttacctcgttgttgatatggctcacatctctggtttgatcgccgctggtgtcatcccaagtcctttcgagcatgctgatatcgttaccaccacaacccacaagtctctccgtggtcctcgtggtgccatgatcttcttccgcaagggtgtccgcaagactgatgccaagactggaaaggagaccctctacgaccttgaaggcccaatcaacttctccgtcttcccaggtcaccaaggtggaccacacaaccacaccatcacagctcttgctgttgcccttaagcaagccacaactgatgacttcaagaaataccaacagcaagttgttgacaatgctaaagctctcgagaatgagttcaagcaattgggctacaagcttgtagctgacggtactgactcacacatggttctcctcgatctcagagcacaagcacttgacggtgcccgtgttgaggctgtcttggagcaaatcaacattgcttgcaacaagaactctatcccaggtgacaagtctgctttgaccccttgcggtatccgtattggtaccccagctatgaccagtcgtggattcggtactgaggacttcaagagagttgcatcatacattgatcaaagcatcaagatctgcaaggaagttcaagctgctctgccaaagagtgacaacaagctcaaggacttcaaggctaaggtcgccggtggtgaagttgagaagatcaatgaattaagaaaggagattgctgagtgggccagcagcttccctctcccagttgagggctggagagagtaa

SEQ ID NO: 3989 - protein, 477 aa, Botryotinia fuckeliana B05.10
MSSTYALPKSHQEMLEKSLVETDPEIAEIMKLEIQRQRESIILIASENVTSRAVFDALGSPMSNKYSEGYPGARYYGGNQHIDSIELTCQARALKAFNLDSEKWGVNVQCLSGSPANLQVYQAIMRPHDRLMGLDLPHGGHLSHGYQTPQRKISAVSTYFETFPYRVNLETGIIDYDQLEANALMYRPKVLVAGTSAYCRLIDYARMRKIADLVGAYLVVDMAHISGLIAAGVIPSPFEHADIVTTTTHKSLRGPRGAMIFFRKGVRKTDAKTGKETLYDLEGPINFSVFPGHQGGPHNHTITALAVALKQATTDDFKKYQQQVVDNAKALENEFKQLGYKLVADGTDSHMVLLDLRAQALDGARVEAVLEQINIACNKNSIPGDKSALTPCGIRIGTPAMTSRGFGTEDFKRVASYIDQSIKICKEVQAALPKSDNKLKDFKAKVAGGEVEKINELRKEIAEWASSFPLPVEGWRE

SEQ ID NO: 3990 - DNA, 1551 bp, Botryotinia fuckeliana B05.10
  CDS (1)..(1551)
atgtcgctctttaaaggagcctcaagaactgtgttcagggctactactgcgcaaagagcagcagcttcaatatgtggcgcgagaagagcggcgagtagtagtcgaatgactatggaaagtcaacaaaagttactctcggcagatcttgaacatgcagatccagcagtcttcagcattctccaaaatgaaaaacggaggcagaagcacttcatcaaccttattccttccgaaaacttcacatcacaagctgttttagatgcattgggaagtgttatgcaaagatatccaggggcaagatattatggaggaaatgagttcatcgacgaatccgaaaggttatgccaaagtcgtgctctacagacttttggtttgaaagagtcggaatggggtgtcaatgttcaaccactgtctggttctcccgcaaatctctacgcatattccgctctcgccaatacacatgacagaataatgggattagatttgcctcacggtggtcatctttctcatggatatcaaactcctaccaaaaaaatttccgctatctcaaaatactttgaaactttaccatatcgattggatgaaagcacaggactcattgactacgctaaattggaggaactcgctacattgtacagaccaaagattattgttgccggtacatcagcgtacagtagactcattgagtatgagcgtatgcgtgaaattgccgacaaggttggagcatatctattagctgatatggcacacatttctggtcttgttgccgcaaaggttattccaagtccttttgaatatgcagatgtcgtcacaactactacacacaaatcactcagaggtcctcgaggtgctatgattttcttccgaaaaggagttaggagagttaatccaaaaacaaaagaagaagagatgtggaatcttgaagatccaattaatgcatcagtatttccaggacatcaaggaggtcctcacaaccatactattactgccttggcagttgcattaaagcaagcacaaagtgttgaattcagagcttaccaagaagcagttctactaaatgcaaaggcatttgcaaagcgtctgggtgattcaaaagataaagggggtctcggttactccatcgtctccgggggtaccgataaccatcttgtactcattgacttgaagcctcaaggagttgatggtgcccgagttgaacgtgttcttgaactcgttggagtcgcatccaataagaatacagttccaggtgataaatctgcccttaaacctggtggattaagaatgggtacaccagctatgacaactcgtggtttccagcctgaagatttcgtacgggttgccgacgttgtaaatagagccgttactataactcaacgattggataaaagtgcaagggaagcagcagaggcaaagggaagaaagaaccctggtagtgtaaaggctttcttggagtaccttggcgaaggcgagaatgagagagagattgtacaattgagaagtgaagttgaggaatgggttggcactttctccctaccatgggaggagagtagttaa

SEQ ID NO: 3991 - protein, 516 aa, Botryotinia fuckeliana B05.10
MSLFKGASRTVFRATTAQRAAASICGARRAASSSRMTMESQQKLLSADLEHADPAVFSILQNEKRRQKHFINLIPSENFTSQAVLDALGSVMQRYPGARYYGGNEFIDESERLCQSRALQTFGLKESEWGVNVQPLSGSPANLYAYSALANTHDRIMGLDLPHGGHLSHGYQTPTKKISAISKYFETLPYRLDESTGLIDYAKLEELATLYRPKIIVAGTSAYSRLIEYERMREIADKVGAYLLADMAHISGLVAAKVIPSPFEYADVVTTTTHKSLRGPRGAMIFFRKGVRRVNPKTKEEEMWNLEDPINASVFPGHQGGPHNHTITALAVALKQAQSVEFRAYQEAVLLNAKAFAKRLGDSKDKGGLGYSIVSGGTDNHLVLIDLKPQGVDGARVERVLELVGVASNKNTVPGDKSALKPGGLRMGTPAMTTRGFQPEDFVRVADVVNRAVTITQRLDKSAREAAEAKGRKNPGSVKAFLEYLGEGENEREIVQLRSEVEEWVGTFSLPWEESS

SEQ ID NO: 3992 - DNA, 1434 bp, Sclerotinia sclerotiorum 1980
  CDS (1)..(1434)
atgtcttctacatacgccctcccaaagtctcaccaagagatgttggaaaagtctttggtcgagaccgatcccgagattgctgagatcatgaaactcgagattcaacgtcagcgtgaatcaattatcctcattgcctccgagaacgttacctcccgtgcagttttcgatgctttgggatctcccatgtcaaacaaatactctgagggttacccaggtgctagatattatggtggaaaccaacacatcgactctattgagttgacctgtcaagctcgtgctcttaaggcattcaacttggactccgagaaatggggtgtcaatgttcaatgcttgagtggttccccagcaaatctccaggtttaccaagccatcatgagacctcacgatagactgatgggtcttgatctcccacacggtggtcatttgtctcacggttaccaaactccccagagaaagatctccgctgtatcaacatacttcgagaccttcccataccgtgtcaacttggagactggtatcatcgattatgaccaactcgaggccaacgctttgatgtacagaccaaaggttcttgttgccggaacctccgcttactgccgtcttattgattatgcccgtatgcgcaagatcgccgatcttgtcggtgcttatctcgttgttgatatggctcacatctccggtttgatcgcagctggtgttatcccaagtccattcgagcacgctgatatcgttaccaccacaacccacaaatccctccgtggtcctcgtggtgccatgatcttcttccgcaagggtgtccgcaagactgatgccaagactggaaaggagacactttacgatctcgaaggcccaatcaacttctccgtcttcccaggtcaccaaggtgggcctcacaaccacactattaccgctcttgctgttgccctcaagcaagctacaactgacgacttcaagaaatatcaacaacaagtcgttgacaacgctaaggctctcgagatcgagttcaagcaattgggctacaagctcgttgctgatggcactgattctcacatggttctccttgatctcagagcacaaggacttgacggtgctcgtgtcgaggctgtcttggagcaaatcaacattgcttgcaacaagaactccataccaggtgacaagtctgctttaaccccttgtggtatccgtattggtacaccagccatgaccagtcgtggatttggtactgaggacttcaagagggttgcatcctacattgatcaaagtatcaacatctgcaaggaagttcaagcttctttgccaaagagcgacaacaagctcaaggacttcaagtccaaggttgccggtggtgaggttgagaagatcaacgagttgagaaaggagattgcgtcctgggctagcagcttccctctcccagttgagggatggagagagtag

SEQ ID NO: 3993 - protein, 477 aa, Sclerotinia sclerotiorum 1980
MSSTYALPKSHQEMLEKSLVETDPEIAEIMKLEIQRQRESIILIASENVTSRAVFDALGSPMSNKYSEGYPGARYYGGNQHIDSIELTCQARALKAFNLDSEKWGVNVQCLSGSPANLQVYQAIMRPHDRLMGLDLPHGGHLSHGYQTPQRKISAVSTYFETFPYRVNLETGIIDYDQLEANALMYRPKVLVAGTSAYCRLIDYARMRKIADLVGAYLVVDMAHISGLIAAGVIPSPFEHADIVTTTTHKSLRGPRGAMIFFRKGVRKTDAKTGKETLYDLEGPINFSVFPGHQGGPHNHTITALAVALKQATTDDFKKYQQQVVDNAKALEIEFKQLGYKLVADGTDSHMVLLDLRAQGLDGARVEAVLEQINIACNKNSIPGDKSALTPCGIRIGTPAMTSRGFGTEDFKRVASYIDQSINICKEVQASLPKSDNKLKDFKSKVAGGEVEKINELRKEIASWASSFPLPVEGWRE

SEQ ID NO: 3994 - DNA, 1566 bp, Sclerotinia sclerotiorum 1980
  CDS (1)..(1566)
atgtcgctctttaaaggagcctcaagaactgtgttcagagctgttgctgcgcaaagagcagcaacttcaatatgtggcgcaagaacagcggcgactagtagtcgaatgaccatagaaagtcaacaaaagctactctcagcaaacctcgaacacgcagatccagcagtcttcagtattctccaaaatgagaaacgaaggcagaagcacttcattaatcttattccttccgaaaacttcacatcacaagctgttttggatgcattgggaagtgttatgcaaaataaatattccgaaggatacccgggtgcaagatattatggaggaaacgaatttattgacgaatccgaaagattgtgccaatcccgcgctctacagacttttggattgaaggaatcagaatggggagtcaatgttcaaccattatccggttccccagcaaatctttacgcatactccgctctcgcaaatactcatgacagaataatgggattggatttacctcatggtggccatctctcccatggataccaaactcctaccaaaaaaatatcggctatttcaaaatacttcgagactctaccgtatagattggatgaaagtacaggacttattgattacgccaaattggaggagcttgcaacactgtacagaccaaagattattgttgctggcacctcagcgtatagcagactcatcgagtatgagcgtatgcgtgagattgctgacaaagttggggcattcctgttggctgatatggcacatatttctggcctcgtcgcggcaaaagtcattccaagtcctttcgaatatgcagatgtcgtcaccactaccacacataaatcactcaggggtcctcggggtgctatgattttctttagaaagggagttagaagagtcaatccaaaaacaaaggaagaagagatgtggaatcttgaagatccaattaatgcatcagtcttcccgggacatcaaggaggtcctcataatcatactatcactgcattggcagttgcacttaaacaagcacaaagtgttgaattcagagcttaccaagaagcggttttactaaacgcaaaagcattcgcaaagcgtctgggtgactcaaaagataaagggggtctcggctactccattgtatctggaggtacagataaccatcttgtactcattgacttgaaacctcaaggagttgatggtgcccgagttgaacgtgttctcgaactcgtcggagtagcatccaacaagaataccgttcctggagacaaatccgcgcttaagcctggtggactaagaatgggtacaccagctatgactactcgtggttttcaacccgatgacttcgttcgtgttgccgacgttgtaaatagagctgtcaccataactcaacgactagacaaaactgcaaaggaggctgcagaagcaaagggaagaaagaatcctggtagtgtaaaggctttcttagagtatcttggcgagggtgagaatgagagagagattgtacagttgagaagtgaagttgaggaatgggttggcactttctcattaccatgggaagaaagtagctag

SEQ ID NO: 3995 - protein, 521 aa, Sclerotinia sclerotiorum 1980
MSLFKGASRTVFRAVAAQRAATSICGARTAATSSRMTIESQQKLLSANLEHADPAVFSILQNEKRRQKHFINLIPSENFTSQAVLDALGSVMQNKYSEGYPGARYYGGNEFIDESERLCQSRALQTFGLKESEWGVNVQPLSGSPANLYAYSALANTHDRIMGLDLPHGGHLSHGYQTPTKKISAISKYFETLPYRLDESTGLIDYAKLEELATLYRPKIIVAGTSAYSRLIEYERMREIADKVGAFLLADMAHISGLVAAKVIPSPFEYADVVTTTTHKSLRGPRGAMIFFRKGVRRVNPKTKEEEMWNLEDPINASVFPGHQGGPHNHTITALAVALKQAQSVEFRAYQEAVLLNAKAFAKRLGDSKDKGGLGYSIVSGGTDNHLVLIDLKPQGVDGARVERVLELVGVASNKNTVPGDKSALKPGGLRMGTPAMTTRGFQPDDFVRVADVVNRAVTITQRLDKTAKEAAEAKGRKNPGSVKAFLEYLGEGENEREIVQLRSEVEEWVGTFSLPWEESS

SEQ ID NO: 3996 - DNA, 1413 bp, Nematostella vectensis
  CDS (1)..(1413)
atggaagagttactggatagcgactccatgagtttgcagaaatccctcgaggaaactgacccggtgatgtatgagatcttgaagaaggagaaacaccggcagattcatggactggaactcatcgcatctgaaaatttcaccagccaagcggtgatggaagccacgggatcgtgtatgactaataaatactcggagggacaagttggtcagaggtattatggcgggaataaatacgtggatgagatggagtcgttgtgtaagagtcgagcgcttgagctctttagattggacccagaaaaatggggtgtcaatgttcagatctactcaggatcccctgcaaactttgccgtttacactgcccttcttaatcctcacgaccggatcatgggtctagacctccctgatggaggccatctgacgcatggcttcatgacagacaagaagcgaatctccgcaacatcaatctactttgaatcaatgccttataagacaaatgcccagactggttatattgattatgaccagcttgctgagaatgctcgcctgttccgccccaagctcatcattgcagggataagtgcataccctcgtcatctagactatgccaaatttaggcagatctgtgatgaagtaggggcatacttattggccgacatggctcacattagcggcctggtcgcatctgatgttgtgcctggtccatttgagtatgccgatgttgtgacaacaactacccataaatccttgcgtggtcctagggccggtatgatcttttatcgcaagggtatcaaaggctacaagaagaatggagaccccataaagtatgactatggctccaagattgactttgccgttttccctgccctacaaggtggtccccacaatcaccagattgcaggtcttgccgtggctctcaagcaagccatgacacctgagttcaaggcttatggacagcagatactgggtaattgtaaggcgatggctgaggtgttcatggagcgtggatacaaacttgtgacggacggcactgacaaccatctggtcctgatggacttgaggccaaaaggaattggaggagcacaggctgagagaattttagaggagatttccatcactgtgaacaagaacacatgcccaggcgacaagagtgccttgaagccaggagggcttcgcattggggcccccgccctcacttcccgcaagttcaaggttcatgacttcaaacaagttgctgactttattgaccgcggcatcaaactggggctggaaatccaggaagttgctggtactgacttcaagaagttcatagaagctctttccagtgagaagttttcagaaaaagtagaaagtctgcgcaaagaggttgagaagttttctggaaagttccctatgccaggaagagacaccatctga

SEQ ID NO: 3997 - protein, 470 aa, Nematostella vectensis
MEELLDSDSMSLQKSLEETDPVMYEILKKEKHRQIHGLELIASENFTSQAVMEATGSCMTNKYSEGQVGQRYYGGNKYVDEMESLCKSRALELFRLDPEKWGVNVQIYSGSPANFAVYTALLNPHDRIMGLDLPDGGHLTHGFMTDKKRISATSIYFESMPYKTNAQTGYIDYDQLAENARLFRPKLIIAGISAYPRHLDYAKFRQICDEVGAYLLADMAHISGLVASDVVPGPFEYADVVTTTTHKSLRGPRAGMIFYRKGIKGYKKNGDPIKYDYGSKIDFAVFPALQGGPHNHQIAGLAVALKQAMTPEFKAYGQQILGNCKAMAEVFMERGYKLVTDGTDNHLVLMDLRPKGIGGAQAERILEEISITVNKNTCPGDKSALKPGGLRIGAPALTSRKFKVHDFKQVADFIDRGIKLGLEIQEVAGTDFKKFIEALSSEKFSEKVESLRKEVEKFSGKFPMPGRDTI

SEQ ID NO: 3998 - DNA, 1410 bp, Vanderwaltozyma polyspora DSM 70294
  CDS (1)..(1410)
atgacgtacaccttatcagagtcacatcgaactttattacagacgcatttaagtcaaactgatcctgagcttgaaagtattattaaagatgaaatagagagacaaaaacactcaattgatctaattgcatctgaaaattttacatcaacttctgtttatgatgctctaggcactcctttatcaaataagtattctgaaggatatcctggtgctcgttattacggtggtaatgaacatattgatcgtgttgaatccttatgccaaaagagagcattagaagcatttaaattaaatgaaaaagattggggagtcaatgttcagccattatctggttctcctgcaaatttggaagtgtaccaagcactaatgaaaccacatgacagacttatgggattgtatttacccgacggtggccatctatctcatggttacgcaacagagacaaggtctatatctgctgtatccacctatttcgaatctttcccatatagagttaatccaaacactggaataattgattatgacagtttagaacgaaatgccatcttatatagaccaaaaattttgatagctggaacatcttcttattgtcgtttaatagactacaagagaatgaaagaaattgctgataaatgtggcgcctatttaatggtagatattgctcacattgcaggtttaattgttgcggatgtcattccttcaccattcgaatatgctgacgttgtcacaacaactactcataaatctttaagaggtccccgtggtgcaatgatatttttcagaaggggaatcaagtcaataaatcagaaaacaggtaaagaacaaccatttgatttagaaaatcgtattaatttttctgtattcccaggacatcaaggtggtccacacaaccatacgatagctgctctagctacaacattgaaacaagcaactactccagagttcaaagaataccaattacaagtattgaaaaatgctaaatcaatggaagaagaatttaaaaaattgggttacaaattggtatctgatgggactgattcacatatggttttagtttcattaaaggagataggtttagatggcgctcgaattgaatacgtatgtgaaaagatcaatatagtcctaaataaaaactcgattcctggcgacaaatctgcaatagtacctggtggaatacgtgttggtgccccagcaatgacaacaagaggtatgggcgaagctgatttcaagcgtgtcgttgaatatattaaccaagctgtcaacttcgcaaaggaaattcagagttcacttccagtagatcataataaattaaaggactttaagatagcagtcgatggattggctggaaatttggaagaattgaagattgatattttcaattgggcaggatcatttccacttcctgtttaa

SEQ ID NO: 3999 - protein, 469 aa, Vanderwaltozyma polyspora DSM 70294
MTYTLSESHRTLLQTHLSQTDPELESIIKDEIERQKHSIDLIASENFTSTSVYDALGTPLSNKYSEGYPGARYYGGNEHIDRVESLCQKRALEAFKLNEKDWGVNVQPLSGSPANLEVYQALMKPHDRLMGLYLPDGGHLSHGYATETRSISAVSTYFESFPYRVNPNTGIIDYDSLERNAILYRPKILIAGTSSYCRLIDYKRMKEIADKCGAYLMVDIAHIAGLIVADVIPSPFEYADVVTTTTHKSLRGPRGAMIFFRRGIKSINQKTGKEQPFDLENRINFSVFPGHQGGPHNHTIAALATTLKQATTPEFKEYQLQVLKNAKSMEEEFKKLGYKLVSDGTDSHMVLVSLKEIGLDGARIEYVCEKINIVLNKNSIPGDKSAIVPGGIRVGAPAMTTRGMGEADFKRVVEYINQAVNFAKEIQSSLPVDHNKLKDFKIAVDGLAGNLEELKIDIFNWAGSFPLPV

SEQ ID NO: 4000 - DNA, 1410 bp, Vanderwaltozyma polyspora DSM 70294
  CDS (1)..(1410)
atgccttacgctttatctgattcccataagttaatgttacaatctcacttacgtgagactgatcctgaattggaatctattgttaaagatgaaattgacagacaacagcatttcattgatttgattgcttctgaaaatttcacttcaacttcagttttcgatgctttaggaactccattatctaacaagtactctgaaggttatccaggtgctcgttattatggtggtaatgaacacattgatcgtattgagttgttatgtcaacaaagagcattagaggctttccatttgacttcagatcgttggggtgtcaatgttcaaccattatctggttcacctgctaatttggaagtgtaccaagctttgatgaagccacacgatagattgatgggtttatatttaccagatggtggccatttgtctcatggttatgctactgagcatagatctatttctgctgtttctacatacttcgaatcattcccatacagagttgaccctgaaactggtattattgattacgaaactttagaaaagaatgctatcttgtatagaccaaagattttggttgctggtacttctgcctactgtcgtttaattgactacaagagaatgagagagattgctgacaagtgtggtgcttacttgatggtagacatggcccacatttcaggtttaattgctgctggtgtcattccatctccattcgaatacgctgatatcgttaccactactactcacaaatctttaagaggtcctcgtggtgctatgatctttttcagaagaggtattagatctattaaccaaaagactggcaaagaagttccatacgacttggaaaacagaatcaacttctctgtcttcccaggtcaccaaggtggtccacataaccataccattgctgctttggctactgccctaaagcaagctgcttctccagaatttaaggaatatcaattacaagtcttgaaaaatgcaaaatctatggaagaagaattcaagaagttgggttacagattggtttcggatggtactgactctcatatggtcttggtttccctaagagagcaaggtgttgatggtgctcgtgtcgaatatgtctgtgaaaagattaatattgctttgaacaagaactctatcccaggtgacaagtctgcccttgttccaggtggtattcgtgttggtgctccagctatgtctactagaggtatgggtgaacaagatttcaagagaattgtcgattacattgacaaaactgtccaatttgctagaaacattcaacagtctttaccaaaggatgctaacaaattaaaggacttcaaggccaaggttgatgaaagcagtgctgacttagcttcattgaaacaagatatatataactggacagctgaattcccattgccagtttaa

SEQ ID NO: 4001 - protein, 469 aa, Vanderwaltozyma polyspora DSM 70294
MPYALSDSHKLMLQSHLRETDPELESIVKDEIDRQQHFIDLIASENFTSTSVFDALGTPLSNKYSEGYPGARYYGGNEHIDRIELLCQQRALEAFHLTSDRWGVNVQPLSGSPANLEVYQALMKPHDRLMGLYLPDGGHLSHGYATEHRSISAVSTYFESFPYRVDPETGIIDYETLEKNAILYRPKILVAGTSAYCRLIDYKRMREIADKCGAYLMVDMAHISGLIAAGVIPSPFEYADIVTTTTHKSLRGPRGAMIFFRRGIRSINQKTGKEVPYDLENRINFSVFPGHQGGPHNHTIAALATALKQAASPEFKEYQLQVLKNAKSMEEEFKKLGYRLVSDGTDSHMVLVSLREQGVDGARVEYVCEKINIALNKNSIPGDKSALVPGGIRVGAPAMSTRGMGEQDFKRIVDYIDKTVQFARNIQQSLPKDANKLKDFKAKVDESSADLASLKQDIYNWTAEFPLPV

SEQ ID NO: 4002 - DNA, 1428 bp, Aedes aegypti
  CDS (1)..(1428)
atgcctctatgtaatcataaaaatatgtccggcaatgccaagctgttgcacgagaacctctgggagtcggacccggagctgatggacctgatccggaaggagaagaaacgccaggtgcacgggctggagatgatcgccagtgagaacttcacctcgctctcggtgctgcagtgcctgggatcctgcctgcacaacaagtactccgagggattgcccggacagagatactacggtggcaacgaattcatcgacgagatcgaattgctggcgcagaaacgtgccctcgaagcataccgcctcaacccggatgaatggggctgcaacgtgcagccgtactccggttcgccggccaactttgccgtctacaccggactgatcgaaccgcacggtcgcatcatgggcctggacctgcctgatggtggccacttgacgcacggattcatgaccgccaccaagaaaatctccgccacgtcgatcttcttcgagagcatgccctacaaggtggatccggtgacgggcctgatcgactacgacaaactggaggagagcgccaagaacttcaagcccaagatcatcatcgccggaatctcgtgctattcccggtgcttagactacaaacgcttccgccagattgccgacgccaacggtgcattcctgtttgccgatatggctcacatctctggattggtcgctgccggtgtcatcccatcgccttttgaatacgccgatgtggtcagcacaaccacacacaaatcgctgcggggaccccgcgccggagtgatcttcttccgcaagggcgttcgcagcgtcaagcccaacggcgacaaggtgatgtacgatctggaggcaaaaatcaatcaggctgtgttccccggaatccagggaggaccacacaaccacgccattgccggtattgccacgtgcatgctgcaggcccggacgcccgagttcaaagactaccagacacagatcatccgtaacgcacaagccctgtgcaagggtctgctcgagcggggctactccatttcgaccgggggaaccgatgttcatctggtgttggtggaccttcgcccggctggcatcaccggagcccgtgcggagtacgtcctggaggagatttccattgcctgcaacaagaataccgttcccggagacaagagtgcactgaacccgtccggaatccggttgggtacgccggcgttgacgacccgaggtttggtggagtctgatatgacccatgtggtggacttcatcgatcggggactgaaactgtcgaaggagattacggccgtctcgggtccgaagctggtggacttcaagcgagtgctgcacgaggatccgacgctgaacgctaaggtgcaagctctaaaggaggaagttcaggcgtacagcgcgaagttccccatgccaggctatgaggagttctag

SEQ ID NO: 4003 - protein, 475 aa, Aedes aegypti
MPLCNHKNMSGNAKLLHENLWESDPELMDLIRKEKKRQVHGLEMIASENFTSLSVLQCLGSCLHNKYSEGLPGQRYYGGNEFIDEIELLAQKRALEAYRLNPDEWGCNVQPYSGSPANFAVYTGLIEPHGRIMGLDLPDGGHLTHGFMTATKKISATSIFFESMPYKVDPVTGLIDYDKLEESAKNFKPKIIIAGISCYSRCLDYKRFRQIADANGAFLFADMAHISGLVAAGVIPSPFEYADVVSTTTHKSLRGPRAGVIFFRKGVRSVKPNGDKVMYDLEAKINQAVFPGIQGGPHNHAIAGIATCMLQARTPEFKDYQTQIIRNAQALCKGLLERGYSISTGGTDVHLVLVDLRPAGITGARAEYVLEEISIACNKNTVPGDKSALNPSGIRLGTPALTTRGLVESDMTHVVDFIDRGLKLSKEITAVSGPKLVDFKRVLHEDPTLNAKVQALKEEVQAYSAKFPMPGYEEF

SEQ ID NO: 4004 - DNA, 1722 bp, Aedes aegypti
  CDS (1)..(1722)
atgtcggccaatatcgtacgtgccggagtggcacctctcgctcgctcccacggggcacctgcgatgatcggcttgcgtctgcgtctggataaacatcaacatcagtgtccagcagtaagtggatccagcaccactaccactgcaatcatctccggaacgaggcactttggaacgacgacgatttcatcatcctgcgcgccatcgccacagtcaacgcttccatcgtccctgaagaatcgatccttttccgatacgaagcggtctatctgttctgtgtccggtgtcctcaacggtgtcagccttccgaaagccacaaagatgtccggcaatgccaagctgttgcacgagaacctctgggagtcggacccggagctgatggacctgatccggaaggagaagaaacgccaggtgcacgggctggagatgatcgccagtgagaacttcacctcgctctcggtgctgcagtgcctgggatcctgcctgcacaacaagtactccgagggattgcccggacagagatactacggtggcaacgaattcatcgacgagatcgaattgctggcgcagaaacgtgccctcgaagcataccgcctcaacccggatgaatggggctgcaacgtgcagccgtactccggttcgccggccaactttgccgtctacaccggactgatcgaaccgcacggtcgcatcatgggcctggacctgcctgatggtggccacttgacgcacggattcatgaccgccaccaagaaaatctccgccacgtcgatcttcttcgagagcatgccctacaaggtggatccggtgacgggcctgatcgactacgacaaactggaggagagcgccaagaacttcaagcccaagatcatcatcgccggaatctcgtgctattcccggtgcttagactacaaacgcttccgccagattgccgacgccaacggtgcattcctgtttgccgatatggctcacatctctggattggtcgctgccggtgtcatcccatcgccttttgaatacgccgatgtggtcagcacaaccacacacaaatcgctgcggggaccccgcgccggagtgatcttcttccgcaagggcgttcgcagcgtcaagcccaacggcgacaaggtgatgtacgatctggaggcaaaaatcaatcaggctgtgttccccggaatccagggaggaccacacaaccacgccattgccggtattgccacgtgcatgctgcaggcccggacgcccgagttcaaagactaccagacacagatcatccgtaacgcacaagccctgtgcaagggtctgctcgagcggggctactccatttcgaccgggggaaccgatgttcatctggtgttggtggaccttcgcccggctggcatcaccggagcccgtgcggagtacgtcctggaggagatttccattgcctgcaacaagaataccgttcccggagacaagagtgcactgaacccgtccggaatccggttgggtacgccggcgttgacgacccgaggtttggtggagtctgatatgacccatgtggtggacttcatcgatcggggactgaaactgtcgaaggagattacggccgtctcgggtccgaagctggtggacttcaagcgagtgctgcacgaggatccgacgctgaacgctaaggtgcaagctctaaaggaggaagttcaggcgtacagcgcgaagttccccatgccaggctatgaggagttctag

SEQ ID NO: 4005 - protein, 573 aa, Aedes aegypti
MSANIVRAGVAPLARSHGAPAMIGLRLRLDKHQHQCPAVSGSSTTTTAIISGTRHFGTTTISSSCAPSPQSTLPSSLKNRSFSDTKRSICSVSGVLNGVSLPKATKMSGNAKLLHENLWESDPELMDLIRKEKKRQVHGLEMIASENFTSLSVLQCLGSCLHNKYSEGLPGQRYYGGNEFIDEIELLAQKRALEAYRLNPDEWGCNVQPYSGSPANFAVYTGLIEPHGRIMGLDLPDGGHLTHGFMTATKKISATSIFFESMPYKVDPVTGLIDYDKLEESAKNFKPKIIIAGISCYSRCLDYKRFRQIADANGAFLFADMAHISGLVAAGVIPSPFEYADVVSTTTHKSLRGPRAGVIFFRKGVRSVKPNGDKVMYDLEAKINQAVFPGIQGGPHNHAIAGIATCMLQARTPEFKDYQTQIIRNAQALCKGLLERGYSISTGGTDVHLVLVDLRPAGITGARAEYVLEEISIACNKNTVPGDKSALNPSGIRLGTPALTTRGLVESDMTHVVDFIDRGLKLSKEITAVSGPKLVDFKRVLHEDPTLNAKVQALKEEVQAYSAKFPMPGYEEF

SEQ ID NO: 4006 - DNA, 1464 bp, Chlamydomonas reinhardtii
  CDS (1)..(1464)
atgcagcttcagcagcgtctgccctccggcggtgccgcccgcagcgcgcgcgcttcgcgccgcaccgtgtccgtccaggccactgtcgctccccccgctcctacctcgggcaagaagctgttccagtatgatggcgctctttctgaggtcgacccggagattagtgctctcatcaccaaggagaagtctcgccaggtccgtggcctggagctgattgcctcggagaacttcacctccaaggcggtgatgcaagccctgggctcgtgcatgaccaacaagtactccgagggtcgccccaacgcgcgctactacggcggcaacgagtacattgaccaggtcgagctgctgtgcgagaagcgcgccctggagctgtttggcctggacccggcggagtggggcgtcaacgtgcagccgctgtcgggctcgcccgccaacttcgcggtgtacacggcgctgctgcagccgcacgaccgcatcatgggcctggacctgccgcacggcggccacctgacgcacggcttcatgaccgccaagcgccgcgtcagcgccacctcgattttcttcgagtccatgccctaccgcctcaacgaggccaccggcaccatcgactacgagacgctggagaagaccgccaccctgttccggcccaagctcatcattgccggcgcctcggcctacagccgcaactacgactacgcgcgcatgcgggctgtggcggacagctgcgaggcctacctcatgtcggacatggcgcacatcagcggcctggtcgccgccggtgtggccaccagccccttcgcgcactcgcacatcgtgaccaccaccacgcacaagtcgctgcgcggcccccgcggcggcatgatcttctaccgccgcgagctcaaggacaagattgaccaggccgtgttccccggtctgcagggcggcccccacaaccacaccatctcggcgctggctgtggcgctcaagatggccaacaccgaggagttccgcacctaccagaagcaggtggtggccaactgctctgcgctgtgcgggcggctgcagcagcacggctacaagatcgtgtctgacggcaccgacaaccacctggtgctgctggacctcaagccggcgggcattgacggagcgcgcgtgcagacggtcctggacgcggtgtccatcacgctcaacaagaactcggtgcccggcgacaagagcgccatggtgcccggcggcatccgcatcggcacgcccgcgctcaccacccgcggcttccaggagaaggacttcgagcaggtggctgacttcatccaccgcgccatcaccatcgccaaggactgccaggccaagacgcccgcgcccggcaagctcaaggagttcaaggagtacctggagggcgccggcgccgcccgccccgacatcgccgcgctgcgggccgaggtggaggcgctcgccacctccttccccatgcccggcctgtaa

SEQ ID NO: 4007 - protein, 487 aa, Chlamydomonas reinhardtii
MQLQQRLPSGGAARSARASRRTVSVQATVAPPAPTSGKKLFQYDGALSEVDPEISALITKEKSRQVRGLELIASENFTSKAVMQALGSCMTNKYSEGRPNARYYGGNEYIDQVELLCEKRALELFGLDPAEWGVNVQPLSGSPANFAVYTALLQPHDRIMGLDLPHGGHLTHGFMTAKRRVSATSIFFESMPYRLNEATGTIDYETLEKTATLFRPKLIIAGASAYSRNYDYARMRAVADSCEAYLMSDMAHISGLVAAGVATSPFAHSHIVTTTTHKSLRGPRGGMIFYRRELKDKIDQAVFPGLQGGPHNHTISALAVALKMANTEEFRTYQKQVVANCSALCGRLQQHGYKIVSDGTDNHLVLLDLKPAGIDGARVQTVLDAVSITLNKNSVPGDKSAMVPGGIRIGTPALTTRGFQEKDFEQVADFIHRAITIAKDCQAKTPAPGKLKEFKEYLEGAGAARPDIAALRAEVEALATSFPMPGL

SEQ ID NO: 4008 - DNA, 1563 bp, Chlamydomonas reinhardtii
  CDS (1)..(1563)
atgcagcgcactgtgcagggtatttcgcagcttgcgcgtgcgctgtcgtccgcgcacgcggtcgcgggccagcgctgcttcgctgcgcagccggcgctgtccaacgaggaggagtacagtcgcttctctcaggatgctagccgggcgcatgtgacgtggcccaaggtcctgaacgccggcctggctgaggtggacccagatctcttcgacatcattgagaaggagaagaaccgccagttcaagggcctggagctgatcccctcggagaacttcgtgtctgcctcggtgatggaggcggtgggcagcgtcatgaccaacaagtacagcgagggctaccccggcgcccgctactacggcggcaacgagttcattgaccaggcagagcgcctgtgccaggagcgtgcgctgaaggcattccacctggacccggctcagtggggcgtcaacgtgcagtcgctgtcgggctcgccctccaacttccaggtgtacacggcgctgctgcagccgcacgaccgcatcatggcgctggacctgccccacggcggccacctcagccacggctaccagactgataccaagaagatcagcgccacctccatctactttgagcaaatgccgtaccgcctgaacgaggagactggcctgatcgactacgacatgctggagaagacggccgtgctgttccgccccaagctcattgtggcgggtgcctccgcctacacccgccactacgactatgcccgcatgcgcgccatcgccgacaaggtgggcgcctggctgctggcggacatggcgcacatcagtggcctggtggcggcggacctggtgccctcgcccttcggcttcgcggacgtggtcaccaccaccactcacaagtccctgcgcggtccccgcggcgccatgatcttctaccgcaagggtgtgcgccgcacggacgccaagaccggcaagcccatcaactacgacatcgaggacaagatcaacttcgccgtgttccccggcctgcagggtggcccccacaaccacaccatcgccggtctggcctgcgcgctgaagcaggcggccacccctgagttcaagtcctaccagcagcaggtgctgtccaacagccaggccctggccggcgccctggccaagcgcggcttcaagctggtgtcgggcggcaccgacaaccacatcgtgctggtggacctgcggccaaagggcgtcgacggcagccgcgtggagcgtgtgctggagctggcgcacatcgccgccaacaagaacactgtgcccggcgacgtgagcgcgctggtgcccggcggcctgcgcatgggctcgcctgccctcacctcgcgcggctttgtggagaaggacttcgagcaggtggctgagtttgtggaccgcgccgtgaacatcgcggtggacctcaagaagaagtaccccaagctcaaggagttccgcgaggccatggccaaggagtccacccccgacatcaacgcgctgaagaaggacgtggagaccttcgcgatgcgcttccccacgataggcttcgacaaggccgccatgcgctacaagaactaa

SEQ ID NO: 4009 - protein, 520 aa, Chlamydomonas reinhardtii
MQRTVQGISQLARALSSAHAVAGQRCFAAQPALSNEEEYSRFSQDASRAHVTWPKVLNAGLAEVDPDLFDIIEKEKNRQFKGLELIPSENFVSASVMEAVGSVMTNKYSEGYPGARYYGGNEFIDQAERLCQERALKAFHLDPAQWGVNVQSLSGSPSNFQVYTALLQPHDRIMALDLPHGGHLSHGYQTDTKKISATSIYFEQMPYRLNEETGLIDYDMLEKTAVLFRPKLIVAGASAYTRHYDYARMRAIADKVGAWLLADMAHISGLVAADLVPSPFGFADVVTTTTHKSLRGPRGAMIFYRKGVRRTDAKTGKPINYDIEDKINFAVFPGLQGGPHNHTIAGLACALKQAATPEFKSYQQQVLSNSQALAGALAKRGFKLVSGGTDNHIVLVDLRPKGVDGSRVERVLELAHIAANKNTVPGDVSALVPGGLRMGSPALTSRGFVEKDFEQVAEFVDRAVNIAVDLKKKYPKLKEFREAMAKESTPDINALKKDVETFAMRFPTIGFDKAAMRYKN

SEQ ID NO: 4010 - DNA, 1419 bp, Chlamydomonas reinhardtii
  CDS (1)..(1419)
atgacagcggtctttccggaggcccacacacgtctggctgtcgcggaccctgaggtcttcgcgctgatcgaggatgagaaggcgcgacagtggaagggtatcgagctgattgcttctgagaacttcacgtcgctcccagtcatggaggcgctgggctcctgcctgaccaacaagtactcagagggccagcccggcgctcgttactacggtggtaacgagaacatcgataagattgagctgctgtgcaagaagcgcgcgctggaggcctttcacgtcagcccggaggagtggggtgtcaacgtgcagccttactcgggcagccccgccaacttcgccgtgtatacggcgctgctgaacccgcacgaccgcatcatgggcctggacctgccctccggcggccacctgacccacggctactacacccagggcaagaagatcagcgccacctcgatcttcttcgagtcgctgccctacaagctgaacccccagaccggccttgtggacatggacaagctggaggagaaggcgatggagtaccggccgaagatgatcatctgcggcgcctccgcctacccccgcgactgggactatgcgcgcttccgcgagattgcggacaaggtcggcgcgctgctgatggtggacatggcacacatcagtggcctggtcgccgcgggcacgctgacgactcccttcaagtacgcggacatcgtgaccaccaccacccacaagtccctgcgcggcccccgcgccggcatgatcttcttccgccggggtgtcaagcccgttgaccgcctgctcaagggcgagacggagggcgccgcgtacgacttcgaggacaagatcaacttcgcggtgttcccctcgctgcagggcggcccgcacaaccaccagatcggcgcgctggcggtggcgctcaagtacgtggccacgcccgagttcaggcagtactcggagcaggttgtgcacaactgccgctcgctggcggacgcgctgatgaagaagggctacaagctggtgacggacggcaccgacaaccacctcatcctgtgggacctgcgccccgagggcgtgactggcagcaagatggagaaggcgtgcgacctgtgccacatcacgctaaacaagaacgcggtggtgggcgacctgtccgccatgaaccccggcggcgtgcgcattggcacgcccgccatgacctctcgcggcctgacggagggcgactggacagaggtggcggagttcctgcacgaggtgctggaggtgtgcaagcaggtgcagggcaccactggcaaggcgctcaaggatttcatcaaggggctagagggcaaccccgcgatcgccgacatccgctcgcgtgttgaggcctgggcgagccgcttccccatgccgggcttcaccgtgcctgccgccgaggccaagtaa

SEQ ID NO: 4011 - protein, 472 aa, Chlamydomonas reinhardtii
MTAVFPEAHTRLAVADPEVFALIEDEKARQWKGIELIASENFTSLPVMEALGSCLTNKYSEGQPGARYYGGNENIDKIELLCKKRALEAFHVSPEEWGVNVQPYSGSPANFAVYTALLNPHDRIMGLDLPSGGHLTHGYYTQGKKISATSIFFESLPYKLNPQTGLVDMDKLEEKAMEYRPKMIICGASAYPRDWDYARFREIADKVGALLMVDMAHISGLVAAGTLTTPFKYADIVTTTTHKSLRGPRAGMIFFRRGVKPVDRLLKGETEGAAYDFEDKINFAVFPSLQGGPHNHQIGALAVALKYVATPEFRQYSEQVVHNCRSLADALMKKGYKLVTDGTDNHLILWDLRPEGVTGSKMEKACDLCHITLNKNAVVGDLSAMNPGGVRIGTPAMTSRGLTEGDWTEVAEFLHEVLEVCKQVQGTTGKALKDFIKGLEGNPAIADIRSRVEAWASRFPMPGFTVPAAEAK

SEQ ID NO: 4012 - DNA, 1428 bp, Malassezia globosa CBS 7966
  CDS (1)..(1428)
atgtcctcggtccagattcctaacgactttaacagcgtcctgtacaagcccctctctgaggccgacccagaggtacaggaaatcatcaacaatgagacgtatcgtcagttcactggccttgagcttattgcgtctgaaaacttgacttcgctggccacgatggaagccaacggttcgatcttgacgaacaagtactcggaaggtctcccaggctcgcgttactacggtggtaacgagtacattgaccagcttgaggctcttacgcaaaagcgcgcccttgctgctttcgacctggacccgaacgtgtggggagtcaacgtgcaaccatactctggttccactgccaacttcgctgccttcacagctttgattcagccacaagaccgtgttatgggtcttggcctgccagatggtggccatcttacgcacggttactacacggctaagaagaagatcactgcttcttcaatctacttccagtctttcccttaccaggtgaagcgtgacgacgggtacattgactacgagcgtctccgtgtgaatgccaacctgtttaagcctcgtcttattgtttgtggtggttctgcatacccacgtgactgggaatataacactatcgctgagattgccaaggagcagggtgcttacctcctgtgtgatatggcgcacatctctggtctggtggctggtaaggagcagaacaatcccttcgagtactgtgatgttgtcactacgacaacgcacaagacgctccgtggcccacgtgccggtcttattttcttccgcaaggaccgtgaacctgacctcgaggctcgtgtgaatgccgccgtgttccctgcctgccaaggtggtccacacaacaacaccattgctggcattgctgttgctcttaagcaggccgctgacccagctttcaagcaatatgctaagcaagttcgtgccaacgcgcaggccattgccaagaagctggtttcttacggttaccgcctgcagacggaaggcactgacaaccacctggtgctctgggaccttcgccccatcggtctaacgggctctaagattgaaaagctttgcgaccttgtgcacattacgttgaacaagaatgccgtcgctggcgacacgtcggctgtcgtgcctggtggtgttcgtatcggtacaaatgccctcacttcgcgtagcatgaccgaaaaagatatggaccaaatcggcgagttcctccaccgtgctgttgagattgcccaggtccttcagaaagaggctggttctaagttgctcaaagacttcattgccaaggctacaactggtgaaggtgagggccgcaagatgatcctccagctagctgatgatgtcaaggcctttgccacaagcttccctctccccggcgttcctgacacgagtgtcattaagaaacctgctggcgcgcattaa

SEQ ID NO: 4013 - protein, 475 aa, Malassezia globosa CBS 7966
MSSVQIPNDFNSVLYKPLSEADPEVQEIINNETYRQFTGLELIASENLTSLATMEANGSILTNKYSEGLPGSRYYGGNEYIDQLEALTQKRALAAFDLDPNVWGVNVQPYSGSTANFAAFTALIQPQDRVMGLGLPDGGHLTHGYYTAKKKITASSIYFQSFPYQVKRDDGYIDYERLRVNANLFKPRLIVCGGSAYPRDWEYNTIAEIAKEQGAYLLCDMAHISGLVAGKEQNNPFEYCDVVTTTTHKTLRGPRAGLIFFRKDREPDLEARVNAAVFPACQGGPHNNTIAGIAVALKQAADPAFKQYAKQVRANAQAIAKKLVSYGYRLQTEGTDNHLVLWDLRPIGLTGSKIEKLCDLVHITLNKNAVAGDTSAVVPGGVRIGTNALTSRSMTEKDMDQIGEFLHRAVEIAQVLQKEAGSKLLKDFIAKATTGEGEGRKMILQLADDVKAFATSFPLPGVPDTSVIKKPAGAH

SEQ ID NO: 4014 - DNA, 1440 bp, Physcomitrella patens subsp. patens
  CDS (1)..(1440)
atggaccagtggccgaagcaactgaatgccgacatctccgaggttgaccccgagattgtcgacatcatcgaacatgagaagaaccgtcaatacaagggtctggagttgatcccatcagaaaacttcacctccctctcagttatgcaggcagtggggtcagtcatgaccaacaagtacagtgagggttaccccggggctcgttactacggtggcaacgagtacattgatatggctgaaagattgtgccaaaagagagcacttgctgctttccgtctcgaccccgagaaatggggagtgaacgtgcagtccctgtctggatcgccagcaaactttcaggtgtacacagctctcctgaagccacatgagcggatcatggcgttggatcttcctcatggtggccacttgtctcatggatatcagactgatacaaagaagatttcagccgtttccattttcttcgagactatgccctacagactgaacgagtccacaggttatatcgactatgatcagatggagaagagcgcaacactcttcagaccaaagttgatagtcgctggtgctagtgcttatgcccgccattacgactacgctcgcatgcgccaggtttgtgacaagcaaaaggcgattctgctcgccgacatggcccatatcagtggacttgtagcaggtggcgttgtcccatctccctttgactatgccgatgttgttaccaccacgactcacaagtctctccggggacctcgaggtgcgatgatcttctaccgtaagggtctgaaggagacaaccaagaagggtgaacaggtgttctacgattatgaagataagatcaatgcatccgttttccctggacttcagggaggtccccacaaccataccatcactggtcttgctgttgccctgaagcaggctgctactcccgaattcaaagcttatcaggaacaagttttgaggaactcagcacattttgctaaggctttgatgggccggggttacgagctggtgtccggtggaacagagaaccacttggttcttgttaacctcaagcccaagggtgtggacggttcaagggtggagcgagtgatggagcttgcccacattgcagcaaacaagaacactgttccaggagatgtgtctgcattggtacctggaggtatccgtatgggaaccccggctttgacaagcagagggtttaccgaggaagattttgagaaggttgctgagtacttcgaccgtgcagtggagatcgccgtgaaagtcaagaagtccacagcgttatttcctgtggcaggtacgaagttgaaggacttcaggaacgttgtcgacaccgaccctgaggttcaggctgaaattggaaagttgaagcacgaggtggaagagttcgcgaagcaattccccactattggtttcgagaagtcgtcaatgaagtacaagaactag

SEQ ID NO: 4015 - protein, 479 aa, Physcomitrella patens subsp. patens
MDQWPKQLNADISEVDPEIVDIIEHEKNRQYKGLELIPSENFTSLSVMQAVGSVMTNKYSEGYPGARYYGGNEYIDMAERLCQKRALAAFRLDPEKWGVNVQSLSGSPANFQVYTALLKPHERIMALDLPHGGHLSHGYQTDTKKISAVSIFFETMPYRLNESTGYIDYDQMEKSATLFRPKLIVAGASAYARHYDYARMRQVCDKQKAILLADMAHISGLVAGGVVPSPFDYADVVTTTTHKSLRGPRGAMIFYRKGLKETTKKGEQVFYDYEDKINASVFPGLQGGPHNHTITGLAVALKQAATPEFKAYQEQVLRNSAHFAKALMGRGYELVSGGTENHLVLVNLKPKGVDGSRVERVMELAHIAANKNTVPGDVSALVPGGIRMGTPALTSRGFTEEDFEKVAEYFDRAVEIAVKVKKSTALFPVAGTKLKDFRNVVDTDPEVQAEIGKLKHEVEEFAKQFPTIGFEKSSMKYKN

SEQ ID NO: 4016 - DNA, 1422 bp, Physcomitrella patens subsp. patens
  CDS (1)..(1422)
atgaaacagtggccgaagcagctcaatgccgacatctccgaggttgatcccgagatcactgacatcattgaacacgagaagaatcgtcaatggaagggacttgagctgatcccgtcagagaattttacgtccgtatcagttatgcaggcagtgggttcagtcatgaccaataagtacagtgaaggttaccccggtgctcgctattacggtggcaacgagttcattgacatggctgaaagactgtgtcaaaaaagagctctcgcagctttccgcctcgatccagagaaatggggagtgaatgtgcagtctctctctgggtccccagccaattttcaggtctacacagctctcttaaagccacacgagcgcataatggccttagatcttcctcatggtggtcatttgtctcatggatatcagacggacatgaagaaaatctcggcggtttccattttcttcgagactatgccataccgattggacgagtctacaggttacatagactacgatacgatggagaaaagcgcagttctttacaggccaaaattgatagtagctggtgccagtgcctatgctcgccattacgactatgctcgtatgcgcaaggtttgtgacaagcaaaaagctattctgcttgctgatatggcccacatcagtggcctggtagccgctggcgtcgtcccgtctcccttcgacttcgcggacgtggtaactaccactacccacaagtctcttcgaggccctcggggggccatgatcttctaccgcaaagggttgaaggagacaaacaagaagggtgaacagattttctacgactatgaagacaaaattaatgctgctgtttttccaggactacaagggggtcctcacaaccacaccattgcaggacttgctgttgccttgaaacaggcagctacgccagagttcaaggcgtaccaggaacaagttctgagcaactctgcacgttttgccaaggccttgatgagccaaggttacgagctggtgtccggtggaacagagaaccatttggtgttagtgaacctcaaacccaagggtgtggacggctctagagtggagcgagtgatggagcttgctcatattgcggcaaacaaaaacactgttcctggagatgtatctgctctagtacctggaggcattcgcatgggaacccctgctttgacaagcagaggcttcatagaggaagatttcgagaaagttgctgagttctttgaccgagcggttggaatcgctgtgaaggtcaagaagtccacaggtgcaaagttgaaggactttagggcagctgtggacactgatcccgagatccaggcagaaattggaaagttgagaactgaagttgaagaatttgccaagcagttccccacaataggctttgaaaagtcctccatgaagtaccaaaattag

SEQ ID NO: 4017 - protein, 473 aa, Physcomitrella patens subsp. patens
MKQWPKQLNADISEVDPEITDIIEHEKNRQWKGLELIPSENFTSVSVMQAVGSVMTNKYSEGYPGARYYGGNEFIDMAERLCQKRALAAFRLDPEKWGVNVQSLSGSPANFQVYTALLKPHERIMALDLPHGGHLSHGYQTDMKKISAVSIFFETMPYRLDESTGYIDYDTMEKSAVLYRPKLIVAGASAYARHYDYARMRKVCDKQKAILLADMAHISGLVAAGVVPSPFDFADVVTTTTHKSLRGPRGAMIFYRKGLKETNKKGEQIFYDYEDKINAAVFPGLQGGPHNHTIAGLAVALKQAATPEFKAYQEQVLSNSARFAKALMSQGYELVSGGTENHLVLVNLKPKGVDGSRVERVMELAHIAANKNTVPGDVSALVPGGIRMGTPALTSRGFIEEDFEKVAEFFDRAVGIAVKVKKSTGAKLKDFRAAVDTDPEIQAEIGKLRTEVEEFAKQFPTIGFEKSSMKYQN

SEQ ID NO: 4018 - DNA, 1749 bp, Physcomitrella patens subsp. patens
  CDS (1)..(1749)
atggctgcggcgctgagctcgtcctgctcgcccgcgtcccgcttgtgtggctgtgtgtcggtggggtccagccctgggtcttcgaaggtttcgcatgtccaattaccgcattcccttcggtctgcggaggtgcaggccctcggagctgtgaatttggcgcccgcttctgtttatcgtcgccggcctctcgtggtgtgcgccagtgcggcggcaccagtgtccgttcccgaaggagctacgcgatttgtcgaccctccgttgtcggaaatcgaccccgatgtgcacgcgattattgagtgcgagaagcgaaggcagtttcggggcctggagctcatcgcatcggagaacttcacgtcgcgtgcggtcatggaggctgttgggtcttgtctgacgaacaagtactcggagggcttgcctggcaagaggtattatggtgggaacgagtacattgatcagagcgaaaggttatgccagcaacgagcattgaccgcattccatgtggatgaaaaggaatggggagtgaacgtccagccactgtctgggtccccggccaactttgcagtatatactgctcttcttcagccgcacgatcgtatcatggggttggacttagcacatggagggcatctgacgcacgggtttatgaccccgaagagacgggtgtctgccacttcagtgtacttcgagtcaatgccgtaccgcctgaacgaaaccacgggactggtggattacgatatcttgcaacagacggccttgttgttccggccgaagctgatcatagcgggagcaagtgcttacgctcgtgatttcgactacccacgtatgcggaagattgcggacagcgtgggagcttttctgatgatggacatggcccacattagtgggcttgttgcagccggtgttctaagcaacccgtttgagtactgcgacgtcgtgaccaccactacccacaaatctttgaggggtccaagaggagggatgatcttctaccggaaaggagaggtgaatggaatcgatctggaaaacgccatcaacaatgctgttttcccgggtcttcagggtggtccgcacaatcataccatcggaggactcgccgtatgcctgaagcaagctgctaccccagagtttaagacttatcaacagcaggttgtgaagaactgtcgtgctttggcagatagattgatggagctggggtacaagcttgtgtcaggagggactgacaatcacctggtgctggttgacctccgacccatgggtgctgatggtgcgcgggcagagaaggtgctggatttggcatccatcacgctgaacaagaattctgttcctggagacaagagtgcgatcaaccccggtggagttcgaattggctcaccggctcttaccacgcgaggtcttggggaagcggagtttgtgaaggtggcaaacttcatccacgagggtatccaaatcacagtgaaggcaaaggagacgtgtccagggacgaagatcaaggattttctggagtacgtggagtcggagagctgcgaacaacgtggtgcgattctggatctacgaaaacgggttgaagcatttgcgacccagtaccccatcccaggggttggcacagagatttttggtgagagagttagcagagcagaaaagctccgtgaaggaaatggcatcccttggcacttgatagagcaggacgtgatagtcgccgggacggcattcgtttggagaacagcagcatgttcaatggtagcgctgtag

SEQ ID NO: 4019 - protein, 582 aa, Physcomitrella patens subsp. patens
MAAALSSSCSPASRLCGCVSVGSSPGSSKVSHVQLPHSLRSAEVQALGAVNLAPASVYRRRPLVVCASAAAPVSVPEGATRFVDPPLSEIDPDVHAIIECEKRRQFRGLELIASENFTSRAVMEAVGSCLTNKYSEGLPGKRYYGGNEYIDQSERLCQQRALTAFHVDEKEWGVNVQPLSGSPANFAVYTALLQPHDRIMGLDLAHGGHLTHGFMTPKRRVSATSVYFESMPYRLNETTGLVDYDILQQTALLFRPKLIIAGASAYARDFDYPRMRKIADSVGAFLMMDMAHISGLVAAGVLSNPFEYCDVVTTTTHKSLRGPRGGMIFYRKGEVNGIDLENAINNAVFPGLQGGPHNHTIGGLAVCLKQAATPEFKTYQQQVVKNCRALADRLMELGYKLVSGGTDNHLVLVDLRPMGADGARAEKVLDLASITLNKNSVPGDKSAINPGGVRIGSPALTTRGLGEAEFVKVANFIHEGIQITVKAKETCPGTKIKDFLEYVESESCEQRGAILDLRKRVEAFATQYPIPGVGTEIFGERVSRAEKLREGNGIPWHLIEQDVIVAGTAFVWRTAACSMVAL

SEQ ID NO: 4020 - DNA, 1326 bp, Physcomitrella patens subsp. patens
  CDS (1)..(1326)
atggaaagagagaagcatagacaatggagaggcattgagctgattgcttcagagaatttcacttcactagccgtcttcgaagcactgggcagtcatctcaccaacaagtactcggaaggattacctgggagtagatattacagggggaacgaaaacatcgatcagatcgagtctctctgttgttcaagggctttatcagcctttcatcttgatcctgcgaagtggggtgtaaatgtacaaccctactcatgttcatccgcaaacttagctgttttcaccgcacttctgcaaccgaatgaccgcattatgggcttggacgttctgtccggaggtcaccttagtcacgggtatcagacgcagggcggaaagaagatatccgcagcttccatttattttcagactttaccattcaaggtgcatcctgaaactggccttatcgattacgagaaaatggaggaaatagcactcctctatcgacccaagattctgatttgtggtggaagctcttaccctcgagaatggaattattctcgctttcgccaagtggctgataaaattcatgccatcttaatgtgtgacatggctcatataagcggacttgtggccgcacaggaatgtgacagcccttttaattactgtgatgtggtcacgtccaccactcataagtcacttcgtggacctcggggcggcatagtcttcttccggaaagacttgaaggctggtggcaagccaggggatggcgcccctggtaaccttgagcgggatatcaatttcgcaattcatccgactttacaaggtggtccgcacaacaaccatattgcagctctcgcggtgtccctcaaacaggcatgctcgaaagagtacaaggagtacatccagcaagtgaagaagaacgctcaagctcttgcagaaggcctgaagaggcgagggtgcaagctggtcacggatggaactgataaccatctaatactttgggaccttcgcccttttggtatcactggtaatcttctcgaagaagtttgtgaagcatgccatatcacagtgaacaagaatgccgtttatggagacagtagctcctggcagcctggcggtgtacgtattggaaccccagctatgacgtcccgtggctgcaacgaaggagactttgacactattgcagaatttctttttaagaccatgcaaatcgctgcaaatctaaacaaaggaaacttcaaggcccagtcaaagaacgaggttttcagtaatggcgaaattcgggagctgaggtccaaagtcgaggaattcgccactgcatttgaaatgcctgggttcgatgttccacagtga

SEQ ID NO: 4021 - protein, 441 aa, Physcomitrella patens subsp. patens
MEREKHRQWRGIELIASENFTSLAVFEALGSHLTNKYSEGLPGSRYYRGNENIDQIESLCCSRALSAFHLDPAKWGVNVQPYSCSSANLAVFTALLQPNDRIMGLDVLSGGHLSHGYQTQGGKKISAASIYFQTLPFKVHPETGLIDYEKMEEIALLYRPKILICGGSSYPREWNYSRFRQVADKIHAILMCDMAHISGLVAAQECDSPFNYCDVVTSTTHKSLRGPRGGIVFFRKDLKAGGKPGDGAPGNLERDINFAIHPTLQGGPHNNHIAALAVSLKQACSKEYKEYIQQVKKNAQALAEGLKRRGCKLVTDGTDNHLILWDLRPFGITGNLLEEVCEACHITVNKNAVYGDSSSWQPGGVRIGTPAMTSRGCNEGDFDTIAEFLFKTMQIAANLNKGNFKAQSKNEVFSNGEIRELRSKVEEFATAFEMPGFDVPQ

SEQ ID NO: 4022 - DNA, 1443 bp, Physcomitrella patens subsp. patens
  CDS (1)..(1443)
atgtctccaagagtggtagttaaccacaacagttatcagactcatgataatgaatctcggaaacgagcagtgagggattggggaaatagaccacttgctgaggttgatccagatctgtggaagattatggagaaggagaagagtcggcaatggaaaggtatagagctggttgcatctgaaaattttacttcactggctgtgtttgaagctctcggaagtcacctcacaaacaagtattcggagggactccctggttccaggtactacaagggtaatgaatacattgatcagattgagtccctttgcatttctagggcgcttgcagcttttcatctggacaatgagagatggggggtaaatgtccagccatattcatgctcttctgccaattttgctgtttacactgcattgttgcagccaaatgatcgaattatgggtttggatgtcctatccgggggccatgttagtcatggttatcacacacagagcggcaagaaaatccctgctgcctctatatatttccagactttgccattcaaggttcaccccgaaacaggacttattgactatgataaagtggaggaaattgcgctactatatcgtcccaaaatccttatatgtggaggaagctcatatcctagggagtggaattactcccgatttcgccaggttgccgacaagatcggtgccgttcttatgtgtgatatggctcacatcagcggtctcgttgcagcgcaagagtgtttaagcccgtttgactactgtgacgtggtcactactacaacgcacaagtcacttcgtggacctcgcggtggcatgatattttttcggaagggattgaagtcagccagcaggccagccgatgggcagtataattttgagaaggaaatcaacattgcagtgcaccctacgttacaaggtggcccgcacaacaatcacatagcagccttagctgcagctcttaagcaagctgcgtctgcagaatacaaggcgtatattcaacaagtgattaagaatgctcagtcacttgctgaagggttaaagcgtcgagggtgtaagctggtaacagacgggacagacaatcatctgatgctatgggaccttcgtccatttgccatcccgagcagtctgttcgaagaagtttgtgaagcgtgtcacataacggtgaacaagagtgccgtttatggtgacagcagctcatttcagcctggtggtgtacggattggaactccagcaatgacatcacgaggatgtaacgaaggggatttcgatattatcgcagatttgcttcatcgggctgtccaaatcacaacagctctgcacaaggagaatccgaagcagcagcgcaacctgggaagcaattctgacgtgcaggctctgagggccaaggttgaggagttcgctaccgcatttgaaatgcctggatttgatgtaccctgttga

SEQ ID NO: 4023 - protein, 480 aa, Physcomitrella patens subsp. patens
MSPRVVVNHNSYQTHDNESRKRAVRDWGNRPLAEVDPDLWKIMEKEKSRQWKGIELVASENFTSLAVFEALGSHLTNKYSEGLPGSRYYKGNEYIDQIESLCISRALAAFHLDNERWGVNVQPYSCSSANFAVYTALLQPNDRIMGLDVLSGGHVSHGYHTQSGKKIPAASIYFQTLPFKVHPETGLIDYDKVEEIALLYRPKILICGGSSYPREWNYSRFRQVADKIGAVLMCDMAHISGLVAAQECLSPFDYCDVVTTTTHKSLRGPRGGMIFFRKGLKSASRPADGQYNFEKEINIAVHPTLQGGPHNNHIAALAAALKQAASAEYKAYIQQVIKNAQSLAEGLKRRGCKLVTDGTDNHLMLWDLRPFAIPSSLFEEVCEACHITVNKSAVYGDSSSFQPGGVRIGTPAMTSRGCNEGDFDIIADLLHRAVQITTALHKENPKQQRNLGSNSDVQALRAKVEEFATAFEMPGFDVPC

SEQ ID NO: 4024 - DNA, 1437 bp, Physcomitrella patens subsp. patens
  CDS (1)..(1437)
atgggtgaggaggcagtcgagtacaaggtcgccgagtggggaaaccagtctctggaggttgctgacgaggagatttacaacctcatcgagcatgagaaggtgcgccaatgccggggcattgagctcattgcttccgagaacttcacatctcaggccgtgatcgaagctttggggtccgcccttaccaacaagtactcagaggggctccccggagccaggtactatggtggtaatgagttcatcgatcagatcgagaacctgtgcaaagccagggcgttgaaggctttccacttggacagcgagaagtggggtgtgaatgtacagccctactctggctcccctgctaacttcgctgtttacactgcgcttctcaaccctcacgatcgcatcatgggcctggaccttccctcggggggtcacttgactcacggatactacacatctggcgggaagaaaatctctgctacttcaattttttttgagagcttgccttacaaggtgaactacgagactggatacatcgattacgagaagttggaggagaaggcaatggacttccgtcctaagatgattatctctggaggaagcgcatatcctagagactgggactatgcacggctcaggactattgctgataaggttggagccctgttgatgtgcgatatggcacactacagtggtctcgtggccgcccaggaagtgaaccaaccatttgattactgtgatgtggtgaccaccacgacccacaagagtctgaggggaccccgcgcgggaatgatcttctacaggaaaggcccgaagccagcgaagaagggacagccagagggcgctgtctacgactacgaagacaagattaacttctccgtcttcccatccttgcagggaggaccacacaaccatcagatcgctgctttggcggttgcgctcaagcaggtggatactcctctgttcaaagcatacgcgaagcaagtcaaagccaatgccaaggctattggagaagcattgatgaagaagggatacaagatggtgactggcggcacagagaatcacttggttttgtgggatctgcgacctctcggactcactggaaacaaggtggagaaagtgtgtgagcttgcccacatcacattgaacaagaatgccgtattcggtgacagcagtgctttggcccctggtggtgtccgagttggcgcacccgccatgacatctcgtgggctgaaggagaaagacttcgagcagattgctgactttctggagcgtgccgtaaacatcaccttgaaggtgcagaaggagaggggcaaattgctgaaggaatttaacaagggattggaaaacaacgaagagatcgctgccctgaagagggatgtagagaagttctccatgtcttttgacatgcctgggttcgatgtcaacaaacttaagtatggcaacgaatag

SEQ ID NO: 4025 - protein, 478 aa, Physcomitrella patens subsp. patens
MGEEAVEYKVAEWGNQSLEVADEEIYNLIEHEKVRQCRGIELIASENFTSQAVIEALGSALTNKYSEGLPGARYYGGNEFIDQIENLCKARALKAFHLDSEKWGVNVQPYSGSPANFAVYTALLNPHDRIMGLDLPSGGHLTHGYYTSGGKKISATSIFFESLPYKVNYETGYIDYEKLEEKAMDFRPKMIISGGSAYPRDWDYARLRTIADKVGALLMCDMAHYSGLVAAQEVNQPFDYCDVVTTTTHKSLRGPRAGMIFYRKGPKPAKKGQPEGAVYDYEDKINFSVFPSLQGGPHNHQIAALAVALKQVDTPLFKAYAKQVKANAKAIGEALMKKGYKMVTGGTENHLVLWDLRPLGLTGNKVEKVCELAHITLNKNAVFGDSSALAPGGVRVGAPAMTSRGLKEKDFEQIADFLERAVNITLKVQKERGKLLKEFNKGLENNEEIAALKRDVEKFSMSFDMPGFDVNKLKYGNE

SEQ ID NO: 4026 - DNA, 1452 bp, Phaeosphaeria nodorum SN15
  CDS (1)..(1452)
atggaagcccagcaaaaggtgctttcgcaagacctcgagaaagcggatccaacggtctatgagatcatccagaaggagaagaacagacaaaagcactttatcaacctcatcccctcggagaacttcacgtcgcaagctgttctcgatgctctcggcagtgttatgcaaaacaaatactcggagggatatccaggcgcgcgatactacggtggtaacgagcacatcgatgaggcggagcggctatgccagtcaagagcgctcaaggcgttcggtctgagcccggaggaatggggggtcaacgtacaaccactctcggggtctccagcaaacctctacgcatactcggccatccttaacacacacgatcgcatcctcagtctcgatcttcctcatggcggccacttgtcccacggttaccaaataccaggaaagaagatctcggcagtctccaagtattacgagactctaccatataggctgaacgagaagaccggcattatcgattatgatcgcatggaagaattggcatacctgtaccgacccaaggtcattgttgccggtacatcagcatacagccgattgatcgactatgagcgcttccgtaaggtggcagacggcgtaggcgcatatctcctgtctgatatggctcacatctctggtcttgttgccgcgtccgtcatcccgtcaccattccctcactccgacatcgtcacaaccacaacccataagtcgttgcgcggcccgcgaggtgccatgattttcttccgtaagggcacaaggcgtgtggataagaagggcaaggaggagaagtacgatcttgaaggcccaatcaaccagtctgtcttccctggccaccaaggaggacctcacaaccacactatcacagctctggctgtcgccttacaacaagcccaaagcaaggagttcaaggactaccagcaacaagtacttgagaatgccaagtctcttgcacagcgtctcggtgataccaaagaaaacggcggcctgggctacaacgtcgttagcggtggaactgacaaccaccttgtccttattgacttgaaggacaagggcgtagacggagctcgagttgagcgcatcctcgagcttgtcggcgtggcgtccaataagaacaccgttcctggtgacaagtccgccatgaagcctggcggtctgcgcatgggcactcccgcaatgacgacccgtggctttgcacctggcgacttcaagcgtgtcgccgatgttgtccaccgcgccgtcggcatcactcagaagctcgataaggaggcgaagaagaaggccgaggagactggtcgcaagaaccccggcagcgtcgctgccttcaaggaatacgtaggtgaaggagaggacatcaccgacgttgttcagttacgaaaggaagtcgaggactgggtagctacttttgctctcccatgggacaagagcgaatag

SEQ ID NO: 4027 - protein, 483 aa, Phaeosphaeria nodorum SN15
MEAQQKVLSQDLEKADPTVYEIIQKEKNRQKHFINLIPSENFTSQAVLDALGSVMQNKYSEGYPGARYYGGNEHIDEAERLCQSRALKAFGLSPEEWGVNVQPLSGSPANLYAYSAILNTHDRILSLDLPHGGHLSHGYQIPGKKISAVSKYYETLPYRLNEKTGIIDYDRMEELAYLYRPKVIVAGTSAYSRLIDYERFRKVADGVGAYLLSDMAHISGLVAASVIPSPFPHSDIVTTTTHKSLRGPRGAMIFFRKGTRRVDKKGKEEKYDLEGPINQSVFPGHQGGPHNHTITALAVALQQAQSKEFKDYQQQVLENAKSLAQRLGDTKENGGLGYNVVSGGTDNHLVLIDLKDKGVDGARVERILELVGVASNKNTVPGDKSAMKPGGLRMGTPAMTTRGFAPGDFKRVADVVHRAVGITQKLDKEAKKKAEETGRKNPGSVAAFKEYVGEGEDITDVVQLRKEVEDWVATFALPWDKSE

SEQ ID NO: 4028 - DNA, 1416 bp, Phaeosphaeria nodorum SN15
  CDS (1)..(1416)
atgtctacttacgcgctccccaagtcccaccaggacctcatggagaagtccctggtggacacggacaatgaggttgcccagatcatggagaaggagattcagcgtcagcgcgagtccatcctcctcatcgcgtccgagaatgtcacatcccgcgccgtcttcgatgctctcggctcgcccatgtccaacaagtactccgagggctaccccggtgcccgctactacggcggaaacgagcacatcgacgccattgagctgctgtgccagaagcgcgctctcgaggccttcggtctggatgcagagaagtggggtgtgaacgtccagtgcttgagcggcagcccagccaacctccaggtctaccaggccatcatgcgcccacacgacaggctcatgggtcttgatctgccccacggcggacatttgagccacggataccagacaccgcagaggaagatctctgccgtctccacatacttcgagaccttcccttaccgcgtgaacctcgacaccggcatcatcgactacgaccagctcgagcagaatgccctcatgtaccgccccaaggtcctcgtcgctggaacctctgcctactgccgtgagatcgactacgcccgcatgcgcgagattgccgacaaggtcggatgctacctgatgatggacatggcacacatttctggactcgtcgccgctggcgttaacaagtcgcccttcccatactgcgatattgtcacaaccaccacccacaagtctctccgtggaccccgtggtgccatgatcttcttccgcaagggcgtccgcaagaccgacgcgaagaccggcaaggagaccctgtacgatctcgagggacccatcaacttctccgtgttccctggtcaccagggtggaccccacaaccacaccatcactgcgcttgcagtcgcgctcaagcaggctcagaccgaggacttcaagctttaccagcagcaggtcatcaagaacgccaagcagctcgaggtcaccttcaaggagcttggcttcaagctcgtcaccgacggcacagacaaccacatggtcctcatcgacctcaagcccttcgccctcgacggtgcgcgtgttgaggctgtgctcgagcaggtcaacatcgcctgcaacaagaacaccacacccggcgacaagagcgcgctatcacccatgggtatccgtatcggtgcgcccgccatgacctcaagaggtctcggcgaggacgacttcaagaagattgccggctacatcaacaagtgcgtcgagatgtgcaagaagatccagggcgagttgcccaaggacaacaacaagctcaaggacttcaaggccaaggttgcatctggcgaggttgaggagatcaacagcctgaagaaggaaattgccgcgtgggccgttaccttccctcttcccatctaa

SEQ ID NO: 4029 - protein, 471 aa, Phaeosphaeria nodorum SN15
MSTYALPKSHQDLMEKSLVDTDNEVAQIMEKEIQRQRESILLIASENVTSRAVFDALGSPMSNKYSEGYPGARYYGGNEHIDAIELLCQKRALEAFGLDAEKWGVNVQCLSGSPANLQVYQAIMRPHDRLMGLDLPHGGHLSHGYQTPQRKISAVSTYFETFPYRVNLDTGIIDYDQLEQNALMYRPKVLVAGTSAYCREIDYARMREIADKVGCYLMMDMAHISGLVAAGVNKSPFPYCDIVTTTTHKSLRGPRGAMIFFRKGVRKTDAKTGKETLYDLEGPINFSVFPGHQGGPHNHTITALAVALKQAQTEDFKLYQQQVIKNAKQLEVTFKELGFKLVTDGTDNHMVLIDLKPFALDGARVEAVLEQVNIACNKNTTPGDKSALSPMGIRIGAPAMTSRGLGEDDFKKIAGYINKCVEMCKKIQGELPKDNNKLKDFKAKVASGEVEEINSLKKEIAAWAVTFPLPI

SEQ ID NO: 4030 - DNA, 1413 bp, Aspergillus oryzae RIB40
  CDS (1)..(1413)
atggccacctacgctctgtcgcaggcccaccgggaccaaatggagaagactctcgttgagtctgatcccgaaattgctcagatcatggaaaaagagattcagcgtcagcgtgaatccatagtcctgatcgcttcggagaacttcacttctcacgccgttttcgacgcccttggttctcccatgtccaacaagtactccgagggttaccccggtgcccgttactacggtggtaatcagcacatcgatgccatcgagctcacatgccaggcccgtgccctgaaggccttcaacctcgaccctgccaagtggggcgtcaacgttcagtgcctgagtggcagccctgccaacttgcaggtctaccaggctcttatgcgcccccatgaccgtctgatgggtctggatcttccccacggaggccatctgtcccacggttatcagacccccgccagaaagatctctgctgtctctacttacttcgagaccttcccctaccgtgtcaaccttgagactggtatcattgattacgatgccctggaggccaacgctgagctctaccgccccaagtgtctggttgccggtacctccgcctactgccgcttgatcgactatgagcgcatgcgcaagatcgctgacaaggtcggcgcttacctcattgttgatatggcccatatctccggattgatcgccgccggtgtcattccttctcccttcgagtacgccgatgttgtcactaccaccacccacaagtctcttcgtggcccccgtggtgccatgatcttcttccgcaagggtgtgcgcagcactgacaagaccggaaaggagattctttacgaccttgagggtcctatcaacttctccgttttccctggtcaccagggtggtccccacaaccacaccatcactgcccttgctgttgctctcaagcaggttgacactcccgagttcaagcagtaccagcagcaggtcctgaacaacgccaaggctctggagaacgagttcaagcagctgggccacaagctcgtctctgacggcactgacagccacatggtcctggtcgacctccgtgctcagaagttggacggtgctcgtgttgaggctgtcctggagcagatcaacattgcttgcaacaagaactccatccctggtgacaagtctgcccttaccccctgtggtatccgtatcggtgctcctgccatgaccacccgtggtatgggtgaggaggacttcaagcgcatcgctcactacatcgacaaggccatcaagatctgcaaggatgttcagggtgcgctccccaaggaggccaacaagctcaaggacttcaaggccaaggttgcctccgagaccgtctcggacatcctggagctgcgcaaggagattgccgcctgggcttccaccttccctctccccgtttaa

SEQ ID NO: 4031 - protein, 470 aa, Aspergillus oryzae RIB40
MATYALSQAHRDQMEKTLVESDPEIAQIMEKEIQRQRESIVLIASENFTSHAVFDALGSPMSNKYSEGYPGARYYGGNQHIDAIELTCQARALKAFNLDPAKWGVNVQCLSGSPANLQVYQALMRPHDRLMGLDLPHGGHLSHGYQTPARKISAVSTYFETFPYRVNLETGIIDYDALEANAELYRPKCLVAGTSAYCRLIDYERMRKIADKVGAYLIVDMAHISGLIAAGVIPSPFEYADVVTTTTHKSLRGPRGAMIFFRKGVRSTDKTGKEILYDLEGPINFSVFPGHQGGPHNHTITALAVALKQVDTPEFKQYQQQVLNNAKALENEFKQLGHKLVSDGTDSHMVLVDLRAQKLDGARVEAVLEQINIACNKNSIPGDKSALTPCGIRIGAPAMTTRGMGEEDFKRIAHYIDKAIKICKDVQGALPKEANKLKDFKAKVASETVSDILELRKEIAAWASTFPLPV

SEQ ID NO: 4032 - DNA, 1545 bp, Aspergillus oryzae RIB40
  CDS (1)..(1545)
atgctgagccgctgtggtcgccaggctttgcgattgatcccgcgcacgggaagctcttccagagctatcgccatcactactcaactccgaccggctgctcccttgtgtgtctccagctcaatttctcagagccggagtgtgtcatcctccagtcgtgatggacagcaacatgagaaaaaacgtcaaaagcactttatcaacctgatcccttcggagaacttcacttcacaagcggtccttgatgccctgggcagtgtgatgcaaaacaagtattcagagggttatcccggtgccagatactacggaggaaatgagcacatcgacgagtcggagaggttatgtcaacagcgtgccttggagaccttccggctcaatcccgaagaatggggcgtgaatgttcaaccactttccggctctcccgcgaacttgtatgccatctccgcccttctcaacacgcatgaccgcctgatgggcctggacttgcctcatggtggtcacttgtcacatggttatcagacacccaccaagaagatttcattcatctcgaaatactttgagacccttccttaccgccttgatgagtcgactggtctcattgattacgacgccctcgagaagcaggcgttgctctatcgtccaaagctcattattgccggtacttcggcctatagccgattaatcgactaccctcggatgcgccagatcgcagacgcagctggtgcataccttctcagtgacatggcccacatatctggactggttgctgcggatgtacttccctcgcctttcactcactctgatgtggtaacaacgactactcacaagtccctgcgtgggccccgtggtgccatgatcttctaccgcaagggtgtccgccggacggacaagaagggcaacccggagatgtacgacttagagaatcctatcaatgcctccgtcttcccgggccaccagggtgggcctcataaccacaccattactgctctagcagttgcactgaagcaggcccagtcaaccgagttcaagacttaccaggaaaccgtcttagccaacgctaaggcattggctgaccgacttggcagccctctcagcaatgggggtttgggatacaacattgtgtccggtggaacggataaccacctggtcctcgtggatctgaagaaccgtggggttgatggagcccgtgttgaacgtgttctagagctctgcggcgttgctagcaacaagaacaccgttccgggagatcggtcggctttgaagcccggtggtctccgcctgggtactcctgccatgactacccgtggcttccagcccgaggacttccgccgcgtggccgatatcgttgatcgcgcggtcattatcacccaaaagctggacaaggctgccaaggagagcgctgcggctaagggcgttaagaacccgaacactgtcaaggccttcctggaatatgttggtgagggtgaggagatttcagagattgtgctcttgcggcaggaagttgaggactgggtgggaactttcagcctcccttggaaggacgagtaa

SEQ ID NO: 4033 - protein, 514 aa, Aspergillus oryzae RIB40
MLSRCGRQALRLIPRTGSSSRAIAITTQLRPAAPLCVSSSISQSRSVSSSSRDGQQHEKKRQKHFINLIPSENFTSQAVLDALGSVMQNKYSEGYPGARYYGGNEHIDESERLCQQRALETFRLNPEEWGVNVQPLSGSPANLYAISALLNTHDRLMGLDLPHGGHLSHGYQTPTKKISFISKYFETLPYRLDESTGLIDYDALEKQALLYRPKLIIAGTSAYSRLIDYPRMRQIADAAGAYLLSDMAHISGLVAADVLPSPFTHSDVVTTTTHKSLRGPRGAMIFYRKGVRRTDKKGNPEMYDLENPINASVFPGHQGGPHNHTITALAVALKQAQSTEFKTYQETVLANAKALADRLGSPLSNGGLGYNIVSGGTDNHLVLVDLKNRGVDGARVERVLELCGVASNKNTVPGDRSALKPGGLRLGTPAMTTRGFQPEDFRRVADIVDRAVIITQKLDKAAKESAAAKGVKNPNTVKAFLEYVGEGEEISEIVLLRQEVEDWVGTFSLPWKDE

SEQ ID NO: 4034 - DNA, 1443 bp, Coprinopsis cinerea okayama7#130
  CDS (1)..(1443)
atggcatcccaaaacacaccagctttcaacaagattctctacgctcctttggcagagatcgacccagaggtcaaaaatatcatcgacaaggagacatggaggcagttcactggactcgagcttattgcttcagagaacttgaccagccaggccaccatggaggccaatggctcaattctcaccaacaaatactctgagggtctccccaatgctcgttactacggtggtaacgagtacattgacgaactcgagctcctttgccgaaagcgtgcccttgaggccttccacctcgatgcctccaagtggggtgtcaatgtccagccctactctggcagtactgcaaactttgctgctcttaccgctttgatccaaccccaggaccgactcatgggtctcggtctccccgacggtggccatctcacccacggttactacaccgccaaaaagaagatgaccgcctcctccatctacttccagtccctcccctacggtatcatccctgagagcggcctcatcgactacgacaagctcgaggcccaagctaaaatctacaagccccgactcatcatctgcggtgcctctgcctacccccgtgactgggactatgctcgtctccgccagattgctgacaaggagggcgcttggttgatggctgatattgcccacaccagtggtctcattgctgcccaggagctcaacagccccttcgactactgtgacgttgtcaccaccaccacccacaagacccttcgtggccctcgtgctggcctcatcttctacaggaaggatctcgagaacgccaaggacctcgagaagcgcgtcaacgacgccgtcttccctgcctgccagggtggtcctcacaacaacaccatcgctgctattgctaccgccctcaagcaggtcgcctcccccgaatggaaggcctacgccaagcaggtcgtcgccaatgcccgcgccctcgctgagaccctcgtcggtcacggctacaagctccaaactggcggtaccgacaaccacctcgtcctctgggacctccgccccatcggcctcaccggctccaaggtcgagaaggtctgcgacctcatgggtatcaccatcaacaagaacgctgtctccggtgacgcctctgctcaagtccccggcggtatccgtttgggtacctccgcgctcacctcgcgtgacatgcgcgaggaggacgtcaagcaggtcgccgagttcttgcaccgtgctgtgcagatctccttgactctccagaaggaggccggcaccaagttgttgaaggactttgtccgtgttgctaccaccaaggaggagggcaaggttggatatgagcaggtcagccaactgagggaggaggttcaggcctttgccaagaggttccctctccctggtgtcgatacccagaacctgcagaggcccgagggtttgcatgagtaccactaa

SEQ ID NO: 4035 - protein, 480 aa, Coprinopsis cinerea okayama7#130
MASQNTPAFNKILYAPLAEIDPEVKNIIDKETWRQFTGLELIASENLTSQATMEANGSILTNKYSEGLPNARYYGGNEYIDELELLCRKRALEAFHLDASKWGVNVQPYSGSTANFAALTALIQPQDRLMGLGLPDGGHLTHGYYTAKKKMTASSIYFQSLPYGIIPESGLIDYDKLEAQAKIYKPRLIICGASAYPRDWDYARLRQIADKEGAWLMADIAHTSGLIAAQELNSPFDYCDVVTTTTHKTLRGPRAGLIFYRKDLENAKDLEKRVNDAVFPACQGGPHNNTIAAIATALKQVASPEWKAYAKQVVANARALAETLVGHGYKLQTGGTDNHLVLWDLRPIGLTGSKVEKVCDLMGITINKNAVSGDASAQVPGGIRLGTSALTSRDMREEDVKQVAEFLHRAVQISLTLQKEAGTKLLKDFVRVATTKEEGKVGYEQVSQLREEVQAFAKRFPLPGVDTQNLQRPEGLHEYH

SEQ ID NO: 4036 - DNA, 1404 bp, Culex quinquefasciatus
  CDS (1)..(1404)
atgtccggcaacgcgaagctgctgcacgagaacctgtggcaggccgatccagagctgatggatctggtccggaaggagaagaagcgccagatccagggcctggagatgatcgccagcgagaactttacctcgctgtcggtgctacagtgtctgagctcgtgcctgcacaacaagtattccgagggactgcccggccagagatactatggtggcaacgagtacatcgacgaaatcgaactcctcgcccaaaagcgtgccctcgaggcgtaccggctgaatccggaggagtggggttgcaacgtgcagccgtactcgggttcgccggccaactttgccgtgtacaccgggttgatcgaaccgcacgggcgcatcatggggctggacctgcccgatggtggccacttgacgcacggtttcatgacggcgaccaaaaagatctccgccacgtccatcttcttcgagagcatgccgtacaaggtcgatccggtgacggggctgatcgattacgacaagctggaggaaagtgcgcggatattcaagccgaagatcatcatcgcgggcatttcgtgctactcgcggtgtctggactacaagcgcttccggcagattgccgacgccaacggggcttacatgtttgcggacatggcgcacatttccgggctggtcgcggccggagttattccatcgccgtttgagtttgcggatgtggttagtacgaccacgcacaaatcgctccgtggaccacgtgctggagtgatcttctaccgcaagggggtgcgcagtgtcaaggcgaacggggagaaggtgctgtacgacttggagagcaagatcaaccaggcggtgttcccgggtctgcagggaggaccacacaaccacgccatcgccggaatcgccacctgcatgctgcaagcccagacgccggagttcaaagaataccaggtgcagatcatcaaaaacgcccgtgccctctgcgacggcctgctgcagaagggttacaccatctcgaccggtggaaccgacgtccacctggtgctcgttgacctgcgtccggtcggtatcaccggagctcgcgccgaatacgtcctcgaagaaatatcgatcgcgtgcaacaaaaacaccgtccccggcgacaagagcgccctcaacccgtccggaatccggctgggaacgccggcgctgaccacgcgtggcctcaccgagtcggacatggcccgggtggtggactttatcgatcggggtctgcagctgtcgaaggaaatcaccgccgtgtccggaccgaagctggccgactttaagcgagtgctgcacgaagatccgaagcttaatggcaaggtgcaagccctcaagaaggaggtccaagactacagcgaaaagttcccgatgcccggctacgaggagttctga

SEQ ID NO: 4037 - protein, 467 aa, Culex quinquefasciatus
MSGNAKLLHENLWQADPELMDLVRKEKKRQIQGLEMIASENFTSLSVLQCLSSCLHNKYSEGLPGQRYYGGNEYIDEIELLAQKRALEAYRLNPEEWGCNVQPYSGSPANFAVYTGLIEPHGRIMGLDLPDGGHLTHGFMTATKKISATSIFFESMPYKVDPVTGLIDYDKLEESARIFKPKIIIAGISCYSRCLDYKRFRQIADANGAYMFADMAHISGLVAAGVIPSPFEFADVVSTTTHKSLRGPRAGVIFYRKGVRSVKANGEKVLYDLESKINQAVFPGLQGGPHNHAIAGIATCMLQAQTPEFKEYQVQIIKNARALCDGLLQKGYTISTGGTDVHLVLVDLRPVGITGARAEYVLEEISIACNKNTVPGDKSALNPSGIRLGTPALTTRGLTESDMARVVDFIDRGLQLSKEITAVSGPKLADFKRVLHEDPKLNGKVQALKKEVQDYSEKFPMPGYEEF

SEQ ID NO: 4038 - DNA, 1506 bp, Laccaria bicolor S238N-H82
  CDS (1)..(1506)
atgttgagattattaggacgacccattctccgcacgcccatctcacgtcaactagttttcagaaaaatggccacagcgaataccccagatttcaacaaggttctctacactcctttggcggagatcgacccagaggtcaagaatatcatcgataaggagacatggagacagttcactggcctcgagcttattgcctccgaaaacttgaccagcagggctaccatggaggccaatggctcaattctgaccaacaagtattccgaaggtctcccgaacgccaggtactacggtggcaacgagtatatcgatgaacttgaagttctttgccgcaaacgtgccctccaagcttttaaccttgaccctcttaaatggggcgtcaacgttcagccatattctggtagtaccgccaactttgcggctctcaccgcacttatccagcccaatgaccgtctcatgggtctgggccttcccgacggtggacatcttacccacggatactacactgcaaagaagaagatgactgcgtcgtcaatttacttccagtctttcccttatgccatcactcccgaaaccaatttgattgactatgctgggctcgcctcacaagccaagatcttcaagccccgcttgattatttgtggtgcctcggcttaccctcgtgactgggattacaagaacctcaaggataccgctacaagggaaggtgcctggctcatggcagatattgcacacaccagtggtcttgttgctgcccaggagttgaataatccgttcgaatactgtgatgtcgttaccacgacaacccacaagactctccgtggtcctcgtgctggtctcatcttcttcaggaaggatctcgagtatgcgaaagacctcgagaagcgcgtcaatgacgccgtcttccctgcttgccagggtggaccccacaacaacaccatcgctgctatcgccacagccctgctccaggtcgcccaacccgaattccgtgcttatgccaaacaggtcatctcaaacgcccagaccctcgcgtcatcgctcatcgagcatggctacaggttgcaaactggtggcaccgacaaccatctcgtcctgtgggacttgcggcccattggtttgacgggcagcaaagttgaaaaggtctgcgatctcatgggcatcaccatcaacaagaatgctgtttctggtgacgcctctgcccaagtgccaggcggcatccgtcttggcacctctgccctcacttctcgtgatatgaaggaggctgatatcaagaaggtcgctgaattcctccaccgcgccgttcaactctccctgctcctccaaaaagaggccggatcgaagctcctcaaagacttcgtccgcgtagccactactcaggaggcgggcaaagagggctacgcaaaggtgaaggagctgcgcgacgaggtccaatctttcgccagcgcattcccactccctggtgtggatgtctccgcgctgaaaaagcctgagggtctccatgagtattaa

SEQ ID NO: 4039 - protein, 501 aa, Laccaria bicolor S238N-H82
MLRLLGRPILRTPISRQLVFRKMATANTPDFNKVLYTPLAEIDPEVKNIIDKETWRQFTGLELIASENLTSRATMEANGSILTNKYSEGLPNARYYGGNEYIDELEVLCRKRALQAFNLDPLKWGVNVQPYSGSTANFAALTALIQPNDRLMGLGLPDGGHLTHGYYTAKKKMTASSIYFQSFPYAITPETNLIDYAGLASQAKIFKPRLIICGASAYPRDWDYKNLKDTATREGAWLMADIAHTSGLVAAQELNNPFEYCDVVTTTTHKTLRGPRAGLIFFRKDLEYAKDLEKRVNDAVFPACQGGPHNNTIAAIATALLQVAQPEFRAYAKQVISNAQTLASSLIEHGYRLQTGGTDNHLVLWDLRPIGLTGSKVEKVCDLMGITINKNAVSGDASAQVPGGIRLGTSALTSRDMKEADIKKVAEFLHRAVQLSLLLQKEAGSKLLKDFVRVATTQEAGKEGYAKVKELRDEVQSFASAFPLPGVDVSALKKPEGLHEY

SEQ ID NO: 4040 - DNA, 1455 bp, Brugia malayi
  CDS (1)..(1455)
  misc_feature (870)..(870): r is g or a
atgaacacctgctttttaccacttacagcgctcaaaggaatagaacgaatgcattattctggaagaaatatgctgaaggattcattgagtattgctgatcccgaagcttataaaatcatgcaaaaggaaaaggaaaggcagaaacgaggactggaactaattgcaagtgaaaatttcacttcgaaagctgttcatgatgcattaggctcttcaatgtcaaataaatattcagaaggctatcctggtatcagatattacgcagggaatgaatttattgatgaaatggaaatattatgtcgaagtcgtgctcttcaggtatttggtttggatgataagaagtggggtgtcaatgtgcaagccctctcaggttcaccagcaaattttgctgtttataccggcttgctggaaccaaatgggcgaattatgggtttggatttgcctgatggtggacatttgacccatggattctttacacctcgacgaaaagtttcatcgtcgtccttatttttccagtcgatgccttacaaagttgatgccaaaactggttacatcgattacaatcaactagagtacactgcattactatttcgtccaaatattattgtagcgggaacaagttgttattcacgcttgctagactacagtcgcttccgtaagatagctgataaatgtggtgcttatttattggctgatatggcacatatttcgggtctggttgctgcaaatgtcattccatcaccttttgaatatgctgatgtcatcacaacaacgactcacaaatcacttcggggtcctcgtggggctttgattttttacaggaaaggcttgaagaaaataactccaaaaggtgagaaagtgatgtatgatttrgaacaaaggatagattctgccgtatttccgggattgcaaggaggacctcataatcatacaatagcgggcattgctgttgctttaaatcagtgtcttacagaagattttattcaatattgcaagcagattttgtcaaactctcgaacacttgcaaatagattggtggaacttggctatactttggttacagggggaactgatactcatctctgcttggttgatttacgtccaaaaggtttggatggtgcgaaagtggaacatgtcctcagtttagctaatattatttgcaatcgtaatacttgtccaggagaccagagcgctctacatcccagcggtatacgtcttggaacaccagctcttactacacgaggaatgaaagaaaatgatttcgttagggttgccgattttattcatgaaggagtggaaattttggtaaaatatgagtcgcaggtgggcaaaacactaaaagacttgacagtgtttaccagttcgaatgagcagtttatagcagatattaataagttaggggaaaaagtggagcagttcgctagtcgtttcgatatgccggggaacgatgatatttaa

SEQ ID NO: 4041 - protein, 484 aa, Brugia malayi
MNTCFLPLTALKGIERMHYSGRNMLKDSLSIADPEAYKIMQKEKERQKRGLELIASENFTSKAVHDALGSSMSNKYSEGYPGIRYYAGNEFIDEMEILCRSRALQVFGLDDKKWGVNVQALSGSPANFAVYTGLLEPNGRIMGLDLPDGGHLTHGFFTPRRKVSSSSLFFQSMPYKVDAKTGYIDYNQLEYTALLFRPNIIVAGTSCYSRLLDYSRFRKIADKCGAYLLADMAHISGLVAANVIPSPFEYADVITTTTHKSLRGPRGALIFYRKGLKKITPKGEKVMYDLEQRIDSAVFPGLQGGPHNHTIAGIAVALNQCLTEDFIQYCKQILSNSRTLANRLVELGYTLVTGGTDTHLCLVDLRPKGLDGAKVEHVLSLANIICNRNTCPGDQSALHPSGIRLGTPALTTRGMKENDFVRVADFIHEGVEILVKYESQVGKTLKDLTVFTSSNEQFIADINKLGEKVEQFASRFDMPGNDDI

SEQ ID NO: 4042 - DNA, 1635 bp, Podospora anserina DSM 980
  CDS (1)..(1635)
atgacgacaatcccggcgttgcggagcgccgccggcggttccccctcggctgcgatgatgagaaggatgatagccaccaccaccacgacggccacgatgacgaggagggcgggacagcttgggggatggatgtcaagacagcagcagcagcagcagaaaagattggtttcgtcgttagggaatgatacgcagcagaagttgcttgcggcgcatttgcagcaggcggatccgatcatgtatgatattgtcgagaaggagaaagtcaggcaaaagcagttcatcaacttgatcccttccgagaactttacctcgcaggctgtgctggatgcgctggggagtcctatgcagaacaagtactctgagggatacccgggtgcgagatactacggcggtaacgagttcatcgatgcctccgagagattatgccagcagcgcgcactcgagacgttcggactggatgccaaggagtggggggtgaatgttcaagctctctctggtgcgccagcgaacctgtatgtctactcagccatcatggaaactcatgatcggttgatgggtctcgatctcccccacggcggccatctttcccacgggtaccagacccccaccaagaaaatctcgttcatctccaagtacttcgagacggttccttaccgacttgacgagtccaccggcctgatcgactacgataagctcgaggagctggcaaccatctaccgccccaaggttatcgtcgctggcgcctcggcctacagcaggcaaatcgattatgctcgtatgcgggacatcgccgacaaggtgaaggcctaccttgtggctgacatggctcatatctccggtcttgtcgccgccaaggtcatgcccgggccgtttggctacgcagacattgtcacgacgacttctcacaaatccctccgtggcccccgtggcgcgctgattttcttccgccgcggtgtgaggaaggtcaacccgaagaccggagcggaggagctgtacaacctcgagaaccccatcaaccaatccgtgtttcccggccaccagggcggtccgcacaaccacactattgccgccttggccgtggcgctcaagcaggcacaaacaccagagttcagggcgtatcaatcgcaggtcttgtccaatgccaaagccttctccaagaggctgggtgaaccaaaggaaaagggcgggctgggctacaagattgtctcgggcggtactgataaccatcttgttcttgtcgatctgaagccgcacggtgtggacggggcgagagtggaacggatcctggagttggtcggggtagcttccaacaagaacactgttccgggtgacaagagcgcgttgacgcctggtgggttgaggatgggaactccggccatgacgacgagaggattccaggaggaggactttgcgcgggtagcggatattgtcgataggtcggtgacgattgcggtcagggtggacaaggcggcgaggaaggcggctgaggaaaagggggaggggaagacggcggggagggtgaagacctttatggagtttttgggggatggggagacggacacggagattgtgcagttgaggagtgaggtggcggattgggtggggacgtatcctgttccttgggaggggaagtaa

SEQ ID NO: 4043 - protein, 544 aa, Podospora anserina DSM 980
MTTIPALRSAAGGSPSAAMMRRMIATTTTTATMTRRAGQLGGWMSRQQQQQQKRLVSSLGNDTQQKLLAAHLQQADPIMYDIVEKEKVRQKQFINLIPSENFTSQAVLDALGSPMQNKYSEGYPGARYYGGNEFIDASERLCQQRALETFGLDAKEWGVNVQALSGAPANLYVYSAIMETHDRLMGLDLPHGGHLSHGYQTPTKKISFISKYFETVPYRLDESTGLIDYDKLEELATIYRPKVIVAGASAYSRQIDYARMRDIADKVKAYLVADMAHISGLVAAKVMPGPFGYADIVTTTSHKSLRGPRGALIFFRRGVRKVNPKTGAEELYNLENPINQSVFPGHQGGPHNHTIAALAVALKQAQTPEFRAYQSQVLSNAKAFSKRLGEPKEKGGLGYKIVSGGTDNHLVLVDLKPHGVDGARVERILELVGVASNKNTVPGDKSALTPGGLRMGTPAMTTRGFQEEDFARVADIVDRSVTIAVRVDKAARKAAEEKGEGKTAGRVKTFMEFLGDGETDTEIVQLRSEVADWVGTYPVPWEGK

SEQ ID NO: 4044 - DNA, 1485 bp, Pyrenophora tritici-repentis Pt-1C-BFP
  CDS (1)..(1485)
atggcaaacctcagagcagcatgcagaacgcctttgcgccagctcacgtcgcgcccaacagccgcaattccgacgaatcattcaagattactgcagcgacaatggcggggctacgcaacaagcttggatgcacagcaaaaggtagatctgatcgagcggaaatttgacgccgtcctcgatgctctcggcagtgttatgcaaaacaagtattcggaaggatatccgggcgcacgatactacggaggaaatgaacacattgacgaggcagagcgactgtgtcagcaaagagcgctcaaagcgttcggcctgagtcctgatgagtggggtgtcaacgtccaggctctctcaggctcgcctgcaaacctctacgcttactccgccattctcaacacccatgaccgaattctcagtctcgatctgccccacggcggccacttgtcgcatggctaccaaacgcccactaagaagatctcggccgtctccaagtactttgagactctcccatacagacttaatgagaaaacgggcatcattgactacgagaagatggcggaattggcgcacctgtacaggcccaaggtcattgttgcgggcacgtcagcatacagtcgcttgattgagtacgagaggatgcgaaagctggcagatgaggttggcgcataccttctctcagatatggctcatatctctggactggtcgctgctggcgtcatcccatctccgtttccccactccgacatcgtgaccacaaccacccacaagtcgctgcgcggcccgcgaggcgctatgatcttctatcgcaagggtgttagaaaggtggacaagaagggtaagcaggagatgtacgatctagaaggtccgatcaatgcctcggtgtttccaggtcaccagggagggccccataaccatacaattactgctttggccgtagccctgcaacaagcttcgagcaaagaattcaaggactaccagcagcaggttcttgaaaatgcaaaggcccttgcgcatcgtctgggcgcttcaaaggacagcggcggccttggctacaatatcgtctccggcggcaccgacaaccaccttgttctcgttgacctcaaagaccgtggtgtagatggcgctcgagtagagcgtattctggagcttgttggcgtcgcttcgaacaagaacactgtccctggcgacaagtctgccatgaagcccggcggtctgcgcctcggtacccccgccatgacaacccgcggcttccaggccgacgacttcaagcgggtagctgatgtcgtacaccgagcagtcggtatcacacagaagctagacacagacgcaagaaagaaggcagaggacatgggccgcaagaaccctggcagtgtagcggctttcaaggaatacgtcggtgagggtgaggacattactgaaatcatcgaactcaagaaagaagttgcggattgggtatctacatttgcgctgccctgggacaaggcgcaatga

SEQ ID NO: 4045 - protein, 494 aa, Pyrenophora tritici-repentis Pt-1C-BFP
MANLRAACRTPLRQLTSRPTAAIPTNHSRLLQRQWRGYATSLDAQQKVDLIERKFDAVLDALGSVMQNKYSEGYPGARYYGGNEHIDEAERLCQQRALKAFGLSPDEWGVNVQALSGSPANLYAYSAILNTHDRILSLDLPHGGHLSHGYQTPTKKISAVSKYFETLPYRLNEKTGIIDYEKMAELAHLYRPKVIVAGTSAYSRLIEYERMRKLADEVGAYLLSDMAHISGLVAAGVIPSPFPHSDIVTTTTHKSLRGPRGAMIFYRKGVRKVDKKGKQEMYDLEGPINASVFPGHQGGPHNHTITALAVALQQASSKEFKDYQQQVLENAKALAHRLGASKDSGGLGYNIVSGGTDNHLVLVDLKDRGVDGARVERILELVGVASNKNTVPGDKSAMKPGGLRLGTPAMTTRGFQADDFKRVADVVHRAVGITQKLDTDARKKAEDMGRKNPGSVAAFKEYVGEGEDITEIIELKKEVADWVSTFALPWDKAQ

SEQ ID NO: 4046 - DNA, 1416 bp, Pyrenophora tritici-repentis Pt-1C-BFP
  CDS (1)..(1416)
atgtctagctacgcgcttcccaagtcccaccaggacctcatggagaagtccctggtggacactgacaatgaggtcgctcaaatcatggagaaggaaattcagcgtcaacgcgagtccatcctcctcatcgcctccgagaatgttacctcccgcgccgtctttgatgcgctcggttcgcccatgtccaacaagtactctgagggttaccccggtgccagatactacggtggcaacgagcacattgactccatcgaactgctctgccagaagcgcgctcttgagacctttggtcttgactcggagaagtggggtgtcaacgtacaatgcttgagcggtagcccggcaaacttgcaggcataccaagccatcatgaggccacacgacaggctgatgggtcttgatctgccccacggtggtcacttgagccacggttaccagacaccgcagaggaaaatctccgctgtttccacatacttcgagacgttcccctaccgcgtaaacctcgagactggcctcatcgactacgaccagctcgagcagaacgccctcatgtaccgccccaaggtcctcgttgccggtacctccgcctactgccgtgagatcgactatgcccgcatgcgcgagattgctgacaaggtcggctgctacctgttgatggacatggcccatatctctggtcttgtcgctgctggtgttaacaagtcgcccttcccatactgcgacattgtcaccaccacgacccacaagtcccttcgtggaccccgtggtgccatgatcttcttccgcaagggcgtgcgcaagaccgatgccaagactggcaaggagaccctatatgacctcgagggacccatcaacttctccgtcttccctggtcaccagggtggtccccataaccacaccatcaccgcgcttgctgttgcgcttaagcaagcccagaccgaggacttcaagctctaccagcaacaagtcatcaagaacgcaaaggcacttgaggttgccttcaagaagatggactacaagctcgtcactgacggcactgacaaccacatggtcctcctggacctcaagccctttgccctcgacggtgcccgtgttgaggccgttctcgagcaggtaaacattgcctgcaacaagaacaccacccctggtgacaagtccgcacttacgcctatgggtatccgtattggagcaccagccatgacatcgcgtggtctgggtgaggatgacttcaagaagattgccaactacatcgactcatgcatcaaactatgcaagaagatccagagcgagctccccaaggagaacaacaagctcaaggacttcaagaacaaggtcgcatccggcgaggtgcaagagatcaacgacctgaagaaggagattgcggcctgggccgtcactttcccccttcccatctaa

SEQ ID NO: 4047 - protein, 471 aa, Pyrenophora tritici-repentis Pt-1C-BFP
MSSYALPKSHQDLMEKSLVDTDNEVAQIMEKEIQRQRESILLIASENVTSRAVFDALGSPMSNKYSEGYPGARYYGGNEHIDSIELLCQKRALETFGLDSEKWGVNVQCLSGSPANLQAYQAIMRPHDRLMGLDLPHGGHLSHGYQTPQRKISAVSTYFETFPYRVNLETGLIDYDQLEQNALMYRPKVLVAGTSAYCREIDYARMREIADKVGCYLLMDMAHISGLVAAGVNKSPFPYCDIVTTTTHKSLRGPRGAMIFFRKGVRKTDAKTGKETLYDLEGPINFSVFPGHQGGPHNHTITALAVALKQAQTEDFKLYQQQVIKNAKALEVAFKKMDYKLVTDGTDNHMVLLDLKPFALDGARVEAVLEQVNIACNKNTTPGDKSALTPMGIRIGAPAMTSRGLGEDDFKKIANYIDSCIKLCKKIQSELPKENNKLKDFKNKVASGEVQEINDLKKEIAAWAVTFPLPI

SEQ ID NO: 4048 - DNA, 1602 bp, Drosophila ananassae
  CDS (1)..(1602)
atgcagaaagtacgctgcttgtcattgccacaaaagcttctctactgcttaagccgagacgtgaacacaaaagccggtaacttcgccggagaacagctgatcggagctttaactcgcgtcgctgccgccaaaaatccaacatccacattctccccgatcagacgatactcgtacagcacggaaaacacttctaggaaaatgtcggatcagaagatgctgcaggccacattggaggagggtgatcccgagttggcggatctcattaagaaggagaaggagcgtcagctggaaggactcgagatgattgccagtgagaacttcacatccgtgggtgtcctggagagtctgagctcctgtctgaccaacaagtactcggagggttatccgggaaagcggtactatggcggcaacgagttcatcgactgcatcgaactcttggcccagaaacgtggccgtgaactcttcaacctgcccgaggacaagtggggcgtcaatgtccagccctactccggttctccggccaatctggctgtctatacgggtgtctgtcgtcctcatgatcgcatcatgggtttggatctgcccgatggtggtcacttgacccatggcttcttcacgcccaccaagaagatctccgccacgtcgatcttcttcgagagcatgccctacaaggtgaatccggagacgggaatcatcgattatgataaactggccgaggcggccaagaccttccgtccgcagatcatcatcgctggcatctcgtgctactccaggctgctggactatgcccgtttccggcagatttgcgacgatgtgggtgcttacctgatggccgatatggcccatgtggcgggaatagtggccgctggactgatcccatcgcccttcgaatatgccgatattgtgacgacgacgacccacaagacgctgcgcggtccccgggccggagtcatcttcttccgcaagggcgtacggagcaccaaggccaacggcgatgtgatcaactatgatctggaggagcgcatcaaccaggccgtcttcccctcgctccagggtggaccgcacaacaacgccgtcgccggcattgccacggccttcaagcaggccaagtcgccggagttcaaggcctaccagacgcaggtcctcaagaacgccaagaccctgtgcgatggtctgatcgccaagggctatcaggtggccaccggtggcactgacgtccatctggtactggttgatgtccgcaaggcgggattaacgggcgccaaggccgagtacatcctggaggaggtgggaattgcctgcaacaagaacaccgtgccgggcgataagtccgccctgaatccttcgggcatccgtctgggcactcctgccctcaccactcgcggtctcatcgagcaggacatcaaccaggtggtgacgttcatcgatgccgctttgaagctgggcgcccaggcggccaaatcggcagccagtcccaagctggccgactaccacaaggtcctggcggaggacaaggacatctctggcaaggtggcggagctccagaaggccgtcaagatcttcagcaggaagttcccattgcccggtctgaagactttctaa

SEQ ID NO: 4049 - protein, 533 aa, Drosophila ananassae
MQKVRCLSLPQKLLYCLSRDVNTKAGNFAGEQLIGALTRVAAAKNPTSTFSPIRRYSYSTENTSRKMSDQKMLQATLEEGDPELADLIKKEKERQLEGLEMIASENFTSVGVLESLSSCLTNKYSEGYPGKRYYGGNEFIDCIELLAQKRGRELFNLPEDKWGVNVQPYSGSPANLAVYTGVCRPHDRIMGLDLPDGGHLTHGFFTPTKKISATSIFFESMPYKVNPETGIIDYDKLAEAAKTFRPQIIIAGISCYSRLLDYARFRQICDDVGAYLMADMAHVAGIVAAGLIPSPFEYADIVTTTTHKTLRGPRAGVIFFRKGVRSTKANGDVINYDLEERINQAVFPSLQGGPHNNAVAGIATAFKQAKSPEFKAYQTQVLKNAKTLCDGLIAKGYQVATGGTDVHLVLVDVRKAGLTGAKAEYILEEVGIACNKNTVPGDKSALNPSGIRLGTPALTTRGLIEQDINQVVTFIDAALKLGAQAAKSAASPKLADYHKVLAEDKDISGKVAELQKAVKIFSRKFPLPGLKTF

SEQ ID NO: 4050 - DNA, 1608 bp, Drosophila erecta
  CDS (1)..(1608)
atgcagctggcgcgcactacactgccccaaaagcttcggctctgccttagccgggacctgaacaccaaagttggcaacccggttaacttcgaaggtggaaagctgcgcgaagctttaactcaccatcgccatcgccatttccagacattctttctaccggcgatcagacgattttcggactccaagcagagcactttgaagaacatggccaatcagaaactactgcaaaccccgctggcggtgggcgatccggagctggccgatctgatccagaaggagaaggagcgccagcgcgagggtctcgagatgatcgccagtgagaacttcacctcggtcgcggtgctcgagagcttgagctcctgcctgaccaacaagtactccgagggatatcccggcaagaggtactacggcggcaacgagtacatcgatcgcatagagctgctggcccagaaacgcggacgcgagctcttcaacctggacgaggcgaagtggggcgtaaatgtgcagccgtactccggatcgccgggcaatctggctgtctacacgggcgtctgccgtccccacgatcgcatcatgggcctggatctgcccgatggcggccacttgacgcacggcttcttcacgcccaccaagaaaatctcggccacatcgatattcttcgagagcatgccgtacaaagtgaacccggagacgggcatcatcgattacgacaagttggcggaggcggccaagaacttccgcccgcaaatcatcattgccggcatctcgtgctactcccggctgctggactacgcccgtttccgtcagatatgcgacgatgtgggcgcctacctgatggccgacatggcccatgtggcgggcattgtggccgccggcctgataccatcaccgttcgagtgggccgacattgtgaccaccaccacgcacaagacgctgcgcggaccgcgcgccggcgtcatcttcttccgcaagggcgtgcgcagcaccaaggcgaatggcgacaaggtactgtacgacctggaggagcgcatcaatcaggcggtgttcccaacacttcagggtggtccgcacaacaatgccatcgctggcattgccacggccttcaggcaggccaagagtcccgaattcaagtcgtaccaggagcaggtgctcaagaatgccaaggtcctgtgcgatggcctcatctcgcgcggctatcaggtggccaccggcggcaccgatgtccatttggtgctggtggatgtgcgcaaggctggcctgaccggcgccaaggcggagtacatactcgaggaggtgggcatcgcgtgcaacaagaacaccgtgcccggcgacaagtccgccatgaatccgtcgggcatccgtctgggcacacctgccctcaccacgcgcggcctcgtcgatcaggacatcgagcaggtggtggccttcatcgatgctgccctcaagttgggcgcccaggccgccaagcagaccagcagccccaagctggccgactaccacaagacgctggcggagaatgtggagctcaagggccaggtggacgcgctgcgcaataatgttgtccagttcagcaggaagttcccgctgcccggcttggagagcctgtag

SEQ ID NO: 4051 - protein, 535 aa, Drosophila erecta
MQLARTTLPQKLRLCLSRDLNTKVGNPVNFEGGKLREALTHHRHRHFQTFFLPAIRRFSDSKQSTLKNMANQKLLQTPLAVGDPELADLIQKEKERQREGLEMIASENFTSVAVLESLSSCLTNKYSEGYPGKRYYGGNEYIDRIELLAQKRGRELFNLDEAKWGVNVQPYSGSPGNLAVYTGVCRPHDRIMGLDLPDGGHLTHGFFTPTKKISATSIFFESMPYKVNPETGIIDYDKLAEAAKNFRPQIIIAGISCYSRLLDYARFRQICDDVGAYLMADMAHVAGIVAAGLIPSPFEWADIVTTTTHKTLRGPRAGVIFFRKGVRSTKANGDKVLYDLEERINQAVFPTLQGGPHNNAIAGIATAFRQAKSPEFKSYQEQVLKNAKVLCDGLISRGYQVATGGTDVHLVLVDVRKAGLTGAKAEYILEEVGIACNKNTVPGDKSAMNPSGIRLGTPALTTRGLVDQDIEQVVAFIDAALKLGAQAAKQTSSPKLADYHKTLAENVELKGQVDALRNNVVQFSRKFPLPGLESL

SEQ ID NO: 4052 - DNA, 1413 bp, Drosophila grimshawi
  CDS (1)..(1413)
atgcagaaaatggaggaccagaaaatgttgcaggccacgctgaaggagagcgatcccgaactcgctgcgatcatcataaaggagaagcagcgtcaactggaaggtctcgagatgattgccagcgagaatttcacctcggtggctgtgctggaaagtttgggctcctgcttgaccaacaaatactcggagggttatcccggcaagcgctactatggcggcaatgagtgcatcgatcagattgagcgaatggctcagtcgcgtggcttggagctctttaacttggatagcagcgagtggggcgtcaatgtgcaaccgtattcgggttctccggcgaatttggctgcgtatacgggcgtgctgcgaccacacgatcgcattatgggcttggatttgcccgatggtggacatttgacgcatggcttctttacgcccagcaagaaaatctcagccacatcgatattctttgagagtatgccgtataaggttaatgcggtgacgggcctcattgactatgataagctcgcggaggctgctcgcacattccgtccccagatcatcattgcgggcatctcgtgctattcacgtctgctggactatggacgcttccgcaagatctgtgacgaggtcggcgcctatctaatggccgatatggcacacgttgccggtctcgttgccgccgagcagataccctcgccattccaatacgccgacattgtgacgacgacaacgcacaaaacgttgcgtggaccacgtgccggtgtcatcttcttccgcaagggtgtgcgcagcaccaaggccaacggtgacaagatcctatacgatctggaggatcgcatcaatcaggccgtattcccaggtctacagggtggtccgcataatcatcaaattgctggcattgccacagcattcaagcaggcgaaatccgtgccgtttaggaactatcaggcacagatcatcaagaatgcgcagacactgtgcaagggtctgatcaatttgggctatgaggtggccaccggcggcaccgatgtccatctcgttctggtcgatttacgcaataagggtttgagtggcgcccgggccgaactggtcctcgaggaggtgggcattgcttgcaacaagaatacggtgccgggtgataagtccgcactgaatccgtccggcctgcgcttgggcacaccggcgttgaccacacgtggcctgctcgagaaggatatgcagcaggtggtcgccttcattcatgcagcgctcaacattggcgttgaggcggctaaagtcactggtggtcccaaattgaccgacttcgccaggaccctggccgagaacagcgagatcaagcagaaactggaggatcttcacaagtccatcgtcaaattcagcaccagcttcccactgcccggccttggttccctgtaa

SEQ ID NO: 4053 - protein, 470 aa, Drosophila grimshawi
MQKMEDQKMLQATLKESDPELAAIIIKEKQRQLEGLEMIASENFTSVAVLESLGSCLTNKYSEGYPGKRYYGGNECIDQIERMAQSRGLELFNLDSSEWGVNVQPYSGSPANLAAYTGVLRPHDRIMGLDLPDGGHLTHGFFTPSKKISATSIFFESMPYKVNAVTGLIDYDKLAEAARTFRPQIIIAGISCYSRLLDYGRFRKICDEVGAYLMADMAHVAGLVAAEQIPSPFQYADIVTTTTHKTLRGPRAGVIFFRKGVRSTKANGDKILYDLEDRINQAVFPGLQGGPHNHQIAGIATAFKQAKSVPFRNYQAQIIKNAQTLCKGLINLGYEVATGGTDVHLVLVDLRNKGLSGARAELVLEEVGIACNKNTVPGDKSALNPSGLRLGTPALTTRGLLEKDMQQVVAFIHAALNIGVEAAKVTGGPKLTDFARTLAENSEIKQKLEDLHKSIVKFSTSFPLPGLGSL

SEQ ID NO: 4054 - DNA, 1404 bp, Drosophila mojavensis
  CDS (1)..(1404)
atggcggaccaaaagatgttgcaggcaacgctgaaggagagcgacccggagctggccgatatcatagtcaaggagaaggagcgccaacgggagggcctcgagatgattgccagcgagaatttcacctcgttggctgtgttggagagcttgagctcctgtctgaccaacaaatactctgagggctatccgggcaagcgctattatggtggcaatcagttcattgatcagattgagaacctggcgcgggctcgcggcctcgaattgttcaatctcaacagcaacgattggggcgtcaatgtgcagccctattccggatcgccggccaatctggctgtctatacgggcgtactgcgtccacatgatcgtattatgggcctggatctgcccgatggcggccatttgacgcacggcttcttcacgcccagcaagaagatctcggccacatccatcttcttcgagagcatgccgtacaaggtgaatccggagacgggcctgattgactacgacaagctggctgaggcagcgcgcacattccgccctcagatcatcatcgctggcatctcgtgctattcacgtctgctcgattacggccgtttccgtaagatctgtgacgaggtcggcgcctatctgatggccgacatggcgcacgtcgccggcttggtggccgccgagcagatcccctctccattcgagtacgccgacatcgtgaccacaacgacgcacaagacgctgcgcggtccacgtgccggcgtcatcttcttccgcaagggcgtgcgcagcaccaaggccaacggcgagaaggtcctctacgatctggaggagcgcatcaatcaggccgtattcccggccctgcagggtggaccgcacaacaatgccattgctggcattgccacggccttcaagcaggccaagtcggccgagttcaaggaataccaggcgcaggtgataaagaacgcgaagacactgtgcaagggtctcgtcgatctgggctatacggtggccaccggcggcaccgatgtccatctcgtgctggtggacgtgcgcaaaaccggactgaccggcgccaaggccgagctggtgctcgaggaggtgggcattgcgtgcaacaagaatacggtgcccggcgacaagtccgccatgaatccgtccggcatacgcctgggcacgccggccctaaccactcgcggcctcctcgagaaggacatcgagcaggtggtcgtcttcatcgatgccgcgctgaagatcggctccgaggccgtcaaggcagcgggcagccccaaaatggtcgacttcaccaagaccctggccgagaacgctagcatcaagcagcagctggaggagctccacaaatgcgtcatcaaattcagcaccaccttccccctgcccggccacgatctgctctaa

SEQ ID NO: 4055 - protein, 467 aa, Drosophila mojavensis
MADQKMLQATLKESDPELADIIVKEKERQREGLEMIASENFTSLAVLESLSSCLTNKYSEGYPGKRYYGGNQFIDQIENLARARGLELFNLNSNDWGVNVQPYSGSPANLAVYTGVLRPHDRIMGLDLPDGGHLTHGFFTPSKKISATSIFFESMPYKVNPETGLIDYDKLAEAARTFRPQIIIAGISCYSRLLDYGRFRKICDEVGAYLMADMAHVAGLVAAEQIPSPFEYADIVTTTTHKTLRGPRAGVIFFRKGVRSTKANGEKVLYDLEERINQAVFPALQGGPHNNAIAGIATAFKQAKSAEFKEYQAQVIKNAKTLCKGLVDLGYTVATGGTDVHLVLVDVRKTGLTGAKAELVLEEVGIACNKNTVPGDKSAMNPSGIRLGTPALTTRGLLEKDIEQVVVFIDAALKIGSEAVKAAGSPKMVDFTKTLAENASIKQQLEELHKCVIKFSTTFPLPGHDLL

SEQ ID NO: 4056 - DNA, 1620 bp, Drosophila persimilis
  CDS (1)..(1620)
atgcagcgcataagccatcacctaacacaaaagctcgtgccaggccttagcagagacttgaacaccaaaacggttaacttttctcttcgccagcggcagcagccggtccgagcttttacacagaaattattgccggcagcgctgctaacgccatcatttccattcgcgatcagacgatattcggaaggcaaaaaaaccacaactttgggctcgaaaatggaggatcaaaaactgctgcaggccacgctggaggatagcgatccggagctggcgaatctcatcaagcaggagaaggagcgacagcgcgagggactcgaaatgattgccagcgagaatttcacttcggtggccgttctggagagtcttggctcctgcctgaccaacaagtactcggagggatatcccggcaagcggtactatggcggcaacgagttcattgaccgcatcgagctgctggcccagaagcgcggccgtgagctattcaatctgaacgaggaggtgtggggcgtgaatgtccagccatactcgggctctccggccaatatggccgcctatgtgggcgtctgtcgtccgcacgaccgcatcatgggcctggatctgcccgatggcggtcatctgacgcacggcttcttcacggccaccaaacggatctcggccacctcgatcttcttcgagagcatgccgtacaaggtgaaccccgtgacgggcattattgactacgacaagctggccgaggcggccaaggccttcaagccgcagatcatcatcgccggcatctcgtgctactctcgcctgctcgactacggacgcttccgtcagatctgcgacgatgtgggcgcctacctaatggccgatatggctcatgtggcaggtctggttgctgccggtcacataccatcgcccttccagtacgccgacattgtgaccacaaccacgcacaaaaccttgcgcggaccacgcgccggcgtcatctttttccgcaagggcttgcgcagcgtaaagaccaacggggacaaggtgctgtacgatctggaggatcgcatcaatcaggccgtcttcccatcgctgcagggcggaccacacaacaatgccatagccggcattgccaccgccttcaagcaggccaagtccgcggaattcaagagctaccagtcccatgtgatcaagaacgccaaggtgctttgcgaggccctgattgccaagggctatcaggtggccaccggcggcactgatgtccatctcgtgctggtggatgtccgaaacgtcggccttaccggtgccagggcggagctaattctcgaggaggtaggaattgcctgcaacaagaacaccgttcccggggacatgtccgccatgaatccgtccggtatccgtttgggcacaccggcgttgaccacgcgcggccttgtcgagaaggacatcgatcaggtggtgaacttcatagatgcggccctcaagatcggcgccgaggccgcccaggctgcgggcagcaacaagatggtcgactttcagaaggtcctcgctgaagatgcaacgatcaaggccaagatcgagcagatccacaagtgcgtgatcgcgttcagcaagcagttccctctgcccggcctcaagactttttaa

SEQ ID NO: 4057 - protein, 539 aa, Drosophila persimilis
MQRISHHLTQKLVPGLSRDLNTKTVNFSLRQRQQPVRAFTQKLLPAALLTPSFPFAIRRYSEGKKTTTLGSKMEDQKLLQATLEDSDPELANLIKQEKERQREGLEMIASENFTSVAVLESLGSCLTNKYSEGYPGKRYYGGNEFIDRIELLAQKRGRELFNLNEEVWGVNVQPYSGSPANMAAYVGVCRPHDRIMGLDLPDGGHLTHGFFTATKRISATSIFFESMPYKVNPVTGIIDYDKLAEAAKAFKPQIIIAGISCYSRLLDYGRFRQICDDVGAYLMADMAHVAGLVAAGHIPSPFQYADIVTTTTHKTLRGPRAGVIFFRKGLRSVKTNGDKVLYDLEDRINQAVFPSLQGGPHNNAIAGIATAFKQAKSAEFKSYQSHVIKNAKVLCEALIAKGYQVATGGTDVHLVLVDVRNVGLTGARAELILEEVGIACNKNTVPGDMSAMNPSGIRLGTPALTTRGLVEKDIDQVVNFIDAALKIGAEAAQAAGSNKMVDFQKVLAEDATIKAKIEQIHKCVIAFSKQFPLPGLKTF

SEQ ID NO: 4058 - DNA, 1614 bp, Drosophila virilis
  CDS (1)..(1614)
atgctacatttacgatcatcggccgcccgtctccccgcaaaggcaatgccagttatgacagcggccgtcagaacatttaacagcagcaatcagcatgatcaacggcctgccaacttgatcgtaactcgactggcatcgaaaatcacgccgcaaatttcgtcggctgcgatcagaaactattcaaactcggttgcggtaagtgtgcttaagatggcagatcagaaaatgttgcaggccacgctgaagcagagcgatccggagctggccgatatcattataaaggagaaggagcgtcagcgcgagggactcgagatgattgccagcgagaacttcacctcgctggccgtcctggagagtctgggctcctgtctgaccaacaaatattcagagggctatccaggcaagcgctactatggtggcaatcaatttattgatcagattgaatgcctggctcagacacgcggccttcatctgttcaatctggatgccagcgaatggggcgtcaatgttcagccctattccggctcgccggccaatctggccgcgtacacgggcgtgctgcgtccacacgatcgtattatgggcctggatctgcccgatggtggacatttgacgcacggcttctttacgccaaacaagaaaatctcggctacatccatcttctttgagagcatgccctataaggtgaatcccgaaacgggcatcatcgactatgaaaaactggcagaggcggccagaaatttccgtccgcagattatcattgcgggcatctcgtgctattcgcgcctgctggactatgcacgcttccgcaagatctgtgacgaggtcggcgcatatctgatggccgacatggcgcacgtggctggactcgtggccgccgagcagataccctcaccatttgagtacgccgacattgtgacgaccacgacgcacaagacgctgcgcggtccgcgagccggcgtcatcttcttccgcaagggtgtgcgcagcacaaaaccaaacggcgagaaggttatgtacgatctagaggagcgcatcaatcaggcggtgttcccggcgctgcagggtgggccgcataataatgccattgccggcattgccacggcctttaagcaggccaaatcgccggaattcaagggctaccagacgcaggtcatcaagaatgccaaggcgctgtgcaagggcctcatcgatctgggctatacggtggccaccggcggcaccgatgttcatctcgtgctggtcgatgtgcgcaaaaccggcctaaccggcgccaaggctgagctggtgctcgaggaggtgggcatagcctgcaacaagaacacggtgcccggcgataagtccgccctgaatccgtccggcatacgcctgggcacgccagcgctaaccacgcgcggtctactcgaaaaggacatggaacaggtggtcgccttcatcgatgcggcgctcaaaattggcgccgacgctgtcaaagcggcgggcggccccaaattggttgactatacgaagaccctaaacgagaatccggccatcaagcagcagctgtcggagcttcacgaatgcgttaagaagttcagcgtcacgttcccgctgcccggacaagagtgtctctag

SEQ ID NO: 4059 - protein, 537 aa, Drosophila virilis
MLHLRSSAARLPAKAMPVMTAAVRTFNSSNQHDQRPANLIVTRLASKITPQISSAAIRNYSNSVAVSVLKMADQKMLQATLKQSDPELADIIIKEKERQREGLEMIASENFTSLAVLESLGSCLTNKYSEGYPGKRYYGGNQFIDQIECLAQTRGLHLFNLDASEWGVNVQPYSGSPANLAAYTGVLRPHDRIMGLDLPDGGHLTHGFFTPNKKISATSIFFESMPYKVNPETGIIDYEKLAEAARNFRPQIIIAGISCYSRLLDYARFRKICDEVGAYLMADMAHVAGLVAAEQIPSPFEYADIVTTTTHKTLRGPRAGVIFFRKGVRSTKPNGEKVMYDLEERINQAVFPALQGGPHNNAIAGIATAFKQAKSPEFKGYQTQVIKNAKALCKGLIDLGYTVATGGTDVHLVLVDVRKTGLTGAKAELVLEEVGIACNKNTVPGDKSALNPSGIRLGTPALTTRGLLEKDMEQVVAFIDAALKIGADAVKAAGGPKLVDYTKTLNENPAIKQQLSELHECVKKFSVTFPLPGQECL

SEQ ID NO: 4060 - DNA, 1404 bp, Drosophila willistoni
  CDS (1)..(1404)
atgacggatcaacaattattacaaactaacctggagacaagtgatcccgaattggcggcgatcattaagaaggagaaggaacgccaacgtgaaggtctcgagatgattgccagtgagaactatacctcagtggctgtattggattgtttgagctcttgtctgaccaacaagtattccgagggctatcctggcaaaaggtattatggtggcaatgagtacatcgatatggtggaattgctggcccaagctcgtggacgtgagctgttcaatttggatgcagataaatggggcgttaatgtacaaccatattccggttcaccggccaatttggctgtctacacaggcgtctgtcgtccccatgatcgtattatgggtctcgatttgcccgatggcggtcatttgacacacggctttttcacgcccaccaaaaagatatcggccacgtcgatattctttgagagcatgccatacaaagtgaatcccacaaccggaatcattgactatgacaaattggccgaagcagccaaaacattccgtccccaggttataattgctggcatttcgtgctattcgcgtctgctcgattataagcgtttccgtgagatttgcgatgatgttggtgcctatctgatggccgatatggctcatgtggctggtttggtggcagctggtctgatcccctcaccgtttgagtatgccgacattgtgagcaccacaacccacaagactttgcgtggcccccgcgccggtgtcatcttcttccgcaagggagtgcgcagcaccaaaccgaatggcgacaaagtgctctacgatctggaggagcgcatcaatcaggctgtattccctgccctgcaaggtggaccgcataataacgccatcgctggcattgctacggccttcaagcaggccaaatcgcccgagttcaaggaatatcagacccgtgtcatcaagaatgccaaggtcctgtgcaagggtcttatcgagaagggttatgtagtggccaccggtggcactgatgtccatctcgtgttggtggatgttcgcaccgcgggtctaaccggtgccaaggctgaatatattctggaattggtgggcattgcctgcaataagaacaccgtaccgggcgataagtccgccctgaatccatcgggcattcgtctgggtacacctgctctgaccacacgtggtcttaatgaaaaggacatcgaacaggttgtctccttcattgatgaggccctcaaagctggtgcggaggcagccaaagcagccgctggccccaaattggccgattatcacaaggttttcaatgacaacgagaagatcaagaacaaagtcaatgatattcatcaacgtatcattgcctttacaaagactttcccactgcccggattggatgttctgtaa

SEQ ID NO: 4061 - protein, 467 aa, Drosophila willistoni
MTDQQLLQTNLETSDPELAAIIKKEKERQREGLEMIASENYTSVAVLDCLSSCLTNKYSEGYPGKRYYGGNEYIDMVELLAQARGRELFNLDADKWGVNVQPYSGSPANLAVYTGVCRPHDRIMGLDLPDGGHLTHGFFTPTKKISATSIFFESMPYKVNPTTGIIDYDKLAEAAKTFRPQVIIAGISCYSRLLDYKRFREICDDVGAYLMADMAHVAGLVAAGLIPSPFEYADIVSTTTHKTLRGPRAGVIFFRKGVRSTKPNGDKVLYDLEERINQAVFPALQGGPHNNAIAGIATAFKQAKSPEFKEYQTRVIKNAKVLCKGLIEKGYVVATGGTDVHLVLVDVRTAGLTGAKAEYILELVGIACNKNTVPGDKSALNPSGIRLGTPALTTRGLNEKDIEQVVSFIDEALKAGAEAAKAAAGPKLADYHKVFNDNEKIKNKVNDIHQRIIAFTKTFPLPGLDVL

SEQ ID NO: 4062 - DNA, 1647 bp, Drosophila yakuba
  CDS (1)..(1647)
atgcagctggcgcgctctacactgccacaaaagcttcgcttttgccttagccgggacctgaacacccaagttcaagttggcaacccggttaacgggtttcgcgcagcgagaactgcgagcggagctttaactcgcgtcgcttccaaaaattaccaacaccaacaacatcaacatcatccattggcgttctttgggccggcgatcagacgatattcggacgccaagcagagcactttgaagaacatggccgatcagaagatgctgcaaaccccgctggcggcgggcgatccggagctggccgagctgatcaagaaggagaaggagcgacagcgcgagggtctcgagatgatcgccagtgagaacttcacctcggtggcggtcctcgagagcctgagctcctgcctgaccaacaagtactccgagggctatcccggcaagaggtactacggtggcaatgagtacatcgatcgcatcgagctgctggcccagcaacgtggacgcgagctgttcaacctggcggaggagaagtggggcgtgaatgtgcagccgtactccggttcgccggccaatctggctgtgtacacaggcgtctgccggcctcacgatcgcatcatgggtctggatctgcccgatggcggtcacttgacgcacggcttctttacgcccaccaagaagatatcggccacatccatattcttcgagagcatgccgtacaaagtgaatccggagacgggcatcattgactacgacaagttggcggaggcggcaaagactttccggccgcagatcatcattgcgggcatttcgtgctactcccgactgctggactacgcacgattccgtcagatatgcgatgatgtgggcgcctacctgatggccgacatggcccatgtggcgggcattgtggccgccggcttgataccatcgccattcgaatgggcggacattgtgaccaccaccacgcacaagacgctgcgcggtccacgcgccggcgtcatcttcttccgcaagggtgtgcgcagcaccaaggccaatggcgacaaggtcctgtacgatctggaggagcgcatcaaccaggcggtcttcccctcactccaaggtggtccgcacaacaatgccgtcgccggcattgccaccgccttcaggcaggccaagagtcccgaattcaaggcataccagacgcaggtgctcaagaacgccaaggtcctgtgcgatggcctcatctcgcgcggctatcaggtggccaccggcggcaccgatgtccatttggtgctggtcgatgtgcgcaaggctggcctcaccggcgccaaggccgagtacatactcgaggaggtgggcatcgcgtgcaacaagaacaccgtgcccggcgacaagtccgccatgaatccctcgggcatccgtctgggcacacccgccctgaccactcgcggccttgccgagcaggacatcgaacaggtggtggccttcatcgatgccgcactcaaggtgggcgcccaggcagccaagctgaccagcagtcccaagctggccgactaccacaagacgctggccgagaatgtggagctgaagggccaggtggacacgatccgcaacaacgtcgcccagttcagcaggaagttcccgctgcccggcttggagaccctatag

SEQ ID NO: 4063 - protein, 548 aa, Drosophila yakuba
MQLARSTLPQKLRFCLSRDLNTQVQVGNPVNGFRAARTASGALTRVASKNYQHQQHQHHPLAFFGPAIRRYSDAKQSTLKNMADQKMLQTPLAAGDPELAELIKKEKERQREGLEMIASENFTSVAVLESLSSCLTNKYSEGYPGKRYYGGNEYIDRIELLAQQRGRELFNLAEEKWGVNVQPYSGSPANLAVYTGVCRPHDRIMGLDLPDGGHLTHGFFTPTKKISATSIFFESMPYKVNPETGIIDYDKLAEAAKTFRPQIIIAGISCYSRLLDYARFRQICDDVGAYLMADMAHVAGIVAAGLIPSPFEWADIVTTTTHKTLRGPRAGVIFFRKGVRSTKANGDKVLYDLEERINQAVFPSLQGGPHNNAVAGIATAFRQAKSPEFKAYQTQVLKNAKVLCDGLISRGYQVATGGTDVHLVLVDVRKAGLTGAKAEYILEEVGIACNKNTVPGDKSAMNPSGIRLGTPALTTRGLAEQDIEQVVAFIDAALKVGAQAAKLTSSPKLADYHKTLAENVELKGQVDTIRNNVAQFSRKFPLPGLETL

SEQ ID NO: 4064 - DNA, 1413 bp, Trichoplax adhaerens
  CDS (1)..(1413)
atggctgataattatcaattcgatagcagtttaaagaattctcttcaagaggaagatcctgaaatctatcacttaatctgcaaagagaaaaaacgccaaaggcttggtttagaattgattgcgtcagaaaattacgctagtcgagcgacattacaagcattgggatcgtgtctcaataataaatattctgaaggctatcctggggctcgttattatagtggcacacaagtcgtcgatgacattgagttgttatgccaacgtcgagctcttgaattatttggattagatcgtgaacagtggggcgttaatgtacaaccttattctggctcaccggctaattttgctgtttataccgcattattacaacctcatgatcgaatcatgggcttagatttacccgatggtggccatttaacccatggctacatgaacgatactaagcgtatttcagcttcgtccatttatttcgagtccatgccatacaagatcaatcctaccacaggtttaatcgattacgatcaattggaagccaatgcaaaattatttaggcctaaattaattattgctgggattagtagttattgtcgccatctcgattatgcccgtatacgacaaattgctgaccaacaaaaggcatacgttctatcggatatggcccatgtcagtggccttgttgccgccaaacttgcccctactcctttccaatattctgatgtggttacaaccaccacacataagacactacgtggaccccgttctgcattgattttctaccgtaaaggaatacgccatcatgatcaatctggccagccgatctattacgatttgcaagataaaatcaattttgctgtctttccagcattacaaggtgggccacataatcatgccattgccgctgtcgctgtcgctttaaaagaagctcaatcggataaatttatacaatatcaaaaacaagtgttaagtaattgtcaaacattatccgatggtttaatcgcacttggctatacattagtcaccggtggtagtgacaatcatttaattttactcgatttaagaccacaaaaattaaatggtgcccgtgctgttgaagtatttgaaagagtccacattagtgctaacaagaacacctgccctggcgataaaaatgccttaatacccagtggtattcgttttggaactccagctttaaccagtcgtggattgagttgtcaggatatggtgaaaatagtacaatttatccatcgtgctttgcaaattgcaattgatgccactagtactgttgcggggaaatccattaaagactataaagctacccttgatcaggaagagtatcaagcaaagatacaacaactagcagaagaagtactcgagttttctagccaattcccaacacctggttctgatgtcatataa

SEQ ID NO: 4065 - protein, 470 aa, Trichoplax adhaerens
MADNYQFDSSLKNSLQEEDPEIYHLICKEKKRQRLGLELIASENYASRATLQALGSCLNNKYSEGYPGARYYSGTQVVDDIELLCQRRALELFGLDREQWGVNVQPYSGSPANFAVYTALLQPHDRIMGLDLPDGGHLTHGYMNDTKRISASSIYFESMPYKINPTTGLIDYDQLEANAKLFRPKLIIAGISSYCRHLDYARIRQIADQQKAYVLSDMAHVSGLVAAKLAPTPFQYSDVVTTTTHKTLRGPRSALIFYRKGIRHHDQSGQPIYYDLQDKINFAVFPALQGGPHNHAIAAVAVALKEAQSDKFIQYQKQVLSNCQTLSDGLIALGYTLVTGGSDNHLILLDLRPQKLNGARAVEVFERVHISANKNTCPGDKNALIPSGIRFGTPALTSRGLSCQDMVKIVQFIHRALQIAIDATSTVAGKSIKDYKATLDQEEYQAKIQQLAEEVLEFSSQFPTPGSDVI

SEQ ID NO: 4066 - DNA, 1470 bp, Ciona intestinalis
  CDS (1)..(1470)
atgttaagtagattgtatccacgcctcattcaacaagtatatgctgtgaacgcttcaccactatctagattcagttccaaatggaccggaagagaatctttagaatctgaagatccagaaatattaagaatcatcaagaatgaaaaagatcgtcaactaagagggttggaacttatagcgtcggagaatttctgctcacgagctgccattgaagcaatgtcgtcttgtttaacgaacaaatattcagaaggatacccaggccagcgttattatggtggtactgaaaatgttgatgaacttgagctgttgtgccagaagcgtgctttggaagctttccatcttaaccctgatgaatggggcgttaatgttcaaccttattctggttctcctgccaactttgcagcttacacagcagtattgaaaccgcatgatagaataatggggttggatcttcctgatggtggacatttaacacatggttttatgacggacgctaagagaatttcttccacaagtatttattttgaatcgatgccgtatcgacttaatccctctactggctacattgacatggatgcattagagaacagtgccaagctattccgtccgagaatgatcatcgctggtgcgagcgcttattcacgcctcatcgattataagaggatgagagagatagcagaccaacatggcgcatatgtgttgtcagacatggcacatataagtggattagttgccacacaacttgtaccttctccattcgaacacagtgatatcgttacaactaccacacataagacattgagggggccaagggctggaatcattttcttcaggaaaggtgtacgaagtgttcacaagaaaacgggcaaagaaacgatgtatgatttggagagtcgtatcaactttgcagtgtttccaagtttacaaggaggaccacacaacccagcaattgcagctattgcagtagcattaaaacagtcaatggaaccatttttcaaggaataccaaattcaaactttaaaaaacgcggcaaccatggccagtgagttgacagcaaggggttacaacctcgtttcaggtgggacagataatcacctcgtgctcgttgatctgcgacccaagggaatcgatggagcgcgaacggagaaagttctcgagcttgcttcggttaccgtgaacaagaacagcgttccgggggataaaagcgctctcatgccaggagggttgagattgggtgcccccgcattaacctcccgtgactttgttgaagaagattttgtgaaagttgttgattttcttgataaaggggttgagatcgctattgaagcaaagaagaaaaccaaaaaactcgcggacttcaaatcatttatcgaaacaaatcctgaaacagttgaaaaaatctcaaatcttcgaaacgaggtcgaaaaattcgctcgtagtttcccaatgccagggttcgaggaccattaa

SEQ ID NO: 4067 - protein, 489 aa, Ciona intestinalis
MLSRLYPRLIQQVYAVNASPLSRFSSKWTGRESLESEDPEILRIIKNEKDRQLRGLELIASENFCSRAAIEAMSSCLTNKYSEGYPGQRYYGGTENVDELELLCQKRALEAFHLNPDEWGVNVQPYSGSPANFAAYTAVLKPHDRIMGLDLPDGGHLTHGFMTDAKRISSTSIYFESMPYRLNPSTGYIDMDALENSAKLFRPRMIIAGASAYSRLIDYKRMREIADQHGAYVLSDMAHISGLVATQLVPSPFEHSDIVTTTTHKTLRGPRAGIIFFRKGVRSVHKKTGKETMYDLESRINFAVFPSLQGGPHNPAIAAIAVALKQSMEPFFKEYQIQTLKNAATMASELTARGYNLVSGGTDNHLVLVDLRPKGIDGARTEKVLELASVTVNKNSVPGDKSALMPGGLRLGAPALTSRDFVEEDFVKVVDFLDKGVEIAIEAKKKTKKLADFKSFIETNPETVEKISNLRNEVEKFARSFPMPGFEDH

SEQ ID NO: 4068 - DNA, 1440 bp, Ciona intestinalis
  CDS (1)..(1440)
atgtcttgtggagatacaaaaccgaccgaaactaaggagtctgcatggttggagcaaccgcttgaagaaaatgatcctgaaatctacagaattatcagaaatgagaaagaacggcagagagatggacttgaattaatagcgtcggagaattttaccagtggggcagttttggaagctttagggtcctgcttgaataataaatactcggaaggatatccaggcgtaagatattatggaggaacagaaaacattgatgaactggagcgactttgccagaaaagagctttggaagttttcaaactcaaccctgaagaatggggtgttaatgtacagccctactcaggctcaccagcaaactttgctgttttaacagccattgttgagccccacggtcgtataatggggttggacctccccgatggcggccatcttactcatggcttcatgaccgagaagaagaaaatatcagcgacctccattttctttgagtcgatgccatataaggtgaatcctgcaacaggacttatagattacgatcaactggaacaaaatgcaaaacttttcaaaccgaaagtgattattgctggcatgagttgttactcgcgtgtcattgattatgagcgaatacgcaagatagctgatgccaacaaagcacttgtgatggctgacatggctcatgttagcggtttagtagcaactggtgtaatcccttcaccatttgaacattgccagatagttaccagcacgacacacaagacgctaaggggtccacgcgctggtataatcttctacaggcgtggtgtcaaagtacccgccaccgatggcaaacctgcggagatgtacaactttgaaaagccgataaatgaagctgttttccccggcttacagggtggcccccataaccatgcgattgctggtgtggccgtgtgtctgttgcaagcaaaatcccccatgtttatcgaatatcagaagaacgtggtaagcaatgcacaaacattggggaaagtcctcatggacaaaggatatgatgtggtgactggtggaacagatacgcatcttatactggttaaccttaaaagcaagggtacagatggtaacagggcagacaaagtgttagaagccattggtgttgcttgcaataagaacacttgcccaggtgataaagcagcattgcgtccaagtgggttgagacttggttcaccagctctcacttcaagggggttgaatgggaaagattttgagaaggttgcggatttcattgacaggggggtgcaactgactgtggagattcaaaacagtcttgaacccaaagctacattcaaggatttcagagtgaagttatataacgatgatgtcataataggaaaggttaaagcattgaaggaagaagttacaatgttcgcacgtacatttccaatacctggccttaaatatacttaa

SEQ ID NO: 4069 - protein, 479 aa, Ciona intestinalis
MSCGDTKPTETKESAWLEQPLEENDPEIYRIIRNEKERQRDGLELIASENFTSGAVLEALGSCLNNKYSEGYPGVRYYGGTENIDELERLCQKRALEVFKLNPEEWGVNVQPYSGSPANFAVLTAIVEPHGRIMGLDLPDGGHLTHGFMTEKKKISATSIFFESMPYKVNPATGLIDYDQLEQNAKLFKPKVIIAGMSCYSRVIDYERIRKIADANKALVMADMAHVSGLVATGVIPSPFEHCQIVTSTTHKTLRGPRAGIIFYRRGVKVPATDGKPAEMYNFEKPINEAVFPGLQGGPHNHAIAGVAVCLLQAKSPMFIEYQKNVVSNAQTLGKVLMDKGYDVVTGGTDTHLILVNLKSKGTDGNRADKVLEAIGVACNKNTCPGDKAALRPSGLRLGSPALTSRGLNGKDFEKVADFIDRGVQLTVEIQNSLEPKATFKDFRVKLYNDDVIIGKVKALKEEVTMFARTFPIPGLKYT

SEQ ID NO: 4070 - DNA, 1479 bp, Hydra magnipapillata
  CDS (1)..(1479)
atggctattcatttttctataaaaagatgtgttatgcaaccttgtaaaattctgtctatggttcatttttctacatcaaatattttaaatgcatggacaggaaaagaatcattggatgttgatgatcctgaaatgtttaagttgattcaaaaagaaaaaaagagacaaacagaaggtttagaattaattgcttctgagaatttttgcagtaaagcagctttgcaagcattaggaagttgtttaaacaataaatattcagaaggctatccaggtgctagatattatggtgggaatgatgttattgatgatatcgaaagacttgtacaacaaagagcattgaaagcttttcatcttgattctgaaaaatggggtgtaaacgtacaagtttactcgggggcaccagcaaattttgctatttacaccggtcttttaaatcctcatgatcgaataatgggacttgatttaccacatggaggccatttgtctcatggtttttccacagatacaaagagagtttcagcaacatcaaaatttttcgagtcaatgccgtacaggctcaatgaacgcactggactaattgactatgataaattggaggaaactgcacatctctttagaccaaaaattttaattgctggaacaagtgcttattcaagattaattgactatgagcggatgaaaaagatcagttcaagcattaatgcttatcttcttgctgatatggcacacataagtggtttggttgctgccagagtcattcccagtccttttgattatgctgatgtggtatctacaacaactcataaaacattaagggctgtaagacactctttgatattttatcgcaaaggggtaagaagtataaacagtaaaggagaagaaatcatgtatgatttagaaagaccaatcaatgatgctgtctttccaggtctacaaggtggaccgcataatcattcaatggctggtgttggggttggactacatcaggccatgacaccagagtttcgtgattaccaagttcaagtactaaagaatgccaaaaccatggcagaacaacttatggcaaaaggttatgacattgtatccaatggaactgacaaccatcttgtattagttgatttgagaccaaagggcattgacggttcacgcgttgagtttgtattagatcaagcatctattacagccaataaaaatacagttccaggagataaaagcgccatgaagcctagtggtttaagattaggtgctgctgcacttacgtcaaggaattttaaagaaaacgattttgtaaaagtcatcgatttattaaacaagggggttgaaatcggattggaagctcaaaaattaactaaaacattaaaagaatataaatcaatatttaaaaccaaccggacgattatggacggagtagattcgttacgtcaagaggtgtgccagtttgcatgtacttttccaatgccgggattagatgatttataa

SEQ ID NO: 4071 - protein, 492 aa, Hydra magnipapillata
MAIHFSIKRCVMQPCKILSMVHFSTSNILNAWTGKESLDVDDPEMFKLIQKEKKRQTEGLELIASENFCSKAALQALGSCLNNKYSEGYPGARYYGGNDVIDDIERLVQQRALKAFHLDSEKWGVNVQVYSGAPANFAIYTGLLNPHDRIMGLDLPHGGHLSHGFSTDTKRVSATSKFFESMPYRLNERTGLIDYDKLEETAHLFRPKILIAGTSAYSRLIDYERMKKISSSINAYLLADMAHISGLVAARVIPSPFDYADVVSTTTHKTLRAVRHSLIFYRKGVRSINSKGEEIMYDLERPINDAVFPGLQGGPHNHSMAGVGVGLHQAMTPEFRDYQVQVLKNAKTMAEQLMAKGYDIVSNGTDNHLVLVDLRPKGIDGSRVEFVLDQASITANKNTVPGDKSAMKPSGLRLGAAALTSRNFKENDFVKVIDLLNKGVEIGLEAQKLTKTLKEYKSIFKTNRTIMDGVDSLRQEVCQFACTFPMPGLDDL

SEQ ID NO: 4072 - DNA, 1401 bp, Hydra magnipapillata
  CDS (1)..(1401)
atgtgtgatcttaatgagcctctagagaccaatgatccagaaatattttccatccttaaaaaggaagatcacagacaaagatgtggattagaaatgattgcatcagaaaattttactagtcgtgcagttatggaatgtcttggttcctgctttactaacaagtattcagaaggaaaagtccatgcaagatattatggaggaaatgaatatattgatgaaatggaaattctttgtcaaaaaagggcattggaagcttttaggcttgataatactaaatggggtgtcaacgtgcaaccttattctggttccccagcaaactttgcagtatacactggtttattgcaaccccatgatcgcattatgggtctagaccttccagatggaggtcacctgactcacggatacatgacagaaaagaaacgaatttcagcttcttctattttttttgaatcaatgccttataaggtgaatcctgaaactggtttgattgattatgataagttacttgaaaacgcaaaacttttcaaaccgaagttaatcattgctggtgcaagtgcttattcaagaattatagactatgaacgatttcgcaaaatatgtgatgaagtaggagcaatactcatgagtgacatggcacattatagtggtcttattgttgctaatgccatacctagtccattccaacattgtgatattgtcacatctacaactcataagagcttacgcggttcacggtctggtttaatattttacaggattggggagaagtttaaagatcagcatggcaaatctgtaatgtatgattatgctactcgaattgataatgcagtatttcctactcttcaaggtggaccacacaacaataacattgctgctgttgcagtaacattaaaacaagctgcaacgccacaatttgctgagtatgctaaacaagttattaaaaatgcacaagctcttgcaaaagctttgcaagataaaggttataagattgtaacagatggcacagacacccacatgttcctaatggatgttcgaagtttggggattgatggtgcaaaagttgacacaattatggaaatggcgagcataagtgttaaccgaaatactgtacccggagacacaagcgcttttagaccaggtggtgttcgcattggtacgcctgcactcacatctcgtagttttttagaaaatgatatgttggttgtgtcagattttatacatgattgtatacaacttactcaaaaaatagagttgtctcttcatcttggaaaacaaagtttgttacgtgagtttcgagcggagcttgaaaaagaagaatggcgccaagaaataaattctattcgtcttcgagttcaaacctttgcatcaaaatttcccatgccagggtttcctgcgttttag

SEQ ID NO: 4073 - protein, 466 aa, Hydra magnipapillata
MCDLNEPLETNDPEIFSILKKEDHRQRCGLEMIASENFTSRAVMECLGSCFTNKYSEGKVHARYYGGNEYIDEMEILCQKRALEAFRLDNTKWGVNVQPYSGSPANFAVYTGLLQPHDRIMGLDLPDGGHLTHGYMTEKKRISASSIFFESMPYKVNPETGLIDYDKLLENAKLFKPKLIIAGASAYSRIIDYERFRKICDEVGAILMSDMAHYSGLIVANAIPSPFQHCDIVTSTTHKSLRGSRSGLIFYRIGEKFKDQHGKSVMYDYATRIDNAVFPTLQGGPHNNNIAAVAVTLKQAATPQFAEYAKQVIKNAQALAKALQDKGYKIVTDGTDTHMFLMDVRSLGIDGAKVDTIMEMASISVNRNTVPGDTSAFRPGGVRIGTPALTSRSFLENDMLVVSDFIHDCIQLTQKIELSLHLGKQSLLREFRAELEKEEWRQEINSIRLRVQTFASKFPMPGFPAF

SEQ ID NO: 4074 - DNA, 1404 bp, Schizosaccharomyces japonicus yFS275
  CDS (1)..(1404)
atgtctgttaccaacgaacaactctttttgactcccttggccgagcaagaccctaaggtcgccgagatcatgaagaatgaggagcaacgtcaacgtagctccatcaacctcattgcttctgagaactttacctctcgtgctgtcatggatgctcttggaagtgtcatgagcaacaagtactctgagggttaccccggtgcccgttactacggtggtaaccaattcatcgatcaaatcgagaccttgtgtcaagagcgtgccctcaaggctttcaacgttactgctgacaagtggggcgttaacgttcagtgcttgtccggttcccccgccaacttggaggtttaccaggctatcatgcctcctcacagccgtcttatgggtcttgaccttccttcgggtggtcacttgtcccacggttaccaaaccgatgcccgtaagatcagtgccgtctctacctatttcgagtccatgccctaccgtgtcgaccccgagaccggtatcattgactacgacaccttggccaagaacgctcagctcttccgccctaaggttctcgttgctggtacctctgcttactgccgtttgatcgactacaagcgcatgcgcgagatcgccgacagtgtcaacgcctacctcatggttgacatggctcacatttccggtctcgtctccgctggtgttattccctctcccttcgagtacgctgacattgtcaccaccaccactcacaagtctcttcgtggtccccgtggtgctatgatcttcttccgccgcggtctccgcaagcatgacaagaagggtaaccccgtctactacgacttggaggacaagattaacttctctgtcttccctggtcaccaaggtggtccccacaaccacaccatcactgctctcgctgttgccttgaagcaatgcgacactcctgcctacaaggcataccaagctcaagtcgtgaagaacgccaaggcctgcgagaacgagttcaagaagctcggctacaagttggccgctgacggtaccgacagccacatggttcttgtcaacgtcaagagcaagcacggtattgatggtgctcgtgctgagcgtgttcttgagctcatcaacgttgtcaccaacaagaacactctcccctccgacaagtctgctttgtctccctctggtatccgtgtcggtacccctgccatgactactcgtggcttcaaggagcaagacttcctccgtgttgttgacttcatcgaccgtgctctcaccattgccgccgacctccaaaagagccttcccaaggaggccaacaagttgaaggacttcaaggccgctcttggtgagggtgagaacatccccgagcttgccgccttgaagaaggaggttatcgagtggacttctgctcttcctcttgctgcttaa

SEQ ID NO: 4075 - protein, 467 aa, Schizosaccharomyces japonicus yFS275
MSVTNEQLFLTPLAEQDPKVAEIMKNEEQRQRSSINLIASENFTSRAVMDALGSVMSNKYSEGYPGARYYGGNQFIDQIETLCQERALKAFNVTADKWGVNVQCLSGSPANLEVYQAIMPPHSRLMGLDLPSGGHLSHGYQTDARKISAVSTYFESMPYRVDPETGIIDYDTLAKNAQLFRPKVLVAGTSAYCRLIDYKRMREIADSVNAYLMVDMAHISGLVSAGVIPSPFEYADIVTTTTHKSLRGPRGAMIFFRRGLRKHDKKGNPVYYDLEDKINFSVFPGHQGGPHNHTITALAVALKQCDTPAYKAYQAQVVKNAKACENEFKKLGYKLAADGTDSHMVLVNVKSKHGIDGARAERVLELINVVTNKNTLPSDKSALSPSGIRVGTPAMTTRGFKEQDFLRVVDFIDRALTIAADLQKSLPKEANKLKDFKAALGEGENIPELAALKKEVIEWTSALPLAA

SEQ ID NO: 4076 - DNA, 1383 bp, Schizosaccharomyces japonicus yFS275
  CDS (1)..(1383)
atgattcaagctcctttggaggaatgtgatccagaaatgtctcgcattctcaagtcagaggaagcccgccaaaaacaatccatcgctcttatcgcttctgagaacttcacttctcgtgctgtcatggatgcccttggaagtattatgcaaaacaagtactcagagggttatcccggtgctcgttactatggcggaaacgagttcattgaccagggcgagcgtttgtgccaaaagagagcactcgaggcctaccgtttggacccagaacaatggggcgtcaatgtgcaaccccattctggctctcccgccaatctccaagtgtaccaagccgtgttgaaaccccacgagcgtcttatgggtcttgacttgcctcacggaggtcacttgtctcatggattctccactcctcaaaaggctatttctgcagtctctacatacttcacgaccatgccttaccgcgtgaacccaagcaccggcatcatcgactacgacacgctggagcaagacgtgcagttgttccgccccaaggttatcgtggccggtgccagtgcctacgctcgtctgatcgactacgagcgtatgagaaagatcgccgacagtgtcaacgcttaccttatgtccgatatggcacatatttccggtttggttgctgctggtgtaattccttctccattcgaatactctgatatcgtgacgactactacacacaagtcgcttcgtggtcctcgtggtgccatgatcttctaccgtcgtggtgtccgcaagcacgacaagaagggcaacgctgtcatgtacgacttggaagataaaattaatttctccgtctttcccggtcatcaaggtggtcctcacaaccatactatctcggctttggctgtcgccctcggtcaagcaaagacacccgagttccgtgcttatcaagaaagcgtgctgcgcaacgcaaaggccctcgagagagcgttccttgcacgcaattacgaactcgtttctggcggcaccgacacacatcttgtcttggttaacttgaccagcaagggcattgatggcgctcgtgtggagcgtgtgctagaattgattaatatctctgccaacaagaacaccgttcccggcgacaagtctgccctcattcctcacggacttcgtctcggtacacccgcttgcacaacccgcggcttcaatgagcaagattttgaacgcgttgttgactatattgaccaagccgttgctctgaccaagcaaattaacgcggatgctaagaaaaccggaaagaacaaactgagtgacttcaagcagttcctcggcgatggctctcaataccccgaaatccaacgtctcaaatctgaaattggcagctgggctagcggttttgaattccccatttag

SEQ ID NO: 4077 - protein, 460 aa, Schizosaccharomyces japonicus yFS275
MIQAPLEECDPEMSRILKSEEARQKQSIALIASENFTSRAVMDALGSIMQNKYSEGYPGARYYGGNEFIDQGERLCQKRALEAYRLDPEQWGVNVQPHSGSPANLQVYQAVLKPHERLMGLDLPHGGHLSHGFSTPQKAISAVSTYFTTMPYRVNPSTGIIDYDTLEQDVQLFRPKVIVAGASAYARLIDYERMRKIADSVNAYLMSDMAHISGLVAAGVIPSPFEYSDIVTTTTHKSLRGPRGAMIFYRRGVRKHDKKGNAVMYDLEDKINFSVFPGHQGGPHNHTISALAVALGQAKTPEFRAYQESVLRNAKALERAFLARNYELVSGGTDTHLVLVNLTSKGIDGARVERVLELINISANKNTVPGDKSALIPHGLRLGTPACTTRGFNEQDFERVVDYIDQAVALTKQINADAKKTGKNKLSDFKQFLGDGSQYPEIQRLKSEIGSWASGFEFPI

SEQ ID NO: 4078 - DNA, 1416 bp, Branchiostoma floridae
  CDS (1)..(1416)
atgactaacggccactctgcaggggactggtgggacctcaccaaacctgtgggggaagtggacccggaaatcactgccatcatccgcaaggaaaaggaccgtcagaggagggaattggaaatgatcgcttcagagaactttgccagtgctgcttgtctacaggccatgggctcatgtctcaacaacaagtactctgagggctaccctggacagaggtactatggaggcaccaagtttgtggatgagattgaagtcctgtgccaaaagagagccctgtcagtgtatggtctggacccagagaagtggggagttaatgtgcagccttattctgggtctcctgccaactttgctgtcttcacagctattgtggagccacatggaaggatcatgggtctggatctccctgatggaggccatctcacccatggcttcatgacagacaagaagaagatctctgccacctctgtgttcttcgagtccatgccctacaaggtggacccaaagactgggctgattgattatgagaggcttcgggagaatgcaaagatcttccacccaaggatgatcattgctggtatcagttgctactccaggaacctggactatgccaagttccgtgagattgcagacgagaacaacgcctacctgctggcggacatggcgcacatctcaggactggtggccgcaggggccgtgccctctcccttcgagcactgcgacattgtgacgaccaccacacacaagaccctgcgtggtgtcagggcagggatgatcttcttcaggaaaggtgtaaggagtgttgggaaggatgggaagcccatcatgtataacctggagtctcccatcaaccaggctgtgtttcctgggcttcaggggggaccacataaccatgctattgcaggtgttgctgtggccctgaaacaggctgccatgccagagtttaagacctacatacaacaggtcattaagaactgccaggctatgtgtaaaatgatgatggacaagggataccatgtggtaacagatggttcagataaccacctgctgctgatagacctgaggtcaaagggcatcaatggttctaagacagagaagatcttggaggaggtctccatcgcttgtaataagaacacttgtccaggtgacaagagtgccctgaaccccagtggtctgcgttttggaacaccagccctgacatcccgcggttttgtggagaaggactttgagaaagttacagactttattgacagagcgatcctgctggctgttgagatccagacagtgtctggtaagatgctgaaggacttcaaggctaagatggtggaggaaccattctcgtccaagattgctgccctccgtgctgaagtggaggcattcgccatcgctttccccatccctggactggaggacatgtaa

SEQ ID NO: 4079 - protein, 471 aa, Branchiostoma floridae
MTNGHSAGDWWDLTKPVGEVDPEITAIIRKEKDRQRRELEMIASENFASAACLQAMGSCLNNKYSEGYPGQRYYGGTKFVDEIEVLCQKRALSVYGLDPEKWGVNVQPYSGSPANFAVFTAIVEPHGRIMGLDLPDGGHLTHGFMTDKKKISATSVFFESMPYKVDPKTGLIDYERLRENAKIFHPRMIIAGISCYSRNLDYAKFREIADENNAYLLADMAHISGLVAAGAVPSPFEHCDIVTTTTHKTLRGVRAGMIFFRKGVRSVGKDGKPIMYNLESPINQAVFPGLQGGPHNHAIAGVAVALKQAAMPEFKTYIQQVIKNCQAMCKMMMDKGYHVVTDGSDNHLLLIDLRSKGINGSKTEKILEEVSIACNKNTCPGDKSALNPSGLRFGTPALTSRGFVEKDFEKVTDFIDRAILLAVEIQTVSGKMLKDFKAKMVEEPFSSKIAALRAEVEAFAIAFPIPGLEDM

SEQ ID NO: 4080 - DNA, 1530 bp, Branchiostoma floridae
  CDS (1)..(1530)
atgttacgatcggctgcaaccgctgtccttactaaggcgttcaggacgaattgccaactcttgccccgtgtcacgacaagtgtttcccagcagcgatgggttatgtcagccactgcacaggaccaggatgacaaagtgtggacagggcaggagagcctggctgactcggaccctgacatgtggggactgctgcagaaggagaaggacagacagctccgaggactggaactcatcgcttccgagaatttctgcagcaaggcggccctggaagctctgggttcctgtctgaacaacaagtactctgaagggtacccaggacagaggtactacggaggagcggagatcgtggaccagattgagctcctgtgtcagcagcgggcccagcaggccttccgtctggacccggagaagtggggagtgaacgtccagccgtactccggctctcccgccaacttcgctgtctacaccgcgctgctgaaccctcacgacagggtcatgggcctggacctgcctgatggtggacatctcacccacggttttatgactgacaccaagagaatctctgcaacctccatctactttgagtccatgccgtacaggctgaacccccagacaggtctgattgactatgacaagctggaggagacagcgcgactattccgtcctcggatgatcatcgcgggaaccagcgcctacgccaggcttatcgactacaaaaaaatgcgagagatctgtgatgagcacggtgcctacctgttggcagacatggcgcacatctcaggcctggtggctgctggggtcatccccagccccttcgagtacgctgatgttgtcacaactaccactcacaaaaccctgcgaggggcaagagctgggctgatctttttccgccgtggggtcaagggtcagaacaagaagacggggaaagacatcatgtacgactttgagcgcaggatcaacttcgctgtgttcccgtctctgcaaggaggtccccacaaccatgccatcgctgctgtggctgtggcacttaaacaggcccagactcccatgttccgtgagtaccaggaacaggtgatgagcaacaccaaggccatggctgaatctctgatgtcgaaaggctacaaattagtctcagatggcacagataaccaccttgtcctggtggacctgcgtccgaagggcatcgacggagctcgtgtggagcgtgtgtgtgaactggcctccatcacctgcaacaagaacacctgtcctggggacaagagtgcgctcacacctgggggactcaggctgggagccccagctctgacatcacgttgtatgaaggaagacaacttccgtcaggtggtggactttatcgacgaggctgtgcagattggtctgcaggtcaaggacaagactgggcccaagatggtggatttcaagaagttcctcctggaagatgaagagactgttggcaggatctccgacctgcgtgctcgtgtggagagtttcgctcgcacatttcctatgccaggctttgatgaccattaa

SEQ ID NO: 4081 - protein, 509 aa, Branchiostoma floridae
MLRSAATAVLTKAFRTNCQLLPRVTTSVSQQRWVMSATAQDQDDKVWTGQESLADSDPDMWGLLQKEKDRQLRGLELIASENFCSKAALEALGSCLNNKYSEGYPGQRYYGGAEIVDQIELLCQQRAQQAFRLDPEKWGVNVQPYSGSPANFAVYTALLNPHDRVMGLDLPDGGHLTHGFMTDTKRISATSIYFESMPYRLNPQTGLIDYDKLEETARLFRPRMIIAGTSAYARLIDYKKMREICDEHGAYLLADMAHISGLVAAGVIPSPFEYADVVTTTTHKTLRGARAGLIFFRRGVKGQNKKTGKDIMYDFERRINFAVFPSLQGGPHNHAIAAVAVALKQAQTPMFREYQEQVMSNTKAMAESLMSKGYKLVSDGTDNHLVLVDLRPKGIDGARVERVCELASITCNKNTCPGDKSALTPGGLRLGAPALTSRCMKEDNFRQVVDFIDEAVQIGLQVKDKTGPKMVDFKKFLLEDEETVGRISDLRARVESFARTFPMPGFDDH

SEQ ID NO: 4082 - DNA, 1530 bp, Branchiostoma floridae
  CDS (1)..(1530)
atgttacgatcggctgcaaccgctgtccttactaaggcatttaggacaaattgccaactcttgccacgtgtgacgacaagtgtatcccagcagcgatggatcatgtctgccactgcacaggaccaggatgagaaggtgtggacagggcaggagagcctggctgactcggaccctgacatgtggggtctgctgcagaaggagaaggacagacagctccgaggactggaactcatcgcttccgagaatttctgcagcaaggcggccctggaagctctgggttcctgtctgaacaacaagtactctgaagggtacccaggacagaggtactatggaggagcagaaatcgtggaccagattgagctcctgtgtcagcagcgggcccagcaggccttccgtctggacccggagcggtggggagtgaacgtccagccctactccggctctcccgctaactttgctgtctacactgcattgctgaacccacatgacagggtcatgggtctggacttgcctgatggtggacatctcacccatggtttcatgactgacaccaagagaatctctgcaacctccatctactttgaatccatgccatacaggctgaacccccagacaggtctgattgactatgacaagctggaggagacagcgcgactattccgtccacggatgatcatcgcgggaaccagcgcctacgccaggctgatcgactacaaaaggatgcgagagatctgtgatgagcacggtgcctacctgttggcagacatggcgcacatctcaggcctggtggctgctggggtcatccccagcccattcgagtacgctgatgtcgtcacaactaccactcacaaaaccctgcgaggggcaagagctggcctgatctttttccgccgcggggtcaaaggtcagaacaagaagacggggaaggacatcatgtacgactttgagcgcagaatcaattttgccgtgttcccatctctgcaaggaggtccccacaatcatgccatcgctgctgtggctgtggcactaaaacaggcgcagacacccatgttccgtgagtaccaggaacaggtgatgagcaacaccaaggccatggccgagtctctgatgtccaaaggctacaaactagtctcagatggcacagacaaccaccttgttctagtggacctgcgtccgaagggcatcgacggagctcgtgtggagcgggtgtgtgaactggcctccatcacctgcaacaagaacacctgtcctggggacaagagtgcgctcacacctggaggactcaggctgggagctccagcgctgacgtcacgttgtatgaaggaagacaacttccgtcaggtggtggactttattgacgaggctgtgcagattggtctacaggtcaaggacaagactggtcccaagatggtggatttcaagaagttcctcctggaagatgaagagactgttggcaggatctctgacctgcgtgctcgtgtggagagtttcgctcgcacatttcctatgccaggcttcgatgaccattaa

SEQ ID NO: 4083 - protein, 509 aa, Branchiostoma floridae
MLRSAATAVLTKAFRTNCQLLPRVTTSVSQQRWIMSATAQDQDEKVWTGQESLADSDPDMWGLLQKEKDRQLRGLELIASENFCSKAALEALGSCLNNKYSEGYPGQRYYGGAEIVDQIELLCQQRAQQAFRLDPERWGVNVQPYSGSPANFAVYTALLNPHDRVMGLDLPDGGHLTHGFMTDTKRISATSIYFESMPYRLNPQTGLIDYDKLEETARLFRPRMIIAGTSAYARLIDYKRMREICDEHGAYLLADMAHISGLVAAGVIPSPFEYADVVTTTTHKTLRGARAGLIFFRRGVKGQNKKTGKDIMYDFERRINFAVFPSLQGGPHNHAIAAVAVALKQAQTPMFREYQEQVMSNTKAMAESLMSKGYKLVSDGTDNHLVLVDLRPKGIDGARVERVCELASITCNKNTCPGDKSALTPGGLRLGAPALTSRCMKEDNFRQVVDFIDEAVQIGLQVKDKTGPKMVDFKKFLLEDEETVGRISDLRARVESFARTFPMPGFDDH

SEQ ID NO: 4084 - DNA, 1416 bp, Vitis vinifera
  CDS (1)..(1416)
atggatccagtatcagaatggggaaactcaagcctcctcacagtggatccagagatccatgacctgatcgagaaggaaaagaggaggcagtgcagggggatagagctgattgcctccgagaatttcacatcctttgccgtcattgaagccctgggcagcgccctcaccaacaagtactccgagggcatgcctggcaaccgctactatggtggaaatgagttcatcgacgagatcgagaacctctgcaggtcacgtgccctgcaggccttccactgcgacccctccaagtggggcgtcaatgttcagccctactccggctcccccgccaatttcgccgcctacaccgccattctcaacccccacgaccgcatcatgggtttggacctcccttccggtggccacctcacccacggctactacacctccagcggaaagaagatctcggccacttccatttactttgagagtttgccttataaggtcagctccaccactggctacattgattacgatcgcttggaggagaaggccttggatttcaggcctaagttaatcatttgcggtggcagcgcctaccccagggactgggattacgccaggttccgctctattgccgataagtgtggcgctttgttgctttgtgacatggcccacattagtggccttgttgctgctcaggaagccgcaaacccctttgagtattgtgacatagtcacaactacaacccacaagagcctgaggggcccaagggctggtatgatcttctaccgtaagggtcctaaaccacccaagaagggccagccggaagatgcagtttatgattttgaggacaaggtcaattttgctgttttcccctccctccaaggtggcccccacaatcaccagattgctgccctagctgttgccttgaagcaggccatggttcccgggttcaaggcctatgctaagcaagtcaaggccaatgcagttgcccttggaaactacctgatgagcaagggatacaagcttgttactggtgggactgagaaccaccttgttctatgggatctccgccctctcggtttgactggcaacaaagttgagaaactttgtgatctgtgcaacattacagtgaacaagaatgctgtgtttggtgacagcagtgccttggctcctggaggtgtacgcattggtgctcctgccatgacttcaaggggtttggttgagaaggactttgagcagatagcagagttcctgcatagggctgtgaccatcaccttaaagatccaaaaggagcatgggaaacttttgaaggatttcaacaagggccttgttaacaataaggatatcgaggagctgaaggttgatgttgagaagttttcagcctcatttgagatgcctggattttcagtgtctgagatgaagtacaaggattag

SEQ ID NO: 4085 - protein, 471 aa, Vitis vinifera
MDPVSEWGNSSLLTVDPEIHDLIEKEKRRQCRGIELIASENFTSFAVIEALGSALTNKYSEGMPGNRYYGGNEFIDEIENLCRSRALQAFHCDPSKWGVNVQPYSGSPANFAAYTAILNPHDRIMGLDLPSGGHLTHGYYTSSGKKISATSIYFESLPYKVSSTTGYIDYDRLEEKALDFRPKLIICGGSAYPRDWDYARFRSIADKCGALLLCDMAHISGLVAAQEAANPFEYCDIVTTTTHKSLRGPRAGMIFYRKGPKPPKKGQPEDAVYDFEDKVNFAVFPSLQGGPHNHQIAALAVALKQAMVPGFKAYAKQVKANAVALGNYLMSKGYKLVTGGTENHLVLWDLRPLGLTGNKVEKLCDLCNITVNKNAVFGDSSALAPGGVRIGAPAMTSRGLVEKDFEQIAEFLHRAVTITLKIQKEHGKLLKDFNKGLVNNKDIEELKVDVEKFSASFEMPGFSVSEMKYKD

SEQ ID NO: 4086 - DNA, 1734 bp, Vitis vinifera
  CDS (1)..(1734)
atggatttgaactccagctccaatctctctcttgggttctcatcgtcttcatcggtgcaaatagccgacgattctatcgcttttcagattgattccagcttccgcgaatccacgaacccgatgccaaccgcgccactgcagttgttggaggagaatcacaggggcgagaatggtggaggcgggggagagagcgcggatgaggaagagaaggtggaggagttcaggatattggggcattcgatgtgcttgaagaggcggagagacggggaggtcacttgttcggcggtgagaagagatccgatggaggcggagctcgaggcgcggcggagcgctgtgagggcgtggggaaaccagcggctctgcgtggccgatcctgatgtgtttgatattatggaaaaagagaagcggaggcaattcaagggaattgagttgatcgcttcggagaatttcgtgtgcagggcggtgatggaagccctgggaagccatttgacgaataagtattccgagggaatgccgggtgctaggtattactgtgggaatcagtatattgatgagattgaatggctttgttgcaagcgcgcattgaaggcattcgatcttgatccggagaattggggagtgaatgttcagccatattcatgtacttctgcaaatttcgcagtttacacaggtttacttcttccgggtgatagaatcatggggttggatactccatcaggtggaaatactagtcatgggtactacactcctaatggcaggaaagtttcgggggcgtctatcttctttgagagtttaccctataaggtgaacccacaaactgggtatatagattttgataagctggaagagagggcgctagattttcgccccaagattcttatttgtggtgggagttcatatcctcgtgaatgggattatgctaggtttagacagattgctgataagtgtggagcagtgcttttgtgcgacatggctcaaattagcggacttgttgcggctaaggaatgtgtaaacccttttgattactgtgatattgttacctcaacaactcacaaaagtctacggggtcccaggggaggcatcattttttatagaaagggtacaaagccaaggaaaagagggatgattctaagtcaaggagatgataatgatcactatgactatgaggaaaagataaactttgctgttttcccatcattgcaagggggccctcacaataaccacattgctgcccttgcaatagccctaaaacaagtggctactccagagtacaaggcatatatgctgcaggtaaagaaaaatgctcaggctttagcatctgctttactgagaagaaaatgtaggctggtaactggaggcacagacaaccatttgttactttgggatcttagaactctgggattgacaggtaagaactatgagaaggtctgtgaaatgtgccacattacactcaataaaattgctatattcggtgataatggcactattactcctggaggtgtaaggattggtactcctgctatgacatcaagaggttgtctagaggccgattttgagactattgctgactttttgctcagagctgcacagattgcaagtgtcgtacagagagagcatgggaaaatgcagaaggcttttctgaagggccttgagagcaataaagatattgttgagctcagaacccgagttgaaatttttgctactcaatttgtaatgccaggatttgatggttga

SEQ ID NO: 4087 - protein, 577 aa, Vitis vinifera
MDLNSSSNLSLGFSSSSSVQIADDSIAFQIDSSFRESTNPMPTAPLQLLEENHRGENGGGGGESADEEEKVEEFRILGHSMCLKRRRDGEVTCSAVRRDPMEAELEARRSAVRAWGNQRLCVADPDVFDIMEKEKRRQFKGIELIASENFVCRAVMEALGSHLTNKYSEGMPGARYYCGNQYIDEIEWLCCKRALKAFDLDPENWGVNVQPYSCTSANFAVYTGLLLPGDRIMGLDTPSGGNTSHGYYTPNGRKVSGASIFFESLPYKVNPQTGYIDFDKLEERALDFRPKILICGGSSYPREWDYARFRQIADKCGAVLLCDMAQISGLVAAKECVNPFDYCDIVTSTTHKSLRGPRGGIIFYRKGTKPRKRGMILSQGDDNDHYDYEEKINFAVFPSLQGGPHNNHIAALAIALKQVATPEYKAYMLQVKKNAQALASALLRRKCRLVTGGTDNHLLLWDLRTLGLTGKNYEKVCEMCHITLNKIAIFGDNGTITPGGVRIGTPAMTSRGCLEADFETIADFLLRAAQIASVVQREHGKMQKAFLKGLESNKDIVELRTRVEIFATQFVMPGFDG

SEQ ID NO: 4088 - DNA, 1587 bp, Vitis vinifera
  CDS (1)..(1587)
atgcaggcttgtagtggaactgctgctatgggttctctgcaacagcccatttggattaaggggtcaagttttgctccaaatgggtctactgtcaatgggttcccacaccaaattaaactgaactcggttaagccatgtagatcttatatcaaaggaagcttggttactgggaagccaccttcctctgtgtctgtcactgtgcctggaaatggggatagtggagtcaattttattgaccatggcttgaatgaagctgatcctgaagtgtgtgcaattatttacaaggaaaagcaacggcaaatgaaaagcttagaacttattgcctcagagaatttcacatcccgggcagtgatggaagctgttggttcttgcctcacaaacaaatattctgagggattgcctggtaaaaggtactatggtggtaatgagttcattgatgagctggaaactctgtgtcagaagagggctttggcagcattccacttagatggaaagaagtggggtgtcaatgttcaaccattgtctggttctccagctaactttgaagtatacactgcccttctcaatccacatgacagaatcatgggcttggacttacctcatgggggccacttgtctcatggtttcatgactcctaaaagacgggtatcaggcacatcaatttattttgagtctatgccttatcgacttgatgaatctacaggtcttgttgattatgacatgcttgagaaaacagctaatctttttcgaccaaaactcattattgctggtgctagtgcttatcctcgagattttgattatcctcgtatgaggaagattgcagatggtgttggtgcttttctcatgatggatatggctcacattagtggacttgttgctgcttctgtggttgctgacccctttgagtactgtgatattgtgacaacaacaacacacaagtctcttagaggtcctagaggtggcatgatcttcttcaagaaagattctgttctgggagttgacttagaatctgccatcaacaatgctgtttttccaggtttacagggtggtccgcataaccacacaatcgggggactttcagtctgcttaaagcatgcccaatccccagaattcaaggcttaccagaaccaggtagtgtcaaactgtagagctcttgctggccggttaatcgaattgggatataacctggtttccgggggaagtgataaccaccttattcttgtggatcttaggccattgggtattgatggggctcgggcggagaagattcttgacatggcttctatcaccctcaacaagaattcagtgcctggcgacaagagtgccctcgtgcctggtggcattcgcatcggatcacctgcgatgactaccaggggattctccgagaaggaattcatagcaactgcagatttcattcacgagggcgtgcagctatctcttgaagcaaaaaaatcggtttcaggatcaaagctcctagacttcatgaagtttgtaacgtccccagatttctctttgatagaccgggtgtcggatttgcagaggagagtcgaaactctcacaacccagttcccaatgcctggattataa

SEQ ID NO: 4089 - protein, 528 aa, Vitis vinifera
MQACSGTAAMGSLQQPIWIKGSSFAPNGSTVNGFPHQIKLNSVKPCRSYIKGSLVTGKPPSSVSVTVPGNGDSGVNFIDHGLNEADPEVCAIIYKEKQRQMKSLELIASENFTSRAVMEAVGSCLTNKYSEGLPGKRYYGGNEFIDELETLCQKRALAAFHLDGKKWGVNVQPLSGSPANFEVYTALLNPHDRIMGLDLPHGGHLSHGFMTPKRRVSGTSIYFESMPYRLDESTGLVDYDMLEKTANLFRPKLIIAGASAYPRDFDYPRMRKIADGVGAFLMMDMAHISGLVAASVVADPFEYCDIVTTTTHKSLRGPRGGMIFFKKDSVLGVDLESAINNAVFPGLQGGPHNHTIGGLSVCLKHAQSPEFKAYQNQVVSNCRALAGRLIELGYNLVSGGSDNHLILVDLRPLGIDGARAEKILDMASITLNKNSVPGDKSALVPGGIRIGSPAMTTRGFSEKEFIATADFIHEGVQLSLEAKKSVSGSKLLDFMKFVTSPDFSLIDRVSDLQRRVETLTTQFPMPGL

SEQ ID NO: 4090 - DNA, 1551 bp, Vitis vinifera
  CDS (1)..(1551)
atggcaatggcgcttcgcggactcgcctcttccgtcaagaagccgattgggcctcttatcaatggcggttccctttactacatgtcatctctcccgaacgaagttgtctgcgaaaaagagaaatctcgtattacttggacaaaacaattgaatgctccgcttgaggttgttgatccggaaatcgctgacatcattgagctcgagaaagcgaggcaatggaagggattggaactcattccttcagaaaatttcacatcggtatctgtaatgcaagccgttggatcagtcatgactaataaatatagtgaagggtatcctggtgcgagatactatggaggaaatgagtatattgacatggcagagtccttatgtcagaagcgtgcattagaagctttccagttggaccctgcaaaatggggagtcaatgtgcagtcattatctggatcccctgccaactttcaagcttacacggcattattaaaacctcatgagagaatcatggcacttgatcttcctcatggtgggcatctttcacatggttatcagaccgacaccaagaagatatctgctgtgtctatattttttgagacaatgccatacagattggatgaaaaaactggatatattgactatgaccagttggagaaaagtgctgccctcttcagaccaaaactaattgttgctggcgcaagtgcctatgcacgtctttatgattatgcacgtatccgcaaggtgtgtgacaagcagaaagctgtcatgttggcagacatggcacatattagtgggttggttgctgctggtgttatccaatctccttttgaatatgctgatattgtgacaaccacaacacataagtctctacgtgggccacgtggagcaatgatattcttcaggaagggggttaaagagatcaacaaacaagggaaagaagtgttgtatgactatgaagacaaaatcaatcaggctgtctttcctggacttcaaggtggaccacacaatcatactatttctggcttagcagttgcattgaaacaggccatgactccagagtacaaggcttatcaagagcaagtccttactaattgctcaacatttgctcagagtctgttagagaaaggctatgaacttgtatctggcggaactgataaccatttagtcttggtgaatttgaaaaacaagggtattgatggttctagagttgaaaaggttcttgaatcagttcacattgcagccaataaaaacactgttcctggggatgtgtctgccatggttcctggtggcattcgaatgggaaccccagctcttacatctaggggatttgttgaggaggattttgtgaaagtagccgagttatttgatgctgctgtcaagttggctttgaagatcaaagctaacagcaaaggaacaaagttgaaggactttgtggcaaccatgcagtcagatgccgaaactcaatctgagattgcgaagctccgccatgaggtcgaggagtatgcaaaacaattcccaactattggttttgagaaagaaacaatgaaatataaagattga

SEQ ID NO: 4091 - protein, 516 aa, Vitis vinifera
MAMALRGLASSVKKPIGPLINGGSLYYMSSLPNEVVCEKEKSRITWTKQLNAPLEVVDPEIADIIELEKARQWKGLELIPSENFTSVSVMQAVGSVMTNKYSEGYPGARYYGGNEYIDMAESLCQKRALEAFQLDPAKWGVNVQSLSGSPANFQAYTALLKPHERIMALDLPHGGHLSHGYQTDTKKISAVSIFFETMPYRLDEKTGYIDYDQLEKSAALFRPKLIVAGASAYARLYDYARIRKVCDKQKAVMLADMAHISGLVAAGVIQSPFEYADIVTTTTHKSLRGPRGAMIFFRKGVKEINKQGKEVLYDYEDKINQAVFPGLQGGPHNHTISGLAVALKQAMTPEYKAYQEQVLTNCSTFAQSLLEKGYELVSGGTDNHLVLVNLKNKGIDGSRVEKVLESVHIAANKNTVPGDVSAMVPGGIRMGTPALTSRGFVEEDFVKVAELFDAAVKLALKIKANSKGTKLKDFVATMQSDAETQSEIAKLRHEVEEYAKQFPTIGFEKETMKYKD

SEQ ID NO: 4092 - DNA, 1755 bp, Vitis vinifera
  CDS (1)..(1755)
atggatgcgtctcatgctcagtcgggtctctctctagggtttcattcgcattcatcgctagctcccatgacgccgctcgctgacgattcggtgaagctgcagattgcttcggattttagcagtctggggaatcctattcaatccgttccactgcaattgtttgagcaaagatgcgagaaattttctaatggaagtggaggacagtctgaagacggagaggatgaggagtttcatattttggggcatcccatgtgtttgaagaggccgagagacgagcaattttcgaggtcttctagcccttctaaggtggctttggttgagtccgggcttgagcagaggcgagtagcggtgagggcttggggaaaccagccgcttagtgttgctgatcctgatgttttccaaataatggagaaggagaagaagaggcagtttaaaggaattgagcttatagcttctgagaattttgtgtgtagggctgtgatggaagcccttgggagccatttgacaaacaaatattcagaaggaatgccaggtgcaagatattacacgggtaatgactacattgatcagattgaattactttgctgcaggcgtgccttggcggcttttcatcttgattctgagaaatggggtgtaaatgtccagccatattcgtgtacatcagctaattttgctgtgtacactgggcttttacttcccaaggatcggattatgggtttggattcgccctctggtggtcatctgagtcatgggtattacatgccaagcgggaaaaaggtttcaggtacatcaatattttttgagagtctcccttataaagtgaacccacaaactgggtatattgattatgataaactagaggagaaggctcttgatttccgtcccaagatacttatttgtggtgggagttcatatccacgggagtggaattacgcaaggttcaggcagattgcagataaatgtggcgcagtattaatgtgtgacatggctcagattagcggtattgtggcggctaaggagtgtgcaagtccgtttgattattgtgatattgttacctcgacaactcacaaaaatctccgaggtcctaggggaggtattattttttacagaaaaggtgcaaaggcaaggaagcctggcatgcttcttagccaaggagatgatagtaaccaatatgattttgaggagaggataaactttgctgtcttcccttcattacaagggggccctcacaataatcacatagctgctcttgccatagccttaaaacaagtggccacaccagagtacaaagcatatatgcaacaggtgaaaaaaaatgctcaggctttagcagctgctttgctcagaaaaagttgcaaattggtgacagaaggtactgacaaccatttgttgctctgggatcttacagatctacacataacaggcaagaactatgagaaggtctgtgagctgtgccacattactctcaataaaactgctatatatggtgacaatggtgccatttcccctggaggggtaaggatcggttctcctgccatgacaacaagaggttgtctggaggctgattttgagacaattgcagagtttctctacagagcagctgtgattacaagtgcagttgttacacaaagagaacttagaaagtttccgcgagattttttcaagtgtctccagaacaacaaggatattgttgagctccgaaatcaagtggagacatttgcttcccagtttgcaatgccagggtttgacatttga

SEQ ID NO: 4093 - protein, 584 aa, Vitis vinifera
MDASHAQSGLSLGFHSHSSLAPMTPLADDSVKLQIASDFSSLGNPIQSVPLQLFEQRCEKFSNGSGGQSEDGEDEEFHILGHPMCLKRPRDEQFSRSSSPSKVALVESGLEQRRVAVRAWGNQPLSVADPDVFQIMEKEKKRQFKGIELIASENFVCRAVMEALGSHLTNKYSEGMPGARYYTGNDYIDQIELLCCRRALAAFHLDSEKWGVNVQPYSCTSANFAVYTGLLLPKDRIMGLDSPSGGHLSHGYYMPSGKKVSGTSIFFESLPYKVNPQTGYIDYDKLEEKALDFRPKILICGGSSYPREWNYARFRQIADKCGAVLMCDMAQISGIVAAKECASPFDYCDIVTSTTHKNLRGPRGGIIFYRKGAKARKPGMLLSQGDDSNQYDFEERINFAVFPSLQGGPHNNHIAALAIALKQVATPEYKAYMQQVKKNAQALAAALLRKSCKLVTEGTDNHLLLWDLTDLHITGKNYEKVCELCHITLNKTAIYGDNGAISPGGVRIGSPAMTTRGCLEADFETIAEFLYRAAVITSAVVTQRELRKFPRDFFKCLQNNKDIVELRNQVETFASQFAMPGFDI

SEQ ID NO: 4094 - DNA, 1416 bp, Populus trichocarpa
  CDS (1)..(1416)
atggatccagtcactgcatggggaaacacctccctggaatcagtggacccagaaatccacgacttgatcgagaaggaaaaacgccggcaatgcagaggtatcgagctcatcgcttcagaaaatttcacatctttcgccgttatagaggcccttggcagcgctctgactaataagtactcagagggtatgccaggaaaccgctactacggcgggaatgaatatattgatcagattgaaaatctctgcagatctcgggctcttgaagcttttcatttagaccccacaaaatggggtgtaaatgttcagccatattcaggttctcctgcaaattttgctgcttatacagcagttcttcagccccatgacagaatcatggggttggatttgccttctggagggcatttgactcatgggtattacacatctgggggcaagaagatttcagctaccagtatttattttgagagtttgccttacaaggtgaattcgcaaagtgggtatattgattatgataaattggaggagaaggctctagattttaggcctaagcttattatttgtggtggaagtgcttatccgagagattgggattataaaaagtttagatctgtcgctgataagtgtggtgctcttttgctttgtgatatggctcacatcagtggccttgttgctgctcaggaagctgccaacccctttgagtactgtgacatagtcaccaccactacccacaaaagtttgaggggtcctagggctggtatgatcttctatcgcaagggccctaaaccaccaaagaagggtcagccagagaatgcggtttatgacttcgaagacaagatcaactttgctgttttcccatctcttcagggcggtccccacaatcaccagatcggtgctctggctgttgccttgaaacaggtccaaacccctgggttcaaggcctatgccaaacaagtcaaggcaaatgccgttgcccttggaaactacttgatgggccagggatacaagcttgttactgaaggaactgagaaccacctcgttctgtgggatcttagaccccttggattgacaggcaacaaggtcgaaaagctctgtgaccttgcaaacatcaccgtcaacaaaaatgccgtgtttggtgacagcagtgctttggctccgggaggagtaagaattggtacccccgccatgacttcaagaggtttggtagagaaggatttcgaacagattggagagttcctccaccgtgctgtgaccatcacgctgagcatccaaaaggaatatggaaagctcttgaaggacttcaacaagggtctggtgaacaacaaggacattgaggcactcaaggctgatgttgaaaagttttctggctccttcgacatgcctgggtttcagatgtctgagatgaagtacaaggattag

SEQ ID NO: 4095 - protein, 471 aa, Populus trichocarpa
MDPVTAWGNTSLESVDPEIHDLIEKEKRRQCRGIELIASENFTSFAVIEALGSALTNKYSEGMPGNRYYGGNEYIDQIENLCRSRALEAFHLDPTKWGVNVQPYSGSPANFAAYTAVLQPHDRIMGLDLPSGGHLTHGYYTSGGKKISATSIYFESLPYKVNSQSGYIDYDKLEEKALDFRPKLIICGGSAYPRDWDYKKFRSVADKCGALLLCDMAHISGLVAAQEAANPFEYCDIVTTTTHKSLRGPRAGMIFYRKGPKPPKKGQPENAVYDFEDKINFAVFPSLQGGPHNHQIGALAVALKQVQTPGFKAYAKQVKANAVALGNYLMGQGYKLVTEGTENHLVLWDLRPLGLTGNKVEKLCDLANITVNKNAVFGDSSALAPGGVRIGTPAMTSRGLVEKDFEQIGEFLHRAVTITLSIQKEYGKLLKDFNKGLVNNKDIEALKADVEKFSGSFDMPGFQMSEMKYKD

SEQ ID NO: 4096 - DNA, 1668 bp, Populus trichocarpa
  CDS (1)..(1668)
atggatttaacacaagcagcgcaatcaggtctctcgcttcgatttcactcaagttcaattccaattcaactgcaattactcgatcaaaaacaagagacccacatcgataacgaagaaaaccaaacagaagatgaacaatttagcattttgggtcatcaagtgtgtataaagagaccaagagataacagttctcaatcatcatcttcatcatcgacgacaagttcttccaaacgggttgctatggatccgggtttggagtctcgtcgggccatggttcgggcatggggtaaccaccgtcttcccgtcgcggatcctgaaattcatgagattatggagaaagagaagcaaaggcagtttaaaggtattgaattgattgcatctgagaattttgtttgccgtgcagttatggaagctcttggtagtcatttaactaataaatattcggagggattgcctggttccagatactatacgggaaatcaatatattgatcaaattgaattgatttgttggagccgcgcgctggcagcttttggacttgattctgataaatggggtgttaatgtgcagccatattcgtgtacttcagcgaatttttctgttttcactgggcttttattgcctggggataggatcatggggttagactcgccttctggagggcatttaagtcatgggtattatacacctggagggaagaatgtgtcagcttcgtcaatattttttgagagtctgccatataaagtgaatccacaaaccgggtatattgattatgataagatggaggagaaggctatggattttagacctaagatactgatctgtggtgggagttcgtacccgagggagtgggattatgcgaggtttagacaagttgctgataagattggtgctgttttgatgtgtgatatggctcacattagcgggctcgtagcagctaaggaatgtgtaagtccatttgaatattgtgatattgttacctctacaacacacaaaagtcttcgaggtcctagaggggggattattttttataggaaaggcccaaaattgaggaagcagggcatgcttcttagtcatggtgatggtatcagccattatgattttgaagaaaagataaattttgcagtccatccatcaacacaagggggtcctcacaataatcacatcgctgctcttgccatagccttaaaacaagtggccacaccagagtacaaagcatatatgcaacaggtgaggaaaaatgctcaggcattagcatctgctttgttgagaagaaaatgcagactcgtgactggtgggactgataaccatttgttgctgtgggatctaactgcttggggattaacaggcaagtgttatgagaaggtgtgtgaaatgtgccacatcactctaaataaaagtgccatatttggtgacaatggtgcgatctgtcctggaggagtgagaattggtgctcctgctatgacatcaagaggttgcatagaggctgattttgagacgattgctgactttcttcttaaggctgctcagattactactgttgtgcagagggaacatggaaaaaaggatttcctcaaaggtcttcataacaatagagatattgttgagcttcgaaaccgggttgagatttttgcttctcagtttgccatgccaggatttgacatttga

SEQ ID NO: 4097 - protein, 555 aa, Populus trichocarpa
MDLTQAAQSGLSLRFHSSSIPIQLQLLDQKQETHIDNEENQTEDEQFSILGHQVCIKRPRDNSSQSSSSSSTTSSSKRVAMDPGLESRRAMVRAWGNHRLPVADPEIHEIMEKEKQRQFKGIELIASENFVCRAVMEALGSHLTNKYSEGLPGSRYYTGNQYIDQIELICWSRALAAFGLDSDKWGVNVQPYSCTSANFSVFTGLLLPGDRIMGLDSPSGGHLSHGYYTPGGKNVSASSIFFESLPYKVNPQTGYIDYDKMEEKAMDFRPKILICGGSSYPREWDYARFRQVADKIGAVLMCDMAHISGLVAAKECVSPFEYCDIVTSTTHKSLRGPRGGIIFYRKGPKLRKQGMLLSHGDGISHYDFEEKINFAVHPSTQGGPHNNHIAALAIALKQVATPEYKAYMQQVRKNAQALASALLRRKCRLVTGGTDNHLLLWDLTAWGLTGKCYEKVCEMCHITLNKSAIFGDNGAICPGGVRIGAPAMTSRGCIEADFETIADFLLKAAQITTVVQREHGKKDFLKGLHNNRDIVELRNRVEIFASQFAMPGFDI

SEQ ID NO: 4098 - DNA, 1551 bp, Populus trichocarpa
  CDS (1)..(1551)
atggccattgctcttcgcaggctctcttcctccctcaggaacccaatcaaaccttacctcaatggcggttctctctattacaacatgtcttctttgcctcataaagctctgcccgacgaagacaaagctcgcgccaattggataaagcaattgaatgctccgttagaggaaatcgatccggaaattgctgacatcatcgaactcgagaaagcaaggcaatggaagggattggaactcattccttcagagaatttcacgtcggtgtcggtgatgcaagcggttggttcggttatgaccaataaatacagtgaagggtacccgggggctagatattatggaggaaatgagtacattgacatggctgagacgttatgtcagaagcgtgcattagaagcttttgggttggatcctcaaaaatggggagtcaacgtgcagtcactatctggatcccctgctaactttcaagtttacacggcactgctgaaacctcatgagagaatcatggcacttgatctgccacatggtgggcatctttcacatggttatcagactgacacaaagaagatatctgctgtatccatattttttgagacaatgccatacagattgaatgagagtacaggctatgtggactatgatcagctggagaaaagtgccacactctttagaccaaaacttatagttgctggtgcaagtgcttatgctcgcctttatgactatgcacgtatccgtaaggtctgtgacaagcaaaaggcagttttgttggctgatatggcacacatcagtgggcttgttgcagcaggtgttattccatctcctttcgaatatgcagatgtcgttacaaccaccacacacaagtcacttcgaggtccacggggggctatgatcttcttcaggaagggggtgaaagaaattaacaaacaagggaaagaagtgatgtatgactatgaagacaaaatcaatcaggcagtctttcctggacttcaaggtggtcctcacaatcataccatatctggtttagcggttgcactaaagcaggcgagaactccagagtacaaggcctaccaagagcaagttctcagcaactgttcaaaatttgctcagagcttgatagagaagggctatgaactggtatctggtggcactgagaaccatctagtcctggtgaatttaagaaacaagggtattgatggatcaagagttgaaaaggttctggaattagtccacattgcagctaataaaaacactgttcctggagatgtatctgccatggttcctggtggaattcgtatgggaacccctgctctcacttcaaggggttttattgagagagattttgtgaaagtagctgagttctttgatgctgctgtgaagttggccttgaagatcaaggcagatgcacaaggaatgaagttgaaggattttgtagcagccatgaagtcagatggacatcaatctgagattgcaaggctccgtcatgatgttgaagagtatgcaaagcaattccctacagttggatttgagaaggaaacaatgaaatacaaggactga

SEQ ID NO: 4099 - protein, 516 aa, Populus trichocarpa
MAIALRRLSSSLRNPIKPYLNGGSLYYNMSSLPHKALPDEDKARANWIKQLNAPLEEIDPEIADIIELEKARQWKGLELIPSENFTSVSVMQAVGSVMTNKYSEGYPGARYYGGNEYIDMAETLCQKRALEAFGLDPQKWGVNVQSLSGSPANFQVYTALLKPHERIMALDLPHGGHLSHGYQTDTKKISAVSIFFETMPYRLNESTGYVDYDQLEKSATLFRPKLIVAGASAYARLYDYARIRKVCDKQKAVLLADMAHISGLVAAGVIPSPFEYADVVTTTTHKSLRGPRGAMIFFRKGVKEINKQGKEVMYDYEDKINQAVFPGLQGGPHNHTISGLAVALKQARTPEYKAYQEQVLSNCSKFAQSLIEKGYELVSGGTENHLVLVNLRNKGIDGSRVEKVLELVHIAANKNTVPGDVSAMVPGGIRMGTPALTSRGFIERDFVKVAEFFDAAVKLALKIKADAQGMKLKDFVAAMKSDGHQSEIARLRHDVEEYAKQFPTVGFEKETMKYKD

SEQ ID NO: 4100 - DNA, 1659 bp, Populus trichocarpa
  CDS (1)..(1659)
atggatttaacacaagcagcacaatcaggtctctcacttggatttcactcaagtccaattccactacaattactcgatcaaaaacaagaaacccgcatcgataacgaagagaatcaaaccgaagatgagcaatttagcattttgggtcaccaaatgtgtataaagagaccgagagataacagttctcaatcatcagcgtcatcgtcgacgacaaattcttccaaacgggttgccatggaccctggtttggagtctcgtcgggccatggttcgggcatggggaaaccacccgcttccaatcgcagatcctgagattcatgagattatggagaaggagaagcaaaggcagtttaaaggtattgaattgattgcgtctgagaattttgtttgccgtgctgttatggaagctcttggtagtcatttaactaataaatattctgagggattgcctggttccagatattatacgggaaatcaaaatattgatcaaattgaattgatttgttggagtcgcgccttggcagcttttggacttgattctgataaatggggtgttaatgtgcagccatattcctgtacttcagcgaattttgctgtttacacagggcttttgttgcctggggataggatcatggggttagattctccttctggaggacatttgagtcatgggtattatacaccgggagggaaaagggtctcggcttcttcgattttttttgagagtctgccttataaagtgaacccgcaaactgggtatattgattatgataagatggaggagaaggctatggattttagacctaagatactgatctgtggtgggagttcctatccgagggagtgggattatgcgaggtttagacaagttgctgataggattggtgctgttttgatgtgtgatatggctcacattagcgggcttgtggcagctaaggaatgtgttagtccatttgaatattgtgatattgttacctctacaactcacaaaagccttcgaggtcctagaggggggattattttttataggaaaggcccaaaattgaggaagcagggcatgcttagtcatggtgatggtagcagccattatgattttgaagaaaagataaattttgcagtccatccatcattacaagggggtcctcacaataatcacatcgctgctcttgccatagccttaaaacaagtggctacaccagagtacaaagcatatatgcaacaggtgaggaaaaatgctcaggcattagcgtctgctttgttgagaagaaaatgcagattggtgactggcggtactgataaccatttggtgctgtgggatctaacaacttggggcttagcaggcaagtgttatgagaaggtgtgtgaaatgtgccaaatcactctaaataaaagtgccatatttggtgacaatggtgctatctgtcctggaggagtgagaatcggtactcctgctatgacatcaagaggttgcttagaggctgatttcgagaaaattgctgactttcttcttaaggcctctcatataacgactgttgtgcagagggaacatggaaaaaaggattttctcaaaggtcttcataacaataaagaaattgttgagcttcgaaaccgggttgagatatttgcttctcagtttgccatgccaggatttgacgtttga

SEQ ID NO: 4101 - protein, 552 aa, Populus trichocarpa
MDLTQAAQSGLSLGFHSSPIPLQLLDQKQETRIDNEENQTEDEQFSILGHQMCIKRPRDNSSQSSASSSTTNSSKRVAMDPGLESRRAMVRAWGNHPLPIADPEIHEIMEKEKQRQFKGIELIASENFVCRAVMEALGSHLTNKYSEGLPGSRYYTGNQNIDQIELICWSRALAAFGLDSDKWGVNVQPYSCTSANFAVYTGLLLPGDRIMGLDSPSGGHLSHGYYTPGGKRVSASSIFFESLPYKVNPQTGYIDYDKMEEKAMDFRPKILICGGSSYPREWDYARFRQVADRIGAVLMCDMAHISGLVAAKECVSPFEYCDIVTSTTHKSLRGPRGGIIFYRKGPKLRKQGMLSHGDGSSHYDFEEKINFAVHPSLQGGPHNNHIAALAIALKQVATPEYKAYMQQVRKNAQALASALLRRKCRLVTGGTDNHLVLWDLTTWGLAGKCYEKVCEMCQITLNKSAIFGDNGAICPGGVRIGTPAMTSRGCLEADFEKIADFLLKASHITTVVQREHGKKDFLKGLHNNKEIVELRNRVEIFASQFAMPGFDV

SEQ ID NO: 4102 - DNA, 1590 bp, Populus trichocarpa
  CDS (1)..(1590)
atgcaagccaccagtggagccgcagtgatgggttctttgcaacagcctgttttgtcaaaagggccagcctttccaatgaaaaggagtgttatcattgggtttccgtatcaagttaagcttaattcagtgaagccatgcagggcttcttcccttgaaggaagcttggtcactggcagacccccctcttctgtttctgttcctatccctgaaactggagctgacataagtagcttcaaagattatggacttggtgaagctgatcctgaagtgcttgaaattataaataaggaaaaggataggcagttcaaaagccttgaacttattgcatcagagaatttcacatctcgagcagtgatggaagcagttggttcgtgcttaacaaataagtattctgaaggacttcctggtaaaagatactatggtggaaatgagtacattgatgagcttgaaaccctttgtcaaaaaagggctctggcatcatttaacttggatggaaagaagtggggtgttaatgttcaaccattgtctggatcccctgctaattttgaggtttatactgcacttcttaaaccacatgaccgaatcatgggtttggacttgcctcatgggggacacttgtctcatgggttcatgacccctaaaaggcgggtatctgggacatcaatttactttgagtctatgccatatcgacttgatgaatcaacaggcctggttgattatgatatgcttgagaaaacagctatcctctttcgaccaaaactcattattgctggtgctagtgcttatcctcgagattttgattatcctcgcatgaggaagattgcagatgctgtcggtgcttttctcatgatggatatggctcatataagtggtcttgttgctgcttctgttgttgccgacccctttgagtactgtgatgttgtgacaactacaacacacaagtcactacgaggtccaagaggtggaatgatctttttcaaaaaagatcctgttctaggagttgacatggaatctgccatcaacaatgctgtttttccaggcttacaaggcggtcctcataatcacacaattggtggattggcagtttgcttgaagcatgcacaatcccctgaatttaaagcttaccagaagcaggtcatctgtaactctagagcacttgcaaaccgaatggttgaattaggatataaattggtttctggtggcagcgacaatcatctcattcttgtagatctaaggccattgggacttgatggggctcgggtggagaaaatccttgacatggcttctatcaccctcaacaagaattctgtgcctggtgataagagcgccctagttcctggtggcattcgcattggatcccctgcgatgactaccagaggatttacagagacagaatttgtagctactgctgacttgattcatgaaggagtacaaataagtcttgaagctaaaaaatcagtatccggatccaagctccaggatttcttaaagtttgttaaatcccctgatttccctctaacagataaagtatcagatcttcaaagaagagttgaagcacttacaactcagtttccaatcccaggattatga

SEQ ID NO: 4103 - protein, 529 aa, Populus trichocarpa
MQATSGAAVMGSLQQPVLSKGPAFPMKRSVIIGFPYQVKLNSVKPCRASSLEGSLVTGRPPSSVSVPIPETGADISSFKDYGLGEADPEVLEIINKEKDRQFKSLELIASENFTSRAVMEAVGSCLTNKYSEGLPGKRYYGGNEYIDELETLCQKRALASFNLDGKKWGVNVQPLSGSPANFEVYTALLKPHDRIMGLDLPHGGHLSHGFMTPKRRVSGTSIYFESMPYRLDESTGLVDYDMLEKTAILFRPKLIIAGASAYPRDFDYPRMRKIADAVGAFLMMDMAHISGLVAASVVADPFEYCDVVTTTTHKSLRGPRGGMIFFKKDPVLGVDMESAINNAVFPGLQGGPHNHTIGGLAVCLKHAQSPEFKAYQKQVICNSRALANRMVELGYKLVSGGSDNHLILVDLRPLGLDGARVEKILDMASITLNKNSVPGDKSALVPGGIRIGSPAMTTRGFTETEFVATADLIHEGVQISLEAKKSVSGSKLQDFLKFVKSPDFPLTDKVSDLQRRVEALTTQFPIPGL

SEQ ID NO: 4104 - DNA, 1563 bp, Populus trichocarpa
  CDS (1)..(1563)
atggcagtggcaatgaccatggcccttcgccgtctctcctcttcctttgacaagccccttcgccctgctctcttcaaagccacctccctctattatatgtcttctttgccaaacgaagctgtatatgagaaggagaaacctggtgtcagctggccaaagcagctgaatgcacccttagaggctgttgatcctcaggttgctgatattattgagctcgagaaagctaggcaatggaaggggcttgagcttataccctcagagaacttcacttcggtatcagtgatgcaagctgtgggttctgtcatgaccaacaagtacagtgaaggataccctggtgcaagatactatggtggaaacgagtatattgacatggcagaatccttatgtcagaagcgtgctctggaagcatttcgcctggatcctgctaaatggggagtgaacgtgcaatctctatctggatctccagctaattttcaagtctacactgcattgttaaagcctcatgaaagaatcatggcacttgatcttcctcatggaggccatctttctcatggctatcagacagacaccaaaaaaatatctgcagtgtcaatattttttgagacaatgccatacagattgaatgagagcactggctatattgactatgatcagctggagaaaagtgccactcttttcagaccaaaattaatagtagctggtgctagtgcttacgcacgactatatgattatgcacgcattcgcaaggtttgcgacaaacaaaaagctatactgttggcagatatggcacacattagtggattggttgcagctgatgtcatcccgtcaccttttgagtatgcagatatagtgactaccacaactcacaagtcacttcgcgggccacgtggggcaatgattttcttcaggaaggggttaaaagaggttaacaaacaagggaaagaagtgttttatgactacgaggacaaaatcaatcaagctgtctttcctgggcttcaaggtggtccacacaaccacacaattgctggtttagcagttgctttgaaacaggctacaactgtagagtacaaagcgtatcaagagcaagttctaagtaattgtgcaaaatttgcccagagtttagttgagaaaggctacgaacttgtttctggaggaactgagaaccatttagttttggtgaatttgaagaacaagggtatagatggctccagagttgaaaaggtgcttgaatctgttcacattgctgcaaacaaaaacactgttcctggagatgtgtctgccatggttcctggtggcatcaggatgggaacgccggctcttacttctaggggtttcgttgaagaggattttgctaaggtggcagatttctttgatgccgctgtgaagttggcagtggagatcaaggctgaaaccaaagggacgaagttgaaggatttcttggctacgcagtctgctcctcactttcaatctgagatttcaaaactccgtcgtgacgtggaagagtacgctaagcaattcccaacaattggatttgaaaaggaaaccatgaagtacaagaattga

SEQ ID NO: 4105 - protein, 520 aa, Populus trichocarpa
MAVAMTMALRRLSSSFDKPLRPALFKATSLYYMSSLPNEAVYEKEKPGVSWPKQLNAPLEAVDPQVADIIELEKARQWKGLELIPSENFTSVSVMQAVGSVMTNKYSEGYPGARYYGGNEYIDMAESLCQKRALEAFRLDPAKWGVNVQSLSGSPANFQVYTALLKPHERIMALDLPHGGHLSHGYQTDTKKISAVSIFFETMPYRLNESTGYIDYDQLEKSATLFRPKLIVAGASAYARLYDYARIRKVCDKQKAILLADMAHISGLVAADVIPSPFEYADIVTTTTHKSLRGPRGAMIFFRKGLKEVNKQGKEVFYDYEDKINQAVFPGLQGGPHNHTIAGLAVALKQATTVEYKAYQEQVLSNCAKFAQSLVEKGYELVSGGTENHLVLVNLKNKGIDGSRVEKVLESVHIAANKNTVPGDVSAMVPGGIRMGTPALTSRGFVEEDFAKVADFFDAAVKLAVEIKAETKGTKLKDFLATQSAPHFQSEISKLRRDVEEYAKQFPTIGFEKETMKYKN

SEQ ID NO: 4106 - DNA, 1416 bp, Populus trichocarpa
  CDS (1)..(1416)
atggatccagtaactgtgtggggaaactcctccctccaaacagttgacccagaaatccacgacttaatcgagaaggaaaaacgccgccaatgcaaaggaatcgaactgatcgcatcagaaaacttcacttctttcgccgttatagaggctcttggaagcgctctcaccaacaagtactctgagggtatgccaggtaaccgctactacggcggtaatgaatatattgatgagattgaaaatctctgcagagctcgggcccttcaagcttttcatttagaccccactaaatggggtgtaaatgtccagccctattctggttcccctgcaaatttcgctgcgtacacagcagttctccagccccatgacagaatcatgggcttggatttgccttcaggggggcatttgactcatgggtattacacatctgggggtaaaaagatttcagctaccagtatttattttgagagtttgccttacaaggtgaacccgcaaactgggtttcttgattatgataggttggaagaaaaggctttggattttaggcctaagcttattatttgtggtggaagtgcttatcctagagactgggattataagaagtttagatctgttgctgataagtgtggtgctcttttgctttgtgacatggctcacatcagtggccttgttgctgctcaggaagctgccaacccgtttgagtactgtgacatagtcaccaccactacccacaaaagtttgaggggtcccagggctggtatgatcttctaccgcaagggccctaagccacccaagaagggtcagccggaggatgcagtttatgactttgaagacaagatcaactttgcagttttcccatctcttcagggtggtcctcacaaccaccagattggtgctctggctgttgcattgaaacaggcccagagccctgggttcaaggcctatgctaagcaagtcaaggccaatgcagttgcccttggaaactacttgatgagcaagggatacaagcttgttactgaaggcaccgagaaccaccttgttctgtgggatcttaggccccttgggttgacaggcaacaaggttgaaaaactatgtgaccttgcaaacatcactgtgaacaagaatgccgtgtttggtgacagcagtgctttggcacctggtggagtgagaatcggtgcccccgccatgacttctagaggtttggttgagaaggatttcgagcagattggagaattcctccaccgtgctgtgaccatcacactgagcatccaaaaggaacatggaaagctcttgaaggacttcaacaagggtctggtgaacaacaaggaaatcgaggccctcaaggctgatgttgaacagttctcaggctcctttgagatgcctggctttctgatgtctgagatgaagtataaggattag

SEQ ID NO: 4107 - protein, 471 aa, Populus trichocarpa
MDPVTVWGNSSLQTVDPEIHDLIEKEKRRQCKGIELIASENFTSFAVIEALGSALTNKYSEGMPGNRYYGGNEYIDEIENLCRARALQAFHLDPTKWGVNVQPYSGSPANFAAYTAVLQPHDRIMGLDLPSGGHLTHGYYTSGGKKISATSIYFESLPYKVNPQTGFLDYDRLEEKALDFRPKLIICGGSAYPRDWDYKKFRSVADKCGALLLCDMAHISGLVAAQEAANPFEYCDIVTTTTHKSLRGPRAGMIFYRKGPKPPKKGQPEDAVYDFEDKINFAVFPSLQGGPHNHQIGALAVALKQAQSPGFKAYAKQVKANAVALGNYLMSKGYKLVTEGTENHLVLWDLRPLGLTGNKVEKLCDLANITVNKNAVFGDSSALAPGGVRIGAPAMTSRGLVEKDFEQIGEFLHRAVTITLSIQKEHGKLLKDFNKGLVNNKEIEALKADVEQFSGSFEMPGFLMSEMKYKD

SEQ ID NO: 4108 - DNA, 1602 bp, Aspergillus flavus NRRL3357
  CDS (1)..(1602)
atgctgagccgctgtggtcgccaggctttgcgattgatcccgcgcacgggaagctcttccagagctatcgccatcactactcaactccgaccggctgctcccttgtgtgtctccagctcaatttctcagagccggagtgtgtcatcctccagtcgtgatggacagcaacatttgctctccgcacacctcgaggaggaagaccccacaatctacaatattctccagaaggagaaaaaacgtcaaaagcactttatcaacctgatcccttcggagaacttcacttcacaagcggtccttgatgccctgggcagtgtgatgcaaaacaagtattcagagggttatcccggtgccagatactacggaggaaatgagcacatcgacgagtcggagaggttatgtcaacagcgtgccttggagaccttccggctcaatcccgaagaatggggcgtgaatgttcaaccactttccggctctcccgcgaacttgtatgccatctccgcccttctcaacacgcatgaccgcctgatgggcctggacttgcctcatggtggtcacttgtcacatggttatcagacacccaccaagaagatttcattcatctcgaaatactttgagacccttccttaccgccttgatgagtcgactggtctcattgattacgacgccctcgagaagcaggcgttgctctatcgtccaaagctcattattgccggtacttcggcctatagccgattaatcgactaccctcggatgcgccagatcgcagacgcagctggtgcataccttctcagtgacatggcccacatatctggactggttgctgcggatgtacttccctcgcctttcactcactctgatgtggtaacaacgactactcacaagtccctgcgtgggccccgtggtgccatgatcttctaccgcaagggtgtccgccggacggacaagaagggcaacccggagatgtacgacttagagaatcctatcaatgcctccgtcttcccgggccaccagggtgggcctcataaccacaccattactgctctagcagttgcactgaagcaggcccagtcaaccgagttcaagacttaccaggaaaccgtcttagccaacgctaaggcattggctgaccgacttggcagccctctcagcaatgggggtttgggatacaacattgtgtccggtggaacggataaccacctggtcctcgtggatctgaagaaccgtggggttgatggagcccgtgttgaacgtgttctagagctctgcggcgttgctagcaacaagaacaccgttccgggagatcggtcggctttgaagcccggtggtctccgcctgggtactcctgccatgactacccgtggcttccagcccgaggacttccgccgcgtggccgatatcgttgatcgcgcggtcattatcacccaaaagctggacaaggctgccaaggagagcgctgcggctaagggcgttaagaacccgaacactgtcaaggccttcctggaatatgttggtgagggtgaggagatttcagagattgtgctcttgcggcaggaagttgaggactgggtgggaactttcagcctcccttggaaggacgagtaa

SEQ ID NO: 4109 - protein, 533 aa, Aspergillus flavus NRRL3357
MLSRCGRQALRLIPRTGSSSRAIAITTQLRPAAPLCVSSSISQSRSVSSSSRDGQQHLLSAHLEEEDPTIYNILQKEKKRQKHFINLIPSENFTSQAVLDALGSVMQNKYSEGYPGARYYGGNEHIDESERLCQQRALETFRLNPEEWGVNVQPLSGSPANLYAISALLNTHDRLMGLDLPHGGHLSHGYQTPTKKISFISKYFETLPYRLDESTGLIDYDALEKQALLYRPKLIIAGTSAYSRLIDYPRMRQIADAAGAYLLSDMAHISGLVAADVLPSPFTHSDVVTTTTHKSLRGPRGAMIFYRKGVRRTDKKGNPEMYDLENPINASVFPGHQGGPHNHTITALAVALKQAQSTEFKTYQETVLANAKALADRLGSPLSNGGLGYNIVSGGTDNHLVLVDLKNRGVDGARVERVLELCGVASNKNTVPGDRSALKPGGLRLGTPAMTTRGFQPEDFRRVADIVDRAVIITQKLDKAAKESAAAKGVKNPNTVKAFLEYVGEGEEISEIVLLRQEVEDWVGTFSLPWKDE

SEQ ID NO: 4110 - DNA, 1449 bp, Magnaporthe grisea 70-15
  CDS (1)..(1449)
atggccgaggctacttacgcattgtcggctactcataaggagatgcttgagaagtctcttctcgactccgaccctgaggtcgctgagatcatgaaacacgagatccagcgtcagcgcgagtccatcatccttatcgcctccgagaatgttacgtctcgggctgtcttcgatgcccttggttcgcctatgtcgaacaagtactccgagggctacccaggcaagcgctactacggtggcaaccagcacattgacgagattgagctcctctgccagcgccgtgctcttgctgccttcaacgtcactgaggacaagtggggtgtcaacgttcagtgcttgagtggcagccctgccaaccttcaggtttaccaggccattatgcctccccatggcaggctcatgggtctggacctccctcacggtggccacttgagccacggctaccagaccccccagcgaaagatttcggctgtttcgacctacttcgagaccatgccctaccgtgttgaccttgagactggcatcattgactacgaccagctcgagaagaacgtggtcctgtacaggcccaagattttggtggccggtacctctgcctactgccgcctgatcgattacgcgcggatgcgcaagatcgctgatctcgttggcgcttacttggtcgtcgacattgctcacatttctggcctcgtcgcttcgggtgtgatcccctccccgttcctccacgccgatgttgttactaccactacccacaagtctctccgtggtcctcgtggcgcgatgatcttcttccgcaggggtgttcgttccgtcgaccccaagactggcaaggagaccatgtacgacctcgaggagcccatcaacttctcggtcttccccggtcaccagggtggtccccacaaccacaccatcactgctctggctgtcgccctcaagcaggcatccacgcccgagttcaaggcctaccagcagcaggttgtcgacaacgccaaggcgttggagaacagcttcaaggagcttggccacaagctcgtctcggacggcaccgactcccacatggtcctggttgacctgcgtgcccactccctggatggtgctcgtgttgaggctgtacttgagcagatcaacatcgcctgcaacaagaacagcattcctggcgacaagagcgctcttaccccgtgcggtatccgtatcggtacccctgccatgaccagccgtggctttggtgtcgagcacttccagcgcgtcgccaaatacattgacgagagcatcaagatttgcaaggacgtccaggctgctctgcccaaggaggccaacaagctcaaggacttcaaggccaaggttgcttcgggcgaggtttccaggatcaacgagctcaagaaggagattgcgtcctggtgccaaaccttccctctccctgttgagggctggcgcaccgacgccggtatttaa

SEQ ID NO: 4111 - protein, 482 aa, Magnaporthe grisea 70-15
MAEATYALSATHKEMLEKSLLDSDPEVAEIMKHEIQRQRESIILIASENVTSRAVFDALGSPMSNKYSEGYPGKRYYGGNQHIDEIELLCQRRALAAFNVTEDKWGVNVQCLSGSPANLQVYQAIMPPHGRLMGLDLPHGGHLSHGYQTPQRKISAVSTYFETMPYRVDLETGIIDYDQLEKNVVLYRPKILVAGTSAYCRLIDYARMRKIADLVGAYLVVDIAHISGLVASGVIPSPFLHADVVTTTTHKSLRGPRGAMIFFRRGVRSVDPKTGKETMYDLEEPINFSVFPGHQGGPHNHTITALAVALKQASTPEFKAYQQQVVDNAKALENSFKELGHKLVSDGTDSHMVLVDLRAHSLDGARVEAVLEQINIACNKNSIPGDKSALTPCGIRIGTPAMTSRGFGVEHFQRVAKYIDESIKICKDVQAALPKEANKLKDFKAKVASGEVSRINELKKEIASWCQTFPLPVEGWRTDAGI

SEQ ID NO: 4112 - DNA, 1476 bp, Gibberella zeae PH-1
  CDS (1)..(1476)
atgtctcccacaaacgccgagtatgcgctctccgagtcgcacaaggagatgctcgagaagtctctcctcgactccgaccccgaggttgcctccatcatgaaggatgagatccagcgccagcgcgagtccatcgtcctcatcgcctccgagaacatcacctcccgtgccgtcttcgacgcccttggttctcccatgtccaacaagtactctgagggttaccccggtgctcgttactatggtggcaaccagcacatcgatcagatcgagcttctctgccagcgtcgtgccctcgaggccttccacctcgactctgagaagtggggtgtcaacgtccagtgcctttctggatctcccgccaacctccaggtctaccaggctatcatgcctcctcacggtcgtctcatgggtcttgacctcccccacggtggccatcttagccacggttaccagacccccgccaggaatatgctaacaattgacaacaggatctctgctgtctctacttacttcgagaccatgccctaccgtgtcgaccttgacaccggtatcattgactacgacaccctccagaagaacgctatcctctaccgccccaaggtcctggtcgccggtacctctgcctattgccgtctcatcgactacgagcgcatgcgcaagatcgccgactccgtcggtgcttacctcgttgtcgatatggcccacatctctggtcttatcgccgctgaggtcatccccacccccttcaagtacgccgatatcgttaccaccaccacccacaagtccctccgtggtccccgtggtgccatgatcttcttccgcaagggtgtccgctccgtcgatgccaagactggcaaggagactctctacgaccttgagaaccccatcaacttctccgttttccctggtcaccagggtggtcctcacaaccacaccatcactgccctggctgttgccctgaagcaggctgccagccccgacttcaaggcctaccaggagaaggttgtctccaacgccaagaccctggagaacaccttcaaggctctcggccacaagctcgtctctgacggaactgacagtcacatggtcctcattgacctccgccagcacaaccttgacggtgcccgcgttgaagccgttctcgagcagatcaacattgcttgcaacaagaactccatccccggtgacaagtctgcccttactccttgcggtatccgtatcggtacccccgccatgacttctcgtggtttcggcgagaaggagttcgagcgtgtcggcaagttcatcgacgaggccatcaagatctgcaaggaggagcaggctgccctccccaaggaagcaaacaagctcaaggacttcaaggcccgcgttgccagtggtgaggtccagaagatcaacgatttccgaaaggagattgcttcttggtgcagcgccttccccctccccgttgagggttggcgcctggacgccagcatctaa

SEQ ID NO: 4113 - protein, 491 aa, Gibberella zeae PH-1
MSPTNAEYALSESHKEMLEKSLLDSDPEVASIMKDEIQRQRESIVLIASENITSRAVFDALGSPMSNKYSEGYPGARYYGGNQHIDQIELLCQRRALEAFHLDSEKWGVNVQCLSGSPANLQVYQAIMPPHGRLMGLDLPHGGHLSHGYQTPARNMLTIDNRISAVSTYFETMPYRVDLDTGIIDYDTLQKNAILYRPKVLVAGTSAYCRLIDYERMRKIADSVGAYLVVDMAHISGLIAAEVIPTPFKYADIVTTTTHKSLRGPRGAMIFFRKGVRSVDAKTGKETLYDLENPINFSVFPGHQGGPHNHTITALAVALKQAASPDFKAYQEKVVSNAKTLENTFKALGHKLVSDGTDSHMVLIDLRQHNLDGARVEAVLEQINIACNKNSIPGDKSALTPCGIRIGTPAMTSRGFGEKEFERVGKFIDEAIKICKEEQAALPKEANKLKDFKARVASGEVQKINDFRKEIASWCSAFPLPVEGWRLDASI

SEQ ID NO: 4114 - DNA, 1509 bp, Gibberella zeae PH-1
  CDS (1)..(1509)
atgatgaacatgaggcttcttcggcagcaatgccttcgcaccaagccatcactggctacgcgcatttccaccagaggtttcgcatctcaaaaagatctcctcggttcaagcctcgagcaaggcgaccctgagatccatgccattctcaagcgcgaagagaagcgtcagaaccacttcatcaacctcatcccctccgaaaacttcacctcgcgatcagttctcgatgccctaggcagtgtcatgcaaaacaagtactccgagggctacccaggagcacgatactacggcggcaatgaacacatcgatgaggccgaacgtctttgccaatccagagctctcgagactttccgtcttgaccccgagaagtggggtgtcaacgttcagccactctctggatccccagccaacctctacgcttactctgctatcctcaacacccacgatcgcatcatgggtcttgaccttccccatggaggccatctctcccacggctaccagatccccggcaagaagatctccatgatctcaaagtactacgagaccttcccctaccgactcaacgaggagactggcctgatcgactacgaaaagctgcgcgagaacgccctgctgtaccgccccaaggtcatcgtagcaggaacatctgcctattcccgccttatcgattatgagcgcatgcgcgccattgccaatgaggctggtgcttaccttctctctgatatggctcacgtttccggtcttgtcgctgctggtgttatcggaacaccctttgatgactctgacatcgtcacgaccaccacccacaagtccctgcgcggacctcgcggcgccatgatcttctaccgcaagggcgtgcgaagcacagacaagaagggcaagcagatcatgtacgacctcgagggccccatcaacgcgtccgtcttccccggccaccaaggcggtcctcacaaccacaccatcaccgccctcgctgtcgccctcaagcaggcccagacacctgagttcaaggactaccaagaaaaggtcctcgcaaactcccaagccatggccaaccagctcactgacctcggctactcgcttgtctctggcggcaccgacaaccacctcgttctcgtggacctcaagcccaagggtatcgacggcgcgcgtgtggagcgcgtgcttgaactcgttggcgtagcgagtaacaagaacaccgtgcctggtgaccgctcggcgctgaagccgggcggtctccgtctgggaacgcccgccatgacgacgcggggcttcaacggcgaggactttaagcgcgtggccgatattgttgaccgcggcgtgaagatcactctggcggttgataaggatgcgcgtgctgcggctgaggctaagggagctaagaacccaggtaccgtcaagaactttttggagtttttgggtgatggatccagtgtcaaggagattgctgcgctgcgcgatgaggttgctgagtgggttggaggattccctcagccttggctcaagtcatga

SEQ ID NO: 4115 - protein, 502 aa, Gibberella zeae PH-1
MMNMRLLRQQCLRTKPSLATRISTRGFASQKDLLGSSLEQGDPEIHAILKREEKRQNHFINLIPSENFTSRSVLDALGSVMQNKYSEGYPGARYYGGNEHIDEAERLCQSRALETFRLDPEKWGVNVQPLSGSPANLYAYSAILNTHDRIMGLDLPHGGHLSHGYQIPGKKISMISKYYETFPYRLNEETGLIDYEKLRENALLYRPKVIVAGTSAYSRLIDYERMRAIANEAGAYLLSDMAHVSGLVAAGVIGTPFDDSDIVTTTTHKSLRGPRGAMIFYRKGVRSTDKKGKQIMYDLEGPINASVFPGHQGGPHNHTITALAVALKQAQTPEFKDYQEKVLANSQAMANQLTDLGYSLVSGGTDNHLVLVDLKPKGIDGARVERVLELVGVASNKNTVPGDRSALKPGGLRLGTPAMTTRGFNGEDFKRVADIVDRGVKITLAVDKDARAAAEAKGAKNPGTVKNFLEFLGDGSSVKEIAALRDEVAEWVGGFPQPWLKS

SEQ ID NO: 4116 - DNA, 1500 bp, Gibberella zeae PH-1
  CDS (1)..(1500)
atgtctctcacaggcgtgagaggcacctcccgtgtcttgcgtaccattgcgaagccagtagccatatcagcaacatgtactcgcccagcttcttcattagccgtcgaggatcagcagcaggagaagaatcgccagaaacacttcataaacctgatcccttccgagaacttcacctcacaggctgtactggatgctctgggcagtgtgatgcaaaacaaatactcagaagggtatccaggcgcccgatattacggcggtaacgaattcatcgatcaatccgaaagactttgtcaacaacgcgctctggaatcattcggcctcgatccgaaacaatggggggtgaacgttcaagctctgtccggcgcacctgccaatctctacgtttattccgctttgctcaatacacacgaccggctaatgggtctggatctaccgcatggtggccatttatcgcacgggtaccaaacactgaccaaaaagatctctgccatttcaaagtacttcgaaactctaccataccggttgaatgaaacgactggatacattgattacgaaaaactggatgaggtggcgagcgtatacagaccaaagattatcgttgctggcgcaagtgcatacagtcgacttattgactatcagcgtatgcgagagatctgtgacaaggtcaacgcctaccttcttgccgatatcgctcacatttctggtctagttgcagccaaagtcattcctggacctttcgcacatgcagatattgtaactactacaagccataaaagtttacgaggaccccgaggtgccatgatcttttacagaaagggcattcgaagacaacaccctaaaaccaaggaggatatcctatacgacctcgaaggtccaatcaacaattccgtcttccccggtcaccaaggcggtcctcacaaccacacaattacagccctcgccgtggctctcaagcaggcccaaactcctgagttccaagcttatcagtctcaagtgctaaagaatgcaaaggcattcgcgaaacggttgagtgaacccaagggcaaaggcggcttaggttacaagcttgttagtggggggacagacaaccacttggtcctcgccgacctgaaaccacacggcatcgatggtggtcgagtagaacgcgtgctggaactagttggcgtcgcagccaacaaaaacacagtccctggagatcgttctgctttggttcctggcggtcttcgcatgggtacacctgccatgaccacgcgcggctttaacgaggacgatttcgtccgcgtcgctgatgttgttgatcgcgctgtcactatcgcttctcgcattgacaaggccgcccggaaggcggcggaggagaagggcgataagagtcctggtaagataaaggtttttctagagcatctcggcgatggtgagacacaatccgaaatcgttcagctgcgaagcgaggtcgaggattgggtaggcacataccctgtaccatggaacacgtcacaataa

SEQ ID NO: 4117 - protein, 499 aa, Gibberella zeae PH-1
MSLTGVRGTSRVLRTIAKPVAISATCTRPASSLAVEDQQQEKNRQKHFINLIPSENFTSQAVLDALGSVMQNKYSEGYPGARYYGGNEFIDQSERLCQQRALESFGLDPKQWGVNVQALSGAPANLYVYSALLNTHDRLMGLDLPHGGHLSHGYQTLTKKISAISKYFETLPYRLNETTGYIDYEKLDEVASVYRPKIIVAGASAYSRLIDYQRMREICDKVNAYLLADIAHISGLVAAKVIPGPFAHADIVTTTSHKSLRGPRGAMIFYRKGIRRQHPKTKEDILYDLEGPINNSVFPGHQGGPHNHTITALAVALKQAQTPEFQAYQSQVLKNAKAFAKRLSEPKGKGGLGYKLVSGGTDNHLVLADLKPHGIDGGRVERVLELVGVAANKNTVPGDRSALVPGGLRMGTPAMTTRGFNEDDFVRVADVVDRAVTIASRIDKAARKAAEEKGDKSPGKIKVFLEHLGDGETQSEIVQLRSEVEDWVGTYPVPWNTSQ

SEQ ID NO: 4118 - DNA, 1395 bp, Apis mellifera
  CDS (1)..(1395)
atgcctgaattaatttataaaaatatctgggaaacagacccagagctttttgaattaatgaaaaaagaaaaaaaaagacaagaatctggtcttgaaatgattgctagtgaaaattttacatctcttagcgttcttcaatgtttaagttcttgccttcataataaatatagcgaaggtcttcctggtcaaagatattatggaggaaatgaatatattgatgaaattgaattattagcacaaaaacgtgctttagaagcatttaatttaaatcctgaagaatggggttgtaatgttcaaccatattcaggaagtccagctaattttgctgtttatacaggtataattgaacctcatggtcgtataatgggtttagatcttccagatggagggcatcttacacatggtttttttactccaaataaaaaagtttctgcaacatcattattttttgaatcaaaaccatacaaagttaatattaatactggtttaattgattatgataaattagctgaagaagcaagattatttaagcctaaaattataatagcaggagtatcttgttatagtagatgtttagattacaaacgattcaaagaaatagcagaagaaaataatgcttatctatttagtgatatggctcatgtagcaggattagttgctgctgaattaattcctagcccattcaaatatagtgatgttgtatctactacaacacataaaactttaagaggacctcgagcaggtgttatcttctttcgcaaaggaattagaaaaattggaaaagatggtcaaaaaattatgtatgatttagaagataaaattaatcaagctgtatttccaggactgcaaggtggacctcacaatcatgcaattgcaggcatagctacaacaatgaaacaagtcaaatcaccagaatttcttcaataccagaaacaaattatagctaatgcaaaaagattatgtacaaaattacaagagtatggttataaaattaatacagatggaactgatgttcatatgttacttgtagatttacgatctacaggtattactggagctaaagcagaaaaaattttggagagtatttctattgcttgcaataaaaatacagtgcctggtgataaaagtgcattgaattgtagtggtatcagacttggtacacctgcattaactactcgtggtttagttgaaaaagatattgataaagttgtaaactttatacacaaaggattattactttctaaagaagtatctaatatttctggtcctaaacttgttgactataaaagagtattaaatactgatgcttatataaaggcaaaagttgcagctttaagaaaagaagttgaaacattttctaaacaatttcctattcctggttttgaaatatattaa

SEQ ID NO: 4119 - protein, 464 aa, Apis mellifera
MPELIYKNIWETDPELFELMKKEKKRQESGLEMIASENFTSLSVLQCLSSCLHNKYSEGLPGQRYYGGNEYIDEIELLAQKRALEAFNLNPEEWGCNVQPYSGSPANFAVYTGIIEPHGRIMGLDLPDGGHLTHGFFTPNKKVSATSLFFESKPYKVNINTGLIDYDKLAEEARLFKPKIIIAGVSCYSRCLDYKRFKEIAEENNAYLFSDMAHVAGLVAAELIPSPFKYSDVVSTTTHKTLRGPRAGVIFFRKGIRKIGKDGQKIMYDLEDKINQAVFPGLQGGPHNHAIAGIATTMKQVKSPEFLQYQKQIIANAKRLCTKLQEYGYKINTDGTDVHMLLVDLRSTGITGAKAEKILESISIACNKNTVPGDKSALNCSGIRLGTPALTTRGLVEKDIDKVVNFIHKGLLLSKEVSNISGPKLVDYKRVLNTDAYIKAKVAALRKEVETFSKQFPIPGFEIY

SEQ ID NO: 4120 - DNA, 1410 bp, Candida glabrata CBS 138
  CDS (1)..(1410)
atgccttatgcgttatctgataagcacttgaagatggtcagtggccatctaagtgaaactgaccctgaagttgaacagattatcaaggatgaagtcgacagacaaaagcactccattgacttgatcgcctctgagaacttcaccaccacctctgtgttcgatgctttgggaactccactatgtaacaagtactctgagggttacccaggtgctcgttactacggtggtaacgaacacattgaccgcattgaaagactgtgtcaacagagagccttggaggctttccatgtaactccagacagatggggtgtcaatgttcagactttgtctggttctccagctaacttgcaggtatatcaagctttgatgaagccccacgaaagattaatgggtctatacttgccagatggtggccatttgtcccatggttacgctactgagaacagaaagatcagtgctgtctccacctacttcgaatccttcccatacagagtcaacccagaaactggtatcatcgactatgacaccttggagaagaatgctatcctatacagaccaaagattctagttgctggtacttctgcttactgtcgtctgatcgactacaagagaatgagagagatcgctgacaaatgtggtgcttacttaatggtcgacatggcccacatttccggtttggtcgccgctggtgtcattccatctccattcgaatacgctgacatcgttaccactaccactcacaagtctctaagaggtcctcgtggtgcaatgatcttcttcagaagaggtatcagatcagttaaccaaaagactggtaaggaaattccatatgacttggagaacccaattaacttctctgtcttcccaggtcaccaaggtggtccacacaaccataccattgctgctttggccaccgcactaaaacaagctgctactccagagttcaaggaataccaaactcaagttctaaagaacgctaaggctctagaaaatgagttccaaactctaggttacagactagtctcaaacggtaccgactcacacatggttttggtctccttgagagaaaagggtgtcgatggtgctcgtgttgaatatgtctgtgaaaagattaacattgccttgaacaagaactctattccaggtgataagtcagctttggtcccaggtggtgtacgtattggtgccccagctatgactaccagaggtatgggcgaagaagacttccacagaattgtacgttacattgaccaagctgtgaagtttgctgaacagacccagagctctttgccaaaggaagccaacaaattgaaggacttcaaggccaaggtcgacgaaattgccgaccaactggctccattgaagaaagaaatttacgactggactgctgaataccctctagctgtctaa

SEQ ID NO: 4121 - protein, 469 aa, Candida glabrata CBS 138
MPYALSDKHLKMVSGHLSETDPEVEQIIKDEVDRQKHSIDLIASENFTTTSVFDALGTPLCNKYSEGYPGARYYGGNEHIDRIERLCQQRALEAFHVTPDRWGVNVQTLSGSPANLQVYQALMKPHERLMGLYLPDGGHLSHGYATENRKISAVSTYFESFPYRVNPETGIIDYDTLEKNAILYRPKILVAGTSAYCRLIDYKRMREIADKCGAYLMVDMAHISGLVAAGVIPSPFEYADIVTTTTHKSLRGPRGAMIFFRRGIRSVNQKTGKEIPYDLENPINFSVFPGHQGGPHNHTIAALATALKQAATPEFKEYQTQVLKNAKALENEFQTLGYRLVSNGTDSHMVLVSLREKGVDGARVEYVCEKINIALNKNSIPGDKSALVPGGVRIGAPAMTTRGMGEEDFHRIVRYIDQAVKFAEQTQSSLPKEANKLKDFKAKVDEIADQLAPLKKEIYDWTAEYPLAV

SEQ ID NO: 4122 - DNA, 1458 bp, Candida glabrata CBS 138
  CDS (1)..(1458)
atgatgttgctacgtgccgctagagtgcccgtgttgggcagacgctttctttcccagcaacaattgatctcgaagcatgtgcaagaggtggaccccgagatgttccgcatcctcagcgatgagaggagcagacagaagcactctgtcacgctgatcccttctgagaacttcacgtcgaaggccgtcatggacctgctgggctctgagatgcagaacaagtactccgagggctaccccggcgagaggtactacggtggtaaccagttcatcgataaagctgagtcgctgtgccaggcccgtgccctggacctgtatggccttgaccctgagaagtggggggtcaatgtgcaggccctgagcggtgcccctgccaacctgtacgcttactccgcggtcatggaggtcggcgaccgtctgatgggtctcgacttgccccacggtgggcacttgtctcacggataccaattgccttccggaactaagatctcctacatctcaaagtacttcaacaccatgccataccacgtcaacaccgagaccggtatcattgactatgacactttggccatgacctctaagctgttcagaccaaaggtcatcgtcgcaggtacgtccgcatactcgaggaagctggactacgctaggttcagaaagatcgccgacggctgcggtgcctacttgctgagcgacatggcccacatctccggtctggtggccgccaatgtcatagactccccattcgagcactccgacatagtcaccaccaccacccacaaatccctaagaggcccccgtggtgctatgatattctacagaaagggtatcaagaaagtcaacaagaagactggcaaggagaccccattcactttcgacaagaccatcaacttctcagtgttcccaggccaccaaggtggcccacacaaccacaccatttctgcattggctgtggcattaaagcaagcaaagacccccgagttcgtcgagtaccagaagcaagtggtctccaacgcaaaggccttcggtgacgagctattgaagcgtggcttcgagctagtgtccggcggtaccgataatcacttgcttttgctaaacctgtccaacatgggcatcgacggtgctcgtttggaggctatcctggagaagattaacatcgccgcaaacaagaacaccatcccaggtgacaagtccgcgctgttcccatcaggtttgagagtaggtaccccagccatgactaccagaggcttccaagaacaagacttcaagaaggtcgctgagtacatcgacaacgccgttaaactatccattgctctgaagtcccaggagtccgcagacgctaaggacgtcagatcaaagctaaacagcttcaagcagttgtgtgaccagtctgaaccagtgcaaaaattagccgaagaagtgtcctcatgggtaggcacattcccagttcctggcgaattgtag

SEQ ID NO: 4123 - protein, 485 aa, Candida glabrata CBS 138
MMLLRAARVPVLGRRFLSQQQLISKHVQEVDPEMFRILSDERSRQKHSVTLIPSENFTSKAVMDLLGSEMQNKYSEGYPGERYYGGNQFIDKAESLCQARALDLYGLDPEKWGVNVQALSGAPANLYAYSAVMEVGDRLMGLDLPHGGHLSHGYQLPSGTKISYISKYFNTMPYHVNTETGIIDYDTLAMTSKLFRPKVIVAGTSAYSRKLDYARFRKIADGCGAYLLSDMAHISGLVAANVIDSPFEHSDIVTTTTHKSLRGPRGAMIFYRKGIKKVNKKTGKETPFTFDKTINFSVFPGHQGGPHNHTISALAVALKQAKTPEFVEYQKQVVSNAKAFGDELLKRGFELVSGGTDNHLLLLNLSNMGIDGARLEAILEKINIAANKNTIPGDKSALFPSGLRVGTPAMTTRGFQEQDFKKVAEYIDNAVKLSIALKSQESADAKDVRSKLNSFKQLCDQSEPVQKLAEEVSSWVGTFPVPGEL

SEQ ID NO: 4124 - DNA, 1497 bp, Kluyveromyces lactis NRRL Y-1140
  CDS (1)..(1497)
atgctttcaagatctgctcgttgttctagggctgttctcttcagtgccaaacgctctctagcttcccaggctaatactggtgctaatgccagtgctaaccaggttatggtatcaaagcatgtgcaagacattgacccagaaatgtatgacatcttgacgaaagaacgcaaaagacaaaaacattccatcactttgattccaagtgaaaacttcacttctaagtctgttatggatcttttgggttccgaaatgcaaaacaagtattctgagggctatccaggtgagcgttactatggtggtaatcaatttattgatatggcagaatctctgtgccaaaagcgtgccttggaattgtacaatttggatcctcaactatggggagttaacgttcagccattgtccggtgctccagctaacttatacgcttattctgcagttatggaaacaaacgaccgtttgatgggtttggatttacctcatggtggtcatttgtctcacggctaccaattgccaagtggtactaagatttcatatatctccaagtattttcaaacaatgccataccatgtcgactcacaaactggcataatcgattatgatttcttgtccaagacgtctaaattatttagacctaaggttatcgttgcaggtgcttctgcatactccagagtcttggattacaagcgtttcaaggagattgctgatgcatgcggggcctacttgatgtctgatatggcccatatctcgggacttgtcgccgctggtgttactcgttctccattcgaatattctgatattgttacaactactacccacaaatctttacgtgggccaagaggtgctatgatcttttacagaaagggtgttagaaaggttacaaagaaaggtaaggaagtcctatacgacttggataagagaatcaacttttccgtgttcccaggtcatcaaggtggtccacataatcatactatttctgccttagccgttgctttgaaacaagctgccactccagaattcaaagagtaccaagccgctgttgttgaaaatgctcgtattttcggcgaagaattagtcaagaagggcttcgaattagtttctggcggtaccgatactcatttgatcttgatcaatttatctaacttgggcattgatggtgccaggttggaaaccctgttggaaaacatcaacattgctgctaataaaaatactattccaggtgataaatcggctttgttcccgtcaggtttgagagttggtacaccagctatgaccactagaggctttgggccacaagaatttgcccaagtcgctgcttatattgacagagctgttaagttagccattggcatcaaatctcaagaatctccagatgctaaagacgctagatcgaagttagccagcttcaaagaactatgcaaggaatcagaccaagtcaagcaactagctgacgaagtctatcaatgggttggtgagttcccagttccaggtgaattataa

SEQ ID NO: 4125 - protein, 498 aa, Kluyveromyces lactis NRRL Y-1140
MLSRSARCSRAVLFSAKRSLASQANTGANASANQVMVSKHVQDIDPEMYDILTKERKRQKHSITLIPSENFTSKSVMDLLGSEMQNKYSEGYPGERYYGGNQFIDMAESLCQKRALELYNLDPQLWGVNVQPLSGAPANLYAYSAVMETNDRLMGLDLPHGGHLSHGYQLPSGTKISYISKYFQTMPYHVDSQTGIIDYDFLSKTSKLFRPKVIVAGASAYSRVLDYKRFKEIADACGAYLMSDMAHISGLVAAGVTRSPFEYSDIVTTTTHKSLRGPRGAMIFYRKGVRKVTKKGKEVLYDLDKRINFSVFPGHQGGPHNHTISALAVALKQAATPEFKEYQAAVVENARIFGEELVKKGFELVSGGTDTHLILINLSNLGIDGARLETLLENINIAANKNTIPGDKSALFPSGLRVGTPAMTTRGFGPQEFAQVAAYIDRAVKLAIGIKSQESPDAKDARSKLASFKELCKESDQVKQLADEVYQWVGEFPVPGEL

SEQ ID NO: 4126 - DNA, 1410 bp, Kluyveromyces lactis NRRL Y-1140
  CDS (1)..(1410)
atgccatacgctctatctgactctcacaagaacttggtttctgctcacttgtctgaaagtgatccagaagtcgaacaaatcatcaaggatgaaattgacagacaaaagcactctattgtcttgattgcttctgaaaacttcacctctacctctgttttcgatgctttgggaactccaatgtgtaacaagtattctgaaggttatccaggtgctagatactatggtggtaacgaacacattgaccgtatggaattgttgtgtcaaaagagagctctagaagctttcaacttgactgctgacaaatggggtgttaacgtccaaactttgtctggttctccagctaacttgcaagtctaccaagccttgatgagacctcatgaaagattgatgggtttgttcttgccagatggtggtcatttgtctcacggttaccaaactgaaaacagaaagatttctgctgtctccacttacttcgaatctttcccatacagagttgatccaaagactggtatcatcgactatgacactttggaaaagaatgccatcttgtacagaccaaagatcttggttgctggtacttctgcatactgtcgtttgatcgactacaagagaatgagagaaatcgccgacaaggttggtgcttacttgatggttgacatggctcacatctctggtttgatcgctgctggtgttattccatctccattcgaatacgctgacattgtcactaccactactcacaagtccttgcgtggtccaagaggtgctatgatcttcttcagaagaggtatcagatctgttaacccaaagactggtaaggaaatcccatacgatttggaaggtccaatcaacttctccgtcttcccaggtcaccaaggtggtccacacaaccataccatctctgccttggctactgctttgaagcaagccaacactccagaattcaaggagtaccaaactcaagtcttgaagaacgctaaggttctagaagagtccttcaagaagttgggttacagattagtgtccgatggtactgactcccatatggtcttagtctccttgagagaaaagggtgtcgatggtgctcgtgtcgaatacgtttgtgaaaacatcaacatcgctttgaacaagaactctatcccaggtgacaaatctgctttggtcccaggtggtgtccgtatcggtgctccagctatgactactagaggtttcggtgaaccagaattcgctagaatcgtcgactacattgacaaggccgttcaatttgctgctaagactcaacaatctttgccaaaggaagccaacaaattgaaggacttcaaggctaaggtcaacgaaggttctgaagaattgacccaattgaagaacgaaatctaccaatgggccggtgaattcccattgccagtgtaa

SEQ ID NO: 4127 - protein, 469 aa, Kluyveromyces lactis NRRL Y-1140
MPYALSDSHKNLVSAHLSESDPEVEQIIKDEIDRQKHSIVLIASENFTSTSVFDALGTPMCNKYSEGYPGARYYGGNEHIDRMELLCQKRALEAFNLTADKWGVNVQTLSGSPANLQVYQALMRPHERLMGLFLPDGGHLSHGYQTENRKISAVSTYFESFPYRVDPKTGIIDYDTLEKNAILYRPKILVAGTSAYCRLIDYKRMREIADKVGAYLMVDMAHISGLIAAGVIPSPFEYADIVTTTTHKSLRGPRGAMIFFRRGIRSVNPKTGKEIPYDLEGPINFSVFPGHQGGPHNHTISALATALKQANTPEFKEYQTQVLKNAKVLEESFKKLGYRLVSDGTDSHMVLVSLREKGVDGARVEYVCENINIALNKNSIPGDKSALVPGGVRIGAPAMTTRGFGEPEFARIVDYIDKAVQFAAKTQQSLPKEANKLKDFKAKVNEGSEELTQLKNEIYQWAGEFPLPV

SEQ ID NO: 4128 - DNA, 1482 bp, Debaryomyces hansenii CBS767
  CDS (1)..(1482): transl_table=12
atgattccaacaaccttacgtacattgagaacctcgtctaagagattgcctggttccttttccagatgctatgcattgtctgctaatgcacaatcattgatctcaaaagctgtgaaggacgtcgacccagagatggccgaaattttacaacaagaaagaaacagacaaaaaagctcgattactttgattccatcggaaaatttcacttccaaggctgttatggacttgttaggatcggagatgcaaaacaagtactccgaaggttaccctggtgaaagatactacggtggtaatgaaatcatagataaagctgagtcattatgtcaaaagagagcattagaagcatttgacttgaacccggaagaatggggtgtcaacgtgcagccattatccggtgctccagctaacttgtacgcttactctgctgttttggaagtaggtgacagaatcatgggtttggacttacctcacggaggacatttatcccacggttaccaaactccaacaaccaaaatttcatacatctcgaagtatttccaaaccatgccatatagattaaacgaagaaaccggtttaattgactatgacaccttagaggccaatgccatgttattcagaccaaaggttattgttgctggtacttctgcatactctagaatcattgactataagagaatgaggcaaattgccgacaaggttggtgcctacttattgagtgatatggcccacatttccggtttggtttctgctggtgtcaccgattcaccattcccattctccgatattgttaccaccaccactcacaagtccttgagaggtccaagaggtgccatgattttctacagaaagggtgttagaaaggtcaccaagaagggtaaggaaattctctacgacttagacaagaagattaacttctctgttttcccagctcaccaaggtggtccacacaatcataccatctctgctttagccgttgctttgaagcaaacttcttacccagaattcaaggaataccaaaaggatgtcgttgccaatgcagccagcttcgccagcgaattgcaatccaagggtttcactttagtttccggtggtactgacacccacttaatcttagtcgacttgagatctaagaacattgacggtgccagagttgaagccgtattagaaagagctaacattgctgccaacaagaacactgttccaggtgacaagtccgctttattcccatccggtttaagagttggtaccccagctatgaccactagaggctttggtgcctctgaattcgcaagagttgctgaattctttgaaagggctgttcagatttcaattgacttgaaggctcaagaacaaggaagctcttcaaaggaattgttggcctctttcaagcaattggctaacagtagtagtgctgttcaagaattagccaccgaagtcaaggattgggtttctacttatcctgttccaggtgatcttccataa

SEQ ID NO: 4129 - protein, 493 aa, Debaryomyces hansenii CBS767
MIPTTLRTLRTSSKRLPGSFSRCYALSANAQSLISKAVKDVDPEMAEILQQERNRQKSSITLIPSENFTSKAVMDLLGSEMQNKYSEGYPGERYYGGNEIIDKAESLCQKRALEAFDLNPEEWGVNVQPLSGAPANLYAYSAVLEVGDRIMGLDLPHGGHLSHGYQTPTTKISYISKYFQTMPYRLNEETGLIDYDTLEANAMLFRPKVIVAGTSAYSRIIDYKRMRQIADKVGAYLLSDMAHISGLVSAGVTDSPFPFSDIVTTTTHKSLRGPRGAMIFYRKGVRKVTKKGKEILYDLDKKINFSVFPAHQGGPHNHTISALAVALKQTSYPEFKEYQKDVVANAASFASELQSKGFTLVSGGTDTHLILVDLRSKNIDGARVEAVLERANIAANKNTVPGDKSALFPSGLRVGTPAMTTRGFGASEFARVAEFFERAVQISIDLKAQEQGSSSKELLASFKQLANSSSAVQELATEVKDWVSTYPVPGDLP

SEQ ID NO: 4130 - DNA, 1413 bp, Debaryomyces hansenii CBS767
  CDS (1)..(1413): transl_table=12
atgccatacgcattatctgaatctcacaagcaattggtcgaaggacacttgaaggacattgatcctgaagttgatcaaattatcaaggatgaagtcgatagacaaaaacattccatcgttttaattgcctctgaaaattttacttcaactgctgttttcgatgccttgggaactccaatgtgtaacaagtactctgaaggttaccctggtgctagatactacggtggtaatgagcaaatcgacaagatggaaattttgtgccaagaaagagctttgaagaccttcaatgctacttctgataaatggggtgttaatgtccaaaccttatctggttcccctgctaatttgcaagtgtaccaagctttgatgaagcctcatgaaagattaatgggattggatttacctcatggaggtcacttatctcacggttatcaaaccgactctagaaagatttcagctgtttcaacctactttgaaactatgccttacagagttaacttagataccggtttaattgactacgatatgttagaaaaaactgctgttttattcagaccaaaaattttagttgcaggtacttcagcttactgtcgtcttatcgattacaagaagatgagggaaattgccgacaaggttggtgcttatcttgttgttgatatggcgcatatttccggtttagttgctgccggtgtaattccttcaccattcgaatatgctgatgttgtcactaccactacccataagtctttaagaggtccaagaggtgctatgatcttcttcagaagaggtgttaggtctatcaacccaaagaccggtcaagagatcttatacgacttagaaaacccaattaacttctctgtcttcccaggtcaccaaggtggtcctcacaaccacaccatcgcagctttagccactgctttgaagcaagcggccactcctgaattcaagcaatatcaagagcaagtattgaagaattcgaaggtcttagaagaagaattcacgaaaaagggttataccttggtttccaatggtaccgattcccatatggttttagtttccttaaaggataaacaaattgatggtgccagagtcgagactatttgtgaaaagatcaacattgctttaaataagaattctattccaggtgataagtcagcattagtcccaggtggtgttagaattggtgctccagctatgaccaccagaggtttaggtgaagaagacttcaagaagattgtttcttatattgattttgctgtcaattacgctaaggaaatacaagctaatttaccaaaggatgctaacaagttgaaagatttcaaaaacaaggtcttgaatactgaagatgagaaattacaagctgctaagaaggaaatttcccaatgggctggtgaattcccattatcagtctaa

SEQ ID NO: 4131 - protein, 470 aa, Debaryomyces hansenii CBS767
MPYALSESHKQLVEGHLKDIDPEVDQIIKDEVDRQKHSIVLIASENFTSTAVFDALGTPMCNKYSEGYPGARYYGGNEQIDKMEILCQERALKTFNATSDKWGVNVQTLSGSPANLQVYQALMKPHERLMGLDLPHGGHLSHGYQTDSRKISAVSTYFETMPYRVNLDTGLIDYDMLEKTAVLFRPKILVAGTSAYCRLIDYKKMREIADKVGAYLVVDMAHISGLVAAGVIPSPFEYADVVTTTTHKSLRGPRGAMIFFRRGVRSINPKTGQEILYDLENPINFSVFPGHQGGPHNHTIAALATALKQAATPEFKQYQEQVLKNSKVLEEEFTKKGYTLVSNGTDSHMVLVSLKDKQIDGARVETICEKINIALNKNSIPGDKSALVPGGVRIGAPAMTTRGLGEEDFKKIVSYIDFAVNYAKEIQANLPKDANKLKDFKNKVLNTEDEKLQAAKKEISQWAGEFPLSV

SEQ ID NO: 4132 - DNA, 1446 bp, Yarrowia lipolytica CLIB122
  CDS (1)..(1446)
atgcagcgattcactcgactttcccggcctctcaaccgaggcctgcttcgagcctacgccaccaaggcgtcgcccgatacccagatgactcagcagaccttgtacgcgtccgatcccgagatcgcagacatcatcaagaaggaaaccgaccggcagatcggctccatcaccctgatcccgtcggaaaacttcacctcgcaggccgtcatgaacgccctgggctccgtcatgcagaacaagtactctgagggctaccctggcgcccgatactacggtggtaacgagttcattgatcaggccgagtctctgtgccagaagcgagccctggaggcgttcaacctggaccccaaggtctggggagtcaacgtccagcccctgtctggtgcccccgcaaacctctacgcttactccgctgtcatggaggccggtgaccgactgatgggcctggacctgccccatggaggccatctctcccacggctaccagatcccctccaagaagatctcctacatctccaagtacttcaacaccatgccctaccgactggacgagtcaaccggtctcattgactatgacacgctcgccaagaacattcttcttttccgacccaaggtgctggttgctggagcttccgcctactctcgtctgatcgactacaagcgaatgcgagagatcgccgactctgtgggcgccattctcatgtctgacatggcccacatttccggtatggttgccgctggcgtcatcccctcgccttttgagtactcggacattgtgaccaccaccacccacaagtctcttcgaggcccccgaggtgccatgatcttctaccgaaaggacggtgaccgaaacctcgaggagaagatcaacttctccgtcttccccggccaccagggaggtccccataaccacaccatcaccgctctggccgttgcgcttggccaggccaagtctcccgagttcaaggagtaccagcagaaggttgtcgacaacgcccaggccttctccaaggctctgtctgacgccggcttcaagcttgtttctgacggaaccgacacccatctgatcctcattgatctgaaacccttttccattgacggtgctcgaaccgagatggttcttgacggtatgaacattgccgctaacaagaacaccgtgcccggcgacaagtctgctcttgtgcccggtggtatccgaatcggtactcccgccatgaccaccagaggttttgatcagtctgagttcgagcaggttgccaagtacattgtcaaggccgtcgatattgccaagcgactcaagcagaaggctgtttccgagggcgtcaagaagatctcccagttccggccctacgtcgatgctgatgccgaggtcaaggagctccgaaacgaggtcgagtcctgggccaagaagtaccctttccctattgatcctgctggatacaaatag

SEQ ID NO: 4133 - protein, 481 aa, Yarrowia lipolytica CLIB122
MQRFTRLSRPLNRGLLRAYATKASPDTQMTQQTLYASDPEIADIIKKETDRQIGSITLIPSENFTSQAVMNALGSVMQNKYSEGYPGARYYGGNEFIDQAESLCQKRALEAFNLDPKVWGVNVQPLSGAPANLYAYSAVMEAGDRLMGLDLPHGGHLSHGYQIPSKKISYISKYFNTMPYRLDESTGLIDYDTLAKNILLFRPKVLVAGASAYSRLIDYKRMREIADSVGAILMSDMAHISGMVAAGVIPSPFEYSDIVTTTTHKSLRGPRGAMIFYRKDGDRNLEEKINFSVFPGHQGGPHNHTITALAVALGQAKSPEFKEYQQKVVDNAQAFSKALSDAGFKLVSDGTDTHLILIDLKPFSIDGARTEMVLDGMNIAANKNTVPGDKSALVPGGIRIGTPAMTTRGFDQSEFEQVAKYIVKAVDIAKRLKQKAVSEGVKKISQFRPYVDADAEVKELRNEVESWAKKYPFPIDPAGYK

SEQ ID NO: 4134 - DNA, 1416 bp, Yarrowia lipolytica CLIB122
  CDS (1)..(1416)
atgtcttcgtacgccctttccaacaaccataaggatctcattgaagcctccctccacgacctcgaccccgaggtcgagggcatcatgaaggacgagattgaccgacagaagcactccatcgtcctcattgcctccgaaaacttcacctccaagtctgttttcgacgcccttggatctcccatgtgcaacaagtactccgagggataccccggcgcccgatactacggtggtaaccagcacattgaccgaatcgagactctgtgccagaaccgagccctcaaggccttcggcgtcacccccgacaagtggggcgtcaacgtccagaccctgtctggctctcccgcaaacctccaggtctatcaggccatcatgaagccccacgatcgactcatgggtcttgatctgccccacggaggccatctttctcacggttaccagaccgacaaccgaaagatctccgccgtctccacctacttcgagaccatgccctaccgagtcgacctcgagaccggcatcatcgactacgacatgctcgagaagaccgccatcctctatcgacccaaggttctggttgccggaacctccgcttactgccgactcattgactacaagcgaatgcgagagattgccgacaaggttggcgcttacctcgttgtcgacatggcccatatttccggcctgatcgccgccggtgtcatcccctctccctttgagtacgctgacattgtcaccaccaccacccacaagtctctgcgaggcccccgaggtgccatgatctttttccgacgaggtgtccgatccgtcgaccccaagactggtaaggagattctctacgaccttgagaaccccatcaacttttccgtcttccccggccaccagggaggtccccacaaccacaccatcaccgctctggccgttgccctgaagcaggctgctgaccccactttccgggagtaccaggagcaggttctcaagaacgccaaggctctggagaccgagttcaacaagctcggttacaacctcgtgtccggcggaaccgactcccacatggttctggtttccctgcgagacaagggcattgacggtgctcgagtcgagactgtttgcgagcagatcaacattgctctcaacaagaactccatccccggtgacaagtctgcccttgtccccggtggtgtccgaatcggtgctcccgccatgtccacccgaggcttcggcgaggaggacttcaagaagattgccaactacatctcgcaagccgtcgatctcgccattgagatccagcagggactgcccaaggaggccaacaagctcaaggacttcaaggctgctgcccaggctggtggcaaccccaagatcgaggctctcaagaccgagatctccaactgggccggccagttccctctgcccgtttaa

SEQ ID NO: 4135 - protein, 471 aa, Yarrowia lipolytica CLIB122
MSSYALSNNHKDLIEASLHDLDPEVEGIMKDEIDRQKHSIVLIASENFTSKSVFDALGSPMCNKYSEGYPGARYYGGNQHIDRIETLCQNRALKAFGVTPDKWGVNVQTLSGSPANLQVYQAIMKPHDRLMGLDLPHGGHLSHGYQTDNRKISAVSTYFETMPYRVDLETGIIDYDMLEKTAILYRPKVLVAGTSAYCRLIDYKRMREIADKVGAYLVVDMAHISGLIAAGVIPSPFEYADIVTTTTHKSLRGPRGAMIFFRRGVRSVDPKTGKEILYDLENPINFSVFPGHQGGPHNHTITALAVALKQAADPTFREYQEQVLKNAKALETEFNKLGYNLVSGGTDSHMVLVSLRDKGIDGARVETVCEQINIALNKNSIPGDKSALVPGGVRIGAPAMSTRGFGEEDFKKIANYISQAVDLAIEIQQGLPKEANKLKDFKAAAQAGGNPKIEALKTEISNWAGQFPLPV

SEQ ID NO: 4136 - DNA, 1500 bp, Cryptococcus neoformans var. neoformans JEC21
  CDS (1)..(1500)
atgcccaggcctattctcgccgctcttcgaactaccatccgcccagctttctcaaaacaattcagaatggcctcctccatccctgttcccaccgactttaacgcttgtctctacaagcccttggctgaggccgaccccgagatcaactctctcatcgagaaggagacatggcgtcagttctctggtctcgagcttatcgcttccgagaacttgacctctctcgcggttatggaggccaatggctctatgcttaccaacaagtactctgagggtcttcccggtgctcgatactacggtggtaacgagttcatcgacgttgtcgagaaccttaccagggagcgtgctttgaaggctttcaaccttgaccccaagatctggggcgtcaacgtccagccttactctggttccaccgccaactttgccgctttcactgctctcatcaacccccaggaccgagtgatgggtctcggtcttcccgacggtggtcacctcacccacggttactacaccgccaagaagaagattaccgcttcttccatctacttccagtctttcccttaccgagttgaccccaagactggcatcattgactacccccagctcgagaccaacgccaacctctacaagccccgtcttgtcgtttgcggtggttccgcttacccccgtgactgggactatggccgtctccgaaagatcgccgatagccagggcgcctacctcttgtctgacatggcccacatctctggtctcgtcgctgctgctgagcaaaactctcctttcgagtactgtgacgtcgtgaccaccactacccacaagaccctccgtggtccccgagctggtctcatcttcttccgaaaggacaaggaatccgacctcgaggctcgtgtcaacgctgccgtcttccctgcctgtcagggtggtccccacaacaacaccatcgctggtgttgccgtcgccctcaagcaggctgccgaccccgctttcaaggagtacgccaagcaggtcagggccaacgccgctgccatggctgccgtcttgttcaagcacggttacaggctccaaactgacggtactgagaaccacttgatcctctgggacctcaggcctatcggtttgaccggctccaaggttgagaagatttgtgatgccgctcacatcaccctcaacaagaatgccgtcgccggtgatacttctgccctcgtgcccggtggtgtccgaatcggtacctctgccttgacttcccgatcgatgaaggagcaggatgtggagaaggttgccgagttcctccaccgtgtggtccagattgcgctcaagactcaggaggaggcgggttccaagcttctcaaggactttgtcaagacttacgagtctggtaacggcgaagcccccaagcttatcgctgagctcaaggaggacgttatgaagtttgccaccagcttccccttgcctggtgtccccgacacttccaagattgtccgacccgagggcgtcaacctctaa

SEQ ID NO: 4137 - protein, 499 aa, Cryptococcus neoformans var. neoformans JEC21
MPRPILAALRTTIRPAFSKQFRMASSIPVPTDFNACLYKPLAEADPEINSLIEKETWRQFSGLELIASENLTSLAVMEANGSMLTNKYSEGLPGARYYGGNEFIDVVENLTRERALKAFNLDPKIWGVNVQPYSGSTANFAAFTALINPQDRVMGLGLPDGGHLTHGYYTAKKKITASSIYFQSFPYRVDPKTGIIDYPQLETNANLYKPRLVVCGGSAYPRDWDYGRLRKIADSQGAYLLSDMAHISGLVAAAEQNSPFEYCDVVTTTTHKTLRGPRAGLIFFRKDKESDLEARVNAAVFPACQGGPHNNTIAGVAVALKQAADPAFKEYAKQVRANAAAMAAVLFKHGYRLQTDGTENHLILWDLRPIGLTGSKVEKICDAAHITLNKNAVAGDTSALVPGGVRIGTSALTSRSMKEQDVEKVAEFLHRVVQIALKTQEEAGSKLLKDFVKTYESGNGEAPKLIAELKEDVMKFATSFPLPGVPDTSKIVRPEGVNL

SEQ ID NO: 4138 - DNA, 1377 bp, Aspergillus nidulans FGSC A4
  CDS (1)..(1377)
atggaggaccgcctcgtcgacactgaccccgaggtcgctaagatcatggagaatgagatccaacgtcagcgtgaatctgttgtcttgattgcttcggagaacttcacttcccgcgctgtcttcgatgctcttggttctcccatgtgcaacaagtattccgagggttaccccggtgctcgttactatggtggaaaccagcacattgacgctatcgagctgctctgccagtcccgtgcccttaaggcattcaacctcgacgccgataagtggggtgtcaacgttcagtgccttagtggcagcccggccaatttgcaggtctaccaggctctcatgcgcccccatgaccgtctcatgggtctcgaccttccccacggtggtcacctgagccacggttatcagactccttccaggaagatctctgctgtgtctacttacttcgagaccttcccttaccgcgttaacctcgagaccggtattattgactacgacacccttgaagccaacgctgagctgtaccgccccaagattttggttgccggtacctctgcctactgccgtctgatcgactatgcccgcatgcgcaagatcgctgacaaggttggcgcctaccttgttgttgacatggcccacatctccggtctgattgctgctggtgtcatcccctctcctttcgagtacgccgatgtagtcaccactaccactcacaagtctctccgcggtccccgtggtgccatgattttcttccgcaagggcgtccgcagcactgaccccaagactggtaaggacatcatgtatgacctcgagggtcccatcaacttctccgtcttccctggtcaccagggtggtccccacaaccacaccatcactgctctctctgtcgccctcaagtacgccgctaccaccgagttcaagcagtaccaggagcaggtgatcaagaacgccaaggcccttgagaacgaattcaaggccattggccacaagctcgtctccgacggtaccgacagccacatggtactcgtggatctccgccccaagtctctcgacggtgcccgtgtcgaagccgtcctcgagcagatcaacattgcttgcaacaagaactccatccctggtgacaagtctgctctcactccctgcggtatccgcattggtgctcccgccatgaccagccgtggtatgggcgaggaggacttcaagcgcatcgctcgctacattgaccaggccatcaacatctgcaagtccgtgcaggccgcacttcccacggatgccaacaagctcaaggacttcaaggccaaggttgcttccggcaccgtccctgagatcaacgacctgcgcaaggagatcgctgcgtgggccagcaccttccctctccctgtctaa

SEQ ID NO: 4139 - protein, 458 aa, Aspergillus nidulans FGSC A4
MEDRLVDTDPEVAKIMENEIQRQRESVVLIASENFTSRAVFDALGSPMCNKYSEGYPGARYYGGNQHIDAIELLCQSRALKAFNLDADKWGVNVQCLSGSPANLQVYQALMRPHDRLMGLDLPHGGHLSHGYQTPSRKISAVSTYFETFPYRVNLETGIIDYDTLEANAELYRPKILVAGTSAYCRLIDYARMRKIADKVGAYLVVDMAHISGLIAAGVIPSPFEYADVVTTTTHKSLRGPRGAMIFFRKGVRSTDPKTGKDIMYDLEGPINFSVFPGHQGGPHNHTITALSVALKYAATTEFKQYQEQVIKNAKALENEFKAIGHKLVSDGTDSHMVLVDLRPKSLDGARVEAVLEQINIACNKNSIPGDKSALTPCGIRIGAPAMTSRGMGEEDFKRIARYIDQAINICKSVQAALPTDANKLKDFKAKVASGTVPEINDLRKEIAAWASTFPLPV

SEQ ID NO: 4140 - DNA, 4941 bp, Aspergillus nidulans FGSC A4
  CDS (1)..(4941)
atgttaggccgctgtggtcgccaggcttcgcgcctcctcccgcgtcctgtcaccgcccgcccgccttcattgcaatggcagcgtatggtgtcatcgtccagagacggccagcaatcgttgctcactgcgccccttgaacaagctgacccatcagtgtacaacattctccagaaagagaaaaaacgccagcagcatttcatcaacctcattccttcagagaacttcacatcccaagcggttctggatgccctgggcagtgtcatgcaaaataaatactccgagggctatcccggagccagatactacggaggcaacgagcacatagatgaggccgagcgcctctgtcagcagcgcgccctagagacgttccgacttagtccagaggaatggggtgtcaacgttcagccgctctccgggtcccccgcgaatctctacgccatctccgctctcctcaacacacacgaccgtctgatgggcttggatctgccgcatggcggccacctttctcatggataccagaccccgacgaagaagatctcttttatttccaaatacttcgagaccctcccctaccgcctggatgagtctacgggtctcatcgattatgagagcctggagaagcaggccctcctttaccgtcccaagctcatcatcgccggtacatcggcctacagccgtcttatagattaccctcgcatgcgccagatcgccgacaacgcgggcgcttacctcatgagtgacatggcgcacatctctggcctggtcgcggccggcgtcatcccctctcccttcgcacactccgatgttgtgacaacgacaacgcacaagtcactccgtggcccccgaggagccatgatcttctaccgtaagggcatccgcaggacggacaagaaaggcaaccaggagatgtacgatctggaaggtcccatcaatgcgtccgtcttccccggccaccaaggcggccctcataaccacacaatcaccgcgctggctgtggcactccagcaggcgcagtcgactgaattcaagacctaccaggagaccgttctggccaacgccaagtctctagccgaacgcctcggtggttcgaccagcagtggtggcctgggctacaacatcgtttccggcggcacggacaaccacctcgtcttggttgatctcaagaaccgtggtgttgatggagcgcgcgttgagcgcgtgctagagctctgtggcgtggccagcaataagaacactgtccccggagaccggtcggcgctgaaacccggtggtctgcgtctcggtacgccggcgatgaccactcgcggtttccaaccggaggacttccgccgggtcgctgatatcgtcgaccgcgcggtcaccattacgcagaagctagacaaatcggcaaaggagagcgcagcttccaagggtgtcaagaaccctaacacggtcaaggcgtttttggagtatgtaggcaacggtgaggaaatctcggagattgtgcagctgcgacaggaggtggaggattgggccgtcaatcccaacggagtattttacatccaattatcctacaagcaacccatgccaagaccagattcctaccttggaaacaacgcacgtcaaagcaggctagactccaactcccgactgctccagatccctccgcagtcgcatcgagtatctttttcgacactgcaacaacaccccttctcacaatatatatccctatcatccaccaagatgaaggttagccagatatatgtctaccctataaaatctctgcgtggagtccctctttcatcagcgcaggtaacccggaccggcttcgaatatgaccgccgcttcatgctcctcaaagtcatcccgtcggaatccgaagatgcgaagggcgaaaaaacgctaaagaatatgcacatcccgcatttcccggagatgtcgctattccagacggagttgctcgagccagggagcggtgacaatgcgagaataagggttacgtatcatccttcggactctgaatcggcagggcaggtgaatggaactggctatggaaaagaggaagaggcgctgcatatccccctcaatcccgacacgaggggtctcgagcaactggcggtcgtgatgcaccgctctccaacgaaagggtataatatgggtcccaagtataatgagtggtttagcgagcgtttcggctacgatgtcgtgcttgcatatttaggcgatggcaacgggagggctgtgctggggacctttgccccggggaagcacgtcgcgcacaaggatcagaggcagggtatgaatttaggttacgttgcggcgctgcttgccgttattggggtcctctacattgcacttacggttttgacgccgtctccccctggatttgcttttgtagctgctggttttcttgggcggcgggatagagtcggcgtgatggtcgctgtggccgcacttttgccagcctttttggtcttgaaaagacagtctacgaaagacgaacgcatcacgttcgcagatacagcgccatacatggttgtttccgagacatcggtggcgaacgtcactgaccgattggaaggcgaagagatggacatgaggaagttccgtgcaaacattgtggtgtccggagcaaaaacggcatttgaagaggatttttgggcggaactggtgatcggcgatgctcaagtgcgcctgctgctgacggcgaactgtgtacggtgtcgtagtctggatgtggactatgagacgggcaagatggggaccggcgagtccgggaaagtgctgaagaaacttatggcggatcgcagagtggatactggcgccaagtacagccctgtctttgggcggtacgcgttcctggaggggcagtcagacttgaagatggtccgtgtaggtgatgaggttatagtggcaagaaacatgaaagagcgggctatttatgtgaaagttaggcataaaattagccaccagctgagacacaaactgcggctgtgcaagaagtcttggctgcaccacctcaacttcgtctcccctcctcacgcctgctcacttttgttatctttgaacccgggtctcatcttcactctctgctgtgcgagactgggaatcgccatggaccaagttcgccgcaaagataccaccaagggccctccccttcggattctgtccctcgacggcggtggtgtgcggggatactcgatgctcatcttgctccaggaactgatgcaccgtatctatgtggaaatagaaggcaaaccaccgcgacgcgaccagatccccaaaccatgcgactacttcgacctcatcgccggcacaggaaccggaggactcattgctctgatgctggggcgcttacgcctggacctcgagacctgcaaggatgtgtatgtgcgcatgacgcgccgtgtatttgagacagacaagacgtttgctggtatcccttttcggtcgacgcttttcaaggcgtcgaaactcgaagaggcgatccgggagtgcgtgcgggaacatacaatctacgagaccgaggggaacgacagcacgtcaccaacatcccctacttatgcgcccttcagtccgaatttctcgacgacgtcaatcccgcagcggtccgggagtcgggcgagccagagcacaacgcattcaagcattaacaaccgaagttctgcgttcatcaacgggttgaggtgggggaatccagatgcgctgctgtatgataaccgggagaaccgcacgaagacggctgtgacggcggtgtatcggggcacgcctaagaacggcaactcggtgttgctacggtcctatgactctcgcaaggagccggcgcccgaacagcattgtactatctggcaggccggtcgcgcgacgtctgcgaccgggctcgcattcaagcctattcagatcggtcagcattattttatcgatgaaggagcgggcacgtacaatccggcaccggaggtcttggacgaagcagcagtcaacgagtggccgggacgagagattggagtgttcatcagtgtcggtacaggcaagcgtcctccagacacgaataatcgccagcacgagtggtgggaggacttctttggcgacgctctgggcacattcgccgaggcgcgccgtcggctgatagccaagatcgaaggctgcgaggacattcaccacgccatgctccgggagcacctccccaagcgcggtgtcaacaaagacaactattaccgactgaacgtcgaagtcggtgtcggcgagtttggaatgaacgaatggcaccgcctcgcagacatcagtaccaacacgcgccggtatctctcccgaccagatgtgaagaagatgatccacgacgcgagcgtcaagttcgccaaaatcgagcgcatgcatcgccgtctcgaagctcacacagcagctggccacgatccggtcaacagctctttgacggaagacgaccactcctcactcgcacccagccctcgcctctccgtcacatcgccaacttcacaaacaggccctcctccccctcccgcaaacaccttcgaactccctgctgaacttcccggagactttactccgtaccagccgaacgacgacaaacttcctatgcaccccacaccccaagacgccattcgcccacccccaggccgcacctcaggcagcgatctccatctcagctccaacgaaccgagccgtccttcatcacaagcgtactcaccacctcgtctcagtttcgaacacacgggcccgccgcctgttccgccaaagacaccaatcccgtaccccgatacggctgagttgggagggaatccaatgccaatgccgaaccagagtctggggctgcatccagcgcatgcgacaactgcgcctgtgagtgcggcggggcgaccggcaccgccgtacccggttgacgaaccgccgccggtggtaaacaagttacggaaaccgagttaccaagtgcgcgattattctgtttag

SEQ ID NO: 4141 - protein, 1646 aa, Aspergillus nidulans FGSC A4
MLGRCGRQASRLLPRPVTARPPSLQWQRMVSSSRDGQQSLLTAPLEQADPSVYNILQKEKKRQQHFINLIPSENFTSQAVLDALGSVMQNKYSEGYPGARYYGGNEHIDEAERLCQQRALETFRLSPEEWGVNVQPLSGSPANLYAISALLNTHDRLMGLDLPHGGHLSHGYQTPTKKISFISKYFETLPYRLDESTGLIDYESLEKQALLYRPKLIIAGTSAYSRLIDYPRMRQIADNAGAYLMSDMAHISGLVAAGVIPSPFAHSDVVTTTTHKSLRGPRGAMIFYRKGIRRTDKKGNQEMYDLEGPINASVFPGHQGGPHNHTITALAVALQQAQSTEFKTYQETVLANAKSLAERLGGSTSSGGLGYNIVSGGTDNHLVLVDLKNRGVDGARVERVLELCGVASNKNTVPGDRSALKPGGLRLGTPAMTTRGFQPEDFRRVADIVDRAVTITQKLDKSAKESAASKGVKNPNTVKAFLEYVGNGEEISEIVQLRQEVEDWAVNPNGVFYIQLSYKQPMPRPDSYLGNNARQSRLDSNSRLLQIPPQSHRVSFSTLQQHPFSQYISLSSTKMKVSQIYVYPIKSLRGVPLSSAQVTRTGFEYDRRFMLLKVIPSESEDAKGEKTLKNMHIPHFPEMSLFQTELLEPGSGDNARIRVTYHPSDSESAGQVNGTGYGKEEEALHIPLNPDTRGLEQLAVVMHRSPTKGYNMGPKYNEWFSERFGYDVVLAYLGDGNGRAVLGTFAPGKHVAHKDQRQGMNLGYVAALLAVIGVLYIALTVLTPSPPGFAFVAAGFLGRRDRVGVMVAVAALLPAFLVLKRQSTKDERITFADTAPYMVVSETSVANVTDRLEGEEMDMRKFRANIVVSGAKTAFEEDFWAELVIGDAQVRLLLTANCVRCRSLDVDYETGKMGTGESGKVLKKLMADRRVDTGAKYSPVFGRYAFLEGQSDLKMVRVGDEVIVARNMKERAIYVKVRHKISHQLRHKLRLCKKSWLHHLNFVSPPHACSLLLSLNPGLIFTLCCARLGIAMDQVRRKDTTKGPPLRILSLDGGGVRGYSMLILLQELMHRIYVEIEGKPPRRDQIPKPCDYFDLIAGTGTGGLIALMLGRLRLDLETCKDVYVRMTRRVFETDKTFAGIPFRSTLFKASKLEEAIRECVREHTIYETEGNDSTSPTSPTYAPFSPNFSTTSIPQRSGSRASQSTTHSSINNRSSAFINGLRWGNPDALLYDNRENRTKTAVTAVYRGTPKNGNSVLLRSYDSRKEPAPEQHCTIWQAGRATSATGLAFKPIQIGQHYFIDEGAGTYNPAPEVLDEAAVNEWPGREIGVFISVGTGKRPPDTNNRQHEWWEDFFGDALGTFAEARRRLIAKIEGCEDIHHAMLREHLPKRGVNKDNYYRLNVEVGVGEFGMNEWHRLADISTNTRRYLSRPDVKKMIHDASVKFAKIERMHRRLEAHTAAGHDPVNSSLTEDDHSSLAPSPRLSVTSPTSQTGPPPPPANTFELPAELPGDFTPYQPNDDKLPMHPTPQDAIRPPPGRTSGSDLHLSSNEPSRPSSQAYSPPRLSFEHTGPPPVPPKTPIPYPDTAELGGNPMPMPNQSLGLHPAHATTAPVSAAGRPAPPYPVDEPPPVVNKLRKPSYQVRDYSV

SEQ ID NO: 4142 - DNA, 1482 bp, Candida albicans SC5314
  CDS (1)..(1482): transl_table=12
atgctttcatctacgttacgtcgttctgtgagagctcaatccaagaatttgccagcttttgcaagaagagcctatgccgtttctccatctgctcaagcattaatttccaaatccgttcaagatgttgaccctgagatggcggatattttgaatcaagaaagaaccagacaaaagaactcaattactttgattccatcagagaattttacctctaaagcagttatggatttgttgggttcagaaatgcaaaacaaatattctgaagggtaccctggagagagatattatgggggtaatgaaataatcgataaagctgaagcattatgtcaaaaaagagctttagaagcatttggattggacccatctcaatggggggttaatgtacagccattatctggtgctccagccaatttgtatgcttatagtgcaattttagaagttggtgacagaattatgggtttagatttacctcatggtggtcatttgtctcatggatatcaaaccaacactaccaagatttcctacatttccaaatacttccaaaccatgccatatagattaaatgaagaaactggtataattgattacgatactttagaaaaaaacgctcaattgtttagacctaaagtaattgttgctggtgcttcagcttattctcgtgtcattgactacaaaagaatgagacaaattgctgataaggttggagcttacttattgtccgatatggcccacatctctgggttagtttctgctggtgttactgattcaccattcccatattctgatattgtcaccactactacccataaatcgttgagaggaccaagaggagccatgattttctttagaaaaggaatcagaaaggttaccaaaaagggtaaagaaattccttatgaattggaaagaaagatcaatttctcggttttcccagggcatcaaggtggtccacataatcatactatttctgctttagcagttgctttaaaacaatgtactgaaccagaatatgttaaataccaacaagaagttgtttctaatgccaaacattttgctgatgcattagtctccaagggtttcaaattggtttccgatggtactgatactcatttgatcttggttgatttaagatcaagaaatattgatggtgctagagttgaagctgttttggaaagagccaacatagctgccaataaaaacaccgttcctggtgatgtatcagctcttttcccatcaggtttaagagttggtactccagctatgaccactagaggatttgggccagaagagtttgataaagttgctgaattcattgatcaagccgttaacattgccattgaattaaaagctcaagaacaaggtaaagtaccaaaagaattattggcatcatttaaaaaattagctgatgaaagtgataaagttaaacaattagataaagaagttgtcagttgggtcagtaaatatcctgtcccaggtgaattgtaa

SEQ ID NO: 4143 - protein, 493 aa, Candida albicans SC5314
MLSSTLRRSVRAQSKNLPAFARRAYAVSPSAQALISKSVQDVDPEMADILNQERTRQKNSITLIPSENFTSKAVMDLLGSEMQNKYSEGYPGERYYGGNEIIDKAEALCQKRALEAFGLDPSQWGVNVQPLSGAPANLYAYSAILEVGDRIMGLDLPHGGHLSHGYQTNTTKISYISKYFQTMPYRLNEETGIIDYDTLEKNAQLFRPKVIVAGASAYSRVIDYKRMRQIADKVGAYLLSDMAHISGLVSAGVTDSPFPYSDIVTTTTHKSLRGPRGAMIFFRKGIRKVTKKGKEIPYELERKINFSVFPGHQGGPHNHTISALAVALKQCTEPEYVKYQQEVVSNAKHFADALVSKGFKLVSDGTDTHLILVDLRSRNIDGARVEAVLERANIAANKNTVPGDVSALFPSGLRVGTPAMTTRGFGPEEFDKVAEFIDQAVNIAIELKAQEQGKVPKELLASFKKLADESDKVKQLDKEVVSWVSKYPVPGEL

SEQ ID NO: 4144 - DNA, 1413 bp, Candida albicans SC5314
  CDS (1)..(1413): transl_table=12
atgtctgcttacgctttatctcaatctcatagacaattgactgaaggtcatttaaaagatactgatcctgaagttgatcaaatcattaaagatgaaattgatagacaacaacattccattgttttaattgcttcagaaaatttcactactactgctgttttcgatgccttgggaactccaatgtgtaataaatattctgaaggttatcctggtgctagatattatggtggtaatgaacatattgatagaatggaacttttgtgtcaagaaagagctttaaaagcttttggtttgactccagataaatggggggttaatgttcaaactttgagtggatctccagctaatttacaagtttatcaagccattatgaaacctcatgaaagattaatggggttggatttaccccatggtggtcatttatctcatggttatcaaaccgattcaagaaaaatttctgctgtttccacttattttgaaaccatgccttacagagttgatttagaaactggattgattgattatgatatgttggaaaaaactgctgttttgtatagaccaaaagttttagttgctggtacttctgcttattgtagattaattgattacaaaagaatgagagaaattgccgataaagttggtgcttaccttgttgttgatatggctcatatttccggtttaattgctgctggtgttatcccatcaccatttgaatacgctgatattgtcaccaccactactcataaatcattaagaggtccaagaggtgccatgattttctttagaagaggggtaagatcagttaatccaaagactggtcaagaaatcttgtatgatttagaaaacccaattaacttctcagtgttcccaggtcatcaaggtggtccacataatcataccattgctgccttggctactgctttgaaacaagctaatactccagaatttaaagaatatcaagaacaagttttgaaaaatgctaaagctttagaaagtgaattcaccaaaaaaggttataaattagtttctgacggtactgattctcatatggttttagtgtctttaaaagataaacaaattgatggtgctagagttgaaactgtttgtgaaaaaatcaatattgctttgaataagaattccattcctggagataaatcagctttagttccaggtggagttagaattggtgccccagccatgactacaagaggtttaggtgaagaagatttcaagaaaatcgttagttatattgattttgctgtcaattatgctaaggaagttcaatcacaattaccaaaagatgctaataaattgaaagatttcaaaaatgctgtttctggtgatctggaaaaacttaaagctgttagagatgaaatttatcaatgggctggttctttcccattagcagtataa

SEQ ID NO: 4145 - protein, 470 aa, Candida albicans SC5314
MSAYALSQSHRQLTEGHLKDTDPEVDQIIKDEIDRQQHSIVLIASENFTTTAVFDALGTPMCNKYSEGYPGARYYGGNEHIDRMELLCQERALKAFGLTPDKWGVNVQTLSGSPANLQVYQAIMKPHERLMGLDLPHGGHLSHGYQTDSRKISAVSTYFETMPYRVDLETGLIDYDMLEKTAVLYRPKVLVAGTSAYCRLIDYKRMREIADKVGAYLVVDMAHISGLIAAGVIPSPFEYADIVTTTTHKSLRGPRGAMIFFRRGVRSVNPKTGQEILYDLENPINFSVFPGHQGGPHNHTIAALATALKQANTPEFKEYQEQVLKNAKALESEFTKKGYKLVSDGTDSHMVLVSLKDKQIDGARVETVCEKINIALNKNSIPGDKSALVPGGVRIGAPAMTTRGLGEEDFKKIVSYIDFAVNYAKEVQSQLPKDANKLKDFKNAVSGDSEKLKAVRDEIYQWAGSFPLAV

SEQ ID NO: 4146 - DNA, 1416 bp, Aspergillus fumigatus Af293
  CDS (1)..(1416)
atggccacctacgctttgtcgcaggctcaccgtgagcaaatggagaagtctctggtcgactccgaccctgagattgctcagatcatggaaaaagagattcagcgccagcgcgagtccatcctcctgattgcctctgagaacgtcacttcccgtgccgttttcgatgctctcggctctcccatgagcaacaagtactccgagggttaccccggtgctcgttactacggtggtaaccagcacattgatgccattgagctcacctgccaggctcgtgccctgaaggctttcaacctcgaccccgagaagtggggtgtcaacgttcagtgcctcagtggtagccctgccaacctggaggtctaccaggctctcatgcgcccccatgaccgtctcatgggtctggatcttcctcacggcggtcacctgagtcacggttaccagactccctccagaaagatttccgctgtttctacctactttgagaccttcccctaccgtgttaacactgagaccggcatcattgactacgatactctcgaggccaacgctgagctctaccgtcccaagtgcttggttgctgggacttctgcctactgccgtctcattgactacggtcgtatgcgcaagattgccgacaaggttggcgcctacctaatcgtcgacatggcccacatctccggtctagttgccgctggtgtcattccttctcccttcgagtacgccgacgtcgtcaccaccaccacccacaagtctctccgtggtcctcgtggtgccatgatcttcttccgcaagggtgtgcgtagcactgaccccaagactggcaaggaaatcatgtatgaccttgagggtcctatcaacttctccgtcttccctggtcaccagggtggtccccacaaccacaccatcactgctttggctgttgccctcaagcaggccgccactcctgagttccgtcagtaccaggaacaggttctcaagaacgccaaggctcttgaggttgagttcaaggctctcggccacaagctcgtctctgacggtactgacagccacatggtcctgctggaccttcgccccaagggtcttgacggtgctcgtgtcgaggctgtcctcgagcagatcaacattgcctgcaacaaaaactccattcctggcgacaagtctgccctgaccccctgcggtatccgcattggtactcccgctatgaccagccgtggtatgagcgaggaggacttcaagcgcgtcgctcgctacattgaccaggtcatcaacctttgcaagagcatccaggctgacctgcccaaggaggccaataagctcaaggacttcaaggccaaggttgcctccggctctgttcccgagatcctcgctctccgcaaggaggtcgccgagtgggccagcacctaccccctgcctgtctaa

SEQ ID NO: 4147 - protein, 471 aa, Aspergillus fumigatus Af293
MATYALSQAHREQMEKSLVDSDPEIAQIMEKEIQRQRESILLIASENVTSRAVFDALGSPMSNKYSEGYPGARYYGGNQHIDAIELTCQARALKAFNLDPEKWGVNVQCLSGSPANLEVYQALMRPHDRLMGLDLPHGGHLSHGYQTPSRKISAVSTYFETFPYRVNTETGIIDYDTLEANAELYRPKCLVAGTSAYCRLIDYGRMRKIADKVGAYLIVDMAHISGLVAAGVIPSPFEYADVVTTTTHKSLRGPRGAMIFFRKGVRSTDPKTGKEIMYDLEGPINFSVFPGHQGGPHNHTITALAVALKQAATPEFRQYQEQVLKNAKALEVEFKALGHKLVSDGTDSHMVLLDLRPKGLDGARVEAVLEQINIACNKNSIPGDKSALTPCGIRIGTPAMTSRGMSEEDFKRVARYIDQVINLCKSIQADLPKEANKLKDFKAKVASGSVPEILALRKEVAEWASTYPLPV

SEQ ID NO: 4148 - DNA, 1614 bp, Aspergillus fumigatus Af293
  CDS (1)..(1614)
atgtctctgagtcgttgcggacgacaggccttgcgcctcatcccgcggtctggaagctcttctagagctaccactgttatcaccaccgcccgccatccgggcttccagcttcagactcccactgctgcatccaggaatgtgcaatggcggagcgtatcgtcgtccagccgcgatggccagcaacatttgctctccgcatccctcgaggagcaagatcccactgtctacaacattctgcaaaaggagaaaaaacgccaaaagcatttcatcaacctcatcccctccgagaactttacgtcacaagccgttctcgatgcgctgggaagtgtgatgcaaaacaaatattccgaagggtatcccggtgcgagatactatggagggaacgagttcatcgacgagtccgagagactgtgccagcagcgtgccctcgagacgtttcgactcgaccccgaggaatggggtgtcaacgtacaggctctctccggttctcccgctaacctgtatgccatctccgccgtcctcaacacacatgaccgtctgatgggcctggatctgccccatggtggccacctgtcacacggttaccaaacgcccaccaagaagatctctttcatctccaagtacttcgagaccctgccttaccgcttggatgaatccaccggcctcattgactacgatggagcggagaagctggctctgctctaccgacccaagctgatcatcgctgggacttcggcctacagccggcttatcgattacccccgcatgcgccagatcgctgatgctgctggtgcgtacttgttgagcgatatggcccacatttcgggcttagtagccgccggtgtgctgccgtcgcccttcccccactccgacattgtgacaaccacaacccacaagtctttgcgcggtcctcgcggtgccatgatcttctaccgcaagggcgtccgccggacagacaagaagggcaacaaggagatgtacgacctcgagaatctcatcaacgcgtcggttttccctggtcaccagggtggtcctcacaaccacaccatcaccgcgctgtccgtcgccttgaagcaggcccaaacgcctgaattcaaggcctaccaggagaccgttttggccaatgccaaggcgctgtcggaacggctgggtggcccaatcaacaatggcggtctcggctacaacatcgtgtcgggcggcaccgacaaccacctggtccttgtcgacctgaagaatcgcggcgtcgatggtgcccgtgtcgagcgtgtccttgaactctgtggtgtcgccagcaacaagaacactgtccctggcgaccagtccgccctgaagcccggcggcctgcgtctgggaactcccgccatgaccactcgtggcttccagcctgaggacttccgtcgtgtcgctgacattgtcgaccgggccgtgatcatcacccagaaactggacaaggcggccaaggagagtgctgccgccaagggagtcaagaaccccaacactgtcaaggccttcctcgactacgtgggcgagggtgacgagatctccgagattgtgctgctgagaaaggaggtggaagactgggtgggcactttcagccttccgtgggatgattaa

SEQ ID NO: 4149 - protein, 537 aa, Aspergillus fumigatus Af293
MSLSRCGRQALRLIPRSGSSSRATTVITTARHPGFQLQTPTAASRNVQWRSVSSSSRDGQQHLLSASLEEQDPTVYNILQKEKKRQKHFINLIPSENFTSQAVLDALGSVMQNKYSEGYPGARYYGGNEFIDESERLCQQRALETFRLDPEEWGVNVQALSGSPANLYAISAVLNTHDRLMGLDLPHGGHLSHGYQTPTKKISFISKYFETLPYRLDESTGLIDYDGAEKLALLYRPKLIIAGTSAYSRLIDYPRMRQIADAAGAYLLSDMAHISGLVAAGVLPSPFPHSDIVTTTTHKSLRGPRGAMIFYRKGVRRTDKKGNKEMYDLENLINASVFPGHQGGPHNHTITALSVALKQAQTPEFKAYQETVLANAKALSERLGGPINNGGLGYNIVSGGTDNHLVLVDLKNRGVDGARVERVLELCGVASNKNTVPGDQSALKPGGLRLGTPAMTTRGFQPEDFRRVADIVDRAVIITQKLDKAAKESAAAKGVKNPNTVKAFLDYVGEGDEISEIVLLRKEVEDWVGTFSLPWDD

SEQ ID NO: 4150 - DNA, 1533 bp, Ustilago maydis 521
  CDS (1)..(1533)
atggcttcccgtcgttcttacgcaacactcgttcaaagcttcctgaagcactcttccctccctgtcgtccgaggtcctgcttctcctgcctccatccttcctcgcacctttgccacctctgttctcaagatgtccattgccgtccccaccgatttcaacaaggttctctaccagcctctggccgaggctgaccccgaggtccagcagattatcgagaatgagacttaccgtcaattctccggtctcgagctcatcgcttccgagaatctgacctcactcgccaccatggaagctaacggctccatccttactaacaagtattctgagggtcttcccggtgcccgatactacggcggtaacgagtacatcgaccagctagaggttctctgccagcagcgtgccttgaaggccttcaacctcgaccccaaggtctggggcgtcaacgttcagccttactctggctccaccgccaactttgctaccttcaccgccctcctccagccccaggaccgtatcatgggtctcggccttccttccggtggccacttgacccatggttactacaccgccaagaagaagatctcggcttcttcgatctacttccagtcgttcccttacaacgttgaccccgccaccggctacatcaactacgacgagctcaagaagaacgctgatcttttcaagccccgcatggtcatctgcggtggttccgcctacccccgtgactgggactacgccaagcttgccgagattgccaagactcagtccgcttacctcatggccgacattgcccacatctctggtctcgttgccgcccaggtgcagaacaaccccttcgagtactgtgacattgtcaccaccactactcacaagaccctccgcggtccccgtgctggtatgatcttcttccgcaaggatcgtgatgccgagattgagggtcgtgtcaatgcggccgtcttccctgcctgccagggcggcccccacaacaacaccattgccggtatcgctgttgcgctcaagcaggtcgccgaccccgctttcaagcagtacgccacccaagtcatcaagaactcgcaggccattgccaaggtcctctctggcaagggctacaagctccagactgacggctcggagaaccacctgattctttgggacttgcgtcctcttggcctcaccggctccaaggtcgagaacatttgcgaccttgcgcacatcacgctcaacaagaacgccgtcagcggtgacacttcggcccttgtgcccggtggtgttcgtatcggcactggtgcccttacctcgcgatccatgggcgagaaggacatggagaaggtggctgagttccttgaccgcgtcgtccagatctcgcttgagattcaaaagacgtcgggcaagaaactcgttgacttcatgaacgctgcccgccagtcggaggccgtcaagcagctcaacaaggacgtcgaggcctttgccaccagcttcccccttcctggtgttcccgacacctcgatcatcaagaagcccgccgctcactaa

SEQ ID NO: 4151 - protein, 510 aa, Ustilago maydis 521
MASRRSYATLVQSFLKHSSLPVVRGPASPASILPRTFATSVLKMSIAVPTDFNKVLYQPLAEADPEVQQIIENETYRQFSGLELIASENLTSLATMEANGSILTNKYSEGLPGARYYGGNEYIDQLEVLCQQRALKAFNLDPKVWGVNVQPYSGSTANFATFTALLQPQDRIMGLGLPSGGHLTHGYYTAKKKISASSIYFQSFPYNVDPATGYINYDELKKNADLFKPRMVICGGSAYPRDWDYAKLAEIAKTQSAYLMADIAHISGLVAAQVQNNPFEYCDIVTTTTHKTLRGPRAGMIFFRKDRDAEIEGRVNAAVFPACQGGPHNNTIAGIAVALKQVADPAFKQYATQVIKNSQAIAKVLSGKGYKLQTDGSENHLILWDLRPLGLTGSKVENICDLAHITLNKNAVSGDTSALVPGGVRIGTGALTSRSMGEKDMEKVAEFLDRVVQISLEIQKTSGKKLVDFMNAARQSEAVKQLNKDVEAFATSFPLPGVPDTSIIKKPAAH

SEQ ID NO: 4152 - DNA, 1557 bp, Strongylocentrotus purpuratus
  CDS (1)..(1557)
atggctactgttaacggaaccaagacagtgatcaagacagcgatgaatggtgatgggagtctaaagacagtcaccaatggcaatggtgatgggagtctcaagaaagttagcaatggcaatggcgatgggagtctcaagacagtcactaatagtgatgggagtccttggtttggacaccagtcgttggaagagaatgacccggagatgtatgctatcatcttaaaggagaaggatcgtcaaaggaaaggcttagaactgattgcatcagagaacttcccaagcagggctgttctagaggctctcggctcctgtctgcaaaataaatactgcgagggataccctggaaatagatactatggcggtacgcagttctttgatgaaatggaacttctgactcagaagagagccttagcagcatttggtttgaaggaggaggaatggggcgtcaatgtccagccgtattcaggctctccagcaaactttgccgtctacactggagtgattggcccccatggtcgtatcatgggtctggatctaccggacggtggtcaccttacacatggattcatgacggctaagaagaagatctctgcaacgtccttgttctttgagtcaatgccttacagggtgaatcctaaaacaggcctcattgattatgaagctctagctgtaaacgccagattgttccgtccacaaatgatcattgcaggtatgagctgttatcctaggaatctagactacaaacgtttcaaggagatagcagtagagaatgatgcttatcttctagctgatatggctcacgtgagtggattagttgctgctggagttgtagctaatccttttgagtactgtgacatcgttacaagcacaacacacaagacacttagaggacctcgatcaggcatcatcttcttccgtagaggtgtccgtaaggttctcaagaatggcactgaggtgatgtatgaccttgagaaaccgatcaacgaagccgtcttccctggtcttcaaggtggaccccatatgcatgctgtaggaggcgttggtgtagccttattgcaggcttcacaaccggagtttaagctgtatgcccgggatgtcgtcacaaacgcacaagccatggctgaagaacttatgaagagaggttatactatttcttcaggtggaacggacactcatcttctactccttgacctccgacccctgggactggatggagctcgtggagagttcgtgcttgagcgtgtaggaatcgttctcaataagaacacatgtcctggggacaagagcgcactcaagcctggcggtctaaggatcggtacaccagctctcacgtcaagaaacttcaaggttactgatttcatgatggtggttgactacattgatagaggtctgaagttgactgcagaggcaaacaagaagtgttcaagtacaacccttcgtgacttcaaggcttacgtcacaagtgattcagacttccaatccaaacttgctgcccttgaaaaggaggtcgaatcttttgctgtaaggttcccattacctggtcatgaagttctgtaa

SEQ ID NO: 4153 - protein, 518 aa, Strongylocentrotus purpuratus
MATVNGTKTVIKTAMNGDGSLKTVTNGNGDGSLKKVSNGNGDGSLKTVTNSDGSPWFGHQSLEENDPEMYAIILKEKDRQRKGLELIASENFPSRAVLEALGSCLQNKYCEGYPGNRYYGGTQFFDEMELLTQKRALAAFGLKEEEWGVNVQPYSGSPANFAVYTGVIGPHGRIMGLDLPDGGHLTHGFMTAKKKISATSLFFESMPYRVNPKTGLIDYEALAVNARLFRPQMIIAGMSCYPRNLDYKRFKEIAVENDAYLLADMAHVSGLVAAGVVANPFEYCDIVTSTTHKTLRGPRSGIIFFRRGVRKVLKNGTEVMYDLEKPINEAVFPGLQGGPHMHAVGGVGVALLQASQPEFKLYARDVVTNAQAMAEELMKRGYTISSGGTDTHLLLLDLRPLGLDGARGEFVLERVGIVLNKNTCPGDKSALKPGGLRIGTPALTSRNFKVTDFMMVVDYIDRGLKLTAEANKKCSSTTLRDFKAYVTSDSDFQSKLAALEKEVESFAVRFPLPGHEVL

SEQ ID NO: 4154 - DNA, 1482 bp, Candida albicans SC5314
  CDS (1)..(1482): transl_table=12
atgctttcatctacgttacgtcgttctgtgagagctcaatccaagaatttgccagcttttgcaagaagaacctatgccgtttctccatctgctcaagcattaatttctaaatccgttcaagatgttgaccctgagatggcggatattttgaatcaagaaagaaccagacaaaagaactcaattactttgattccatcagagaattttacctctaaagcagttatggatttgttgggttcagaaatgcaaaacaaatattctgaagggtaccctggagaaagatattatgggggtaatgaaataatcgataaagctgaagcattatgtcaaaaaagagctttagaagcatttggattggacccatctcaatggggggttaatgtacagccattatctggtgctccagccaatttgtatgcttatagtgcaattttagaagttggtgacagaattatgggtttagatttacctcatggtggtcatttgtctcatggatatcaaaccaacactaccaagatttcctacatttccaaatacttccaaaccatgccatatagattaaatgaagaaactggtataattgattacgatactttagaaaaaaatgctcaattgtttagacctaaagtaattgttgctggtgcttcagcttattctcgtgtcattgactacaaaagaatgagacaaattgctgataaggttggagcttatttattgtccgatatggcccacatctctgggttagtttctgctggtgttactgattcaccattcccatattctgatattgtcaccactactacccataaatcgttgagaggaccaagaggagccatgattttctttagaaaaggaatcagaaaggttaccaaaaagggtaaagaaattccttatgaattggaaagaaagatcaatttctcggttttcccagggcatcaaggtggtccacataatcatactatttctgctttagcagttgctttaaaacaatgtactgaaccagaatatgttaaataccaacaagaagttgtttctaatgccaaacattttgctgatgcattagtctccaagggtttcaaattggtttccgatggtactgatactcatttgatcttggttgatttaagatcaagaaatattgatggtgctagagtcgaagctgttttggaaagagctaacatagctaccaataagaacaccgttcctggtgatgtatcagctcttttcccatcaggtttaagagttggtactccagctatgaccactagaggatttgggccagaagagtttgataaagttgctgaattcattgatcaagccgttaacattgccattgaattaaaagctcaagaacaaggtaaagtaccaaaagaattattggcatcatttaaaaaattggctgatgaaagtgataaagttaaacaattagataaagaagttgtcagttgggtcagtaaatatcctgtcccaggtgaattgtaa

SEQ ID NO: 4155 - protein, 493 aa, Candida albicans SC5314
MLSSTLRRSVRAQSKNLPAFARRTYAVSPSAQALISKSVQDVDPEMADILNQERTRQKNSITLIPSENFTSKAVMDLLGSEMQNKYSEGYPGERYYGGNEIIDKAEALCQKRALEAFGLDPSQWGVNVQPLSGAPANLYAYSAILEVGDRIMGLDLPHGGHLSHGYQTNTTKISYISKYFQTMPYRLNEETGIIDYDTLEKNAQLFRPKVIVAGASAYSRVIDYKRMRQIADKVGAYLLSDMAHISGLVSAGVTDSPFPYSDIVTTTTHKSLRGPRGAMIFFRKGIRKVTKKGKEIPYELERKINFSVFPGHQGGPHNHTISALAVALKQCTEPEYVKYQQEVVSNAKHFADALVSKGFKLVSDGTDTHLILVDLRSRNIDGARVEAVLERANIATNKNTVPGDVSALFPSGLRVGTPAMTTRGFGPEEFDKVAEFIDQAVNIAIELKAQEQGKVPKELLASFKKLADESDKVKQLDKEVVSWVSKYPVPGEL

SEQ ID NO: 4156 - DNA, 1443 bp, Neurospora crassa OR74A
  CDS (1)..(1443)
atgtctacctactccctctccgagactcacaaggccatgctcgagcatagcttggtcgagtccgacccccaggtcgccgagatcatgaagaaggaggttcagcgccagcgcgagtccatcatcctcatcgcctccgagaacgtcacctcgcgtgccgtcttcgatgccctcggctcccccatgtccaacaagtactcggagggtcttcccggcgcccgctactatggtggcaaccagcacatcgacgagatcgaggttctctgccagaaccgtgcccttgaggccttccacctcgaccccaagcagtggggtgtcaatgttcagtgcttgtccggcagccctgccaacctccaggtctaccaggccatcatgcccgtccacggcagactcatgggtcttgacctcccccacggtggccatctttcccacggttaccagaccccccagcgcaagatctctgctgtctctacctacttcgagaccatgccctaccgcgtcaacattgacactggtctcatcgactacgataccctcgagaagaacgcccagctcttccgccccaaggtcctcgtcgccggtacctctgcctactgccgtctgattgactacgagcgcatgcgcaagattgccgactccgttggcgcttaccttgtcgtcgatatggctcacatttccggcctcattgcctccgaggttatcccctcgcccttcctctacgccgatgtcgtcaccaccaccactcacaagtctctccgtggccctcgtggcgccatgatcttcttccgccgcggtgtccgctccgttgacgccaagaccggcaaggagaccctctacgaccttgaggacaagatcaacttctccgtcttccctggtcaccagggtggcccccacaaccacaccatcaccgcccttgccgttgccctcaagcaggctgcctcccccgagttcaaggagtaccagcagaaggtcgttgccaacgccaaggctctcgagaagaagctcaaggagctcggctacaagctcgtctctgacggcactgactctcacatggtcctcgttgaccttcgccccatcggcgtcgatggtgcccgtgttgagttcctccttgagcagatcaacattacctgcaacaagaacgccgttcccggcgacaagagcgccctcacccccggcggtctccgtattggtacccccgctatgacctcccgtggcttcggcgaggccgacttcgagaaggtcgccgtcttcgtcgatgaggctgtcaagctctgcaaggagatccaggcttccctccccaaggaggctaacaagcagaaggacttcaaggccaagatcgccaccagcgatattccccgcatcaacgagctcaagcaggagattgccgcctggagcaacaccttccccctccccgttgagggctggagatacgatgccggtctctaa

SEQ ID NO: 4157 - protein, 480 aa, Neurospora crassa OR74A
MSTYSLSETHKAMLEHSLVESDPQVAEIMKKEVQRQRESIILIASENVTSRAVFDALGSPMSNKYSEGLPGARYYGGNQHIDEIEVLCQNRALEAFHLDPKQWGVNVQCLSGSPANLQVYQAIMPVHGRLMGLDLPHGGHLSHGYQTPQRKISAVSTYFETMPYRVNIDTGLIDYDTLEKNAQLFRPKVLVAGTSAYCRLIDYERMRKIADSVGAYLVVDMAHISGLIASEVIPSPFLYADVVTTTTHKSLRGPRGAMIFFRRGVRSVDAKTGKETLYDLEDKINFSVFPGHQGGPHNHTITALAVALKQAASPEFKEYQQKVVANAKALEKKLKELGYKLVSDGTDSHMVLVDLRPIGVDGARVEFLLEQINITCNKNAVPGDKSALTPGGLRIGTPAMTSRGFGEADFEKVAVFVDEAVKLCKEIQASLPKEANKQKDFKAKIATSDIPRINELKQEIAAWSNTFPLPVEGWRYDAGL

SEQ ID NO: 4158 - DNA, 1584 bp, Neurospora crassa OR74A
  CDS (1)..(1584)
atgtcgagcttccagagcacagctgctgtgcgcgcctgcgcccgccgagcggcttctaccacctccgccgcgactctggcctcgacaacatgtcgcgccgccgcttcccggatacaattgcagggacagagaagcgcagggctggtacctaagagctggacgaggttctcctcgtcttcgattgctaatgacaatcagcaaaaggagaagcaaagacagaagcagttcatcaacctgatcccttccgagaacttcacatcccaggccgtcctcgatgctctaggaagccccatgcagaacaagtactctgaaggctatcccggagcgcgttattacggcggcaacgagttcatcgatgcttccgaaaggttatgccaggaccgagccctcgagacctttggcttggatcccaaggaatggggtgtcaacgtgcaagcgctctccggtgctcctgcgaacctctacgtctactcggccctcatggacacccacgaccgcttgatgggccttgacctcccccacggcggccatctttcgcacggttatcagactcccaccaaaaagatctccttcatctccaagtacttcgagacccttccctaccgtctcgatgagaagacgggctacatcgactacaacaagctcgaggagctggccatcacctaccgccccaagatcatcgtcgccggcgcctccgcttacagccgcctgatcgactacgcccgcctccgcgagatctgcgacaaggtcaacgcctacctcatggccgacatggcccacatctccggtctcgtggccgccaaggtcatgcccggccccttcacccacgccgacatcgtcaccaccaccagccacaagtccctccgcggcccccgcggcgccatgatcttcttccgccgcggcgtccgccgcaccaacaagaagggcgaggaggagctgtacaacctcgagacccccatcaacgcctccgtcttccccggccaccagggcgggccccacaaccacaccatcgccgccctcgccgtcgccctcaagcaggcccagacgcccgagttccgcgcctaccagagccaggtcctcgccaacgccacggcgctcgccgcccgcctcggcgagcccaaggacaagaacggcctgggctacaccattgtcagcggcggcaccgacaaccatctcgtcctgatcgacctcaagccgcagggcatcgacggcagccgcgtcgagcgcgtgctggaactcgtcggcgtcgctgccaacaagaataccgtccccggcgacaagtcggcgctgacgcctggcggtctacgcatcggcacgcccgccatgaccacgcgcgggttcacggaagaggactttgcgcgcgtggctgacatcatcgatcgcgccgtgaccattgctgtgcgcatcaacaaggcggccaaagaggatgcggtgaagaagggcaacgagaaggcggcgaaccgcgtcaagacgtttatggattacttgggcaatggcgagacggacccggagattgtccagctcaggagcgaggtggagagttgggtgggcacgtacccttgcccttgggaccagtcgtcttag

SEQ ID NO: 4159 - protein, 527 aa, Neurospora crassa OR74A
MSSFQSTAAVRACARRAASTTSAATLASTTCRAAASRIQLQGQRSAGLVPKSWTRFSSSSIANDNQQKEKQRQKQFINLIPSENFTSQAVLDALGSPMQNKYSEGYPGARYYGGNEFIDASERLCQDRALETFGLDPKEWGVNVQALSGAPANLYVYSALMDTHDRLMGLDLPHGGHLSHGYQTPTKKISFISKYFETLPYRLDEKTGYIDYNKLEELAITYRPKIIVAGASAYSRLIDYARLREICDKVNAYLMADMAHISGLVAAKVMPGPFTHADIVTTTSHKSLRGPRGAMIFFRRGVRRTNKKGEEELYNLETPINASVFPGHQGGPHNHTIAALAVALKQAQTPEFRAYQSQVLANATALAARLGEPKDKNGLGYTIVSGGTDNHLVLIDLKPQGIDGSRVERVLELVGVAANKNTVPGDKSALTPGGLRIGTPAMTTRGFTEEDFARVADIIDRAVTIAVRINKAAKEDAVKKGNEKAANRVKTFMDYLGNGETDPEIVQLRSEVESWVGTYPCPWDQSS

SEQ ID NO: 4160 - DNA, 1383 bp, Encephalitozoon cuniculi GB-M1
  CDS (1)..(1383)
atgacagatgcaagagaaaagggcttctggacaggcccgctggagatggcagaccccgagctccatgccctgatctgcggagaggtcgagaggcagaagaagacaataaacctgatagcaagcgagaactatgcgcatcagagcgcgatggaggcctgtgggtctgtcctcaccaacaagtattcagaaggcagggtgggagagcgatactacggggggacgcactgggtcgacaggatcgagctcctctgccagaagagggctctcgagctcttcgggctggatcctgacgtctggggcgtcaatgtccagccatactcggggagcccagccaactttgcaatctacacggccgttgtccctccgggcgggaggatcatgggccttgacctgccgtctggaggacacctgacccatggatacaagacgaagaccaggaagatatctgcctcaagcgtctacttcgactcaaggccatacacagtggggagcaacggcctcatcgactacgagggcctcgagaagaccttcacggactttctgccgcacatcctgatctgcggatacagcgcatactccagagacatcgactacaagaggctgcagtcgatagccggcaggaacggtgcctttctgtttgcagacatctcgcacatctcgccgctggttgcgtctgggctgatgaacagcccgttcgagcactgcgacattgtcatgacgacaacgcagaaggggctccggggacctcgaggggcgctcatcttctacaggagggccgtgacaaagaatggggagactgtggatctggatgcccggatcaactttgccgtgtttccgatgctgcagggaggcccccacaaccacacgattgcagggattgcctctgcacttctccatgcaggaactcccgagtttgcggagtacacaaggcgcgtggtggagaactcgagggagctgtgcagccgcttgcagtctctgggccttgacatcctgacggggggaacggacaaccacatgctccttgtggatctccggagcacgggtgtcgacggggcggctgtggagcacatgtgcgatgccctgggcatcagcctgaacagaaacgccattgtcggaaactccagcccgctgagcccgtctggaatacgtgtgggcacatatgcagtcactgccaggggatttggccccgaggagatgagggaggttggagacataatcggcggggtagtcaagctctgcagggagatgacgggcggcaggaagatgtcgaaggccgatctccacagagtgacgtccgatgcccgggtcatgggcagcgagcaggttttagtgctgagaagaagagtgtgtgccctggcagaggcatatcccatctacgaatga

SEQ ID NO: 4161 - protein, 460 aa, Encephalitozoon cuniculi GB-M1
MTDAREKGFWTGPLEMADPELHALICGEVERQKKTINLIASENYAHQSAMEACGSVLTNKYSEGRVGERYYGGTHWVDRIELLCQKRALELFGLDPDVWGVNVQPYSGSPANFAIYTAVVPPGGRIMGLDLPSGGHLTHGYKTKTRKISASSVYFDSRPYTVGSNGLIDYEGLEKTFTDFLPHILICGYSAYSRDIDYKRLQSIAGRNGAFLFADISHISPLVASGLMNSPFEHCDIVMTTTQKGLRGPRGALIFYRRAVTKNGETVDLDARINFAVFPMLQGGPHNHTIAGIASALLHAGTPEFAEYTRRVVENSRELCSRLQSLGLDILTGGTDNHMLLVDLRSTGVDGAAVEHMCDALGISLNRNAIVGNSSPLSPSGIRVGTYAVTARGFGPEEMREVGDIIGGVVKLCREMTGGRKMSKADLHRVTSDARVMGSEQVLVLRRRVCALAEAYPIYE

SEQ ID NO: 4162 - DNA, 1482 bp, Tribolium castaneum
  CDS (1)..(1482)
atgttttcgcgcgctttttcaaccgccaaccacctgttgaacaaccggaatctgcaaagactcgctgtgacccagttaaggaaaatgagtcaacaagtgctgcattcaaacgtttgggactccgatcccgaactttttgccctcattcaggaggaaaaaaagcgacaattgaccggtttggaaatgattgcgtcggaaaatttcacctcactgcctgtattacaatgtttgagcacttgcctgcataataagtattcggaaggtttgcctggacaaaggtattatgggggcaaccaatttatcgatcagatcgaacgtttagctcaaaagcgggccttggaagcttacagactaaatccagaagaatggggtgtgaatgtgcagccctattctgggtcacctgccaattttgccgtctacacaggattggttgaggcgcacggacgtattatggggttggatttgcctgatgggggccatttgactcatggattcttcactgcgactaagaaaatctcagctacctccatattcttcgaatcgctgccatataaggtcgatgtcgaaaccggcctcatcgactacgagcagctcgccaaaactgcccgtctattcaaaccccgtattattatcgccggtatcagttgctactcccgtcctctggactacaaacgtttccgcgagatttgcaacgaagtcggtgcctacctcatggccgacatggcccacatttccggtttagttgctgccggcgtcaccccaagtcccttcgaatacgccgacgtcgtcagcaccaccacgcacaagagtttgcgaggacctcgagccggtgtcatcttcttccgaaaaggcgtgcggtcgcataacgctaaaggcgaacccattatgtatgatcttgaatcgaagatcaaccaagctgtctttcccggtctccaagggggcccccacaataacaccatcgctgccattgccaccaccatgaaacaggccaccacgccagaatttgttgagtatcagaagcagattattgcgaatgcgaaacgactctgtaaggggttgcaggacaagggatacaagattgccaccggtggaaccgatgtgcacctgttgctggtcgatttgagaaatgtaggacttacgggggccaaggctgagtttatccttgaagaagtttcaattgcgtgtaataaaaatacagttcctggagataaaagcgcattgaatccatcagggattaggttgggaacgccggctttgaccacaagagggcttgtggagaaagatatggatcaagttgtggagtttattgataaagcgttgaaattggcaaaagaaattggaaccaaatcagggcctaaattggtggatttcaaaaagacgattgaatgtgacgaggaaactaaaaagaaggtggcggatttgagagctcaagttgaagagtatagctgtaaattccccatgcctggatatcccgaatattga

SEQ ID NO: 4163 - protein, 493 aa, Tribolium castaneum
MFSRAFSTANHLLNNRNLQRLAVTQLRKMSQQVLHSNVWDSDPELFALIQEEKKRQLTGLEMIASENFTSLPVLQCLSTCLHNKYSEGLPGQRYYGGNQFIDQIERLAQKRALEAYRLNPEEWGVNVQPYSGSPANFAVYTGLVEAHGRIMGLDLPDGGHLTHGFFTATKKISATSIFFESLPYKVDVETGLIDYEQLAKTARLFKPRIIIAGISCYSRPLDYKRFREICNEVGAYLMADMAHISGLVAAGVTPSPFEYADVVSTTTHKSLRGPRAGVIFFRKGVRSHNAKGEPIMYDLESKINQAVFPGLQGGPHNNTIAAIATTMKQATTPEFVEYQKQIIANAKRLCKGLQDKGYKIATGGTDVHLLLVDLRNVGLTGAKAEFILEEVSIACNKNTVPGDKSALNPSGIRLGTPALTTRGLVEKDMDQVVEFIDKALKLAKEIGTKSGPKLVDFKKTIECDEETKKKVADLRAQVEEYSCKFPMPGYPEY

SEQ ID NO: 4164 - DNA, 1251 bp, Halorhodospira halophila SL1
  CDS (1)..(1251): transl_table=11
atgttctcccgagatatgaccattgcgggttacgacccggagctggcagccgccatcgaggacgagcgccagcgccaggaggatcacatcgagctgatcgcctccgagaactacgccagtccccgcgtgatggaagcgcagggcagcgtgctgaccaacaagtacgccgaagggtacccgggcaagcgctactacggcggctgtgagcacgtcgacgtagccgagcagctggccatcgaccgcgccaagcagctcttcggcgccgactacgccaacgtccagccccactcgggctcccaggccaacgccgccgtcttccacgccctgctcaagcccggcgacaccatcctgggcatgagcctcgaccacggcggccacctgacccacggcgccaaggtcaacttctccggcaagctgttcaacgccgtgcagtacggcatcaacgacgacggccagatcgactacgacgagatccagcgcctggccaccgaacaccagccgaagatggtcatcggcggcttctccgcctactcccaagtggtcgattgggcgcgcctgcgccagatcgccgactcggtgggcgcctacctggtcgtcgatatggcccacatcgccggcctggtggccgccggggtctaccccagcccgatcccccacgccgacgcggtgacctccaccacccacaagaccctgcgcggcccgcgcggcggcatcatcctggcccgctccaacccggacctggagaagaaattccagtcgctggtcttcccggggacccagggcggcccgctgatgcacgccatcgccggcaaggccgtggccttcaaggaggccctcgagcccgacttcaagcagtaccaggagcaggtggtggccaacgcccgcgccatggcccggcgcgtcatcgagcgcggctacaacgtcgtctccggcggtaccgacaaccacctcttcctgatggatctgacccccaagaacctcaccggcaaggatgcggacgccgcgctggggcgggccaacatcacggtcaacaagaacaccgtgcccaacgatccgcagtcgccgttcgtcaccagcggtctgcgcatcggcacgccggcgatcaccacccgtggtttcaaggaggccgaggccacccgcctggctgactggatctgtgacgtcctcgacaacatgggcgacgagtccgtcgtcgagcgcgtgcgcggcgaggtggagcagatctgtcgcgaattccccgtctacgggtga

SEQ ID NO: 4165 - protein, 416 aa, Halorhodospira halophila SL1
MFSRDMTIAGYDPELAAAIEDERQRQEDHIELIASENYASPRVMEAQGSVLTNKYAEGYPGKRYYGGCEHVDVAEQLAIDRAKQLFGADYANVQPHSGSQANAAVFHALLKPGDTILGMSLDHGGHLTHGAKVNFSGKLFNAVQYGINDDGQIDYDEIQRLATEHQPKMVIGGFSAYSQVVDWARLRQIADSVGAYLVVDMAHIAGLVAAGVYPSPIPHADAVTSTTHKTLRGPRGGIILARSNPDLEKKFQSLVFPGTQGGPLMHAIAGKAVAFKEALEPDFKQYQEQVVANARAMARRVIERGYNVVSGGTDNHLFLMDLTPKNLTGKDADAALGRANITVNKNTVPNDPQSPFVTSGLRIGTPAITTRGFKEAEATRLADWICDVLDNMGDESVVERVRGEVEQICREFPVYG

SEQ ID NO: 4166 - DNA, 1275 bp, Prochlorococcus marinus str. MIT 9303
  CDS (1)..(1275): transl_table=11
atgacggatcgctgcttggcttctattaatgctgccctgacggattccgacccggcgattgcaggcttgatcgatcaggagaggcaacgtcaggagacccatctagagctgatagccagtgagaacttcacttctcaagctgtgatgcaggctcagggttctgtgctcactaacaagtacgccgaaggtcttccccataagcgctattacggcggttgtgagcatgtcgatgcgattgaggagttggcgatcgagcgtgctcggcggctctttggtgcggcttgggccaacgtgcaacctcatagtggcgcgcaggccaacttcgctgtcttcctggcgcttttgcagcctggtgacaccatcatggggatggatctatcccatggggggcatctcactcatggttctcctgtcaatgtcagcggcaagtggttcaaggtcgttcattacggcgtggagcctgatagtcagcagctcgacatggaggctgtgcgtcagctggccctgaaagagcgtcctcaactgattatctgcggctactcggcctatccccgcacgatcgattttgctgcttttcgcagcatcgctgatgaggtgggcgcttacttgttggcggacatggcacacattgccggccttgttgcggccggggtccatccgagtcctatcgcccactgtgatgtggtgacgacgaccacccacaagacattgcgtggccccagaggcggcttaatcctttgtcgtgatgcggactttggccgtaagtttgacaaggcagtgtttcctggcagtcagggcggccctttggaacatgtgatcgcagccaaggctgtggccttaggagaagctcttcagccagagttccatgcttatagctgccaggtggtggcgaatgcccaggttcttgctggtcgcattcaggagcgcgggattgcggttgtgagtggaggaacagataatcaccttgtcttgctggatctgcgcagcattgggatgaccgggaaggttgctgatttgcttgtcagtgacgtaaacatcaccgccaataagaacacagtgccctttgatcctgagtcgccttttgtgaccagtggtctgcgcttgggcacggcggctctaacaactcgtggctttgatgaggaggcattccgtgaggttgctgatgtgattgcagatcgtttgcttaaaccgcaagatgaatcgattaaggcgcagtgcttggaacgggtgagacaactttgtggccgtttccctctctacaggggttccctctag

SEQ ID NO: 4167 - protein, 424 aa, Prochlorococcus marinus str. MIT 9303
MTDRCLASINAALTDSDPAIAGLIDQERQRQETHLELIASENFTSQAVMQAQGSVLTNKYAEGLPHKRYYGGCEHVDAIEELAIERARRLFGAAWANVQPHSGAQANFAVFLALLQPGDTIMGMDLSHGGHLTHGSPVNVSGKWFKVVHYGVEPDSQQLDMEAVRQLALKERPQLIICGYSAYPRTIDFAAFRSIADEVGAYLLADMAHIAGLVAAGVHPSPIAHCDVVTTTTHKTLRGPRGGLILCRDADFGRKFDKAVFPGSQGGPLEHVIAAKAVALGEALQPEFHAYSCQVVANAQVLAGRIQERGIAVVSGGTDNHLVLLDLRSIGMTGKVADLLVSDVNITANKNTVPFDPESPFVTSGLRLGTAALTTRGFDEEAFREVADVIADRLLKPQDESIKAQCLERVRQLCGRFPLYRGSL

SEQ ID NO: 4168 - DNA, 1260 bp, Burkholderia vietnamiensis G4
  CDS (1)..(1260): transl_table=11
atgttttccaaagaacaaaccattgccggtttcgatccggatctgcatgaggccatgcgtctcgagcgacagcgccaggaggcgcacatcgagctgatcgcttcggaaaactatacgagcccgcgcgtgctcgaggcacagggatcggtgctgaccaacaaatacgccgaaggctacccgggcaagcgctactacggcggctgcgaacacgtcgacgtggtcgaacagctggcgatcagccgcgcgaaggcgctgttcaatgccgatttcgcgaacgtgcagccgcatagcggctcgcaggcgaacgcggccgtctatctggcgctgctcacgcccggcgacacgatcctcggcatgagcctcgcgcacggcggccatctgacgcacggtgcgaaggtgtcgttttcggggaaggtgttcaatgcggtccagtacggcgtcgatgcgacaaccgggctgatcgattacgacgagatcgaacgtctcgcgctcgagcatcggccgaagatgatcgtcgccggcttttccgcgtattcgcgggttctcgatttcgcacgcttccgcgcgatcgctgacaaggtcggcgcctatctgttcgtcgacatggcgcacgtcgccgggcttgtcgcggcgggcctgtatccgaacccggtgccgtttgccgacgtcgtgacgaccacgacgcacaagacgctgcgcgggcctcgtggcggcctgattctggcccgcgccaacgaggagatcgagaaaaagctgaactcgatggtgtttccgggcacgcaaggcggcccgctgatgcatgtcgttgccgcgaaggcggtcgcgttcaaggaagcactggggccggagttcgtcacgtatcagaagcagacgctcgcgaacgcgcgggcgatggtcgaggtgttcaacgcgcgcggctacgacgtcgtgtcgggcggcaccgacgatcacctgttcctcgtcagcctcgtcaagaagggcatcaccggcaaggatgccgatgcggcgctggggcgcgcgcacatcacggtgaacaagaacacggtgccgaacgatccccaatcgccgttcgtgacgagcggcatccgcatcggcacgccggcgatcacgacgcgcggctttctcgaggcggacgccgcacataccgcgcaattgatgtgcgacgcgctcgaccggctcggcgacgcgcaggtcgaagctgctgtgcgcacccaggtggcgcagctctgcgcgcgcttcccggtttatctcggactgtga

SEQ ID NO: 4169 - protein, 419 aa, Burkholderia vietnamiensis G4
MFSKEQTIAGFDPDLHEAMRLERQRQEAHIELIASENYTSPRVLEAQGSVLTNKYAEGYPGKRYYGGCEHVDVVEQLAISRAKALFNADFANVQPHSGSQANAAVYLALLTPGDTILGMSLAHGGHLTHGAKVSFSGKVFNAVQYGVDATTGLIDYDEIERLALEHRPKMIVAGFSAYSRVLDFARFRAIADKVGAYLFVDMAHVAGLVAAGLYPNPVPFADVVTTTTHKTLRGPRGGLILARANEEIEKKLNSMVFPGTQGGPLMHVVAAKAVAFKEALGPEFVTYQKQTLANARAMVEVFNARGYDVVSGGTDDHLFLVSLVKKGITGKDADAALGRAHITVNKNTVPNDPQSPFVTSGIRIGTPAITTRGFLEADAAHTAQLMCDALDRLGDAQVEAAVRTQVAQLCARFPVYLGL

SEQ ID NO: 4170 - DNA, 1242 bp, Desulfotomaculum reducens MI-1
  CDS (1)..(1242): transl_table=11
atgtttaacggtaaactagctcaaaccgacccggagcttgcaaaagctatcgagctggaacaccaacgccagcagagaaacatcgagttaattgcatcggagaactttgtgagtcctgcagtattggaagcccagggatctattcttaccaacaaatacgcagagggttaccccggcaaacgctattatgggggctgtgaatttgtggatattgcagagtccctagctattagtagggctaagaaattatttggggcagatcatgccaatgtgcagccccattccggagctcaggccaactttgccgtatactttgccctgttacaacccggggacaaaattctaggtatgaacctggcccacgggggacatctaacccatggcagcccggtcaacgtatcgggtaaatattttaatgtggtggcctatggagtagaagaggacactgggtgcatcaattatgagaaactacgggagatcgccctgcaggaaaagcccaaaatgatcgtggcaggtgccagtgcctatgcccgggccatcgattttaaaaaaattggggaaattgccaaggaaattgatgcttacttctttgtggatatggcccatattgctggtttagtagctgcagggttacatcagagtcccgtaccctatgccgatgttgttaccaccaccacccacaaaaccctgcggggaccccggggcggtatgattttatgcaaagaagaatatgctcagttaattgacaaagccatattccctggcagccaaggcggacccttgatgcatgtgattgcggccaaggcagcggcctttggggaagcactgaaaccagagtttaaagcataccagcagcagattattaataacgctcaagccttggccaagggtttactggagcggggctttaaccttgtttccggcggtaccgacaaccacctgatactggtggacctgcggggcaccggcattacgggtaaacaggccgaaacactgttggacgaagttcatatcacctgcaacaaaaacgccattccctttgacccggaaaaaccctttgtaaccagcggtattcgcctaggtacaccggcggtaacaacccggggctttaaagaaaaggatatggataaagtggcagaaatcattgctcttaccctgcaagaaaaagacaacccagacacccaggaaaaagccagagccatggtcaaagaactctgcgacaaatatccgctgtatgcttag

SEQ ID NO: 4171 - protein, 413 aa, Desulfotomaculum reducens MI-1
MFNGKLAQTDPELAKAIELEHQRQQRNIELIASENFVSPAVLEAQGSILTNKYAEGYPGKRYYGGCEFVDIAESLAISRAKKLFGADHANVQPHSGAQANFAVYFALLQPGDKILGMNLAHGGHLTHGSPVNVSGKYFNVVAYGVEEDTGCINYEKLREIALQEKPKMIVAGASAYARAIDFKKIGEIAKEIDAYFFVDMAHIAGLVAAGLHQSPVPYADVVTTTTHKTLRGPRGGMILCKEEYAQLIDKAIFPGSQGGPLMHVIAAKAAAFGEALKPEFKAYQQQIINNAQALAKGLLERGFNLVSGGTDNHLILVDLRGTGITGKQAETLLDEVHITCNKNAIPFDPEKPFVTSGIRLGTPAVTTRGFKEKDMDKVAEIIALTLQEKDNPDTQEKARAMVKELCDKYPLYA

SEQ ID NO: 4172 - DNA, 1248 bp, Burkholderia vietnamiensis G4
  CDS (1)..(1248): transl_table=11
atgttcaatcgcactaccagcaccgtcgcgaacgtcgatcccgagatctttgctgcgatcgagcaggaaaaccgccgccaggaagaccacatcgagttgatcgcgtcggaaaactacacgagcccggccgtgatggccgcacagggctcgcagctcacgaacaagtacgcggaaggttatccgggcaagcgctactacggcggctgcgagtacgtcgacgtggtcgagcagctggcgatcgatcgcgtgaagcagctgttcggcgcggaagcggcgaacgtgcagccgaactcgggctcgcaggcgaaccagggcgtgttcttcgcgatgctcaagccgggcgacacgatcatggggatgagcctggcgcacggtgggcacctgacgcacggctcgccggtgaacatgtcgggcaagtggttcaacgtggtgagctacgggctgaacgaaaacgaagacatcgattacgacgcggcggaaaagctcgcgcaggagcacaagccgaagctgatcgtcgcgggcgcctcggcgttcgcgctgaagatcgacttcgcgcgtatggcgcagatcgcgaagtcggtcggcgcgtacctgatggtggacatggcgcactacgctgggctgatcgcggcgggcgtgtatccgaacccggtgccgcacgctgatttcgtgacgacgaccacgcacaagagcctgcgcggcccgcgcggcggcgtgatcctgatgaaggcggagtacgagaagcagatcaactcggcgatcttcccgggcatccagggcggcccgctgatgcacgtgatcgcggcgaaggcggtggcgttcaaggaagcgctgtcgccggagttcaaggcgtatcagcaaaaggtggtggagaacgcgcgggtgctggccgagacgctggtgaaacgcgggctgcggatcgtgtcgggccgcacggaaagccacgtgatgctggtggacctgcgcgcgaagcacatcacgggcaaggcggcggaagcggcgctgggtgcggcgcacatcacggtgaacaagaacgcgattccgaacgatccggaaaagccgttcgtgacgagcggcgtgcggctgggctcgccggcgatgacgacgcgcggcttcggtccggcggaagcggagcaggtgggcaacctgatcgcggacgtgctggagaacccggaagatgcggcgacgctcgagcgcgtgcgcgcgcaagtggccgagctgaccaagcgtttcccggtctacgggtga

SEQ ID NO: 4173 - protein, 415 aa, Burkholderia vietnamiensis G4
MFNRTTSTVANVDPEIFAAIEQENRRQEDHIELIASENYTSPAVMAAQGSQLTNKYAEGYPGKRYYGGCEYVDVVEQLAIDRVKQLFGAEAANVQPNSGSQANQGVFFAMLKPGDTIMGMSLAHGGHLTHGSPVNMSGKWFNVVSYGLNENEDIDYDAAEKLAQEHKPKLIVAGASAFALKIDFARMAQIAKSVGAYLMVDMAHYAGLIAAGVYPNPVPHADFVTTTTHKSLRGPRGGVILMKAEYEKQINSAIFPGIQGGPLMHVIAAKAVAFKEALSPEFKAYQQKVVENARVLAETLVKRGLRIVSGRTESHVMLVDLRAKHITGKAAEAALGAAHITVNKNAIPNDPEKPFVTSGVRLGSPAMTTRGFGPAEAEQVGNLIADVLENPEDAATLERVRAQVAELTKRFPVYG

SEQ ID NO: 4174 - DNA, 1326 bp, Chlorobium phaeovibrioides DSM 265
  CDS (1)..(1326): transl_table=11
atggacaccgatattctgaagatgcaggacagagaggtttttgaggcgatagcccttgagactggccgtcagatggaaacccttgagctcattgcctcggagaatttcaccagtcgcgcagtcatgcaggcctgcggttcggtgatgaccaataaatatgccgagggttatcccggcaagcgctactatggtggctgtgagtttgttgatatagccgagaatcttgcgcgcgaccgtgcaaaaaaacttttcggctgcgagtatgtcaatgttcagccgcactcaggttcaagcgcaaacatggcggtgcttttttctgtgctcaaacccggtgactgcatcatgggtctcgacctttcccatggcggccacctcacgcacggcagttcggtcaatttttccgggcagatgtacaaggcccatgcttacggagttgatggcgaaaccggtataattgatatgaaccaggtggagaaaatggcccttgaggttcgtccccgccttattatctgtggcgcaagtgcttattcccaggggtttgacttcaaggccttccgtgaaattgccgacaaagtcggggcattcctgatggccgatatcgcccatcctgcaggacttattgtcagtggcctgctcagcgatccgatgccgcattgccattttgtgaccaccaccacacacaagacccttcgtggtcctcgcggtggcatgatcatgatgggcaaagactttgaaaacccgatggggattaccatcaaaaccaaaaacgggcaacgggtgaagatgatgtcggaagtgatggacgcagaggtgatgcccggcattcagggcggtcctctcatgcacattattgccggcaaggctgttgctttcggcgaggctcttcgtccggagttccgtcagtatgcaatgcaggtgcgcagtaatgctgcagctatgtcggagcggttcctgagcctcggttacaacattgtgagcggcggaacgaagaaccatctgatgctgcttgatctccggaacaaggatattaccggcaaggttgtagagaacacattgcacgaagccggcataaccgtcaacaagaacatggttccttttgatgacaagtcgccattcgtgaccagtggcatccgtatcggtactgcagccatgacaacccgcggaatgaatgaagacgacagccggctgattgccgagctgattgacagggtcattctgtcagcggcttcaccggagtcctcctctgtatgccgcagcgtcaaggaggagattcgttcgctctgtctcagaaatccgcttgagggatatggtgtgacgccctcctga

SEQ ID NO: 4175 - protein, 441 aa, Chlorobium phaeovibrioides DSM 265
MDTDILKMQDREVFEAIALETGRQMETLELIASENFTSRAVMQACGSVMTNKYAEGYPGKRYYGGCEFVDIAENLARDRAKKLFGCEYVNVQPHSGSSANMAVLFSVLKPGDCIMGLDLSHGGHLTHGSSVNFSGQMYKAHAYGVDGETGIIDMNQVEKMALEVRPRLIICGASAYSQGFDFKAFREIADKVGAFLMADIAHPAGLIVSGLLSDPMPHCHFVTTTTHKTLRGPRGGMIMMGKDFENPMGITIKTKNGQRVKMMSEVMDAEVMPGIQGGPLMHIIAGKAVAFGEALRPEFRQYAMQVRSNAAAMSERFLSLGYNIVSGGTKNHLMLLDLRNKDITGKVVENTLHEAGITVNKNMVPFDDKSPFVTSGIRIGTAAMTTRGMNEDDSRLIAELIDRVILSAASPESSSVCRSVKEEIRSLCLRNPLEGYGVTPS

SEQ ID NO: 4176 - DNA, 1254 bp, Enterobacter sp. 638
  CDS (1)..(1254): transl_table=11
atgttaaagcgtgaaatgaacattgccgattatgatgcagaactgtggcaagcaatggagcaggaaaaagtacgtcaggaagagcacatcgaactgatcgcctccgaaaactacaccagcccgcgcgttatgcaggctcagggttctcagctgaccaacaaatacgctgaaggttatccaggcaaacgctactacggcggttgcgagtacgttgatatcgttgagcagttggcgatcgaccgtgcaaaagagctgtttggcgcagattacgctaacgtgcagccgcactccggttctcaggctaactttgcggtttacactgcgctgctgcaaccgggtgataccgtgctgggtatgaaccttgcacaaggcggtcacctgactcacggctcaccggttaacttctcaggcaaactgtacaacatcattccttacggcattgatgagtccggtaaaattgactacgaagacatggcgaagcaggctgagacccacaaaccgaagatgattatcggtggcttctctgcttactctggcgtggttgactgggcaaaaatgcgtgaaatcgcagacagcatcggcgcatacctgttcgtcgacatggcgcacgtcgcgggtctgattgcggcaggcgtttacccgaacccggttccacatgctcacgttgtgacgacgaccacccataaaaccctggcgggtccgcgtggcggcctgatcctggcacatggcggtaacgaagagctgtacaaaaaactcaactctgctgtgttcccaagcgctcagggcggcccgctgatgcacgtgatcgcggccaaagccgtggcgctgaaagaagcgatggagccagagtttaaagtgtatcagcagcaggttgcgaaaaacgccaaagccatggtggaagtcttcctgaaccgtggttacaaagtggtttccggcggtactgaaaaccacctgttcctgctggatctggttgataaaaacctgaccggtaaagaagctgacgccgccctgggccgcgcgaacatcaccgtgaacaaaaacagcgtaccaaacgatccgaaaagcccgtttgtgacttccggtatccgtatcggttctccggctgtgactcgccgcggcttcaaagaagctgaagtgaaagagctggctggctggatgtgtgatgttctggataacatcaacgacgaagcggtgatcgaacgtatcaaaggtaaagtgctggatatctgcgcgcgtttccctgtgtacgcctaa

SEQ ID NO: 4177 - protein, 417 aa, Enterobacter sp. 638
MLKREMNIADYDAELWQAMEQEKVRQEEHIELIASENYTSPRVMQAQGSQLTNKYAEGYPGKRYYGGCEYVDIVEQLAIDRAKELFGADYANVQPHSGSQANFAVYTALLQPGDTVLGMNLAQGGHLTHGSPVNFSGKLYNIIPYGIDESGKIDYEDMAKQAETHKPKMIIGGFSAYSGVVDWAKMREIADSIGAYLFVDMAHVAGLIAAGVYPNPVPHAHVVTTTTHKTLAGPRGGLILAHGGNEELYKKLNSAVFPSAQGGPLMHVIAAKAVALKEAMEPEFKVYQQQVAKNAKAMVEVFLNRGYKVVSGGTENHLFLLDLVDKNLTGKEADAALGRANITVNKNSVPNDPKSPFVTSGIRIGSPAVTRRGFKEAEVKELAGWMCDVLDNINDEAVIERIKGKVLDICARFPVYA

SEQ ID NO: 4178 - DNA, 1254 bp, Caldicellulosiruptor saccharolyticus DSM 8903
  CDS (1)..(1254): transl_table=11
atgcaaatgtatttctataatttagtaaaggatactgaccctgaaatagctgaggcaataaaaaatgagctaaaaaggcagcaaaacaagattgaactcattgcctctgaaaactttgtgtcaattgctgttatggcagcaatgggctcgcccttgacaaataaatatgcagaaggttatcctaacaaaagatattacggtggctgcgagtatattgatgttgttgagtcaattgccattgagagagcaaaaaagctatttggagcagagcatgcaaatgttcagccacactctggtgctcaggcaaatatggcagtgtattttgctgtgctgaatcctggggatactatattgggaatgaatctttcgcatggtggtcatttgactcatggtagtcctgtgaacttttctggaaaactttataatatcgtatcgtatggtgttgatcctgaaacagaaacaatagactatgacgaggttttaagattagcaaaagaacacagacccaaactaattttagctggtgcctcagcatatccaagaattattgactttaagaagttcagagaaatagctgatgaggttggagcatatttgatggtcgacatggcacacattgcaggcttggttgcagcaggacttcatccatcacctgttgaatatgccgattttgttaccacaacaacgcacaagacacttagaggtcctcgaggggggttaatcctctgtaaggagaaatatgcaaagctgattgacaagtctatattccccggtattcaaggggggcctttagaacatgtaattgcagcaaaagcagttgctttaaaagaggcaatgacagaagagtttagaaattatcaaattcagattttaaagaatgctaaggcactcagtgaaagactgattgaaagaggatttagacttgttagtggtggtacggataatcatttgatgcttgttgatttgcgaaacaaaggtattactggcaaagatgcagaaaaaagacttgacagcttgaatataacatgtaataaaaatgcaattccttttgatactcaaagcccaatggtgacaagtggaataaggcttggtactccagctgtgacaacacgtgggtttaaagaagaagacatgatagaagttgctgatatcattcatgatgctctgacaaattctgatacggatgataacatattgcaaagggttaaggctttgtgtgagaagtatccactttatagcgaatttagagagtaa

SEQ ID NO: 4179 - protein, 417 aa, Caldicellulosiruptor saccharolyticus DSM 8903
MQMYFYNLVKDTDPEIAEAIKNELKRQQNKIELIASENFVSIAVMAAMGSPLTNKYAEGYPNKRYYGGCEYIDVVESIAIERAKKLFGAEHANVQPHSGAQANMAVYFAVLNPGDTILGMNLSHGGHLTHGSPVNFSGKLYNIVSYGVDPETETIDYDEVLRLAKEHRPKLILAGASAYPRIIDFKKFREIADEVGAYLMVDMAHIAGLVAAGLHPSPVEYADFVTTTTHKTLRGPRGGLILCKEKYAKLIDKSIFPGIQGGPLEHVIAAKAVALKEAMTEEFRNYQIQILKNAKALSERLIERGFRLVSGGTDNHLMLVDLRNKGITGKDAEKRLDSLNITCNKNAIPFDTQSPMVTSGIRLGTPAVTTRGFKEEDMIEVADIIHDALTNSDTDDNILQRVKALCEKYPLYSEFRE

SEQ ID NO: 4180 - DNA, 1248 bp, Pelotomaculum thermopropionicum SI
  CDS (1)..(1248): transl_table=11
atgagtttaaagcgccctctgtccgaagtcgacccggaaattttccgggccatcgagctggaaacccagagacagcgcaatactttggaactgattgcttcagaaaacgtagccagccgggccgtaatggaggcccagggctcggtgctgaccaacaaatatgcggagggctatccggggcgccgctattacgggggctgcgagtttgtggacattgccgaggatctggccatttcccgcgccaaggagcttttcggggcgggttttgcaaacgtgcagccgcattcaggggcccaggccaataccgccgtctattttgccctgctaaacccgggggataccataatgggtatggatcttgcccacggcgggcacctcacccacggaagcccggttaacatttccggcaggtatttcaagtttacgttttacggtgtggaaaaagaaaccggcaggatcaactacgaaaaaatgttttccattgcctttgagcacaagccgcggatgattgtggccggcgccagcgcctatccccgcgccatagacttttacaagatcaaagagatcgccgcagaagttggcgcctacctgatggtcgacatggcccacattgccgggctggtggcggccgggttgcacatgagcccggtgccttacgcagacgtggtcaccaccaccacccataagactctgcgcggtcccaggggcggcctgatcctgtgcaaggacgccgaaagatacggcacaaagataaacagggcggtctttccgggcgtccagggagggccgctgatgcacgttattgcggccaaggcggtagcctttaaagaggcaatggagcccggctttaaagagtaccagcgcaaaattgtaagcaacgcccgggcgctggcggacgccctgctggagcggggctttgagctggtttccgggggtaccgacaaccacctgatcctggttgacttaaggagcaagaaaattaccggcagggaagcccaggagttgttcgacgcggtgggcgtcacggtaaacaagaacgccgtccccttcgacccgcagccgcccaacatagccagcggcatccggatcggcacgcccgccgtaacttcgcggggcctgaatgaggatgacatggtgcaaattgccgaaataatggattatgctatcgaacaccgcgacgaccgcggcaagctggaaaaggccagggcgaaggtagacgaaatatgcgcccggtacccgctatactga

SEQ ID NO: 4181 - protein, 415 aa, Pelotomaculum thermopropionicum SI
MSLKRPLSEVDPEIFRAIELETQRQRNTLELIASENVASRAVMEAQGSVLTNKYAEGYPGRRYYGGCEFVDIAEDLAISRAKELFGAGFANVQPHSGAQANTAVYFALLNPGDTIMGMDLAHGGHLTHGSPVNISGRYFKFTFYGVEKETGRINYEKMFSIAFEHKPRMIVAGASAYPRAIDFYKIKEIAAEVGAYLMVDMAHIAGLVAAGLHMSPVPYADVVTTTTHKTLRGPRGGLILCKDAERYGTKINRAVFPGVQGGPLMHVIAAKAVAFKEAMEPGFKEYQRKIVSNARALADALLERGFELVSGGTDNHLILVDLRSKKITGREAQELFDAVGVTVNKNAVPFDPQPPNIASGIRIGTPAVTSRGLNEDDMVQIAEIMDYAIEHRDDRGKLEKARAKVDEICARYPLY

SEQ ID NO: 4182 - DNA, 1260 bp, Candidatus Vesicomyosocius okutanii HA
  CDS (1)..(1260): transl_table=11
atgtttgataaatctcaaacattagctaaagtagatgctgaaatctataaagcgattgttctggaagagactcgacaagagacacatattgagttgattgccagtgaaaattatacttcacctgcagtgatggagacgcaaggttcaaaattaaccaataagtatgctgaagggtatccttgtaagcgttattatggggggtgtgaatatgttgacatggttgagcaattagcgattgatcgtgctaaaacattatttggtgcggattatgcgaatgtccaaccacattctggttctcaggcgaatgctgcggtttttcaagcgttgttagtacctggggatacaattttaggcatgagtttagcacatggcggacatttaacacatggtgctacaccttcgttttcgggtaaaaattttaattctattcaatatggtttgaatcaaaaaacgggggagattgattatgagcaagttgaagttttggcaaaaaggtataagcctaaaatgattattgctggtttttcagcatattcacgtatggttgattggcaacgttttagagaaattgcagatagtgttggtgcttatttaatggttgatatggcgcatgttgctggtttgattgcaactggtgaatatccatcaccagttgcaattgctgatgtaaccactacaactacgcataaaacacttcggggccctaggggtggtttaattttagccaagtctaacaagacaatagaaaagaaacttaatgctgctattttccctggtatccagggcgggccactaatgcatatcattgctgctaaagcagtgagttttaaagaagctatgagtgatgaatataagacttatcagaagcaagtaaagattaatgcacaagtaatggctaatacatttattaaacgtggatttgatgtagtttcaggtggtacggataatcatttattcttagtaagttttattgaccaaggattaacaggtaaagcagtggatactgctttaggcagtgcgtatatcacggttaatatgaatgcagtgccaaacgacccgaaccctccttttgtaactagtggtattcgtgtaggtacaccatcggtgacaacacgtggattcaatgagattgattgttctgatttagcatcttggatgtgcgatatttgtgatgatttagggaatcaagaagtgatttataagattagaggaagagtcgttagtctttgtgctaaatatccagtttatttagatgattaa

SEQ ID NO: 4183 - protein, 419 aa, Candidatus Vesicomyosocius okutanii HA
MFDKSQTLAKVDAEIYKAIVLEETRQETHIELIASENYTSPAVMETQGSKLTNKYAEGYPCKRYYGGCEYVDMVEQLAIDRAKTLFGADYANVQPHSGSQANAAVFQALLVPGDTILGMSLAHGGHLTHGATPSFSGKNFNSIQYGLNQKTGEIDYEQVEVLAKRYKPKMIIAGFSAYSRMVDWQRFREIADSVGAYLMVDMAHVAGLIATGEYPSPVAIADVTTTTTHKTLRGPRGGLILAKSNKTIEKKLNAAIFPGIQGGPLMHIIAAKAVSFKEAMSDEYKTYQKQVKINAQVMANTFIKRGFDVVSGGTDNHLFLVSFIDQGLTGKAVDTALGSAYITVNMNAVPNDPNPPFVTSGIRVGTPSVTTRGFNEIDCSDLASWMCDICDDLGNQEVIYKIRGRVVSLCAKYPVYLDD

SEQ ID NO: 4184 - DNA, 1299 bp, Acidiphilium cryptum JF-5
  CDS (1)..(1299): transl_table=11
atgaaccagcagagcccgatcgcgaacatctcgcgcttcttcaatgcccctctcgccgagaccgatcctgatctcgcggcggcgatcggccgcgaactcggccgccagcaggacggcatcgagctgatcgcctccgagaatatcgtctcccgcgccgtgctcgaggcccaggggtcggtgctgaccaacaaatacgccgaaggctatcccggcaagcgctactatggcggttgtgcggcggtcgatatcgccgaggaactggcgatcgcgcgcgcgaaggagctgttcggctgcgccttcgccaatgtccagccgcattccggcgcgcaggccaaccaggcggtgttcctcgccctgctcaacgcgggcgacacgattctgggcatgagcctcgccgccggcggccatctgacccatggggcggcgccgaacctgtccggcaagtggttcgacgccgtgcagtatggcgtgaagcgcgaggatggcaccctcgattacgaggagctggagcgcctcgcgcgcgagcgcaagccgaagctgatcatcgctgggggctcggcctatccgcgcttcatcgactttgcccgcatccgcaaggtggcggacgaggtcggcgcctatttcatggtcgacatggcgcatttcgccgggctcgtcgcggccgggatcttcccctcgccggtgcctcacgcgcatgtcgttaccacgacgacgcacaagaccctgcgcggcccgcgcggcggcatgatcctctccaacgacctcgacctcggcaagaagatcaactcggcggtgttccccggcctgcagggcggcccgctgatgcatgtgatcgcggcgaaggcggtcgccttcggcgaggcgctccgccccgaattccgcgcctaccagaaggcgctggccgaaaatgccaaggtgctggcggaaacgctggtcgagggcggtctcgatatcgtgaccggcgggaccgactgccatctcatgctggtggatctccgcccgaagaacgtgaccggcaaggcggcggaagcctcgctcgagcgcgcccacatgaccgcgaacaagaacgcgattccgttcgacccggcgaagccggcggtcacctccggcattcgcctcggcacgccggcggcgacgacgcgcggtttcggacccgacgagttccgtatggtcggccgtttcatcgtcgaggtgctggacgggctctccgcatcgaacgacggtgacaacgccgccgtcgaggcggcggtgggcgccaaggtgctggagctctgcgcccggttcccgatctaccggtaa

SEQ ID NO: 4185 - protein, 432 aa, Acidiphilium cryptum JF-5
MNQQSPIANISRFFNAPLAETDPDLAAAIGRELGRQQDGIELIASENIVSRAVLEAQGSVLTNKYAEGYPGKRYYGGCAAVDIAEELAIARAKELFGCAFANVQPHSGAQANQAVFLALLNAGDTILGMSLAAGGHLTHGAAPNLSGKWFDAVQYGVKREDGTLDYEELERLARERKPKLIIAGGSAYPRFIDFARIRKVADEVGAYFMVDMAHFAGLVAAGIFPSPVPHAHVVTTTTHKTLRGPRGGMILSNDLDLGKKINSAVFPGLQGGPLMHVIAAKAVAFGEALRPEFRAYQKALAENAKVLAETLVEGGLDIVTGGTDCHLMLVDLRPKNVTGKAAEASLERAHMTANKNAIPFDPAKPAVTSGIRLGTPAATTRGFGPDEFRMVGRFIVEVLDGLSASNDGDNAAVEAAVGAKVLELCARFPIYR

SEQ ID NO: 4186 - DNA, 1254 bp, Legionella pneumophila str. Corby
  CDS (1)..(1254): transl_table=11
atgtttgacgaaagttatactataaaaaattttgatgatgttctttttaaagcaatttctgatgaaaaacgacgccaagaagaacacattgaattaatagcatctgaaaattatgtcagcccgagagtattggaggctcagggttctgtgttgacgaataaatacgctgaaggatatccaggcaaacgctattacggaggttgtgagtttgttgatgtcgctgaagagttagccatttcaagggcaaaattactttttggcgctcattatgtcaatgtgcaaccccattcgggatcacaagcgaacgcagcagtcatgatggcattattgtccccaggcgatacttttatgggcatggctttacctcatggtgggcacttgactcatgggtcaaaggttaatttttcaggtaaattataccattctgtcgagtatggtgttgatagcaatacgggtttgattgattatgatgctctggaaaaacttgcgcttcaacacaaaccaaaattgatcattgccggtttttcagcttattccaggatcctggattgggctcgatttagagaaattgccgataaggtcggcgcttatttaatggcggacatcgctcatgtagctggtctggtggctgtagggttatatccttctcctgttccttatgcggatgttgtgacaacgacaactcataaaactttaagaggacctcgcggtggtttaatcctttgtaaggaaaacgaagaaattgagaaaaaattaaattcttctgtatttcctggtatgcaaggtgggcccttaatgcatgtaattgcagccaaggcagttgcttttgcagaagctctgttacccgaatttaaaacttatcagcaacaggttttagctaatgccagaacgatgtgcagtgtgttacaaagcagaggctatgatattgtttctggcggaactgataatcatcttttgctagtggatttgataaataaaggaattacaggtaaagaagctgacgctgctttaggcagagctaacataacagtcaataaaaattcggttcccaatgatcctcgctcgccttttgtaacgagtggtttacgtttgggtacgcctgctgcaaccacaagaggctttaaagaaagagagattactttgttatctaactgggtagcggatgtccttgataatgttcatgatgaaactaatatttcaagagtgaaaacccaggtgttgctactctgtcgtgaatttccggtttatgcctaa

SEQ ID NO: 4187 - protein, 417 aa, Legionella pneumophila str. Corby
MFDESYTIKNFDDVLFKAISDEKRRQEEHIELIASENYVSPRVLEAQGSVLTNKYAEGYPGKRYYGGCEFVDVAEELAISRAKLLFGAHYVNVQPHSGSQANAAVMMALLSPGDTFMGMALPHGGHLTHGSKVNFSGKLYHSVEYGVDSNTGLIDYDALEKLALQHKPKLIIAGFSAYSRILDWARFREIADKVGAYLMADIAHVAGLVAVGLYPSPVPYADVVTTTTHKTLRGPRGGLILCKENEEIEKKLNSSVFPGMQGGPLMHVIAAKAVAFAEALLPEFKTYQQQVLANARTMCSVLQSRGYDIVSGGTDNHLLLVDLINKGITGKEADAALGRANITVNKNSVPNDPRSPFVTSGLRLGTPAATTRGFKEREITLLSNWVADVLDNVHDETNISRVKTQVLLLCREFPVYA

SEQ ID NO: 4188 - DNA, 1281 bp, Parabacteroides distasonis ATCC 8503
  CDS (1)..(1281): transl_table=11
atgaaaagagacaacatcatttttgacattatcgagaaggagcaccaacgccaattgaaaggcattgagttgatcgcttccgagaactttgtcagcgaccaggtcatgcaggccatgggaagctgtctgaccaacaaatacgccgagggatatcccggcaagcgttattatgggggttgcgaggtagtagaccaaagtgagacgatcgctatcgaacggttgaaaaagctattcaacgcagaatgggccaacgtgcagcctcactccggggcgcaggccaacgcagccgtattcttcgccgtattgaatccgggcgacacgttcctcgggttgaacctgtcgcatggcggacacctgtcccacggttcaccagtaaatagctccggcgttctctatcacgctaccgaatataatgtaaaggaagataccggacgggtggactacgaccagatggaggaagtagcccttcgtgagaaaccgaaattgatcgttggcggtggttccgcttattcccgtgactgggattacaaacgtatgcgtgagatagccgacaaggtaggcgccttattgatgatcgatatggcccacccggcaggcctgatcgccgccggtttgctgaacaacccgctggagtacgctcacatcgtaacgtctacgacgcataagaccctgcgtggtcctcgtggcggtatcatcctgctgggtaaggatttcgagaatccttggggcaagaagacaccgaaaggcgagatcaagaagatgtctcagttgttggactccgccgtattcccgggtatccaaggcggtccgctggagcatgtgatcgcagccaaggccgtagccttcggagaggctttggagccggaatacaagacgtaccaagcacaggtgaaagcgaacgccgccgctatggccaaggccttcacggacaaagggtacaagatcatctccggcggtacggacaaccacagcatgctgatcgacctgcgcacgaagttccccgacctgaccggtaaagtggccgagaaagccttggtagccgccgacatcacggtgaacaagaacatggttccgttcgacagccgctcggccttccagacctccggtatccgtgtgggtacgcccgctatcacgacccgtggcgctaaagagccgcttatgggcgagatcgtggaactgatcgacaccgtattggccgctcccgaatgcgataagaccatcggtgccgttcgtgagaaggtgaacggtatcatgaaggaatatcctatcttcgcatggtaa

SEQ ID NO: 4189 - protein, 426 aa, Parabacteroides distasonis ATCC 8503
MKRDNIIFDIIEKEHQRQLKGIELIASENFVSDQVMQAMGSCLTNKYAEGYPGKRYYGGCEVVDQSETIAIERLKKLFNAEWANVQPHSGAQANAAVFFAVLNPGDTFLGLNLSHGGHLSHGSPVNSSGVLYHATEYNVKEDTGRVDYDQMEEVALREKPKLIVGGGSAYSRDWDYKRMREIADKVGALLMIDMAHPAGLIAAGLLNNPLEYAHIVTSTTHKTLRGPRGGIILLGKDFENPWGKKTPKGEIKKMSQLLDSAVFPGIQGGPLEHVIAAKAVAFGEALEPEYKTYQAQVKANAAAMAKAFTDKGYKIISGGTDNHSMLIDLRTKFPDLTGKVAEKALVAADITVNKNMVPFDSRSAFQTSGIRVGTPAITTRGAKEPLMGEIVELIDTVLAAPECDKTIGAVREKVNGIMKEYPIFAW

SEQ ID NO: 4190 - DNA, 1254 bp, Klebsiella pneumoniae subsp. pneumoniae MGH 78578
  CDS (1)..(1254): transl_table=11
atgttaaagcgtgaaatgaacattgccgattatgatgccgaactgtggcaggctatggagcaggaaaaagtacgtcaggaagagcacatcgaactgatcgcctccgaaaactacaccagtccgcgcgttatgcaggcgcagggctctcagctgaccaacaaatatgctgaagggtatccgggcaagcgttactacggcggctgtgaatacgtcgacgtggttgaacagctggcaatcgaccgcgcgaaagaactgttcggcgctgactatgctaacgtccagccgcactccggctcccaggctaactttgccgtctacaccgcgctgctgcagccgggcgacaccgtgctcggtatgaacctggcgcagggcggccacctgactcacggctccccggttaacttctccggcaaactgtacaacatcatcccttacggtattgatgagtccggtaaaattgactacgacgacatggcgaagcaggctcaggaacacaaaccgaagatgatcatcggtggtttctccgcttactccggtatcgttgactgggcgaaaatgcgtgaaatcgctgacagcatcggcgcttacctgttcgtcgatatggcgcacgtggcaggcctgattgccgctggcgtgtacccgaacccggttccgcatgctcacgttgtgaccaccaccacccacaaaaccctggcgggtccgcgcggcggcctgattctggcgaaaggcggtagcgaagagctgtacaaaaaactgaactctgcagtgttcccaagcgcgcagggcggcccgctgatgcacgttatcgcggcgaaagcggtggcgctgaaagaagcgatggagccagagtttaaagtttaccagcagcaggttgcgaaaaacgctaaagcgatggtggaagtgttcctgaaccgcggctacaaagtggtgtctggcggtactgagaaccacctgttcctgctggacctggtggataaaaacctgaccggtaaagaagctgacgctgccctgggccgcgccaacatcaccgtcaacaaaaacagcgtgccgaacgatccgaagagcccgttcgtaacctccggtatccgtatcggttctccggcagtgactcgccgcggctttaaagaagcggaagtcaaagagctggctggctggatgtgtgacgtgctggacaatatcaatgacgacgcggtcattgagcgcgtgaaaggtaaagtgctggatatctgcgcccgcttcccggtatatgcgtaa

SEQ ID NO: 4191 - protein, 417 aa, Klebsiella pneumoniae subsp. pneumoniae MGH 78578
MLKREMNIADYDAELWQAMEQEKVRQEEHIELIASENYTSPRVMQAQGSQLTNKYAEGYPGKRYYGGCEYVDVVEQLAIDRAKELFGADYANVQPHSGSQANFAVYTALLQPGDTVLGMNLAQGGHLTHGSPVNFSGKLYNIIPYGIDESGKIDYDDMAKQAQEHKPKMIIGGFSAYSGIVDWAKMREIADSIGAYLFVDMAHVAGLIAAGVYPNPVPHAHVVTTTTHKTLAGPRGGLILAKGGSEELYKKLNSAVFPSAQGGPLMHVIAAKAVALKEAMEPEFKVYQQQVAKNAKAMVEVFLNRGYKVVSGGTENHLFLLDLVDKNLTGKEADAALGRANITVNKNSVPNDPKSPFVTSGIRIGSPAVTRRGFKEAEVKELAGWMCDVLDNINDDAVIERVKGKVLDICARFPVYA

SEQ ID NO: 4192 - DNA, 1248 bp, Nitratiruptor sp. SB155-2
  CDS (1)..(1248): transl_table=11
atggattttttgaaaaaccaagacccagccgtatatgagattttcgaaaaagagttgcaaagacagacagatcatcttgaaatgatcgccagtgaaaactttactagtccagctgtcatggaagccatgggcagtgtgtttaccaacaaatatgctgaaggctaccctggaaaaagatattatggcggatgcgaatatgctgatgccattgaagagttggcaattcaaagagcaaaagaactttttggatgtgagtttgttaacgttcaaccccactctggctctcaagccaatcaaggagtctatctcgcgcttttaaaaccatacgacaaaattttgggaatggatttaagccacggaggtcacctgactcatggggcaaaagtcaatgccagcgggaaaatctatcaaagtttcttttacggcgtcaatgacgagggatggatcgattatgatagggttttagatattgcaaagattgtcaagccaaaactgatcgtctgcggtgcaagcgcctatccaagagtaatcgattttaaaaagtttcgagagattgcggatgaagtgggtgcgcttttgatggcggatatcgctcatatcgccggtcttgtggctgcaggtgaacatccgagtcctttcccatactgcgatgtagttacaacgacgacccacaaaactcttcgaggtccaagaggcggtatgatcatgaccaatgatgccgatatcgctaaaaagatcaatagcgcaattttccctggaatccaaggtggtccgcttgttcacgtcatagcggcaaaagcggtcggttttggtgaaaatctcaaaccggaatggaaagagtatgcaaaacagatgcgcatcaacgcttctactcttgcaaccgttttgatgaacagaggatacaacgttgtcagtggtggaacggacaaccatctcgtactcgttagttttcttgacaaagattttagtgggaaagatgcggatgaagctttgggacgcgccggaattacggtcaacaaaaacaccgttcccggagagacaagaagtccgtttgttactagtggtatccggataggaagtccggctttgactgcaagaggtatgaaagaggctgaatttgaacttatagccaacaaaatcgcagatgttcttgataatattcacgatgtgaatctgcatgaaaagataaaagaggagatggtggctctagctcgtaagtttgtcatttacgacagaccgacctattaa

SEQ ID NO: 4193 - protein, 415 aa, Nitratiruptor sp. SB155-2
MDFLKNQDPAVYEIFEKELQRQTDHLEMIASENFTSPAVMEAMGSVFTNKYAEGYPGKRYYGGCEYADAIEELAIQRAKELFGCEFVNVQPHSGSQANQGVYLALLKPYDKILGMDLSHGGHLTHGAKVNASGKIYQSFFYGVNDEGWIDYDRVLDIAKIVKPKLIVCGASAYPRVIDFKKFREIADEVGALLMADIAHIAGLVAAGEHPSPFPYCDVVTTTTHKTLRGPRGGMIMTNDADIAKKINSAIFPGIQGGPLVHVIAAKAVGFGENLKPEWKEYAKQMRINASTLATVLMNRGYNVVSGGTDNHLVLVSFLDKDFSGKDADEALGRAGITVNKNTVPGETRSPFVTSGIRIGSPALTARGMKEAEFELIANKIADVLDNIHDVNLHEKIKEEMVALARKFVIYDRPTY

SEQ ID NO: 4194 - DNA, 1251 bp, Sulfurovum sp. NBC37-1
  CDS (1)..(1251): transl_table=11
atgtcatatgccatagaaacgtttgacccggagatattccaggcaattgaaaatgaaagagagagacagacgaaccacctcgagatgatcgcatccgaaaacttcactatccctgccgtcatggaggcgatgggttcggtctttaccaacaaatatgccgaaggatatccgcacaagagatactatggcggatgcgaatacgccgatgtggtagaacagcttgctatcgacagggcctgcgaactctttgactgcaactatgcaaatgtacagccccactccggctcacaggcgaacggtgccgtctatgcggcgctgatcaaagccggggacaaaatacttggtatggacctcagccacggcggtcacctcactcacggctcaaaacccagtttttccggcaaaaactaccacagctttacctacggtgtcgagcttgacgggcgcatcaactatgacagagtcatggagattgcaaagatcgtacaaccgaagatcatcgtctgcggtgcctctgcctatgccagagagatcgatttcaagaagttcagggagatcgccgatgaagtcggcgcgatcctctttgcggacatcgcacacattgcaggtctggtctgtgccggtgaacatccaagcccgttcccgtatgccgatgtggtcacaacaacgacacacaaaacacttgcaggacctcgtggcggtatgatcatgaccaacgatgaagacattgccaagaagatcaactctgccatcttcccgggtcttcaaggcgggccgcttgttcatgtaattgctgccaaggcagtcggtttcaaacacaacctctctgatgaatggaaagtctatgcaaaacaggtgaaagccaatgcttccatacttgcagacgtgctcatcaagagaggctacgacgtggtctccggcggaacagacaaccacctcgttcttgtctccttcctcgataaagaattctcagggaaagatgccgatgcggcactgggtgccgccggtatcaccgtgaacaagaacacggttccaggagagacaagaagcccgttcgtgacttcaggtatccgtatcggttcgcctgcattgacaagccgcggcatgaaagagatagagtttgagatcatcgccaacaagatcgctgatgtactcgacaatgtcaacgacagcgaactgcatgcaaagatcaaagaggaaatgaaggaacttgcttccaacttcgtgatctacgataagccgatatattaa

SEQ ID NO: 4195 - protein, 416 aa, Sulfurovum sp. NBC37-1
MSYAIETFDPEIFQAIENERERQTNHLEMIASENFTIPAVMEAMGSVFTNKYAEGYPHKRYYGGCEYADVVEQLAIDRACELFDCNYANVQPHSGSQANGAVYAALIKAGDKILGMDLSHGGHLTHGSKPSFSGKNYHSFTYGVELDGRINYDRVMEIAKIVQPKIIVCGASAYAREIDFKKFREIADEVGAILFADIAHIAGLVCAGEHPSPFPYADVVTTTTHKTLAGPRGGMIMTNDEDIAKKINSAIFPGLQGGPLVHVIAAKAVGFKHNLSDEWKVYAKQVKANASILADVLIKRGYDVVSGGTDNHLVLVSFLDKEFSGKDADAALGAAGITVNKNTVPGETRSPFVTSGIRIGSPALTSRGMKEIEFEIIANKIADVLDNVNDSELHAKIKEEMKELASNFVIYDKPIY

SEQ ID NO: 4196 - DNA, 1260 bp, Citrobacter koseri ATCC BAA-895
  CDS (1)..(1260): transl_table=11
atgcggatgttaaagcgtgaaatgaacattgccgattatgatgccgaactgtggcaggctatggagcaggaaaaagtacgtcaggaagagcacatcgaactgatcgcctccgaaaactacaccagcccgcgcgtgatgcaggcgcaggggtctcagctgaccaacaaatacgctgaaggatatccgggcaagcgctactacggcggttgcgaatatgtggatgtcgttgagcaactggcgattgaccgcgcgaaagaactgtttggcgcagactacgccaacgtccagccgcactctggttctcaggctaacttcgcggtctacactgcgctgctgcaaccgggcgacaccgttctgggtatgaacctggcgcaaggtggccacctgactcacggttctccggtaaacttctccggtaaactgtacaacatcgtgccttacggcatcgatgagtccggtaaaattgactacgaagagatggcgaagctggctcagactcataaaccgaagatgatcatcggcggcttctctgcttattccggcgtcgttgactgggcaaaaatgcgtgaaattgccgacagcattggcgcgtacctgtttgttgatatggcgcacgtcgcgggtcttatcgccgcagacgtttatccgaacccggttccgcatgctcacgttgtgaccaccaccacgcacaaaaccctggcgggtccgcgcggcggcctgatcctggcgaaaggcggtgacgaagagttgtacaaaaaactgaactctgccgttttccctagtgctcagggtggcccgctgatgcatgtgatcgccggtaaagcggtggcgctgaaagaagcgatggaaccggagttcaaagtctaccagcagcaggttgccaaaaacgccaaagcgatggtggaagtgttcctgaaccgtggctacaaagtggtttccggcggtacggagaaccacctgttcctgctggatctggtggacaaaaacctgaccggtaaagaagctgacgccgcgctgggtcgtgccaacatcaccgttaacaaaaacagcgtgccgaacgatccgaagagcccgtttgttacttccggtatccgtatcggttctccggccattacgcgtcgcggctttaaagaagcagaagccaaagagctggctggctggatgtgcgatgtgctggacaacatcaacgatgaagcggttatcgagcgcatcaaaggcaaagtgctggacatctgcgcacgcttccctgtttacgcgtaa

SEQ ID NO: 4197 - protein, 419 aa, Citrobacter koseri ATCC BAA-895
MRMLKREMNIADYDAELWQAMEQEKVRQEEHIELIASENYTSPRVMQAQGSQLTNKYAEGYPGKRYYGGCEYVDVVEQLAIDRAKELFGADYANVQPHSGSQANFAVYTALLQPGDTVLGMNLAQGGHLTHGSPVNFSGKLYNIVPYGIDESGKIDYEEMAKLAQTHKPKMIIGGFSAYSGVVDWAKMREIADSIGAYLFVDMAHVAGLIAADVYPNPVPHAHVVTTTTHKTLAGPRGGLILAKGGDEELYKKLNSAVFPSAQGGPLMHVIAGKAVALKEAMEPEFKVYQQQVAKNAKAMVEVFLNRGYKVVSGGTENHLFLLDLVDKNLTGKEADAALGRANITVNKNSVPNDPKSPFVTSGIRIGSPAITRRGFKEAEAKELAGWMCDVLDNINDEAVIERIKGKVLDICARFPVYA

SEQ ID NO: 4198 - DNA, 1254 bp, Serratia proteamaculans 568
  CDS (1)..(1254): transl_table=11
atgttaaagcgtgaaatgaacattgctgattacgatgccgaactgtggcgtgcaatggagcaagaagttgtgcgtcaggaagagcacattgagctgattgcgtctgagaactacaccagcccgcgcgtaatgcaggcccagggctcccagttgaccaacaaatacgctgaaggttatccgggcaagcgttattacggcggctgcgaatatgtggatatcgttgagcaactggccatcgatcgcgcaaaagagctgttcggcgcagattacgccaacgtccagccacactccggttcccaggcgaacttcgctgtttacaccgcgctgctgcagccgggcgacaccattctgggcatgaacctggcgcacggcggccacctgacccacggttcaccggtcaacctgtctggtaaactgtataacgtggtgccttacggcatcgacgaaaaaggtcaaatcgactacgaagatctggcgaaacaggcacagactcataaaccaaaaatgatcatcggcggcttctctgccttctccggtatcgttgattgggcaaaaatgcgcgaaatcgccgacagcatcggcgcttacctgttcgttgacatggcgcacgtagcgggtctgatcgccgccggcgtttatccgaacccggtccctcacgcacatatcgtgaccaccaccacccacaaaaccctggcaggtccgcgcggcggcctgatcctggcgaaaggcggtgatgaagatctgtataaaaagctgaactccgcggtgttcccgggcggccagggcggcccgctgatgcacgtgatcgccggtaaagcggtggcgctgaaagaagccatggagcctgagttcaaaatttaccagcagcaagtggccaaaaacgccaaagccatggtggaagtggtgctggagcgcggctacaaagtggtttccggtggcactcataaccacctgttcctgctggatctggttgataagaacctgaccggtaaagaagctgacgctgccctgggccgcgccaacattaccgtgaacaaaaacagcgtgccaaacgatcccaagagcccgttcgtcacctccggtgtgcgtatcggtactccggcagtgacccgtcgcggcttcaaagaagctgacgtgcgtgaactggccggctggatctgcgacgtgctggacaacatcaacgatgaagccaccatcgaacgcaccaagaagaaagtactggatatctgcgcccgcctgccggtttacgcataa

SEQ ID NO: 4199 - protein, 417 aa, Serratia proteamaculans 568
MLKREMNIADYDAELWRAMEQEVVRQEEHIELIASENYTSPRVMQAQGSQLTNKYAEGYPGKRYYGGCEYVDIVEQLAIDRAKELFGADYANVQPHSGSQANFAVYTALLQPGDTILGMNLAHGGHLTHGSPVNLSGKLYNVVPYGIDEKGQIDYEDLAKQAQTHKPKMIIGGFSAFSGIVDWAKMREIADSIGAYLFVDMAHVAGLIAAGVYPNPVPHAHIVTTTTHKTLAGPRGGLILAKGGDEDLYKKLNSAVFPGGQGGPLMHVIAGKAVALKEAMEPEFKIYQQQVAKNAKAMVEVVLERGYKVVSGGTHNHLFLLDLVDKNLTGKEADAALGRANITVNKNSVPNDPKSPFVTSGVRIGTPAVTRRGFKEADVRELAGWICDVLDNINDEATIERTKKKVLDICARLPVYA

SEQ ID NO: 4200 - DNA, 1263 bp, Arcobacter butzleri RM4018
  CDS (1)..(1263): transl_table=11
atgagatatataacagaagcgaagttaaaagaggcagatgtagaagtatataatatcatagaagaggagttgaaaagacaaacaactcacttagagatgatagcaagtgagaatttcacatctccagcagtaatggaagcaatgggaagtgtatttacaaataaatatgcagaaggttatccatataaaagatattatggaggatgtgaacaagctgataaagtagaacaattagcaattgatagagcttgtgaaatatttggatgtaaatatgcaaatgttcaaccacactcaggaagccaagcaaatggagcagtatatgctgcattaataaaagctggtgataaaatcttaggtatggatttatctcatggtggacatttaactcatggttctaaaccatcattctctggacaaaattatcaagcattctattatggagttgaacttgatggaagaattaattatgataaagttgaagagatagcaaaaatagttcaaccaaaaataatcgtttgtggtgcttctgcatatgcaagagaaattgatttcaaaagatttagagaaatagcagatttggttggtgctattttatttgcagatattgcacatattgcaggtcttgtagcagctaatgaacatccaagtccatttcctcatgcacatatagttacaactactactcataagactttaagaggtccaagaggtggtatgataatgacaaatgatgaagagatagctaaaaaaataaactcagctattttcccaggacttcaaggtggaccacttgttcatgtaatagcagcaaaagcagtagcatttaaagagatacttgatccaaaatggaaagactatgcaaaacaagtaaaagcaaatgcaagagtgttaggagaagttctaacaaaaagaggatatgatatagtaagtggtggaacagataatcacttagtattagtaagttttttaaataaaccattttcagggaaagatgcagatgcagctttaggaaatgctggtattacagtaaataagaatacagtaccaggagagacaagaagtccatttgtaacatcagggattagaataggatctccagcattaacagcacgagggatgaaagaaaaagagtttgaattaatagcaaacaaaatatgtgatgtattagatgacataaataacactagtttacaagctaagattagcaaagagttagaggaattatctagcaattttgttatttataatcaagcttcatattaa

SEQ ID NO: 4201 - protein, 420 aa, Arcobacter butzleri RM4018
MRYITEAKLKEADVEVYNIIEEELKRQTTHLEMIASENFTSPAVMEAMGSVFTNKYAEGYPYKRYYGGCEQADKVEQLAIDRACEIFGCKYANVQPHSGSQANGAVYAALIKAGDKILGMDLSHGGHLTHGSKPSFSGQNYQAFYYGVELDGRINYDKVEEIAKIVQPKIIVCGASAYAREIDFKRFREIADLVGAILFADIAHIAGLVAANEHPSPFPHAHIVTTTTHKTLRGPRGGMIMTNDEEIAKKINSAIFPGLQGGPLVHVIAAKAVAFKEILDPKWKDYAKQVKANARVLGEVLTKRGYDIVSGGTDNHLVLVSFLNKPFSGKDADAALGNAGITVNKNTVPGETRSPFVTSGIRIGSPALTARGMKEKEFELIANKICDVLDDINNTSLQAKISKELEELSSNFVIYNQASY

SEQ ID NO: 4202 - DNA, 1263 bp, Arcobacter butzleri RM4018
  CDS (1)..(1263): transl_table=11
atgagatatataacagaagcgaagttaaaagaggcagatgtagaagtatataatatcatagaagaggagttgaaaagacaaacaactcacttagagatgatagcaagtgagaatttcacatctccagcagtaatggaagcaatgggaagtgtatttacaaataaatatgcagaaggttatccatataaaagatattatggaggatgtgaacaagcagataaagtagaacaattagcaattgatagagcttgtgaaatatttggatgtaaatatgcaaatgttcaaccacactcaggaagccaagcaaatggagcagtatatgcagcattaataaaagctggtgataaaatcttaggtatggatttatctcatggtggacatttaactcatggttctaaaccatcattctctggacaaaattatcaagcattctattatggagttgaacttgatggaagaattaattatgataaagttgaagaaatagcaaaaatagttcaaccaaaaataatcgtttgtggtgcttctgcatacgcaagagaaattgattttaaaagatttagagaaatagctgatttagttggagctattttatttgcagatattgcacatattgcaggtcttgtagcagctaatgaacatccaagtccatttcctcattcacatatagttacaactactactcataagactttaagaggtccaagaggtggtatgataatgacaaatgatgaagatattgctaaaaaaataaactcagctattttcccaggacttcaaggtggaccattagttcatgtaatagcagcaaaagcagtagcatttaaagagatacttgatccaaaatggaaagattatgcaaaacaagtaaaagcaaatgcaaaagtgttaggagaagttctaacaaaaagaggatatgatatagtaagtggtggaacagataatcacttagtattagtaagttttttaaataaaccattttcagggaaagatgcagatgcagctttaggaaacgcagggataactgtaaataagaatacagtaccaggagaaacaagaagtccatttataacatcagggattagaataggatctccagcattaacagcaagagggatgaaagaaaaagagtttgaattaatagcaaacaaaatatgtgatgtattagatgacataaataacactagtttacaagctaaaattagcaaagagttagaggaattatctagcaattttgttatttacaacaacggtacatactaa

SEQ ID NO: 4203 - protein, 420 aa, Arcobacter butzleri RM4018
MRYITEAKLKEADVEVYNIIEEELKRQTTHLEMIASENFTSPAVMEAMGSVFTNKYAEGYPYKRYYGGCEQADKVEQLAIDRACEIFGCKYANVQPHSGSQANGAVYAALIKAGDKILGMDLSHGGHLTHGSKPSFSGQNYQAFYYGVELDGRINYDKVEEIAKIVQPKIIVCGASAYAREIDFKRFREIADLVGAILFADIAHIAGLVAANEHPSPFPHSHIVTTTTHKTLRGPRGGMIMTNDEDIAKKINSAIFPGLQGGPLVHVIAAKAVAFKEILDPKWKDYAKQVKANAKVLGEVLTKRGYDIVSGGTDNHLVLVSFLNKPFSGKDADAALGNAGITVNKNTVPGETRSPFITSGIRIGSPALTARGMKEKEFELIANKICDVLDDINNTSLQAKISKELEELSSNFVIYNNGTY

SEQ ID NO: 4204 - DNA, 1263 bp, Rickettsia akari str. Hartford
  CDS (1)..(1263): transl_table=11
atgaatatttttaataataatttgcatgaaacggataaagaaattaatgaaataataaaacatgaaaagttacgtcaaagtagcgtaatcgagcttattgcatcagagaatttcgtaagtcccgcagtacttgaagctcaagggtcgattctgactaataaatatgcagaagggtattccggtaaacgtttttataacggttgtgaggaagtagataaagctgaaaatttagctatagagagagtaaaaaaattatttaactgcaaatatgcaaatgtgcaacctcattcaggctcacaagcaaatcaagctgtatatcttactttattacagccgggcgatacaattcttggtatgtcattagatagcggtgggcatctaacgcacggtgcatcccctaatatgtccggtaaatggtttaacgccgtttcttatggcgtaaataaaaaaacttatttaatcgattatgatgagattgagaggttagcagttttacataagccaaaactacttatagctggcttttctgcttatcctcgtaatattgattttacaagatttagagaaattgcggataaagtcggagcatatttcatggcagatattgctcatattgcagggcttgttgccacaggtgagcatcaaagccctatttcttatgctcatgttgttacctccactactcacaaaacgcttaggggaccaaggggtggtttagtcttatctgacgatgaagagataggcaaaaaaataaattctgcattatttccaggattacaaggtggtccgttaatgcatatagtcgccgcaaaagcagtagcttttttagaaagcttgcagcctgaatataaaagctatattaagcagataataagtaacgctaaagctttagcaagtagcttgcaagaaagaggatatgatatattaacaggcggaacagataatcatattgttttagtggatttgcgtaaaaacggaattaccggaaagcttgctgctaattctttagataacgcagggattacatgtaataagaatgctatcccgtttgatgaaacttcgccttttatcacttcaggtattcgccttggtactcccgcatgtactactagaggctttaaagaacaggatttcgtatcagtcggtcatatggtagcagatattttagatggtctaaagaataataaagataatactaaagctgaacagcaagtgctacataaagtaacaaaactaattaaattatttccgttttatgactaa

SEQ ID NO: 4205 - protein, 420 aa, Rickettsia akari str. Hartford
MNIFNNNLHETDKEINEIIKHEKLRQSSVIELIASENFVSPAVLEAQGSILTNKYAEGYSGKRFYNGCEEVDKAENLAIERVKKLFNCKYANVQPHSGSQANQAVYLTLLQPGDTILGMSLDSGGHLTHGASPNMSGKWFNAVSYGVNKKTYLIDYDEIERLAVLHKPKLLIAGFSAYPRNIDFTRFREIADKVGAYFMADIAHIAGLVATGEHQSPISYAHVVTSTTHKTLRGPRGGLVLSDDEEIGKKINSALFPGLQGGPLMHIVAAKAVAFLESLQPEYKSYIKQIISNAKALASSLQERGYDILTGGTDNHIVLVDLRKNGITGKLAANSLDNAGITCNKNAIPFDETSPFITSGIRLGTPACTTRGFKEQDFVSVGHMVADILDGLKNNKDNTKAEQQVLHKVTKLIKLFPFYD

SEQ ID NO: 4206 - DNA, 1233 bp, Alkaliphilus oremlandii OhILAs
  CDS (1)..(1233): transl_table=11
atgaactttgatacgctaaagattgctgatccggaaatttatgaggtaatacaaaaagaaacaaaaagacagcgagggaatatagaactgatagcatctgaaaactttgttacagaagcagtaatggaagccatgggaagtcaattaactaataagtacgctgaaggatatccaggaaaaagatattacggaggctgtgaagaagtagatgttgcggaagatttagcgagagatcgattaaaaaagttatttaatgcagaacatgccaatgtacagcctcattcaggagccaatgcaaatattggggtatactttgcgatattaaagccaggagatactgttttaggtatgaacttatcccatggtggacatttaactcacggtagtccagtaaatatttctggtacatattataattttgtcgattatggtgttgataaggaaacccatctcatcaattacgaggaagtaagaagaattgcaaatgagattaagccaaagctcatcgtagcaggtgcaagtgctttcccaagaaaaattgattttaaaaagtttagagaaatcgcagatgaagttggtgcatatttaatggtggacatggctcatattgcaggtcttgttgctgctggattacatgaaaatccttgtgattatgcggatttcgttacgacaactacacataaaacattgagaggacctagaggcggagcgatcttatgcaaagagaaatatgcgaaaatgattgacaaagcaattttccctggtcttcaaggtggaccgctgatgcatgtgattgctgcaaaggctgtttcctttaaagaagctttatccccagaatttaaagcttaccaagaacaagtaattaaaaatgcggctaagctgggggaggaattaaaaagcagaggttttaacttagtttctggtggaacagacaaccacttgctattattagacctaagaaataaaaatattacagggaaagatgctgaaaaactattagacgaagtcggtgttactgtaaataaaaatacaataccgtatgaccctgaaagtccattcgtgaccagtggcattcgcattggtacgcctgcagttacaacaagaggtatgaaggaagatgatatggtaacaattgcagaaatcatcggtacaatcatcgaccatccagagagaatagacgaagtctcttccatggttaaaaatctttgtgaaaagtttaagctatatgaataa

SEQ ID NO: 4207 - protein, 410 aa, Alkaliphilus oremlandii OhILAs
MNFDTLKIADPEIYEVIQKETKRQRGNIELIASENFVTEAVMEAMGSQLTNKYAEGYPGKRYYGGCEEVDVAEDLARDRLKKLFNAEHANVQPHSGANANIGVYFAILKPGDTVLGMNLSHGGHLTHGSPVNISGTYYNFVDYGVDKETHLINYEEVRRIANEIKPKLIVAGASAFPRKIDFKKFREIADEVGAYLMVDMAHIAGLVAAGLHENPCDYADFVTTTTHKTLRGPRGGAILCKEKYAKMIDKAIFPGLQGGPLMHVIAAKAVSFKEALSPEFKAYQEQVIKNAAKLGEELKSRGFNLVSGGTDNHLLLLDLRNKNITGKDAEKLLDEVGVTVNKNTIPYDPESPFVTSGIRIGTPAVTTRGMKEDDMVTIAEIIGTIIDHPERIDEVSSMVKNLCEKFKLYE

SEQ ID NO: 4208 - DNA, 1239 bp, Clostridium phytofermentans ISDg
  CDS (1)..(1239): transl_table=11
atgtattcatttgaagatataaaagtatttgatccagaattagcggatagtatcacaatggaaatcgcaagacagaacgatcatattgaattgatagcatcagagaattttgttagtaaggcagttatggctgcaatgggtagcccactaacaaataaatacgcagaaggatatccaggaaaaagatattatggcggatgcgaatttgttgatatagctgagaatttagcgatcgagagagcaaagaagttatttggttgtacttacgccaatgttcagcctcactctggtgcacaggcgaatatggcagtattcttcgctttattacagccaggagatacagttatgggtatgaatcttgcacatggtgggcacttaactcacggtagcccagtaaacttctccggttcttactttaatattgtaccatatggtgtggatgacaatggttttatcgactatgaagaggtagagaaaatagcaaaggaatgtaagccaaaattaatcgtagctggagcttctgcttatgctagaaagattgactttaaacgtttccgtgaaattgctgacttagtaggtgcatacttgatggttgatatggcacatattgctggattagtagctgctggttatcatcaatcaccaataccatatgcgcacgttacaactacaacgactcataagacattacgtggtcctagaggcggtatgattttatctagtgaagagtttgccgaagagcataagcttaataagtccatattcccaggaactcaagggggaccgttaatgcatgtaattgctgcaaaagctatctgttttaaagaagcactagatgatagcttcaaagattatgctgggaaaatcatctccaatgcgggggcattagcaaatgagttaacagcacgtggatttaacttggtatctggaggtaccgacaaccacttaatgttaattgacttacagaatatgaacattacaggaaaagaggcagaacatattttagatgaagctaacattacttgtaataagaatactgttccaaatgatccagcttctccatttgtaacaagcggaatccgtcttggtacacctgctattactacaagaggctttaatgaaaaagatatggctgttgttgcagaagcaatttcacttgtagttaaagatgtagataaaaacaaggaacaggcaaaagctttggttaagatgttaacggatgcgtatccgctatattaa

SEQ ID NO: 4209 - protein, 412 aa, Clostridium phytofermentans ISDg
MYSFEDIKVFDPELADSITMEIARQNDHIELIASENFVSKAVMAAMGSPLTNKYAEGYPGKRYYGGCEFVDIAENLAIERAKKLFGCTYANVQPHSGAQANMAVFFALLQPGDTVMGMNLAHGGHLTHGSPVNFSGSYFNIVPYGVDDNGFIDYEEVEKIAKECKPKLIVAGASAYARKIDFKRFREIADLVGAYLMVDMAHIAGLVAAGYHQSPIPYAHVTTTTTHKTLRGPRGGMILSSEEFAEEHKLNKSIFPGTQGGPLMHVIAAKAICFKEALDDSFKDYAGKIISNAGALANELTARGFNLVSGGTDNHLMLIDLQNMNITGKEAEHILDEANITCNKNTVPNDPASPFVTSGIRLGTPAITTRGFNEKDMAVVAEAISLVVKDVDKNKEQAKALVKMLTDAYPLY

SEQ ID NO: 4210 - DNA, 1248 bp, Delftia acidovorans SPH-1
  CDS (1)..(1248): transl_table=11
atgtttcaacgcaccaataccgtcgagaaggtcgacgccgaagtctttgccgccatccaggccgagaacctgcgtcaacaagaacatatcgagctgatcgccagcgagaactattgctcgcctgccgtcatggaagcccagggctcccagctcaccaacaagtacgccgaaggctatccgggcaagcgctactacggcggctgcgagaacgtcgatgtggtcgagcagctcgccatcgaccgcgtcaagaagctgttcggcgccgaagccgccaacgttcagcccaactccggctcccaggccaaccaggccgtgctgatggcctttgccaagcccggcgacaccatcatgggcatgagcctggccgaaggcggtcacctgacgcacggcatgccgctgaacatgtcgggcaagtggttcaacgtggtctcctacggcctgaacgccgaagaagccatcgactacgacaagatggaagcgctggcgcgcgaacacaagccccgcatcatcgtggccggcgcatcggcctacgccctggccatcgacttcgaacgcttcgccaagatcgcaaaggaagtcggcgccatcttctgggtggacatggcccactatgccggcctgatcgccgcaggcgtgtaccccaaccccgtgccccatgccgacgtggtcaccaccaccacgcacaagagcctgcgcggcccgcgcggcggcgtgatcctgatgaaggccgagcacgagaaggccatcaacagcgccatcttccccggcctgcaaggcggcccgctgatgcatgtcattgccggcaaggccgtggccttcaaggaagcgctgtcgcccgagttcaagacctaccaggaacaggtcgtgaagaacgccaaggttgtcgcggaaacgctgacggcacgcggtctgcgcatcgtctccggccgcacggaaagccacgtcatgctggtggacctgcgcgccaagggcatcaccggcaaggcggccgaagccgcgctgggtgccgcccacatgacgatcaacaagaactccatccccaacgatcccgaaaagccgatggtgaccagcggcatccgcgtgggcacgcccgccatgaccacgcgcggcttcaaggaagaggaagcccgcctgacagccaacctgctggccgacgtgctggagaaccccgccgacgaagccaacctggcccgcgtgcgcgcccaggtggccgagctgacggcccgcttcccggtctacggcgcctga

SEQ ID NO: 4211 - protein, 415 aa, Delftia acidovorans SPH-1
MFQRTNTVEKVDAEVFAAIQAENLRQQEHIELIASENYCSPAVMEAQGSQLTNKYAEGYPGKRYYGGCENVDVVEQLAIDRVKKLFGAEAANVQPNSGSQANQAVLMAFAKPGDTIMGMSLAEGGHLTHGMPLNMSGKWFNVVSYGLNAEEAIDYDKMEALAREHKPRIIVAGASAYALAIDFERFAKIAKEVGAIFWVDMAHYAGLIAAGVYPNPVPHADVVTTTTHKSLRGPRGGVILMKAEHEKAINSAIFPGLQGGPLMHVIAGKAVAFKEALSPEFKTYQEQVVKNAKVVAETLTARGLRIVSGRTESHVMLVDLRAKGITGKAAEAALGAAHMTINKNSIPNDPEKPMVTSGIRVGTPAMTTRGFKEEEARLTANLLADVLENPADEANLARVRAQVAELTARFPVYGA

SEQ ID NO: 4212 - DNA, 1260 bp, Coxiella burnetii RSA 331
  CDS (1)..(1260): transl_table=11
atgtatgagcctacgttgaccgtagagagtttcgattccgaattggcgggagcgattcgggacgaaaggcgtcggcaggagcaccatgttgagttgattgcctcggagaactatgtcagtccgcgggtgttggaacttcaggggtcggtgttgaccaataagtacgctgaagggtatcctggcaggcgttattacggtggttgtgaatttgtcgatattgccgagcaattggcgattgatcgagcgaaggaactgtttgtggcggattatgcgaacgttcagccgcattcgggttcgcaagccaatgcagaagcctatatggcgctaatgaatccaggcgataccttgcttgccatggatttgtcgcatggagggcacttgacccacggctctcctgtcagtttttcaggtaagttctataaagccgtgcattacggtttaaatgcgcatggtgatattgattacgagcaagcggcccaactagcgcaagagcataaaccgaaagtcatcctagcgggattttctgctttttcgggtatcgtcgattggcagcgttttcgcgaaatcgcggacagtgttaacgcctactttatgactgacattgcacatgtggctggtttagtggccgccggcgtctatccttcgccggttcaaattgctgatgttacgacgaccacgacccataaaacattacgaggccctcgtgcgggtttaattttagcaaaagccaaccccgaactagaaaagcgtttaaattccgccgtatttccaggttctcagggcggacctttgatgcacattattgcggccaaagcagttgccttcaaagaagcgatgcaaccggaatttaaaacttatgcgcaacagattttaaaaaatgctaaggcaatggcggaggtgatgaaggagcgcggttatacgattgtctcgggtggcacgcaaaatcacctatttttagtgagcttgttagataaaaacatatcgggcaaagaagccgaagcggctttaggacgagctaatattacagttaacaaaaataccgttcccggtgaaacccgctcgccttttgtgactagtggccttcgcattggcactcccgccattaccacccgagggtttaaagaaaaagaagcttctcaattggcgcattgggtttgtgatattttagatgatattcataacgaaaaagtcatcgccgatgtcaaacaaaaagcccatgaattgtgtgggaaatttccggtgtatcaggaactcgactga

SEQ ID NO: 4213 - protein, 419 aa, Coxiella burnetii RSA 331
MYEPTLTVESFDSELAGAIRDERRRQEHHVELIASENYVSPRVLELQGSVLTNKYAEGYPGRRYYGGCEFVDIAEQLAIDRAKELFVADYANVQPHSGSQANAEAYMALMNPGDTLLAMDLSHGGHLTHGSPVSFSGKFYKAVHYGLNAHGDIDYEQAAQLAQEHKPKVILAGFSAFSGIVDWQRFREIADSVNAYFMTDIAHVAGLVAAGVYPSPVQIADVTTTTTHKTLRGPRAGLILAKANPELEKRLNSAVFPGSQGGPLMHIIAAKAVAFKEAMQPEFKTYAQQILKNAKAMAEVMKERGYTIVSGGTQNHLFLVSLLDKNISGKEAEAALGRANITVNKNTVPGETRSPFVTSGLRIGTPAITTRGFKEKEASQLAHWVCDILDDIHNEKVIADVKQKAHELCGKFPVYQELD

SEQ ID NO: 4214 - DNA, 1242 bp, Heliobacterium modesticaldum Ice1
  CDS (1)..(1242): transl_table=11
gtgagtgaatggaagcatctgcaccaggtcgaccctgaagtggcggccgccatggaccgggaaaagaagcgccagaaaaacaacattgagctgatcgcttcagagaacttcgtcagcgaggccgtcatggaagcggccggcagcgtattgacgaacaagtatgccgaggggtatccgggaaaacgctactacggcggctgcgaattcgtcgaccaggtggaaaggctggccatcgagcgggccaagcggctcttcggtgccgaacacgccaatgtgcagccccactcgggcgctaacgccaacatgggcgtctacttcgcctgcctcgaaccgggcgatacggttttgggcatgaatctcgcccacggcggccatctcacccacggttcgcctgtcaacatatcggggaagtacttccgcttcgtcgcctacggcgtcgacgcacatacgggtcggatcgactatgacgaggtggcgcgcatcgcccgggagacgaagcccaaattgatcgtcgccggcgccagcgcttacccgcgtgtgctcgattttgcccgcttccgggccatcgccgacgaggtcggggccatgctgatggtcgatatggcccacatcgccggcctggtggcggcgggactgcatccctcgcccgttccttacgccgagtttgtcaccaccaccacccacaagacgctgcgcggtccccgcggcggcatgatcctttgtaaacaggagtgggccgccaaggtcgacaaggccattttccccggcctgcagggcggtcccttgatgcacatcatcgctgccaaggccgtcgccttccaagaggccatggcgccggccttcacggcgtatcagaagcagatcgccgccaacgccgccgccctcgccaaaggcctgaccgaccgaggcttccaactcgtctccggcggcaccgacaaccacctgatgctcgtcgacctgcgcaacaagcagctgaccggcaaggaagcggaaaagcggctcgacgagtgccgaattacggtcaataagaacgcgatccccttcgatccgcagagccccttcgtcaccagcggtatccgtatcggcacgccggccgcgacgagccggggcatggatgaagccgccatggatcaggtggccgaagcgatccacctgtgcctctctgacggcagtgagggagccatgcaaaaggctgtcgccatcgtggacgcgctctgcgcccgtttcccgctctacgcctga

SEQ ID NO: 4215 - protein, 413 aa, Heliobacterium modesticaldum Ice1
MSEWKHLHQVDPEVAAAMDREKKRQKNNIELIASENFVSEAVMEAAGSVLTNKYAEGYPGKRYYGGCEFVDQVERLAIERAKRLFGAEHANVQPHSGANANMGVYFACLEPGDTVLGMNLAHGGHLTHGSPVNISGKYFRFVAYGVDAHTGRIDYDEVARIARETKPKLIVAGASAYPRVLDFARFRAIADEVGAMLMVDMAHIAGLVAAGLHPSPVPYAEFVTTTTHKTLRGPRGGMILCKQEWAAKVDKAIFPGLQGGPLMHIIAAKAVAFQEAMAPAFTAYQKQIAANAAALAKGLTDRGFQLVSGGTDNHLMLVDLRNKQLTGKEAEKRLDECRITVNKNAIPFDPQSPFVTSGIRIGTPAATSRGMDEAAMDQVAEAIHLCLSDGSEGAMQKAVAIVDALCARFPLYA

SEQ ID NO: 4216 - DNA, 1242 bp, Lysinibacillus sphaericus C3-41
  CDS (1)..(1242): transl_table=11
atggcatatgaaaaattagcagtacaagacaaagcagtattagaaggaattcttgcagaaaaaaaacgtcaacaagcaaatatcgaattgattgcatctgaaaattttgtatccgaagcagttatggaagcgcaaggttctgtactgacaaataaatacgcagaaggttatccaggtaaacgctactatggtggctgtgaacatgtagacgtagttgaagatattgcacgtgatcgtgtgaaagaaatctttggtgcagaatacgcaaacgtgcaaccacactctggtgcgcaagcaaatatggctgtataccacacaattttagaaccaggcgatacggttcttggtatgaacctttctcatggtggtcacttaacacatggatctcctgtaaacttctctggtattctttataattttgtggaatatggtgtaacaaaggacacacaagttatcgattatgaggatgtacgtcaaaaagcattagaacataagccgaaacttatagttgcgggagcttctgcgtacccacgtgaaattgacttctctaaattccgtgaaatcgcagatgaagtaggtgcatacttcatggtggatatggcacacatagctggtcttgtagctgtcggtgagcatcaatcgccagttccatatgcagactttgttacatcgactacacataaaacattacgtggaccacgtggcggattaattcttgcatcgaaagaatgggagcaaaaattaaacaagtctgtattcccaggaattcaaggtgggccattaatgcatgtcattgctgctaaagctgtagcatttggcgaagtactgcaaccagaatttaaagactatgcaaaacaaataaaattgaatgcaaaagctttagccgaagtccttattgctgagggtgttgaaattgtatctggcggtacagataaccacttattactattaaacgttaaatctcttggtctgacaggtaaagtagcagaacatgcattagatgaagtgggtattacaactaacaaaaacacaatcccttacgatacggagtctccatttgttacttcaggtattcgtatcggtacaccagctgttacatctcgtggctttaaagaggaagatatgaaagaagtgggtgcaattattgcagcagttcttaaaaaccctgaagatgaagcagttaaagcggacgcaaaagatcgcgtaaaagcattaacagataaacatccattatacgcttaa

SEQ ID NO: 4217 - protein, 413 aa, Lysinibacillus sphaericus C3-41
MAYEKLAVQDKAVLEGILAEKKRQQANIELIASENFVSEAVMEAQGSVLTNKYAEGYPGKRYYGGCEHVDVVEDIARDRVKEIFGAEYANVQPHSGAQANMAVYHTILEPGDTVLGMNLSHGGHLTHGSPVNFSGILYNFVEYGVTKDTQVIDYEDVRQKALEHKPKLIVAGASAYPREIDFSKFREIADEVGAYFMVDMAHIAGLVAVGEHQSPVPYADFVTSTTHKTLRGPRGGLILASKEWEQKLNKSVFPGIQGGPLMHVIAAKAVAFGEVLQPEFKDYAKQIKLNAKALAEVLIAEGVEIVSGGTDNHLLLLNVKSLGLTGKVAEHALDEVGITTNKNTIPYDTESPFVTSGIRIGTPAVTSRGFKEEDMKEVGAIIAAVLKNPEDEAVKADAKDRVKALTDKHPLYA

SEQ ID NO: 4218 - DNA, 1248 bp, Candidatus Desulforudis audaxviator MP104C
  CDS (1)..(1248): transl_table=11
atggtctggaaccggtccctggccgaaaccgaccccgaaatcgcccgggccatcgcgctggagatcacccgtcaaggcgccaagcttgagctgatcgcctccgagaacttcgtcagccgcgccgtcctggaagcccagggttcggtgctgacgaacaagtacgccgagggctatcccggcgcgcgctactacggcggctgcgagtacgtggacatcgtggagagtgtggcgatcaggcgggcgaaggaaatcttcggcgccgggcacgcgaacgtgcagccccactccggggcccaggccaacatggccgcctatttcgccttcctcgaaccgggcgacacgatcatggggatgcgtctggcccacggggggcacctgacccacggcgcgaagatcaatttctcgggccggtacttccggtacgtgccctacggggtggaggaggaaaccggccggattgactacgaccggatgcatgccatcgcccgcgaacaccgcccgaaactgatcgtcggcggggccagcgcctacccgcgcgaactggacttcgcccggatgcgtgccattgcggatgacgtcggtgcgctcttgatgatcgacatggcgcacattgccggcctgatcgccgccggactgcacatgtccccggtgccgtacgccgacgtggtgaccaccacgacccacaaaaccctgcgcggcccgcggggcgggatgatcctgtgcccggaggagtacgccgccgccattgacaaggcggtattcccgggaatccagggcggccctctgatgcacgtgatcgcggccaaggccgtggccctgggcgaggctcagcgccccgagttcaagacctaccaggaacaaatcgtgaaaaacgcccgcgccttagcccaagccctgcaggagcggggttttgagctggtggcgggcggcaccgacacccacctgatcctggtcgacctccggaacaagggcctcaccggcgccgtggccgaggaccttctggaccgggtggacgtcaccgtgaacaagaacatggttccgttcgatccccagccgccccgggtcaccagcggcatccgcatcggcaccccggcggtcaccacccgcgggatgaaggaggacagcatggtccagatcgccgaggtgatcagcctgactctggatcatccggaagaaggggccgtccaggcgcgggcgaaagccattgttgccgaattgtgcgccgcccacccgttcctgaaactgtag

SEQ ID NO: 4219 - protein, 415 aa, Candidatus Desulforudis audaxviator MP104C
MVWNRSLAETDPEIARAIALEITRQGAKLELIASENFVSRAVLEAQGSVLTNKYAEGYPGARYYGGCEYVDIVESVAIRRAKEIFGAGHANVQPHSGAQANMAAYFAFLEPGDTIMGMRLAHGGHLTHGAKINFSGRYFRYVPYGVEEETGRIDYDRMHAIAREHRPKLIVGGASAYPRELDFARMRAIADDVGALLMIDMAHIAGLIAAGLHMSPVPYADVVTTTTHKTLRGPRGGMILCPEEYAAAIDKAVFPGIQGGPLMHVIAAKAVALGEAQRPEFKTYQEQIVKNARALAQALQERGFELVAGGTDTHLILVDLRNKGLTGAVAEDLLDRVDVTVNKNMVPFDPQPPRVTSGIRIGTPAVTTRGMKEDSMVQIAEVISLTLDHPEEGAVQARAKAIVAELCAAHPFLKL

SEQ ID NO: 4220 - DNA, 1284 bp, Thermotoga sp. RQ2
  CDS (1)..(1284): transl_table=11
gtgtggaaacatgtaaaacaggttgatcccgaaatatacgaagttcttgtgaacgagttgaagcgtcaagagtacggcctggagctgatcgcctctgagaacttcgcgtcactcgctgtcatagaaaccatgggaagcatgctcaccaacaagtacgcggaaggatacccgcagaagaggtactacggtggctgcgaatgggtggatcgagcagaagaactcgctatagagagagcgaagaggttgtttggagccaaatttgcgaacgttcagccgcactccggttctcaggcgaacatggcggtttatctggcactcgcccagcccggagacacgatcatgggaatgtccctgtctcacgggggacacctcacccatggagcgccggtgaatttctcagggaagatcttcaaggtggtaccctacggagtcaatctggaaacggaaacgatagattacgatgaggtcagaagactcgccctggaacacaagccaaagataatcgttgcgggtggaagtgcttacgccaggatcatcgatttcaaaagattcagagagatagccgatgaggtgggagcatatttgatggtggatatggctcactttgccggactcgtcgctgcaggaattcatccgaatcctttggagtacgcccatgtggtgacttctaccacacacaagaccctcaggggacccagaggtggtttgatactcacgaatgatccggatatcgccaaagccgtggataaaaccatcttccctggcattcagggcggtcctctcatgcacgtcatagcggcgaaagccgtctgtttcaaagaagccatgacggaggagttcaaagagtaccaaaatcaggtggtcaaaaatgctaaaaagatggctgaagagttccagaaacgaggttacaggatcgtttctggaggaactgatacacacttgttcctggtggatctcacaccaaaagacataacgggtaaagcggcggaaaaggccctggaaagctgtggtatcacagtgaacaaaaacaccattcccaacgaaaagagatctccgttcgtggcgagcggtatcagaataggaacacccgctgttacaacccgcggaatgaaggaagaagagatggaagagatcgccgagatgatagacctggttctttcaaacgtgaccgatgaaaacggaacggtgaaaccagaggtgagggaagaggtttcaaagagggtaagggagctctgcgaaaggtttcctctgtaccgcgacaagatcgaaggggtggaaatatga

SEQ ID NO: 4221 - protein, 427 aa, Thermotoga sp. RQ2
MWKHVKQVDPEIYEVLVNELKRQEYGLELIASENFASLAVIETMGSMLTNKYAEGYPQKRYYGGCEWVDRAEELAIERAKRLFGAKFANVQPHSGSQANMAVYLALAQPGDTIMGMSLSHGGHLTHGAPVNFSGKIFKVVPYGVNLETETIDYDEVRRLALEHKPKIIVAGGSAYARIIDFKRFREIADEVGAYLMVDMAHFAGLVAAGIHPNPLEYAHVVTSTTHKTLRGPRGGLILTNDPDIAKAVDKTIFPGIQGGPLMHVIAAKAVCFKEAMTEEFKEYQNQVVKNAKKMAEEFQKRGYRIVSGGTDTHLFLVDLTPKDITGKAAEKALESCGITVNKNTIPNEKRSPFVASGIRIGTPAVTTRGMKEEEMEEIAEMIDLVLSNVTDENGTVKPEVREEVSKRVRELCERFPLYRDKIEGVEI

SEQ ID NO: 4222 - DNA, 1242 bp, Candidatus Phytoplasma australiense
  CDS (1)..(1242): transl_table=11
atgaaatcacaattaagtttaaaagatccaaaaatatttgaactaatcgaacaagaaaaaaaaagacaaaaagaaaatatcatattaattgcttccgaaaacttcgtttccaaagaagttttagaaactcaaggtagtattttaactaataaatacgccgaaggatatcctggaaaaagatattatcatggttgtggtaatgtagatgatattgaacaaatagccatcgaaagggcgaaaaaactctttaatgctcgttatgccaacgttcaaccgcattcaggttctcaagctaatatggcagttttacaagctttattgcaacctaacgataaaattttaagtttgtctttaaacgatggtgggcatttaactcacggacataaattaagtttttcaggtaaatattatcaatcttattcttataatgtcgatccaacaacagaaatgcttgattatgaatcaattagaaaactggctttggaaatcaaaccaaaattaattatcgcaggatattctgcttattccagaaaaattaattttcaaaaattccgtgagattgctaatgaagtcaatgcttatttaatggctgatattgctcatattgcaggctttgttgcatgcaaattacacccttgtcctttagaagctcaagcagatatagttacttcaacgactcacaaaactttaagaggacctcgggggggattgattttaaccaacaaagaaaaaataatgcaacaaattaatagatctgtttttccgggaattcaaggagggcctttgatgcatgttattgctgctaaagctgtttccttcaaagaagctcaaagtttagaatttaaaaattatcaacaacaagtaattaaaaacgctcaagcatttgctcaaacttttcaaaaaaaaggttatcacgttgtaagtcaaggaactgataatcatttatttttaattaatttaaaaaaaacaaaccctctttttaccggagaaaaaattgcaaacattttagaaaaagttaacattatagtcaacaaaaacactattccttttgatcaagaaaaaccaatgtttactagtggtattaggttgggaacgcctgccatgacaacaaaaggatttcaagaagcagatttcattaagttggcagatttgattgatcaggccatcaaaaatagggacgacaacgtgtatctgcaaaaaataaaaaaagaagttctagattggacaaatgattttaaataa

SEQ ID NO: 4223 - protein, 413 aa, Candidatus Phytoplasma australiense
MKSQLSLKDPKIFELIEQEKKRQKENIILIASENFVSKEVLETQGSILTNKYAEGYPGKRYYHGCGNVDDIEQIAIERAKKLFNARYANVQPHSGSQANMAVLQALLQPNDKILSLSLNDGGHLTHGHKLSFSGKYYQSYSYNVDPTTEMLDYESIRKLALEIKPKLIIAGYSAYSRKINFQKFREIANEVNAYLMADIAHIAGFVACKLHPCPLEAQADIVTSTTHKTLRGPRGGLILTNKEKIMQQINRSVFPGIQGGPLMHVIAAKAVSFKEAQSLEFKNYQQQVIKNAQAFAQTFQKKGYHVVSQGTDNHLFLINLKKTNPLFTGEKIANILEKVNIIVNKNTIPFDQEKPMFTSGIRLGTPAMTTKGFQEADFIKLADLIDQAIKNRDDNVYLQKIKKEVLDWTNDFK

SEQ ID NO: 4224 - DNA, 1296 bp, Burkholderia ambifaria MC40-6
  CDS (1)..(1296): transl_table=11
atgtactcggccgcaccggtcaacctgtacacacttaacggaaaccgtatgtttgacagagcccaaagcaccatcgcgaacgtcgatcccgaactctttgctgcgatcgagcaggaaaaccgccgccaggaagatcacatcgagctgatcgcgtcggaaaactacacgagcccggccgtgatggccgcccagggctcgcagctcacgaacaagtacgcggaaggttatccgggcaagcgctactacggcggctgtgaatacgtcgacgtggtcgagcagctggcgatcgaccgtgtgaagcagctgttcggcgcggaagccgcgaacgtgcagccgaactcgggttcgcaggcgaaccagggcgtgttcttcgcgatgctcaagccgggcgacacgatcatgggcatgagcctggcgcacggcggtcacctgacgcacggctcgccggtgaacatgtcgggcaagtggttcaacgtggtgagctacggtctgaacgagcaggaagacatcgactacgacgcggccgagcagctcgcgcaggaacacaagccgaagctgatcgtcgcgggcgcgtcggcgttcgcgctgaagatcgacttcgagcgtctggcgaagatcgcgaagtcggtgggtgcgtacctgatggtcgacatggcgcactacgcgggcctgatcgcggcgggcgtgtatccgaacccggtgccgcatgcggacttcgtgacgacgacgacgcacaagagcctgcgcggcccgcgcggtggcgtgatcctgatgaaggccgagtacgagaagccgatcaactcggcgatcttcccgggcatccagggtgggccgctgatgcacgtgatcgcggcgaaggccgtggcgttcaaggaagcgctgtcgccggaattcaaggcgtaccaggaaaaggtggtcgagaacgcgcgcgtgctggctgaaacgctggtcaagcgcgggctgcggatcgtgtcgggccgcaccgaaagccacgtgatgctggtggacctgcgcgcgaagaacatcaccggcaaggctgcggaagcggcgctgggtgctgcacacatcacggtgaacaagaacgcgatcccgaacgatccggaaaagccgttcgtgacgagcggcatccgtctgggttcgccggcgatgacgacgcgcggcttcggcccggcggaagccgaactggtcggcaacctgattgccgacgtgctcgagaacccggaagatgcggcgacgatcgagcgtgtgcgcgcgcaagtggccgagctgaccaagcgtttcccggtctatcgctga

SEQ ID NO: 4225 - protein, 431 aa, Burkholderia ambifaria MC40-6
MYSAAPVNLYTLNGNRMFDRAQSTIANVDPELFAAIEQENRRQEDHIELIASENYTSPAVMAAQGSQLTNKYAEGYPGKRYYGGCEYVDVVEQLAIDRVKQLFGAEAANVQPNSGSQANQGVFFAMLKPGDTIMGMSLAHGGHLTHGSPVNMSGKWFNVVSYGLNEQEDIDYDAAEQLAQEHKPKLIVAGASAFALKIDFERLAKIAKSVGAYLMVDMAHYAGLIAAGVYPNPVPHADFVTTTTHKSLRGPRGGVILMKAEYEKPINSAIFPGIQGGPLMHVIAAKAVAFKEALSPEFKAYQEKVVENARVLAETLVKRGLRIVSGRTESHVMLVDLRAKNITGKAAEAALGAAHITVNKNAIPNDPEKPFVTSGIRLGSPAMTTRGFGPAEAELVGNLIADVLENPEDAATIERVRAQVAELTKRFPVYR

SEQ ID NO: 4226 - DNA, 1248 bp, Burkholderia phytofirmans PsJN
  CDS (1)..(1248): transl_table=11
atgtttgacagagcccaaagcaccatcgccaacgtcgatcctgaactctggaaggtcatcgagcaggaaaaccgccgtcaggaagagcatatcgaactgatcgcgtcggaaaactacacgagcccggctgttatggctgcgcaaggctcgcaactcacgaacaagtacgctgaagggtatccgggcaagcgctattacggcggctgcgaatacgtcgacgtcgccgagcagctggcgatcgaccgcgtcaagcaactgttcggcgccgaagccgcgaacgtgcagccgaactccggctcgcaggccaaccagggcgtgttcttcgccatgctcaagccgggcgacacgatcatgggcatgagcctcgcgcacggtggccacctcacgcacggttcgccggtcaacatgtcgggcaagtggttcaacgtggtcagctacggtctgaacgaagccgaagacatcgactacgacgctgcggagaagctcgctcaggaacacaagccgaagctgatcgtggcgggcgcctccgcgttctcgctgcgtatcgacttcgaacgcatgtcgaaaatcgcgaagtcggtcggcgcgtacttcatggtcgacatggcgcattacgccggtctgatcgccgcgggcgtctatccgaacccggtgccgcacgccgatttcgtcaccaccaccacgcacaaaagcctgcgtggcccgcgcggcggcgtgatcctgatgaaggccgagttcgaaaaacagatcaactcggcaatcttcccgggcattcaaggtggtccgctcatgcacgtgatcgccggcaaggccgtcgcgttcaaggaagccctgtcgccggaattcaaggcctatcagcagcaagtcgtcgaaaacgcgcgcgtgctggctgagacgctcgtcaagcgcggtttgcgtatcgtgtcgggccgtaccgaaagtcatgtgatgctcgtcgacctgcgcgcgaagaagatcaccggcaaggctgcggaagccgcgctgggcgccgcgcacatcaccgtcaacaagaacgcgatcccgaacgatccggaaaagccgttcgtgacgagcggcgtgcgcctcggctcgccggccatgaccacgcgcggcttcggcgtcaaggaagccgagcaggtgggcaacctgatcgccgacgtgctggacaacccggaagacgccgccacgatcgaacgtgtgcgcggccaggtcgctgagctgacccagcgcttcccggtttaccgctaa

SEQ ID NO: 4227 - protein, 415 aa, Burkholderia phytofirmans PsJN
MFDRAQSTIANVDPELWKVIEQENRRQEEHIELIASENYTSPAVMAAQGSQLTNKYAEGYPGKRYYGGCEYVDVAEQLAIDRVKQLFGAEAANVQPNSGSQANQGVFFAMLKPGDTIMGMSLAHGGHLTHGSPVNMSGKWFNVVSYGLNEAEDIDYDAAEKLAQEHKPKLIVAGASAFSLRIDFERMSKIAKSVGAYFMVDMAHYAGLIAAGVYPNPVPHADFVTTTTHKSLRGPRGGVILMKAEFEKQINSAIFPGIQGGPLMHVIAGKAVAFKEALSPEFKAYQQQVVENARVLAETLVKRGLRIVSGRTESHVMLVDLRAKKITGKAAEAALGAAHITVNKNAIPNDPEKPFVTSGVRLGSPAMTTRGFGVKEAEQVGNLIADVLDNPEDAATIERVRGQVAELTQRFPVYR

SEQ ID NO: 4228 - DNA, 1239 bp, Natranaerobius thermophilus JW/NM-WN-LF
  CDS (1)..(1239): transl_table=11
atggaaaacgttaaaaagacagatccaactattttttcttggattgaagaagaatggaaaagacaggaggaaggtattgaattaatagcttctgaaaactttgcctctcgggcagtgatggaagctcaaggtagtgtcctaacgaataaatatgcagaaggatatcccggaaggagatattatggcggatgtcaatttgttgataaagtagaagaactggctatcagtagagttaaagagctatttaatgccgatcatgccaatgtccagccccattcaggagcctcagcaaatatgggggtttatctggcagcattgaagcccggtgatactgtcttgggtatgagcttagatcatggtggacatttaacccacggaagtccggtcaatatatctggtaaatatttcaattttcatcattatggtattttagaggatacaggtaaaattgattttgacaaagtccgggagttggcaaaagaacataaacctaaaatgatagtagctggcgctagtgcttatccacgcattattgattttgctacttttcgcgaaatcgctgatgaggtaggggcttatctaatggtagatatggctcacattgcagggcttgtggcagcggggctacacccaaacccagtcccttatgctgactttgtgaccacaactactcacaaaactttaaggggtccacgtggtggagtggttctatgtaaagaagagtacaaaaaagaaattgacaaagccatgtttccaggtctacagggaggacctctaatgcatgttattgcttccaaggccgtcagctttcaggaagctttaagttctgaatttaaaaattatcaaaaacaagtaataaaaaatgctagcgttttggctgatgaacttaataatttaggatacgatttggtagcaggaggctctgataatcatctaatgctagttgatcttcagaaaaaaggtgtaactggtaaaaaagctgaacgagttctggatgatgttcatatcactgtcaataaaaatgccgtacctaatgatccagaaggtccttttgtaacaagtggattgagactggggacacctgctgttactaccagaggttttgcagaagatgaaatcaaagaagttgctcagttgctcgataaagtaattaccggattagaagatcaggaaaatctagaaaaatgtaaaaaacaggtaaccgacttatgtcatagattccccttgtatcgtcaataa

SEQ ID NO: 4229 - protein, 412 aa, Natranaerobius thermophilus JW/NM-WN-LF
MENVKKTDPTIFSWIEEEWKRQEEGIELIASENFASRAVMEAQGSVLTNKYAEGYPGRRYYGGCQFVDKVEELAISRVKELFNADHANVQPHSGASANMGVYLAALKPGDTVLGMSLDHGGHLTHGSPVNISGKYFNFHHYGILEDTGKIDFDKVRELAKEHKPKMIVAGASAYPRIIDFATFREIADEVGAYLMVDMAHIAGLVAAGLHPNPVPYADFVTTTTHKTLRGPRGGVVLCKEEYKKEIDKAMFPGLQGGPLMHVIASKAVSFQEALSSEFKNYQKQVIKNASVLADELNNLGYDLVAGGSDNHLMLVDLQKKGVTGKKAERVLDDVHITVNKNAVPNDPEGPFVTSGLRLGTPAVTTRGFAEDEIKEVAQLLDKVITGLEDQENLEKCKKQVTDLCHRFPLYRQ

SEQ ID NO: 4230 - DNA, 1254 bp, Stenotrophomonas maltophilia K279a
  CDS (1)..(1254): transl_table=11
atgttcccgcgtgacgtccgcatcgaatcctacgatcccgaactggccaaggccatcgccgctgaaacccagcgccaggaagaccacgtcgagctgatcgccagcgagaactacaccagcccggcggtgatggaagcccagggcagccagctgaccaacaagtacgccgaaggctacccgggcaagcgctactacggtggctgcgaatacgtggacatcgccgagcagctggcgatcgaccgcctgaagcagctgttcggcgccgactacgcgaacgtgcagccgcacagcggttcgcaggccaaccaggccgtgtacttcgccctgctgcagccgggtgacaccatcctcggcatgagcctggcccacggcggccacctcacccacggcgccaaggtgaacgcctcgggcaagctgttcaacgccgtgcagtacggcgtcaacgatcagggcctgatcgattacgacgaagtcgagcgcctggccctggagcacaagccgaagatggtcgtggccggcttctcggcctactcgcaggtgatcgactgggcgcgcttccgcgccatcgccgacaaggtcggtgcctacctgttcgtcgacatggcccacgttgccggtctggtggctgcaggcgtctacccgagcccgctggaacacgcccacgtggtcacctccaccacccacaagaccctgcgcggcccgcgtggcggcatcatcgtcgccaagggcgccgacgaagacctggtcaagaagctgcagtcgatcgtgttcccgggcatccagggcggtccgctgatgcacgtcatcgccggcaaggccgtggccttcaaggaagcgctggaaccgggcttcaaggcctaccagcagcaggtggtgaagaacgcccaggcgatggccaatacgctgatcgagcgtggctacaagatcgtttccggcggcacccagaaccacctgatgctggtcgacatgatcggcaaggacgtgtccggcaaggacgcggaagcggcgctgggcaaggcccacatcaccgtcaacaagaactcggtgccgaacgacccgcgttcgccgttcgtgacctcgggcctgcgcctgggcaccccggcggtgaccacccgtggctacgtcgaacaggactgcgtggacctggccaactggatcgccgacgtgctcgacgcgccgaacgatgacgccgtcattgcccgcgtgcgcgatgccgtcagcgcgcagtgccgcaagtacccggtctacggctga

SEQ ID NO: 4231 - protein, 417 aa, Stenotrophomonas maltophilia K279a
MFPRDVRIESYDPELAKAIAAETQRQEDHVELIASENYTSPAVMEAQGSQLTNKYAEGYPGKRYYGGCEYVDIAEQLAIDRLKQLFGADYANVQPHSGSQANQAVYFALLQPGDTILGMSLAHGGHLTHGAKVNASGKLFNAVQYGVNDQGLIDYDEVERLALEHKPKMVVAGFSAYSQVIDWARFRAIADKVGAYLFVDMAHVAGLVAAGVYPSPLEHAHVVTSTTHKTLRGPRGGIIVAKGADEDLVKKLQSIVFPGIQGGPLMHVIAGKAVAFKEALEPGFKAYQQQVVKNAQAMANTLIERGYKIVSGGTQNHLMLVDMIGKDVSGKDAEAALGKAHITVNKNSVPNDPRSPFVTSGLRLGTPAVTTRGYVEQDCVDLANWIADVLDAPNDDAVIARVRDAVSAQCRKYPVYG

SEQ ID NO: 4232 - DNA, 1266 bp, Cellvibrio japonicus Ueda107
  CDS (1)..(1266): transl_table=11
atgtttgataaaacccaaacgattgctgcttttgatccggaaatctgggcgtccatccaaaatgaaggtcgtcgccaggaagagcatatcgagctgatcgcctcggaaaactacaccagccccctggtgatggctgcccaaggtaccaagctgaccaacaagtacgccgagggctatccaggtaagcgctactatggcggttgtgagtatgtagaccaatctgaagccctggccatcgagcgtgccaagcagctgttcggcgccgattatgccaacgtgcagcctcactcaggctcccaggccaacacagcggtttatgcagcactctgcgccccgggtgataccgtactgggtatgagcctggcccacggcggtcacctgacccacggcgccaaggtgaacttctccggcaagatctacaacgcggtgcagtacggcctgaacccggaaaccggtttggtggattatgacgaggttgaacgcctggcccttgagcacaagccaaagatgatcgtggcgggtttctctgcttactcacaagtattggattggcagcgcttccgcgatattgctgacaaagtaggtgcctacttgatggtggatatggcccacgtggcgggtttggttgcggctggcctgtaccccaatccggtacaaattgcggatgtcactacttctaccacccacaaaaccctgcgcggcccccgcggcggtatcatcctggcaaaagccaatgaagagattgagaaaaagctcaactccgccgtgttccccggtggccagggcggcccgttgatgcacgtgattgccgccaaggcgatcagctttaaggaggccatgacgcccgagtacaaagattaccaacagcaagtggtaaagaatgccaaggcaatggctgcgacctttattgagcgcggtatcaaaattgtttctggcggcaccgagaaccacctgatgctggttgacctgattggcaagccatacagcggtaaagatgcagatgaagccctgggtaaagcgcacatcactgttaacaagaatgctgtacccaatgatccgcgttcgcccttcgtgacctctggtattcgtgttggtactccggcaattactacccgtggttttaaagaggcggaatgtatccagttaactaactggatttgcgatattttcgctgccctggaagctggtaatgccgatgcagtcattgagcaggttaaaaccagggtggctagcctttgcaaggagttcccggtatacgcggattaa

SEQ ID NO: 4233 - protein, 421 aa, Cellvibrio japonicus Ueda107
MFDKTQTIAAFDPEIWASIQNEGRRQEEHIELIASENYTSPLVMAAQGTKLTNKYAEGYPGKRYYGGCEYVDQSEALAIERAKQLFGADYANVQPHSGSQANTAVYAALCAPGDTVLGMSLAHGGHLTHGAKVNFSGKIYNAVQYGLNPETGLVDYDEVERLALEHKPKMIVAGFSAYSQVLDWQRFRDIADKVGAYLMVDMAHVAGLVAAGLYPNPVQIADVTTSTTHKTLRGPRGGIILAKANEEIEKKLNSAVFPGGQGGPLMHVIAAKAISFKEAMTPEYKDYQQQVVKNAKAMAATFIERGIKIVSGGTENHLMLVDLIGKPYSGKDADEALGKAHITVNKNAVPNDPRSPFVTSGIRVGTPAITTRGFKEAECIQLTNWICDIFAALEAGNADAVIEQVKTRVASLCKEFPVYAD

SEQ ID NO: 4234 - DNA, 1248 bp, Cupriavidus taiwanensis
  CDS (1)..(1248): transl_table=11
atgttcgaacgcagccgttttacgatcgaccagatcgaccccgaggtctttgccgccatccagcaggaaaaccagcgccaggaagaccacatcgagctgatcgcctccgagaactacacctcgcccgcggtgatggccgcgcagggttcgcagctgaccaacaagtatgccgagggctatcccggcaagcgctactacggcggttgcgagtacgtcgacatcgtcgagcagctggccattgatcgcgtcaagcagctgttcggcgccgaggccgccaacgtgcagcccaactcgggctcgcaggccaaccagggcgtgtacttcgccgtgctcaagccgggcgacaccatcatgggcatgagcctggccgaaggcggccacctgacccacggcatggcgctgaacatgagcggcaagtggttcaacgtggtcagctacggcctgaacgcccaggaagacatcgactacgacgcgctggaaaagctggcgcaagagaagaagcccaagctgatcatcgccggtgcctcggccttcgcgctgcgcatcgacttcgagcgcatcggcaaggtggccaagtcgatcggcgcctatttcatggtcgacatggcccactacgccggcctgatcgccgcgggcgtctacccgaacccggttccgcacgccgacttcgtcaccaccaccacccacaagagcctgcgcggcccgcgcggcggcgtgatcctgatgaaggccgagcacgagaaggcgatcaactcgtcgatcttccccggcatccagggcggcccgctgatgcacgtaatcgccggcaaggcggtggcgttcaaggaagcgctgacgccggaattcaaggcctaccagcagcaggtggtgaagaacgccgcggtgctggccgagaccctgatcgcgcgcggcctgcgcatcgtctcgggccgcaccgagagccacgtgatgctggtcgacctgcgcgccaagaacatcaccggcaaggaagccgagcgcatcctgggcgaggcgcacctgaccgtgaacaagaacgcgattccgaacgacccggaaaagccgttcgtcacctcgggcatccgcgtcggctcgccggccatgaccacgcgcggcttcaaggaagaagaagcccgcatcgtcggcaacctgatcgccgacgtgctggacaacccgcacgacgccgccaacatcgccgcggtgcgcgagcaggtgtcggccctgaccaagcgtttcccggtctacggctga

SEQ ID NO: 4235 - protein, 415 aa, Cupriavidus taiwanensis
MFERSRFTIDQIDPEVFAAIQQENQRQEDHIELIASENYTSPAVMAAQGSQLTNKYAEGYPGKRYYGGCEYVDIVEQLAIDRVKQLFGAEAANVQPNSGSQANQGVYFAVLKPGDTIMGMSLAEGGHLTHGMALNMSGKWFNVVSYGLNAQEDIDYDALEKLAQEKKPKLIIAGASAFALRIDFERIGKVAKSIGAYFMVDMAHYAGLIAAGVYPNPVPHADFVTTTTHKSLRGPRGGVILMKAEHEKAINSSIFPGIQGGPLMHVIAGKAVAFKEALTPEFKAYQQQVVKNAAVLAETLIARGLRIVSGRTESHVMLVDLRAKNITGKEAERILGEAHLTVNKNAIPNDPEKPFVTSGIRVGSPAMTTRGFKEEEARIVGNLIADVLDNPHDAANIAAVREQVSALTKRFPVYG

SEQ ID NO: 4236 - DNA, 1260 bp, Streptomyces clavuligerus ATCC 27064
  CDS (1)..(1260): transl_table=11
atgtcgctcctcaacacccctctccatgagctggaccccgatgtcgccgccgccgtcgacgccgagctccaccgtcagcagtccaccctggaaatgatcgcctcggagaacttcgctccggtcgccgtcatggaggcccagggttcggtcctcaccaacaagtacgccgagggctaccccggccgccgctactacggcggctgtgagcacgtcgacgtggtcgagcagatcgcgatcgaccgcatcaaggagctgttcggcgccgagcacgcgaacgtccagccgcactccggcgcgcaggcgaacgcggcggcgatgttcgccctgctcaagcccggcgacacgatcatgggtctgaacctcgcccacggcgggcacctgacccacggcatgaagatcaacttctccggcaagctctacaacgtggtcgcctaccacgtggacgaggccaccggccaggtcgacatggcgcaggtggagcagctcgccaaggagcaccggccgaagctgatcgtggcgggctggtcggcgtacccccggcagctcgacttcgccgccttccgccgggtcgcggacgaggtcggcgcctatctgatggtcgacatggcccacttcgcgggcctggtcgcggcggggctgcaccccaacccggtgccgcacgcccatgtggtgaccaccaccacccacaagaccctgggcggcccgcgcggcggtgtgatcctctccacgcaggagctggccaagaagatcaactccgcggtcttccccggtcagcagggcggcccgctggagcatgtgatcgcggcgaaggcggtctccttcaaggtcgcggcgtccgaggagttcaaggagcgccagcagcgcaccctggagggcgcgcggatcatcgccgagcggctggtccagggcgacgtccgggagtacggcgtctccgtgctctccggcggcaccgatgtccacctcgtcctggtcgacctgcgcgactccgagctggacggccagcaggccgaggaccggctgcacgaggtcgggatcaccgtcaaccgcaacgcgatcccgaacgacccgcggcccccgatggtcacctcgggtctgcgcatcggcaccccggcgctcgccacccgaggcttcggcgcggaggacttccgtgaggtcgccgacatcatcgccgaggcgctgaagccgtcctacgacgcgcgggcgctgcgggaccgggtctcggcgctcgcggcgaagcacccgctgtacccggggctgtaa

SEQ ID NO: 4237 - protein, 419 aa, Streptomyces clavuligerus ATCC 27064
MSLLNTPLHELDPDVAAAVDAELHRQQSTLEMIASENFAPVAVMEAQGSVLTNKYAEGYPGRRYYGGCEHVDVVEQIAIDRIKELFGAEHANVQPHSGAQANAAAMFALLKPGDTIMGLNLAHGGHLTHGMKINFSGKLYNVVAYHVDEATGQVDMAQVEQLAKEHRPKLIVAGWSAYPRQLDFAAFRRVADEVGAYLMVDMAHFAGLVAAGLHPNPVPHAHVVTTTTHKTLGGPRGGVILSTQELAKKINSAVFPGQQGGPLEHVIAAKAVSFKVAASEEFKERQQRTLEGARIIAERLVQGDVREYGVSVLSGGTDVHLVLVDLRDSELDGQQAEDRLHEVGITVNRNAIPNDPRPPMVTSGLRIGTPALATRGFGAEDFREVADIIAEALKPSYDARALRDRVSALAAKHPLYPGL

SEQ ID NO: 4238 - DNA, 1245 bp, Acidithiobacillus ferrooxidans ATCC 53993
  CDS (1)..(1245): transl_table=11
atgttttccaaaaccctgaccatcgctgattttgaccccgtgctttgggatgccatgcgcaaagaggcccggcgccaggaggatcatgtcgagctcatcgcttccgagaactatgccagccccatggtaatggcggcgcagggctcggtgctgaccaacaaatacgcagaaggctatcctggtaaacgctactatggcggctgcgagtacgtagatatcgccgagcagctcgccatggaccgtgcgctggagcttttcggcgctgaacatgccaatgtccaggctcattccggctcgcaggccaatcaggctgtttacttgtccgtgctccagcccggtgacaagatcatgggcatgagtcttgcccatggcggccacctgacccatggcgccaaagtgaacgtgtccggcaagctttttcaggtggcggcttacggcgtgcgcgcggaagacggccgcatcgattatgacgccatggcggagcaggcggagcgggaacgcccgaagatgatcgttgccggtgccagtgcctactctcgcgtcatcgacttcgcccgcatcggcgagattgcccgcagcatcggcgcctatctgctggtggacatggcgcacatcgccggccttgtggccacgggcctgcatcccagccccgtgccccatgcggattttgtcaccaccaccacccacaagaccctgcgcggtcctcgcggcggattgatcctctgtcgggagcaatatgccaaaaaggtgaactccctgatcttccccggcttacagggggggccgctgatgcatgtcatcgctgccaaggccgtcgccttccgtgaagcgctgcagccggagttcaagtcctatcagcagcaggtcattcataacgcgcaaaccttgagcaaggtgttggccgggcgtggttatggcgcggtttcgggtggcaccgacaaccatctcttcttgctgaacctgggcgaaaaagtcacgggtaaggaggcggaagaggcactgggacaggccaatatcaccgtcaacaagaatgccgtgcccttcgatatccgccccccggcggttaccagcggcatccggattggtacgccggccgctaccacgcgtggctttggcgaggccgaaatgcatcgcctgggcaacggcattgctgatgtcctggatgcgagcagcgatgctgcggtcattgagcgggtccgtgcagatatgaaggccctctgccatcagtttccggtatacggctga

SEQ ID NO: 4239 - protein, 414 aa, Acidithiobacillus ferrooxidans ATCC 53993
MFSKTLTIADFDPVLWDAMRKEARRQEDHVELIASENYASPMVMAAQGSVLTNKYAEGYPGKRYYGGCEYVDIAEQLAMDRALELFGAEHANVQAHSGSQANQAVYLSVLQPGDKIMGMSLAHGGHLTHGAKVNVSGKLFQVAAYGVRAEDGRIDYDAMAEQAERERPKMIVAGASAYSRVIDFARIGEIARSIGAYLLVDMAHIAGLVATGLHPSPVPHADFVTTTTHKTLRGPRGGLILCREQYAKKVNSLIFPGLQGGPLMHVIAAKAVAFREALQPEFKSYQQQVIHNAQTLSKVLAGRGYGAVSGGTDNHLFLLNLGEKVTGKEAEEALGQANITVNKNAVPFDIRPPAVTSGIRIGTPAATTRGFGEAEMHRLGNGIADVLDASSDAAVIERVRADMKALCHQFPVYG

SEQ ID NO: 4240 - DNA, 1254 bp, Borrelia duttonii Ly
  CDS (1)..(1254): transl_table=11
atgatagataacattctatttgatttaattgaaagagaagctaaaagagagagagaaaatattgagttaattgcttcagagaattttgtttcatcagatgttagacaagctgttggaagtgttttgaccaataaatatgccgaagggtatccttcaaagagatattatggtggatgttctgttgttgatgatattgaaaatttagccatatcacgagctatggaattattcggtgcaagttatgctaatgttcagcctcatagtggttctcaagctaatatggctgctataatgtcacttattaagcctggggataaaattcttgggatggaattgtctcatggtggtcatttgactcatggtagtaaggttagtttttctggtatgttttttgatgcatattcttatggtgtttcaagagattctgagatgattgattacgatgatgttaaaaacatagctaaggcatgtagaccaaatttgatcattgctggtgcatcttcttattcaagagaaattgattttaagaagtttcgtgaaatagcaaatgaagtttcagcttatcttttatgtgatattgctcatacggcaggtcttgttgctacgggttttcataattctcctattgatgttgcacatttaactacaagtactactcataaaactttaagaggtcctagaggaggcttaattcttgcaggtaaagagtttaatacaatgatcaattataataataaagagagaactttagattcagctgttaattcttgtgtttttccaggaacccaagggggacctttaatgcatgttattgcgggcaaagcagtggctttcaaagaggcattaaataaagagtttaaagattatatttctagggttatagagaatactaaagctatggctgagtattttatttcagagggtcttagaatagttagtggtggtacagataatcatttgtttttggttgatcttagtggtttaggtattacgggagctgatgctgagaagattcttgaaagtgtaaatattacgcttaataaaaatgcaattccttttgattctaaaaatccttctgtagcttctggaattagaattggtgctcctgctattacttcacgaggtttaaatagagatgattctattaaagttgctcattttattattagagctttaaagacaaaatctactgatgaacttagaaagataaaacaagaagttatagggtttattagtagttttgatatgccttag

SEQ ID NO: 4241 - protein, 417 aa, Borrelia duttonii Ly
MIDNILFDLIEREAKRERENIELIASENFVSSDVRQAVGSVLTNKYAEGYPSKRYYGGCSVVDDIENLAISRAMELFGASYANVQPHSGSQANMAAIMSLIKPGDKILGMELSHGGHLTHGSKVSFSGMFFDAYSYGVSRDSEMIDYDDVKNIAKACRPNLIIAGASSYSREIDFKKFREIANEVSAYLLCDIAHTAGLVATGFHNSPIDVAHLTTSTTHKTLRGPRGGLILAGKEFNTMINYNNKERTLDSAVNSCVFPGTQGGPLMHVIAGKAVAFKEALNKEFKDYISRVIENTKAMAEYFISEGLRIVSGGTDNHLFLVDLSGLGITGADAEKILESVNITLNKNAIPFDSKNPSVASGIRIGAPAITSRGLNRDDSIKVAHFIIRALKTKSTDELRKIKQEVIGFISSFDMP

SEQ ID NO: 4242 - DNA, 1242 bp, Anoxybacillus flavithermus WK1
  CDS (1)..(1242): transl_table=11
ttgtcaatgagtcgcttgtcacagcaagatccgcaagtatttcaagctattcaagatgaattgaaacgacaacaaacaaaaattgaattaattgcatcagaaaacttcgttagcgaagcggtgatggaagcgcaaggatcagtattaacgaacaagtatgctgaaggatatccaggccgtcgctattacggcggttgtgaacatgttgacgtcgtggaagagcttgcgcgcgaacgtgcaaaacaattgttcggagcggaacatgcaaatgttcaaccacactcgggagcgcaagcgaatatggcggtatattttacaattttacaacatggggatactgtgcttggcatgaacttatcgcacggtgggcatttaacgcacggaagcccggtaaactttagcggtatccaatacaatttcattgaatacggcgttgacccagaaacgcaccgtattaattacgatgacgttcgtgaaaaagcattaaagcataaaccgaaattaatcgttgctggggcaagcgcatatccgcgcacgattgactttgcgaagtttcgtgaaatcgctgatgaagtaggcgcctatttcatggtcgatatggcccacatcgcaggacttgtcgcggcaggattgcatccaaatcctgttccgtatgcccattttgtaacgacaacgacgcataaaacgttgcgcggtccgcgcgggggcatgattttatgccaagagcagtttgctaaacaaattgataaagcgattttcccaggcattcaaggcggcccgcttatgcatgttatcgcagctaaagctgtggcgctcggtgaggcgttacaagacgatttcaaaacgtatgcgcaaaacattgtaaacaatgcgaaacgtttagcggaagcgctcgtagcagaaggatttacactcgtttctggcggaacggacaaccatttattgctcattgacctccgttctatcggattaacaggaaaagtggctgaaaaagtgcttgatgagatcggtattacagtcaataaaaacacgattccatatgacccagaaagtccgtttgtcacaagcggcattcgcatcggtacagcggcggtaacaagccgtggcttcgggcttgaagaaatggatgaaattgcgcgcatcatttcgattgcgctcaaacataaagacgatgaacaaaagttagacgaagcgcgccgtcgcgttgctgcattaacggaaaagttcccattatacgtataa

SEQ ID NO: 4243 - protein, 413 aa, Anoxybacillus flavithermus WK1
MSMSRLSQQDPQVFQAIQDELKRQQTKIELIASENFVSEAVMEAQGSVLTNKYAEGYPGRRYYGGCEHVDVVEELARERAKQLFGAEHANVQPHSGAQANMAVYFTILQHGDTVLGMNLSHGGHLTHGSPVNFSGIQYNFIEYGVDPETHRINYDDVREKALKHKPKLIVAGASAYPRTIDFAKFREIADEVGAYFMVDMAHIAGLVAAGLHPNPVPYAHFVTTTTHKTLRGPRGGMILCQEQFAKQIDKAIFPGIQGGPLMHVIAAKAVALGEALQDDFKTYAQNIVNNAKRLAEALVAEGFTLVSGGTDNHLLLIDLRSIGLTGKVAEKVLDEIGITVNKNTIPYDPESPFVTSGIRIGTAAVTSRGFGLEEMDEIARIISIALKHKDDEQKLDEARRRVAALTEKFPLYV

SEQ ID NO: 4244 - DNA, 1245 bp, Dictyoglomus turgidum DSM 6724
  CDS (1)..(1245): transl_table=11
gtgaggtatttaccagaggttgatcctgaaatttatgaggctattaaaagcgaggagtacagggaagagtatcatttagaacttattgcttctgaaaattttgtgagtagggcggtcttagaggctcagggttcggttttgactaataaatatgctgagggataccctggaaaaaggtattatggtggatgtctctatgtggataaagtagaagatatagcaagagagagggtaaaagctatatatggagctgaacatgctaatgtccaacctcactctggtagtcaagctaatatggctgtttattttgtagttctcaatcctggggatagagtcttaggaatgaatttagctcatggagggcacttaactcatggaagtcctgttaatttttctggaaagttatataatttttatttctatggagtagataaaaatacagaaatgataaattacgattcggtttggaatttagctaaagaactgaaacctaagttgatagtagctggtgcaagtgcttatcctaggattatagattttgaaaaatttgctcaaatagcagaagatgtgggagcatatttcatggtagatatggctcatatagctggacttgttgctgcaggactacatccttctcctgttccatacgcacatttcgttacaagcaccactcataaaaccttgaggggtccaagaggtggatttattctgtgtaaaaaggaatttgctaaggaaattgataaggctgtatttccgggtattcaaggtggacctttgatgcatgtaatagctgctaaggctgtggcttttaaagaggcaatgagtcctgaatttaaggaatatcaaaagcagatagttttaaatgcgaaggctatggcggaggaacttataaaacttggatataggcttgttagtggaggaacagataatcatttaatgttagtggaccttagagataagggaataactggaaaagaagcagaaaaggctcttgaggaggcaggtattacggtaaataaaaatgctattccttttgatcctcaacctcctacaataaccagtgggattagaataggaactcctgctttaactactcggggtatgaaggaagacgagatgaggtatatagcgagattgattcatgaggttctctctaactttaaggatgagagggtgaaagagaaggttaaaaaagaggtagaagaactttgtaagcaatttccaatttatagaaaggagaattaa

SEQ ID NO: 4245 - protein, 414 aa, Dictyoglomus turgidum DSM 6724
MRYLPEVDPEIYEAIKSEEYREEYHLELIASENFVSRAVLEAQGSVLTNKYAEGYPGKRYYGGCLYVDKVEDIARERVKAIYGAEHANVQPHSGSQANMAVYFVVLNPGDRVLGMNLAHGGHLTHGSPVNFSGKLYNFYFYGVDKNTEMINYDSVWNLAKELKPKLIVAGASAYPRIIDFEKFAQIAEDVGAYFMVDMAHIAGLVAAGLHPSPVPYAHFVTSTTHKTLRGPRGGFILCKKEFAKEIDKAVFPGIQGGPLMHVIAAKAVAFKEAMSPEFKEYQKQIVLNAKAMAEELIKLGYRLVSGGTDNHLMLVDLRDKGITGKEAEKALEEAGITVNKNAIPFDPQPPTITSGIRIGTPALTTRGMKEDEMRYIARLIHEVLSNFKDERVKEKVKKEVEELCKQFPIYRKEN

SEQ ID NO: 4246 - DNA, 1245 bp, Desulfovibrio desulfuricans subsp. desulfuricans str. ATCC 27774
  CDS (1)..(1245): transl_table=11
atggatgaaattctgctgcaagacccggaaatcgcaaaggccattgctctggaatcgcaaaggcagatgggcaagcttgagcttatcgcctcggaaaacattgtttccacggcggtgcgcgaagcccagggcagcgtactgaccaacaaatacgccgaaggctatcccggcaagcgctactacggcggctgcgaatacgtggatatggtggaaaccctggcgcaggaaagagccaagctgctttttgacgcacaatacgtcaacgtgcagccccactccggctcacaggccaacatggccgcctacctggcagttctcaaacccggcgacaccattcttggcatggacctttcccacggcgggcacctcactcacggcagccccgtgaacttttccggccgtcttttcaagatcatctcgtatggggtgcagcgcgaaaccgggcgcatcgactatgacgatgtggccgcaaaagcccgcgaacacaagcccagtgtcattgttgccggcgccagcgcctacccccgcgccattgattttgcccgttttcgcgccattgccgatgaggtgggcgcaaagcttgtggtggacatggcccacatcgcgggtctcgtggctgcaggtctgcaccaaagcccggttccgcatgcccatatcaccaccacaaccacgcacaaaaccctgcgcggtccgcgcggcggcatgatactgtccacggaagatatgggcaaaaccctgaacagccagattttccccggcattcagggcggtcccctcatgcatgtcattgccgccaaggccgtggccctgggcgaagccctgcaccctgccttcaaggtgtatcagcagcaggtgctggataacgccgcaaccctggccgcatgccttacggaagcgggttacgaccttgtctccggcggtacggacaaccacctcatgctggttgacctgaccagcagggatattaccggcaaggacgctgaaattgccctggatacggcgggcatcacggtcaataaaaacaccgtgccctttgaaacgcgctcgcccttcgttacgtccggcatacgcctgggcactgccgcccttaccacgcgcggcatgaagcaggagcacatgcgcactgtggggcagtttatcattgcagcgcttgaaaaacggaacgacactgcggaacttgaaaaaattcgtaaaaacgttgaagaattcgcacatcagttccccctgttcgcccaccttgcctga

SEQ ID NO: 4247 - protein, 414 aa, Desulfovibrio desulfuricans subsp. desulfuricans str. ATCC 27774
MDEILLQDPEIAKAIALESQRQMGKLELIASENIVSTAVREAQGSVLTNKYAEGYPGKRYYGGCEYVDMVETLAQERAKLLFDAQYVNVQPHSGSQANMAAYLAVLKPGDTILGMDLSHGGHLTHGSPVNFSGRLFKIISYGVQRETGRIDYDDVAAKAREHKPSVIVAGASAYPRAIDFARFRAIADEVGAKLVVDMAHIAGLVAAGLHQSPVPHAHITTTTTHKTLRGPRGGMILSTEDMGKTLNSQIFPGIQGGPLMHVIAAKAVALGEALHPAFKVYQQQVLDNAATLAACLTEAGYDLVSGGTDNHLMLVDLTSRDITGKDAEIALDTAGITVNKNTVPFETRSPFVTSGIRLGTAALTTRGMKQEHMRTVGQFIIAALEKRNDTAELEKIRKNVEEFAHQFPLFAHLA

SEQ ID NO: 4248 - DNA, 1281 bp, Thermomicrobium roseum DSM 5159
  CDS (1)..(1281): transl_table=11
atggacgagcgattgtgggagtgggatttcgaggtcgccgaagcgatcgcgtgcgaggagcggcggcaaagccggacgatcgagctgatcgcatcggagaacttcaccagtccggcggtcctggcggcggttggttccgtgctgaccaataaatatgcggaagggtatcctggacggcgctattatggcggatgcgagtgtgtcgatcgtgtggaggaactcgcgatccagcgcgcgaagcagttgttcggtgcgccacacgtcaatgttcagcctcattcgggcgcacaggcgaacatggctgcttactttgccgttttgcagccaggtgaccggatcctcgggatgagcctgcagcatggcggtcatctgacgcatggcgcgaaggtcaatctctcaggtcgatggttcgaggtggctttctacggggtcgatccggagaccgagcggatcgattatgacgcggtttggcatatcgcgcgcgaaatacgacccaagctgatcatttccggagcgagtgcgtatccgcgagtgatcgactttgcacggttgcgcgagatcgccgacgacgtgggagcgatcctgatggccgacatcgcgcacatcgccggtctcgtggcggttggcttgcatccgtctcccatcggtgtcgcccagctcgtcacgaccacgacgcacaagacgctgcggggatcacgtgggggaatgatcatgtgcgatgcggaattcgctgaagcagtcgacaaggcggtgttccccggaacacagggcgggccgctcatgcatgtcattgctgggaaagcggtcgccttgggcgaggctttgcgcccgacgttccggacctacatcgagcgcgtgctggagaatgcgcgggtgttggcggaaacgttgcaggcggaagggttccgcctcgtttcgggagggaccgacaatcatctcctgctggtcgaccttcgctcgcatggactctctggtcggaaggccgaacgggtgctagacgaagtgggtatcaccgtcaacaaaaacacgatcccgaacgacccgaaaccgccgacgcaagccagtggtatcaggctggggacgccagcgatgacgacgcgtggtttcggcccggacgagatgcgcctgactgcccgctggatcgccgacgtgttgcgtgcacctgacgacgaatcggtcaaggcgcgagtgcgtgctgaagtcgccgagctggtttcccgattcccggttcccggcgttaccatagaagcacgaactggcgtcgatgatggtactgtttga

SEQ ID NO: 4249 - protein, 426 aa, Thermomicrobium roseum DSM 5159
MDERLWEWDFEVAEAIACEERRQSRTIELIASENFTSPAVLAAVGSVLTNKYAEGYPGRRYYGGCECVDRVEELAIQRAKQLFGAPHVNVQPHSGAQANMAAYFAVLQPGDRILGMSLQHGGHLTHGAKVNLSGRWFEVAFYGVDPETERIDYDAVWHIAREIRPKLIISGASAYPRVIDFARLREIADDVGAILMADIAHIAGLVAVGLHPSPIGVAQLVTTTTHKTLRGSRGGMIMCDAEFAEAVDKAVFPGTQGGPLMHVIAGKAVALGEALRPTFRTYIERVLENARVLAETLQAEGFRLVSGGTDNHLLLVDLRSHGLSGRKAERVLDEVGITVNKNTIPNDPKPPTQASGIRLGTPAMTTRGFGPDEMRLTARWIADVLRAPDDESVKARVRAEVAELVSRFPVPGVTIEARTGVDDGTV

SEQ ID NO: 4250 - DNA, 1248 bp, Anaerocellum thermophilum DSM 6725
  CDS (1)..(1248): transl_table=11
atgtatttttacaatttagtaaaaaatacagatccagaaatagctgaggcaataaagagcgagcttaaaagacagcagaataaaattgagcttattgcatctgagaactttgtttcaattgcagtaatggcagcaatgggttcacctttgacaaataaatatgcagaaggatatccaggaaagagatattatggtggatgcgaatatatcgatgttgttgaatctatagcaattgagagagctaaaaagctgtttggagctgaacatgctaatgtccagccgcactcaggtgcacaggcgaacatggctgtgtattttgcagtattaaatccgggcgatactatccttggaatgaatctttcgcatggtggacatctgactcatggcagccctgtgaacttttcagggaagctttacaatattatttcatatggggttgaccctgaaacagagacaataaattatgatgaagttttaaaacttgcaaaggagcacagaccaaaacttatcttggcaggcgcatcggcgtatccgagagtaatagattttaaaaagttcagagagatagctgatgaagtgggagcttatttgatggtagatatggctcacattgctgggcttgttgctgcaggacttcatccatcacctgttgaatatgctgattttgttacaaccacaacacacaaaacgctcagaggtccacgcggtggtcttattctttgcaaagaaaagtatgcaaaattaattgacaagtccattttccctggaatacaaggtggcccgcttgaacatgtaatagctgcaaaagctgttgctctcaaagaagctatgacagaagagttcaaaaactaccaggttcaaatattgaaaaatgcaaaagctctgagtacaagacttattgaaagaggattcagacttgtgagtggtggaactgataatcatttaatgttagtagatttgagaaataaaggtataacaggaaaagacgccgaaaagatattggatgagcataatataacatgtaacaaaaatgcggttccttttgatactcaaagtccgatgataacaagcgggataagacttgggacgccggctgtcacaaccagagggtttaaagaaggggatatgcttgaggttgcagatattatccatgatgctttgacaaattctgatactaaagagaatattttaatcagagtgaaagctctttgcgaaaaacatcctttgtataaagaatttgatgaataa

SEQ ID NO: 4251 - protein, 415 aa, Anaerocellum thermophilum DSM 6725
MYFYNLVKNTDPEIAEAIKSELKRQQNKIELIASENFVSIAVMAAMGSPLTNKYAEGYPGKRYYGGCEYIDVVESIAIERAKKLFGAEHANVQPHSGAQANMAVYFAVLNPGDTILGMNLSHGGHLTHGSPVNFSGKLYNIISYGVDPETETINYDEVLKLAKEHRPKLILAGASAYPRVIDFKKFREIADEVGAYLMVDMAHIAGLVAAGLHPSPVEYADFVTTTTHKTLRGPRGGLILCKEKYAKLIDKSIFPGIQGGPLEHVIAAKAVALKEAMTEEFKNYQVQILKNAKALSTRLIERGFRLVSGGTDNHLMLVDLRNKGITGKDAEKILDEHNITCNKNAVPFDTQSPMITSGIRLGTPAVTTRGFKEGDMLEVADIIHDALTNSDTKENILIRVKALCEKHPLYKEFDE

SEQ ID NO: 4252 - DNA, 1242 bp, Carboxydibrachium pacificum DSM 12653
  CDS (1)..(1242): transl_table=11
atggatattgaaataataagaaaaacagacccagaaatcgcagaagtcatattaaaagaactcaacagacagagaaacaaaatagagcttatagcctctgaaaactttgtgagcagggccgtaatggaagcaatgggtacccctctcacaaataaatacgcagaagggtatcccggaaggcgttattacggtggctgtgaatatgtagatatggcagaggaacttgcaagggaaaggcttaaaaagcttttcggagcggaacacgcaaatgtgcagcctcactcgggagctcaggcaaatatggcagcttattttgcacttctaaaacctggagatactgtactaggaatggatttagctcacggcggacatttaacccatggaagcaaagtcaatttttctgggcaaatatataactttgtatcctatggcgtaagagaagatacaggatacatagactatgaccaagtagaagacctagcaaaaaagcataaaccaaaactaattgtagctggcgctagtgcttatccaagaataattgactttaagaaatttagagaaattgcagacaaggtaggagcatatctgatggtagacatggctcacattgccgggcttgtcgcagcaggtttacacccaaatcctgttccttatgcagacgtagtgacaactactactcataagactttaagaggacctagaggaggagctatactctgtaaacaagaacacgcaaaagccatcgacaaagcccttttccctggaacacaaggtggacccttaatgcatattatagcagcaaaagctgtatgttttaaagaagccctttcagatgagtttaaagaatatcaaaaaaggattgtagaaaacgcaaaagctttagcaaatgcattaatggaaagaggaataaatttggtatccggcggtactgacaaccacttaatgctattagatttgcgaaacacaggaataacaggaaaggaattggaaactagattagatgaagtaaacataacttgcaataaaaacgctataccttttgatccattaggaccaaatgtaacctctggcgtaagattaggtacacctgcagttaccaccagaggaatgaaaccggaagacatggtagaaatagcagatataatagctaatatgataaaagatgaaaattacaaagaaaaagcgaaagaaagggtagcaaaactacttgaaaaataccctctctacccagacctcttataa

SEQ ID NO: 4253 - protein, 413 aa, Carboxydibrachium pacificum DSM 12653
MDIEIIRKTDPEIAEVILKELNRQRNKIELIASENFVSRAVMEAMGTPLTNKYAEGYPGRRYYGGCEYVDMAEELARERLKKLFGAEHANVQPHSGAQANMAAYFALLKPGDTVLGMDLAHGGHLTHGSKVNFSGQIYNFVSYGVREDTGYIDYDQVEDLAKKHKPKLIVAGASAYPRIIDFKKFREIADKVGAYLMVDMAHIAGLVAAGLHPNPVPYADVVTTTTHKTLRGPRGGAILCKQEHAKAIDKALFPGTQGGPLMHIIAAKAVCFKEALSDEFKEYQKRIVENAKALANALMERGINLVSGGTDNHLMLLDLRNTGITGKELETRLDEVNITCNKNAIPFDPLGPNVTSGVRLGTPAVTTRGMKPEDMVEIADIIANMIKDENYKEKAKERVAKLLEKYPLYPDLL

SEQ ID NO: 4254 - DNA, 1284 bp, Marinitoga piezophila KA3
  CDS (1)..(1284): transl_table=11
atgtggaaacatgtaaaacaggttgatcccgaaatatacgaagttcttgtgaacgagttgaagcgtcaagagtacggcctggagctgatcgcctctgagaacttcgcgtcactcgctgtcatagaaaccatgggaagcatgctcaccaacaagtacgcggaaggatacccgcagaagaggtactacggtggctgcgaatgggtggatcgagcagaagaactcgctatagagagagcgaagaggttgtttggagccaaatttgcgaacgttcagccgcactccggttctcaggcgaacatggcggtttatctggcactcgcccagcccggagacacgatcatgggaatgtccctgtctcacgggggacacctcacccatggagcgccggtgaatttctcagggaagatcttcaaggtggtaccctacggagtcaatctggaaacggaaacgatagattacgatgaggtcagaagactcgccctggaacacaagccaaagataatcgttgcgggtggaagtgcttacgccaggatcatcgatttcaaaagattcagagagatagccgatgaggtgggagcatatttgatggtggatatggctcactttgccggactcgtcgctgcaggaattcatccgaatcctttggagtacgcccacgtggtgacttctaccacacacaagaccctcaggggacccagaggtggtttgatactcacgaacgatccggatatcgccaaagccgtggataaaactatcttccccggtatccagggtggtcctctcatgcacgtcatagcggcgaaagccgtctgtttcaaagaagccatgacggaggagttcaaagagtaccagaagcaggtggtcaaaaatgctaaaaagatggctgaagagttccagaaacgaggttacaggatcgtttctggaggaactgatacacacttgttcctggtggatctcacaccaaaagacataacgggtaaagcggcggaaaaggccctggaaagctgtggtatcacagtgaacaaaaacaccattcccaacgaaaagagatctccgttcgtggcgagcggtatcagaataggaacacccgctgttacaacccgcggaatgaaggaagaagagatggaagagatcgccgagatgatagacctggttctttcaaacgtgaccgatgaaaacggaacggtgaaaccagaggtgagggaagaggtttcaaagagggtaagggagctctgcgaaaggtttcccctgtaccgcgacaagatcgaaggggtggaaatatga

SEQ ID NO: 4255 - protein, 427 aa, Marinitoga piezophila KA3
MWKHVKQVDPEIYEVLVNELKRQEYGLELIASENFASLAVIETMGSMLTNKYAEGYPQKRYYGGCEWVDRAEELAIERAKRLFGAKFANVQPHSGSQANMAVYLALAQPGDTIMGMSLSHGGHLTHGAPVNFSGKIFKVVPYGVNLETETIDYDEVRRLALEHKPKIIVAGGSAYARIIDFKRFREIADEVGAYLMVDMAHFAGLVAAGIHPNPLEYAHVVTSTTHKTLRGPRGGLILTNDPDIAKAVDKTIFPGIQGGPLMHVIAAKAVCFKEAMTEEFKEYQKQVVKNAKKMAEEFQKRGYRIVSGGTDTHLFLVDLTPKDITGKAAEKALESCGITVNKNTIPNEKRSPFVASGIRIGTPAVTTRGMKEEEMEEIAEMIDLVLSNVTDENGTVKPEVREEVSKRVRELCERFPLYRDKIEGVEI

SEQ ID NO: 4256 - DNA, 1296 bp, Octadecabacter antarcticus 238
  CDS (1)..(1296): transl_table=11
atgaatgcccgcaacaatgacaccggattcttcactgaaagcctcgcgacccgtgatcccgaaatcgctgctgcgattggcgcggaactgggccgtcagcgcaaagagatcgaactgatcgcatcagaaaacatagtctctgccgccgtgatggaagcgcaaggcagcgtgatgaccaacaaatacgccgaaggctatcccgggcgtcgttactatggtggatgccaacacgttgatgtcgctgaaaatttggcaattgatcgcgcaaagcagcttttcggttgcgactttgtgaatgttcaaccgaactctggcagtcaagcaaatcaaggtgtgtatcaagcgctgattaaacccggcgataccattttgggcatgtccttggacgcgggcggtcacctgacgcatggcgcaaaaccgaaccaatcgggcaagatttacaacgccatccaatacggtgtgagtaaacaagacagtctgctagattacgaccaagtacaggaattggcgaccgagcatcaaccaaagctgatcattgctggcgggtccgcgatcccgcgcatcattgatttcaagcgcatgcgcgaaattgcggacagcgttggtgcctacctgctcgtcgacatggcgcatttcgcgggtctggtcgcgacgggtctgtacccatcgccgtttccacacgcccacgttgctaccacaacaacgcacaaaaccctgcgtggcccgcgcggtggcatgatctgtacgaacgacgaagcgctggcgaagaaattcaactctgccatattccccggcatccaaggcgggcccctgatgcacgttatcgcaggcaaggctgtggcgttcggagaggcattgcgccctgaattcaaggcctaccaagaacaggtcgttaaaaatgcacaagcactggcggatcagttgatcaaaggcggcttggacattgtcacgggcggcacggacagccacctgatgctcgtcgatctgcggcccaagggcgtcaaaggcaatgacaccgaagcagcactcgaacgtgcccacattacctgcaacaaaaacggcatcccgttcgatcctgaaaagccgatggtgacatctggcgtgcgtttgggatcgcccgcaggcacgacacgcgggttcaccgaagtcgaattccgccaggtcgctgattggatcgtcgaagtagttgacggtttggccgcgaacggcgcggacgacaatgcagatgtcgaggccaaggtgagaacggaagttgaagcactctgcgacgccttcccgatttatccaaacctttga

SEQ ID NO: 4257 - protein, 431 aa, Octadecabacter antarcticus 238
MNARNNDTGFFTESLATRDPEIAAAIGAELGRQRKEIELIASENIVSAAVMEAQGSVMTNKYAEGYPGRRYYGGCQHVDVAENLAIDRAKQLFGCDFVNVQPNSGSQANQGVYQALIKPGDTILGMSLDAGGHLTHGAKPNQSGKIYNAIQYGVSKQDSLLDYDQVQELATEHQPKLIIAGGSAIPRIIDFKRMREIADSVGAYLLVDMAHFAGLVATGLYPSPFPHAHVATTTTHKTLRGPRGGMICTNDEALAKKFNSAIFPGIQGGPLMHVIAGKAVAFGEALRPEFKAYQEQVVKNAQALADQLIKGGLDIVTGGTDSHLMLVDLRPKGVKGNDTEAALERAHITCNKNGIPFDPEKPMVTSGVRLGSPAGTTRGFTEVEFRQVADWIVEVVDGLAANGADDNADVEAKVRTEVEALCDAFPIYPNL

SEQ ID NO: 4258 - DNA, 1254 bp, Salmonella enterica subsp. enterica serovar Paratyphi C strain RKS4594
  CDS (1)..(1254): transl_table=11
atgttaaagcgtgaaatgaatattgccgattatgatgccgagttgtggcaggctatggagcaggaaaaagtacgtcaggaagagcacatcgaactgatcgcctccgaaaactacaccagcccgcgcgtgatgcaggcgcaggggtctcagctgaccaacaaatacgctgaaggttatccgggcaagcgctactacggcggttgcgaatacgttgatgtcgtagagcagctggctatcgaccgcgcgaaagaactgttcggcgctgactacgctaacgtgcagccgcactccggttctcaggctaacttcgctgtttacaccgcgctgctgcagccgggcgacaccgttctgggtatgaacctggcgcagggtggtcacctgactcacggctccccggttaacttctccggtaaactgtacaacatcgtaccttacggtatcgatgagtccggtaaaattgactatgacgagatggcgaagctggccaaagagcacaagccgaagatgattatcggtggcttctctgcctactccggcgtggttgactgggcaaaaatgcgtgaaatcgctgacagcatcggcgcatacctgtttgtcgacatggcgcacgtggcgggcctgattgccgcaggcgtttacccgaacccggttccgcacgctcacgttgtcaccaccaccacccacaaaaccctggcgggtccgcgcggcggcctgatcctggcgaagggcggcgatgaagagctgtacaaaaaactgaactccgccgtgttcccaagcgcgcagggcggcccgctgatgcacgtgatcgccggtaaagcggtagcactgaaagaagcgatggagccggagttcaaagtttaccagcagcaggtggcgaaaaacgccaaagcgatggtagaagtgttcctgaaccgcggctacaaagtggtgtctggcggcactgagaaccacctgttcctgctggacctggtggataaaaacctgaccggtaaagaagctgacgccgcgctgggccgtgctaacatcaccgtgaacaaaaacagcgtgccgaacgatcctaagagcccgttcgtgacttctggtatccgcatcggttctccagcggtcactcgtcgcggcttcaaagaagcggaagtgaaagagctggctggctggatgtgtgacgtgctggacaacatcaatgatgaagccaccattgaacgcgtgaaagtgaaagtgctggatatctgcgcccgcttcccggtttacgcgtaa

SEQ ID NO: 4259 - protein, 417 aa, Salmonella enterica subsp. enterica serovar Paratyphi C strain RKS4594
MLKREMNIADYDAELWQAMEQEKVRQEEHIELIASENYTSPRVMQAQGSQLTNKYAEGYPGKRYYGGCEYVDVVEQLAIDRAKELFGADYANVQPHSGSQANFAVYTALLQPGDTVLGMNLAQGGHLTHGSPVNFSGKLYNIVPYGIDESGKIDYDEMAKLAKEHKPKMIIGGFSAYSGVVDWAKMREIADSIGAYLFVDMAHVAGLIAAGVYPNPVPHAHVVTTTTHKTLAGPRGGLILAKGGDEELYKKLNSAVFPSAQGGPLMHVIAGKAVALKEAMEPEFKVYQQQVAKNAKAMVEVFLNRGYKVVSGGTENHLFLLDLVDKNLTGKEADAALGRANITVNKNSVPNDPKSPFVTSGIRIGSPAVTRRGFKEAEVKELAGWMCDVLDNINDEATIERVKVKVLDICARFPVYA

SEQ ID NO: 4260 - DNA, 1260 bp, gamma proteobacterium HTCC5015
  CDS (1)..(1260): transl_table=11
atgtttacacaatctatgcgtatcaaaggctatgacgatgagctggccgcagcgatcgaggcggaaaaccgtcgccaagaagagcacattgagctgatcgcctcagaaaattacaccagccctcgcgtcatggaagcgcaaggctcgcagttgaccaataaatacgctgagggctaccccgccaagcgctactacggtggttgcgaatatgtcgacgtggccgagcagttggcgattgatcgcgccaaagcgttgttcggcgcagagtatgccaatgtacagccccactcgggctcgcaggccaacgccgctgtgtacttcgcactgctgcagcctggcgacaccgtgttgggcatgagtttggctcacggcggtcacttgactcacggcgccaaggtgaatttttcgggcaaggtgtttaatgcggttcagtacggtttgaaccccgatacgggtctgatcgactacgacgaaatggagcgcctagcagacgagcaccagcccaaaatgattgtcggcggcttttccgcttattcacaagtggtggattggaagcgcatgcgcgaaattgccgacaaggtgggcgcctatctgttctgtgatatcgcccacgtcgcgggcctagtcgccgccggcctctatcccagccccgtgggaattgccgatgtcgtgacgacgacaacgcacaaaacgctgcgcggcccacgcggcggcttgattttggccaatgccaatgaagatgtgaacaaaaagctcaattcactggtgttccccggcacgcagggcggacccttgatgcacgtgattgccgccaaagcagtggcctttaaagaggctctagagcccagttttaaagactatcaagcgcaagtgattgccaacgcgaaagccatggcaaaaacgctgacagagcgcggctacaagatcgtttccggcggcacggaaaaccaccttttattggtggatttgatcgagcagggcttaactggcaaggccgccgatgcggcactgggtgcggccaatatcacggtgaataaaaatgccgtgcccaacgacccgcaatcaccttttgtaacgagtggtattcgagtgggtacacccgcgattacttcgcgtgggtttggcgaggcggagacggttgagctggcgggctggattgccgatattctggacgacgtggaaaatacgcaactgcaaagcgagatcaaacaaaaagtattggagttgtgccaacgcttccccgtttacgcagcgggctag

SEQ ID NO: 4261 - protein, 419 aa, gamma proteobacterium HTCC5015
MFTQSMRIKGYDDELAAAIEAENRRQEEHIELIASENYTSPRVMEAQGSQLTNKYAEGYPAKRYYGGCEYVDVAEQLAIDRAKALFGAEYANVQPHSGSQANAAVYFALLQPGDTVLGMSLAHGGHLTHGAKVNFSGKVFNAVQYGLNPDTGLIDYDEMERLADEHQPKMIVGGFSAYSQVVDWKRMREIADKVGAYLFCDIAHVAGLVAAGLYPSPVGIADVVTTTTHKTLRGPRGGLILANANEDVNKKLNSLVFPGTQGGPLMHVIAAKAVAFKEALEPSFKDYQAQVIANAKAMAKTLTERGYKIVSGGTENHLLLVDLIEQGLTGKAADAALGAANITVNKNAVPNDPQSPFVTSGIRVGTPAITSRGFGEAETVELAGWIADILDDVENTQLQSEIKQKVLELCQRFPVYAAG

SEQ ID NO: 4262 - DNA, 1296 bp, Octadecabacter antarcticus 307
  CDS (1)..(1296): transl_table=11
atgaatgcccgcaccaaagacaccggtttcttcaccgaaagccttgcgacccgtgaccccgaaattgctgcggcgattggtgcggaactgggtcgtcagcgaaaagagatcgaactgatcgcatcagaaaacatcgtctctgccgccgtgatggaagcccaaggcagcgttatgaccaacaaatacgccgaaggttacccgggccgccgctactatggcggatgccaacacgttgatgtcgctgaaaatttagccattgatcgcgccaaaaagttgtttgattgtgaatttgtgaacgtgcagccaaactctggcagtcaagccaatcaaggtgtgtttcaggcgctgatcaagcccggcgataccattctcggcatgtcgctggacgcgggcggccacttgacccacggcgcaaaaccgaaccaatcgggcaagatttacaacgcgatccaatacggggtaaagcaggccgacagcctattagactatgatcaggttcaggcattggcgaccgagcatcgcccgaaactgatcatcgctggcgggtccgccatcccgcgcatcattgatttcaaacgcatgcgcgagattgcggacagcgttgacgcctacctgctggtcgacatggcgcatttcgcgggtatggtcgcgacgggtttgtacccttcaccttttccccacgcccacgttgccacaacgacaacgcacaaaaccctgcgcggcccgcgcggtggcatgatcctgaccaacgacgaagccctcgccaagaaattcaactcagctatcttcccgggcatccaaggcgggccgttgatgcacgttatagcgggcaaggccgtcgcattcgcagaggcgttgcgccccgaattcaaagcctatcaagaacaggtcgtgaagaatgcacaagcgctggcagatcaattgatcaaaggtggcttagacatcgttacaggcggcacagacagccacctggtgctcgtcgatctgcggcccaaaggcgtcaaaggtaatgacaccgaagcagcgctcgaacgcgcccacatcacctgcaacaaaaacggcatcccgttcgaccctgaaaagccgatggtgacatcaggcgtgcgtttgggatcacccgcgggcacaacgcgtggattcaccgagaccgaattccgccaagtcgctgattggattgtcgaagtggtcgacggtttggcgacgaacggtgcggacggcaatgcagaagtcgaggccaaggtgagaacggaagttgaagcgctctgcgataccttcccgatttatcccaacctttga

SEQ ID NO: 4263 - protein, 431 aa, Octadecabacter antarcticus 307
MNARTKDTGFFTESLATRDPEIAAAIGAELGRQRKEIELIASENIVSAAVMEAQGSVMTNKYAEGYPGRRYYGGCQHVDVAENLAIDRAKKLFDCEFVNVQPNSGSQANQGVFQALIKPGDTILGMSLDAGGHLTHGAKPNQSGKIYNAIQYGVKQADSLLDYDQVQALATEHRPKLIIAGGSAIPRIIDFKRMREIADSVDAYLLVDMAHFAGMVATGLYPSPFPHAHVATTTTHKTLRGPRGGMILTNDEALAKKFNSAIFPGIQGGPLMHVIAGKAVAFAEALRPEFKAYQEQVVKNAQALADQLIKGGLDIVTGGTDSHLVLVDLRPKGVKGNDTEAALERAHITCNKNGIPFDPEKPMVTSGVRLGSPAGTTRGFTETEFRQVADWIVEVVDGLATNGADGNAEVEAKVRTEVEALCDTFPIYPNL

SEQ ID NO: 4264 - DNA, 1254 bp, Stenotrophomonas sp. SKA14
  CDS (1)..(1254): transl_table=11
atgttcccgcgtgacgtccgcatcgaatcctacgatcccgaactggccaaggccattgccgctgagacccagcgtcaggaagaccacgtcgagctgatcgccagcgagaactacaccagcccggcggtgatggaagcccagggcagccagctgaccaacaagtacgccgaaggctacccgggcaagcgctactacggtggctgcgaatacgtggacatcgccgagcagctggccatcgaccgcctcaagcagctgttcggtgccgactacgccaacgtgcagccgcacagtggctcgcaggccaaccaggccgtgtacttcgccctgctgcagccgggtgacaccatcctcggcatgagcctggcgcacggcggccacctcacccacggtgccaaggtgaatgcttccggcaagctgttcaacgccgtgcagtacggcgtgaacgaccagggcctgatcgattacgacgaagtcgagcgcctggcgctggagcacaagccgaagatggtcgtggccggcttctctgcctactcgcaggtgatcgactgggcgcgcttccgcgccatcgccgacaaggtcggtgcctacctgttcgtcgacatggcccacgtggccggcctggtcgccgctggcgtctacccgagcccgctggaacacgcgcacgtggtcacctcgaccacccacaagaccctgcgcgggccgcgcggcggcatcatcgtggccaagggcgccgacgaagacctggtcaagaagctgcagtcgatcgtgttcccgggcatccagggcggtccgctgatgcacgtcatcgccggcaaggccgtggccttcaaggaagcgctggagccgggcttcaaggcctaccagcagcaggtggtgaagaatgcccaggcgatggccaacacgctcatcgcacgtggctacaagatcgtttccggcggcacccagaaccacctgatgctggtcgacatgatcggcaaggacgtgtccggcaaggacgcggaagccgcgctgggcaaggcccacatcaccgtcaacaagaactcggtgccgaatgatccgcgttcgccgttcgtgacctcgggcctgcgcctgggcaccccggcggtgaccacccgcggctacgtcgaacaggactgtgtggacctggccaactggatcgccgacgtgctcgatgcaccggccgatgacgccgtcatcgcccgcgtgcgcgacgcggtcagcgcgcagtgccgcaagtacccggtctacggctga

SEQ ID NO: 4265 - protein, 417 aa, Stenotrophomonas sp. SKA14
MFPRDVRIESYDPELAKAIAAETQRQEDHVELIASENYTSPAVMEAQGSQLTNKYAEGYPGKRYYGGCEYVDIAEQLAIDRLKQLFGADYANVQPHSGSQANQAVYFALLQPGDTILGMSLAHGGHLTHGAKVNASGKLFNAVQYGVNDQGLIDYDEVERLALEHKPKMVVAGFSAYSQVIDWARFRAIADKVGAYLFVDMAHVAGLVAAGVYPSPLEHAHVVTSTTHKTLRGPRGGIIVAKGADEDLVKKLQSIVFPGIQGGPLMHVIAGKAVAFKEALEPGFKAYQQQVVKNAQAMANTLIARGYKIVSGGTQNHLMLVDMIGKDVSGKDAEAALGKAHITVNKNSVPNDPRSPFVTSGLRLGTPAVTTRGYVEQDCVDLANWIADVLDAPADDAVIARVRDAVSAQCRKYPVYG

SEQ ID NO: 4266 - DNA, 1254 bp, Azotobacter vinelandii DJ
  CDS (1)..(1254): transl_table=11
atgttcagccgtgatttgaccctcgcccgctacgatgccgaactgttcgccgccatgaagcaagaagcccagcgccaggaagatcacatcgagctgatcgcctccgagaactacaccagccccgccgtgatggaggctcagggttcggtgctcaccaacaagtacgccgaaggctatccgggcaagcgctactacggcggctgcgaatacgtcgacatcgtcgagcaactggccatcgaccgcgccaagcaactgttcggcgccgactatgccaacgtccagccgcacgccggctcgcaggccaacgcggcggtctatcaggccctggtcaagccgggcgacaccgtgctgggcatgagtctggcccacggtggccacctgacccacggcgccagcgtcaacttctccggcaagatgtacaacgcagtgcagtacggcatcgacgccaacggcttcatcgactacgacgaagtggagcgtctggcgttggagcacaagccgaagatgatcgtcgccggctactcggcctactcccaggtgctggatttcgcccgtttccgcgagatcgccgacaaggtcggcgcctacctgttcgtcgacatggcccacttcgccgggctggtcgccgccggcgtctacccgaacccggtgcccttcgccgacgtggtcaccaccaccacccacaagaccctgcgcggcccgcgcggcggcctgatcctcgccaaggccaacgaagagatcgagaagaaactcaactccgccgtgttccccggcggccagggcggcccgctggaacacgtgatcgccgccaaggcggtgtgcttcaaggaagccctgcagccggacttcaaggaataccagcaacaggtggtgaagaacgccaaggccatggcccaggtgttcatcgagcgcggcttcgacgtggtgtccggcggcaccgagaaccacctgttcctggtctcgctgatcaagcaggagatcaccggcaaggacgcggacgccgccctcggccgcgccttcatcaccgtgaacaagaacagcgtgccgaacgacccgcgctcgcccttcgtcacctctggcctgcgcatcggcaccccggcggtgaccacccgcggcttcaaggaaaccgagtgtcgcgaactggccggctggatctgcgacatcctcgtcgacctgaacaacgaagcggtggtcgacggcgtgcgcgagaaggtccaggcgatctgcgccaggttcccggtgtacggcaagtaa

SEQ ID NO: 4267 - protein, 417 aa, Azotobacter vinelandii DJ
MFSRDLTLARYDAELFAAMKQEAQRQEDHIELIASENYTSPAVMEAQGSVLTNKYAEGYPGKRYYGGCEYVDIVEQLAIDRAKQLFGADYANVQPHAGSQANAAVYQALVKPGDTVLGMSLAHGGHLTHGASVNFSGKMYNAVQYGIDANGFIDYDEVERLALEHKPKMIVAGYSAYSQVLDFARFREIADKVGAYLFVDMAHFAGLVAAGVYPNPVPFADVVTTTTHKTLRGPRGGLILAKANEEIEKKLNSAVFPGGQGGPLEHVIAAKAVCFKEALQPDFKEYQQQVVKNAKAMAQVFIERGFDVVSGGTENHLFLVSLIKQEITGKDADAALGRAFITVNKNSVPNDPRSPFVTSGLRIGTPAVTTRGFKETECRELAGWICDILVDLNNEAVVDGVREKVQAICARFPVYGK

SEQ ID NO: 4268 - DNA, 1272 bp, Thermus thermophilus HB27
  CDS (1)..(1272): transl_table=11
ttgcgccttctccctcatgccgcgattttacccggctataatcgccctatggtgagcaccctcaagcgggacgaggccctctttgagctcatcgccttagaggagaaaaggcagcgggaaggcctggagctcatcgccagcgaaaacttcgtctccaagcaggtgcgggaggcggtggggagcgtcctcaccaacaagtacgccgagggctaccccggggcccggtactacggggggtgcgaggccattgaccgggtggagtccctggccatagagcgggccaaggccctcttcggagcggcctgggccaacgtccagccccactccggctcccaggccaacatggcggtctacatggccctgatggagccgggggacaccctcatgggcatggacctcgcggccggcggccacctcacccacggctcccgcgtgaacttctccgggaagctttacaaggtggtctcctacggggtccgtcccgacacggagctcatagacctggaggaggtccgccgcctcgccctcgagcaccgccccaaggtgatcgtggccggggccagcgcctacccccgcttctgggactttaaggcctttcgggagatcgccgacgaggtgggggcctacctcgtggtggacatggcccacttcgccgggctcgtggccgcgggcctccacccgaaccccctgccttacgcccacgtggtgacgagcaccacccacaaaaccctccggggcccgaggggcggcctcatcctctccaacgaccctgagctcggcaagaggattgacaagctcatcttccccgggatccagggggggcccttggagcacgtgatcgccgggaaggccgtggccttctttgaggccctacagcccgagttcaaggagtacagccgcctggtggtggaaaacgccaagcgcctggcggaggcgcttgcccgccggggctaccgcatcgtcaccggggggacggacaaccacctcttcctcgtggacctgcgccccaagggcctcaccgggaaggaggcagaggagaggctggacgccgtggggatcacggtgaacaagaacgccatcccctttgaccccaagcccccccgggtcacctcggggatccgcatcggcaccccggccatcaccacccggggcttcacccccgaggagatgcccctcgtcgccgagctcatagaccgggcccttctggagggcccctcggaggccctgcgggaagaggtgcgcaggctcgccctggcccaccccatgccctga

SEQ ID NO: 4269 - protein, 423 aa, Thermus thermophilus HB27
MRLLPHAAILPGYNRPMVSTLKRDEALFELIALEEKRQREGLELIASENFVSKQVREAVGSVLTNKYAEGYPGARYYGGCEAIDRVESLAIERAKALFGAAWANVQPHSGSQANMAVYMALMEPGDTLMGMDLAAGGHLTHGSRVNFSGKLYKVVSYGVRPDTELIDLEEVRRLALEHRPKVIVAGASAYPRFWDFKAFREIADEVGAYLVVDMAHFAGLVAAGLHPNPLPYAHVVTSTTHKTLRGPRGGLILSNDPELGKRIDKLIFPGIQGGPLEHVIAGKAVAFFEALQPEFKEYSRLVVENAKRLAEALARRGYRIVTGGTDNHLFLVDLRPKGLTGKEAEERLDAVGITVNKNAIPFDPKPPRVTSGIRIGTPAITTRGFTPEEMPLVAELIDRALLEGPSEALREEVRRLALAHPMP

SEQ ID NO: 4270 - DNA, 1239 bp, Staphylococcus aureus subsp. aureus MRSA252
  CDS (1)..(1239): transl_table=11
atgtcttatatcaccaagcaagataaagttatcgcagaagcaatcgagagagaatttcagagacaaaatagcaacatagagttaatcgcatcggaaaattttgtatcggaagcggttatggaagcacaaggttcagtgttgactaataagtatgctgaaggctatccaggacgccgatattatggtggctgtgagtttgtagatgttactgaaagcatcgcaattgatcgtgctaaagcgttgtttggagctgaacatgtcaatgttcaaccacattcaggttcacaagcgaacatggctgtttacttagttgcattagaaatgggcgacacagttttaggtatgaatttgagtcatggtggtcacttgacacatggagcgcctgttaattttagtggtaaattctacaatttcgttgaatatggagtagataaagacacagaacgaatcaattatgatgaagttcgtaaattagcgttagagcataagcctaagcttattgtggcaggagcatcagcatattcaagaacaattgatttcaaaaagtttaaagaaatcgcagatgaagtaaacgctaagttaatggtagacatggcacatattgcaggattagtagcggcaggtttacatccaaatccagtagaatatgctgattttgtaacaactacaacacacaaaacattacgcggaccacgtggtggtatgattttatgtaaggaagaatataaaaaagacatagataaaacaattttccctggtattcaaggtggacctcttgagcatgttattgcagcaaaagcagttgcttttggagaagcgttagaaaataatttcaaaacgtatcaacaacaagtggttaaaaacgcaaaagttcttgcagaagcattaattaatgaaggatttagaattgtttctggtggtacagataatcacttagtagctgttgatgtaaaagggtctataggacttactggtaaagaagctgaagagactttagattcagttggtatcacatgtaacaaaaataccattccgttcgatcaagaaaaaccttttgtaacgagtggtatacgtttaggtacacctgctgcaacaacgcgtggatttgatgaaaaggcttttgaggaagttgcaaaaatcatcagtttagcattgaaaaatagtaaagatgaagaaaaattacaacaagctaaagaacgcgttgcgaaattaacagctgaatatcctctatatcaataa

SEQ ID NO: 4271 - protein, 412 aa, Staphylococcus aureus subsp. aureus MRSA252
MSYITKQDKVIAEAIEREFQRQNSNIELIASENFVSEAVMEAQGSVLTNKYAEGYPGRRYYGGCEFVDVTESIAIDRAKALFGAEHVNVQPHSGSQANMAVYLVALEMGDTVLGMNLSHGGHLTHGAPVNFSGKFYNFVEYGVDKDTERINYDEVRKLALEHKPKLIVAGASAYSRTIDFKKFKEIADEVNAKLMVDMAHIAGLVAAGLHPNPVEYADFVTTTTHKTLRGPRGGMILCKEEYKKDIDKTIFPGIQGGPLEHVIAAKAVAFGEALENNFKTYQQQVVKNAKVLAEALINEGFRIVSGGTDNHLVAVDVKGSIGLTGKEAEETLDSVGITCNKNTIPFDQEKPFVTSGIRLGTPAATTRGFDEKAFEEVAKIISLALKNSKDEEKLQQAKERVAKLTAEYPLYQ

SEQ ID NO: 4272 - DNA, 1254 bp, Acinetobacter sp. ADP1
  CDS (1)..(1254): transl_table=11
atgtttgccaacatttctctttctgaatttgatccagaattggccaaatcaatcgaagctgaagatgcgcgtcaggaagcgcatattgagttgattgcttctgaaaactattgctctcctgcggtgatggaagcgcaaggatcaaaacttaccaataaatatgcagaaggttatcctggcaaacgctattatggcggctgcgaatatgtagacgtgattgaacagcttgcaattgaccgtgctaaagcgctctttggtgctgattatgcaaacgttcagccacatgctggctcacaagcaaactctgccgtataccttgcattacttaatgcgggtgatactgttttgggtatgagtcttgctcacggtggtcacttgactcacggtgcaaaagtaaacttctctggtaaaacatacaatgccgttcagtacggtcttaaccctgaaacaggcgaaatcgattatgacgaagttgagcgcttagcaatagaacacaaaccgcgtatgatcgttgcaggtttctctgcatatagccgtattgtagattggcaacgtttccgcgatatcgcagataaagtaggcgcttacttatttgttgatatggctcatgtggctggtttggttgctgccggtgtttatccaagcccagttcaaattgctgatgtcaccacaaccacgacccataaaacccttcgtggtccacgttctggtttgattcttgcaaaagcaaatgaagaaattgagaaaaaacttcaatctgctgtattccctggtaaccaaggtggtccacttgtacatgcgattgctgcaaaagcagtctgctttaaagaagcaatggcaccagaatataaagcttatcaacaacaagtagtcaaaaatgctcaagccatggctgaagtattaattgctcgtggttatgatattgtttctggtggtacagataaccacttgttcctactttctttgatcaagcaagatgtcactggtaaagaagcagatgcatggttgggtaatgcaaacattactgtcaacaaaaatgcggttccaaatgacccacgctctccatttgtaacttctggtattcgtattggtacgccagcagtaacgactcgtggttttggtgaagctgaagtgcgcgacttggctagctggattgcagacgttttagacagcaaaggtgatgaaaaagtcattgctgatgtcaaagcaaaagttgaagctgtgtgtgcaaaattccctgtatatgaaaactaa

SEQ ID NO: 4273 - protein, 417 aa, Acinetobacter sp. ADP1
MFANISLSEFDPELAKSIEAEDARQEAHIELIASENYCSPAVMEAQGSKLTNKYAEGYPGKRYYGGCEYVDVIEQLAIDRAKALFGADYANVQPHAGSQANSAVYLALLNAGDTVLGMSLAHGGHLTHGAKVNFSGKTYNAVQYGLNPETGEIDYDEVERLAIEHKPRMIVAGFSAYSRIVDWQRFRDIADKVGAYLFVDMAHVAGLVAAGVYPSPVQIADVTTTTTHKTLRGPRSGLILAKANEEIEKKLQSAVFPGNQGGPLVHAIAAKAVCFKEAMAPEYKAYQQQVVKNAQAMAEVLIARGYDIVSGGTDNHLFLLSLIKQDVTGKEADAWLGNANITVNKNAVPNDPRSPFVTSGIRIGTPAVTTRGFGEAEVRDLASWIADVLDSKGDEKVIADVKAKVEAVCAKFPVYEN

SEQ ID NO: 4274 - DNA, 1278 bp, Desulfotalea psychrophila LSv54
  CDS (1)..(1278): transl_table=11
gtgcacaagaccgaacgaggagatgcaatgacagctttacaacagcaagatccagaaattttttctttaatccaacaagaagaggtacgtcagcacaataagattcgtctcattgcctcagagaactatgtatcctcggctgtgcttgaggcaacaggttctattcttaccaataaatattcagaaggatatcccggcaagcgctactatgaggggcaacagcttattgaccaaatagagagcattgccattgaccgggcaaaggctgtttttggcgcagaacatgttaacgtacagccatactcaggatctcctgctaatatggccgtctatctcgccttcctaaaacctggcgacaccatcctgggaatggcacttccccacggtggacaccttacccacggttccaaggtaagtatttctggtaaatattttaatgccgtctcctatgcactcaacgaagagggcatactggattacgaagaaattcgtaacaaggcccttgaatgcaaaccaaaaattttgattgccggtcactctgcatatccaaggatactcgacttcgccaagttccgcgaaatcgccgatgaggttggggctttgctgatggttgatatggcccactttgcaggacttgttgccggtggcgttcatccctctccatttccatatgccgatgtagttaccaccaccacccacaaatccctccgcggcccacgtggggcaatgatcatgtgtaaggctgaatatgccaaggcaatcgacaaggctgtattcccgggaatgcagggcggtccacacgacagcaccaccgcagccattgccgttgccctgaaagaggctagcacagatagcttcaaaaaatataccgctcaggtagtcgaaaatgcagcaagccttgccgatgtacttattgagaaaggttttaatctggtaacaggtggcacagaaaaccaccttatgctcattgacctttccaacaaaaacattaccggcaagcaggcggcaaaggcccttgatgctgcaggcattgttctcaactgcaactctgtgccctttgataagcgcaaaccttttgatcctagcggtatccgcctcggcacctgcgcaatcacctcaaggggttttgccaaggctgagatggtaatactcggtaacatgatggacagagttgtcaataatttcgaagacagcgcagttcttgccgaaattgcccaggaagtacaagctctctgtgataaatttcctgccccaggactcgaacacattgcaaaataa

SEQ ID NO: 4275 - protein, 425 aa, Desulfotalea psychrophila LSv54
MHKTERGDAMTALQQQDPEIFSLIQQEEVRQHNKIRLIASENYVSSAVLEATGSILTNKYSEGYPGKRYYEGQQLIDQIESIAIDRAKAVFGAEHVNVQPYSGSPANMAVYLAFLKPGDTILGMALPHGGHLTHGSKVSISGKYFNAVSYALNEEGILDYEEIRNKALECKPKILIAGHSAYPRILDFAKFREIADEVGALLMVDMAHFAGLVAGGVHPSPFPYADVVTTTTHKSLRGPRGAMIMCKAEYAKAIDKAVFPGMQGGPHDSTTAAIAVALKEASTDSFKKYTAQVVENAASLADVLIEKGFNLVTGGTENHLMLIDLSNKNITGKQAAKALDAAGIVLNCNSVPFDKRKPFDPSGIRLGTCAITSRGFAKAEMVILGNMMDRVVNNFEDSAVLAEIAQEVQALCDKFPAPGLEHIAK

SEQ ID NO: 4276 - DNA, 1239 bp, Symbiobacterium thermophilum IAM 14863
  CDS (1)..(1239): transl_table=11
atggatgcactgaagcggtatgatcccgaggtcttcgcggccattcagcaggaggtcgagcggcagcagcgcaacattgagctgatcgcctcggagaacttcgtgcccaaggcggtcctcgaggcggcgggcacggtgctcaccaacaagtacgccgagggctatcccggccggcggtactacggcggctgcgagtacgtggacatcgtggagaacatcgcccgggagcggctgaaggcggccttcggcgcggagcacgtcaacgtccagccgcactcgggggccaacgccaacacggcggtctacttcgccttcctccagcccggcgatacggtgctgggcatgaacctggcccagggcggccacctgacccacggctcgccggtcaacttcagcggcaggacttacaacttcgtgccctacggcctggacccggagaccgagcggatcaacatggaccaggtggcggagctggcccggcagcaccggcccaagctcatcgtcgccggctactcggcctacccgcgggtcctggacttcaagcggttccgggagatcgccgaagaggtgggcgccatcctgatggtggacatggcccacttcgccggcctggcggccacgggctactacccgaacccggtggagcacgcgcacgtggtcaccaccaccacccacaagacgctgcgcgggccgcggggcggggcgatcctctgcaagaaggagttcgccaaggagatcgacaaggcggtcttcccgggcatgcagggcggccccctgatgcacatcatcgccgccaaggcggtggccttcaagcagctctccgacccggactacagggcatactgcggccaggtggtgaagaacgccaaggccctggcccaggcgctgctggagcggggctaccggctggtcaccggcggcaccgacaaccacctgatgctggtggacctgcggcccaagggcatcaccggccgggacgcggagcacctgctggacagggtctcgatcacggtcaacaagaacgccatccccaacgaccccgagaagccgatggtgaccagcggcatccgcatcggcaccccggccatgaccacccgggggatgaaggaggccgagatggtccagatcgccgacctcatcgaccgggccatcacccaccggaacgacgaggcggagctggaccggatccgggcggaggtgcacgagctcacggcccggttcccgctctacgccgactag

SEQ ID NO: 4277 - protein, 412 aa, Symbiobacterium thermophilum IAM 14863
MDALKRYDPEVFAAIQQEVERQQRNIELIASENFVPKAVLEAAGTVLTNKYAEGYPGRRYYGGCEYVDIVENIARERLKAAFGAEHVNVQPHSGANANTAVYFAFLQPGDTVLGMNLAQGGHLTHGSPVNFSGRTYNFVPYGLDPETERINMDQVAELARQHRPKLIVAGYSAYPRVLDFKRFREIAEEVGAILMVDMAHFAGLAATGYYPNPVEHAHVVTTTTHKTLRGPRGGAILCKKEFAKEIDKAVFPGMQGGPLMHIIAAKAVAFKQLSDPDYRAYCGQVVKNAKALAQALLERGYRLVTGGTDNHLMLVDLRPKGITGRDAEHLLDRVSITVNKNAIPNDPEKPMVTSGIRIGTPAMTTRGMKEAEMVQIADLIDRAITHRNDEAELDRIRAEVHELTARFPLYAD

SEQ ID NO: 4278 - DNA, 1248 bp, Bacillus licheniformis ATCC 14580
  CDS (1)..(1248): transl_table=11
atgaaacatttacctgcgcaagatgaacaagtttttagcgccattcaagatgagcggaaacgtcaacagtcgaagattgagctgatcgcttctgaaaactttgtaagcgaagcggttatggaagctcaaggctcggttttaactaataaatatgcggaaggatatcctggtaaacgctactacggcggttgtgagcatgtagacgtggcagaggatatcgcgcgcgaccgcgccaagcagattttcggcgccgagcacgtcaacgttcagccgcattccggcgcacaagcgaacatggcggtatacttcacgattttggagcacggtgacactgtgttgggaatgaaccttgctcacggcggacatttaacgcacggcagccctgtcaacttcagcggtgttcagtacaacttcgttgaatacggcgttgataaagagacgcagtatattgattacgaagatgtccgtgaaaaggcgctcaaacataagcctaagctgatcgtggccggagcaagcgcatatccgcgcaccatcgattttaaaaagttccgcgaaatcgctgatgaagtcggagcctatgtgatggtggacatggcgcatatcgccggacttgtagcagcaggtcttcacccgaatcctgttccttacgctgactttgtgacgacgacaactcataaaacgcttcgcggaccgcgcggcggcatgattctttgccgtgaagagtttgcgaaacaaattgacaagtcgatcttccctggaattcaaggcggaccgttaatgcacgtgatcgctgcaaaggctgtttcctttggcgaagctttaaaggacgaattcaaaacatatgcccaaaatgtcatcaacaatgcgaagcgcttggctgaaacattgaaaaaagagggtatcgagctcgtatccggcggaacggataaccatcttgtgctggtcgacctgcgctctctcggcattaccggaaaagtggctgaaaatgtacttgatgaagtcggcatcaccgtcaacaaaaacgcgattccttatgatcctgaaaaacctttcgttacgagcggaatccgcgtcggtacagcagctgtgacgagccgcggctttgatctggaagcgatcgaagaagtgggagcgatcattgcgcttgcccttaaaaaccatgaagacgaagcgaaacttgaagaagcaaaacagcgtgtagaagcgctgacaaacagattcccgttgtataccgggcttgattactaa

SEQ ID NO: 4279 - protein, 415 aa, Bacillus licheniformis ATCC 14580
MKHLPAQDEQVFSAIQDERKRQQSKIELIASENFVSEAVMEAQGSVLTNKYAEGYPGKRYYGGCEHVDVAEDIARDRAKQIFGAEHVNVQPHSGAQANMAVYFTILEHGDTVLGMNLAHGGHLTHGSPVNFSGVQYNFVEYGVDKETQYIDYEDVREKALKHKPKLIVAGASAYPRTIDFKKFREIADEVGAYVMVDMAHIAGLVAAGLHPNPVPYADFVTTTTHKTLRGPRGGMILCREEFAKQIDKSIFPGIQGGPLMHVIAAKAVSFGEALKDEFKTYAQNVINNAKRLAETLKKEGIELVSGGTDNHLVLVDLRSLGITGKVAENVLDEVGITVNKNAIPYDPEKPFVTSGIRVGTAAVTSRGFDLEAIEEVGAIIALALKNHEDEAKLEEAKQRVEALTNRFPLYTGLDY

SEQ ID NO: 4280 - DNA, 1257 bp, Methylococcus capsulatus str. Bath
  CDS (1)..(1257): transl_table=11
atgttcagcaagggtatggaaattgccggattcgacgacgaactctgggctgcgatccaggaagaggaacgcaggcaagaggaccatatcgagctgatcgcatcggagaactatgccagcccgcgggtgctgcaggcacagggaaccgtgctgaccaacaaatacgcggaagggtatccgggcaaacgctactacggaggctgcgagtacgtcgacattgtggagacactggccatcgagcgcgcgaaacgactgttcggggctgattatgccaatgtccagccgcattccggttcgcaggccaatgccgccgtgtacatggctttgctgaagccgggcgatacggtgctgggcatgagtctggcgcacggtggacatctgacccatggcgccaaggtcaacttttcaggcaagatttacaatgccgtacaatatggactcaacccggaaaccggggagatcgattacgaccaggtcgacgaactggcccgggagcaccgtccaaagatgatcgtggccggtttctcggcctactcccaggtggtcgactggcagcgtttccgggcgattgccgactcggtcggtgcctggctcatggtcgacatggcccacgtcgcggggctgatcgcggccggcctgtaccccagcccggtgcagatcgccgacgtgaccacgaccacaacccacaagacgcttcgtggcccgcgcggtggcctgattctggccaaagccaatcccgaggtcgagaaacagctcaactcgctggttttccccggcattcaaggggggccgctgatgcatgtgatcgcggcgaaggcagtggcattaaaggaggccttgcagccggatttcaggcactaccagtcagcggtgatggagaacgccgacgccatggcgaagactttcatcgagcgcggctaccgtatcgtgtcgggcggcacccggaatcatctgttcctggtcgatctgatccaaaagggcctcaccggcaagctggcggaagaggtgttgggcagagcgcatatcaccgtcaacaaaaatgcggtgccgaacgatccgcagtcgcccttcgtgaccagcggcatccgggtggggacccccgcggtgacgacgcgcggctttggggtcgaggagtgccggctgttggcaggctggatgtgcgatatcatggactgcccgggagatgaaacggtcataggccaggtgcgcgaggaggtgacccatctgtgccggcgtttcccggtctatgccaactga

SEQ ID NO: 4281 - protein, 418 aa, Methylococcus capsulatus str. Bath
MFSKGMEIAGFDDELWAAIQEEERRQEDHIELIASENYASPRVLQAQGTVLTNKYAEGYPGKRYYGGCEYVDIVETLAIERAKRLFGADYANVQPHSGSQANAAVYMALLKPGDTVLGMSLAHGGHLTHGAKVNFSGKIYNAVQYGLNPETGEIDYDQVDELAREHRPKMIVAGFSAYSQVVDWQRFRAIADSVGAWLMVDMAHVAGLIAAGLYPSPVQIADVTTTTTHKTLRGPRGGLILAKANPEVEKQLNSLVFPGIQGGPLMHVIAAKAVALKEALQPDFRHYQSAVMENADAMAKTFIERGYRIVSGGTRNHLFLVDLIQKGLTGKLAEEVLGRAHITVNKNAVPNDPQSPFVTSGIRVGTPAVTTRGFGVEECRLLAGWMCDIMDCPGDETVIGQVREEVTHLCRRFPVYAN

SEQ ID NO: 4282 - DNA, 1254 bp, Legionella pneumophila str. Paris
  CDS (1)..(1254): transl_table=11
atgtttgacgaaagttatagtataaaaaattttgatgatgttctttttaaagcaatttctgatgaaaaacgacgccaagaagaacacattgaattaatagcatctgaaaattatgtcagcccgagagtattggaggctcagggttctgtgttgacgaataaatacgctgaaggatatccaggcaaacgctattacggaggttgtgagtttgttgatgtcgctgaggagttagccatttcaagggcaaaattactttttggcgctcattatgtcaatgtgcaaccgcattcgggatcacaagcgaacgcagcagtcatgatggcattattgtccccaggcgatacttttatgggcatggctttacctcatggtgggcacttgactcatgggtcaaaggttaatttttcaggtaaattataccattctgtcgagtatggtgttgatagcaatacgggtttgattgattatgatgctctggaaaaacttgcgcttcaacacaaaccaaaattgatcattgccggtttttcagcttattccaggatcctggattgggctcgatttagagaaattgccgataaggtcggcgcttatttaatggcggacatcgctcatgtagctggtctggtggctgtagggttatatccttctcctgttccttatgcggatgttgtgacaacgacaactcataaaactttaagaggacctcgcggtggtttaatcctttgtaaggaaaacgaagaaattgagaaaaaattaaattcttctgtatttcctggtatgcaaggtgggcccttaatgcatgtaattgcagccaaggcagttgcttttgcagaagctctgttacccgaattcaaaacttatcagcaacaggttttagctaatgccagaacgatgtgcagtgtgttacaaagcagaggctatgatattgtttctggcggaactgataatcatcttttgctagtggatttgataaataaaggaattacaggtaaagaagctgacgctgctgtaggcagagctaacataacagtcaataaaaattcggttcccaatgatcctcgctcgccttttgtaacgagtggtttacgtttgggtacgcctgctgcaaccacaagaggctttaaagaaagagagattactttgttatctaactgggtagcggatgtccttgataatgttcatgatgaaactaatatttcaagagtgaaaacccaggtgttgctactctgtcgtgaatttccggtttatgcctaa

SEQ ID NO: 4283 - protein, 417 aa, Legionella pneumophila str. Paris
MFDESYSIKNFDDVLFKAISDEKRRQEEHIELIASENYVSPRVLEAQGSVLTNKYAEGYPGKRYYGGCEFVDVAEELAISRAKLLFGAHYVNVQPHSGSQANAAVMMALLSPGDTFMGMALPHGGHLTHGSKVNFSGKLYHSVEYGVDSNTGLIDYDALEKLALQHKPKLIIAGFSAYSRILDWARFREIADKVGAYLMADIAHVAGLVAVGLYPSPVPYADVVTTTTHKTLRGPRGGLILCKENEEIEKKLNSSVFPGMQGGPLMHVIAAKAVAFAEALLPEFKTYQQQVLANARTMCSVLQSRGYDIVSGGTDNHLLLVDLINKGITGKEADAAVGRANITVNKNSVPNDPRSPFVTSGLRLGTPAATTRGFKEREITLLSNWVADVLDNVHDETNISRVKTQVLLLCREFPVYA

SEQ ID NO: 4284 - DNA, 1254 bp, Legionella pneumophila str. Lens
  CDS (1)..(1254): transl_table=11
atgtttgacgaaagttatactataaaaaattttgatgatgttctttttaaagcaatttctgatgaaaaacgacgtcaagaagaacacattgaattaatagcatctgaaaattatgtcagcccgagagtattggaagctcagggttctgtgttgacgaataaatacgctgaaggatatccaggcaaacgctattacggaggttgtgagtttgttgatgtcgctgaagagttagccatttcaagggcaaaattactttttggcgctcattatgtcaatgtgcaaccccactcgggatcacaagcaaacgcagcagtcatgatggcattattgtccccaggcgatacttttatgggtatggctttacctcatggcggacacttgactcatgggtcaaaggttaatttttcaggtaaattataccattctgtcgagtatggtgttgataacaatacgggtttgattgattatgatgctctggagaaacttgcgcttcaacacaaaccaaaattgatcattgccggtttttcagcttattccaggatcctggattgggctcggtttagagaaattgccgataaggtcggcgcttatttaatggcggacatcgctcatgtagctggtctggtggccgtagggttatatccttctcctgttccttatgcggatgttgtgacgacaacaactcataaaactttaagaggacctcgcggtggtttaatcctttgtaaggaaaacgaagaaattgagaaaaaattaaattctgctgtatttcctggtatgcaaggtggccccttaatgcatgtaattgctgccaaggcggttgcttttgcggaagcgctgttacccgaattcaaaacttatcagcaacaggttttagctaatgccagaacgatgtgcagtgtgttacaaagcagaggctatgatattgtttctggcggaacggataaccatcttttgctagtggatttgataaataaaggaattacaggtaaagaagctgacgctgctttaggcagagccaacataacagtcaataaaaattcggttcccaatgatcctcgctcaccttttgtaacgagtggtttacgtttgggtacacctgctgcaaccacaagaggctttaaagaaagagagattactttgttatctaactgggtagctgatgtccttgataatgttcatgatgaaactaatatttcaagagtgaaaacccaggtgctgctactctgtcgtgaatttccggtttatgcctaa

SEQ ID NO: 4285 - protein, 417 aa, Legionella pneumophila str. Lens
MFDESYTIKNFDDVLFKAISDEKRRQEEHIELIASENYVSPRVLEAQGSVLTNKYAEGYPGKRYYGGCEFVDVAEELAISRAKLLFGAHYVNVQPHSGSQANAAVMMALLSPGDTFMGMALPHGGHLTHGSKVNFSGKLYHSVEYGVDNNTGLIDYDALEKLALQHKPKLIIAGFSAYSRILDWARFREIADKVGAYLMADIAHVAGLVAVGLYPSPVPYADVVTTTTHKTLRGPRGGLILCKENEEIEKKLNSAVFPGMQGGPLMHVIAAKAVAFAEALLPEFKTYQQQVLANARTMCSVLQSRGYDIVSGGTDNHLLLVDLINKGITGKEADAALGRANITVNKNSVPNDPRSPFVTSGLRLGTPAATTRGFKEREITLLSNWVADVLDNVHDETNISRVKTQVLLLCREFPVYA

SEQ ID NO: 4286 - DNA, 1251 bp, Photobacterium profundum SS9
  CDS (1)..(1251): transl_table=11
atgctaaagcgcgatatgaatattgccgactatgatgcggaactttttgcagccattcaggaagaaacagcacgtcaagaagagcacatcgagttgatcgcttctgaaaactacacaagcccacgtgtaatggaagctcaaggatctcagctgactaacaaatatgctgaaggttacccaggtaagcgttattacggtggttgtgagtttgttgataaagcagaacaactagcgattgatcgtgcatgtcagctttttggtgctgaatacgcgaacgtacagcctcattctggttctcaagctaacaacgccgtttacatggcactactaaatccaggcgacactgtattaggtatgagccttgctcacggtggtcacttgactcacggttctccagtaaacttttctggtaagttatacaacatcatcccttacggcatcgatgaaactggtcagatcgattacgaagaaatggaagcattggcgttagagcacaaacctaagatgattatcggtggtttctctgcgtactctcaggttgttgactggaaacgcatgcgtgaaatcgctgataaagtgggcgcatacttcttcgttgatatggctcacgttgcgggtcttattgcggcaggtgtttaccctaacccagttccccacgcccatgttgtcacaacaacaacgcataaaacattagccggtcctcgtggcggtctaattttgtctaatgacggcgaagctctttataagaagttgaattcagcggtattccctggtggtcagggtggtcctctaatgcatgttatcgcagcaaaagcggtagccttcaaagaagcaatggaacctgaattcaaagtttatcaagcttgtgttgttgaaaatgcgaaagcaatggttggcgagttcttagaacgcggttacaagattgtatctggtagcactgagaatcacttgttccttgttgatttaatcgacaaaggcatcacaggtaaagaagcggatgccgcactgggtgctgctaacattaccgttaacaaaaacagcgttccaaacgatccacgtagcccgtttgtaacgtctggtattcgtattggtacaccatcaatcactcgccgcggtttcacggttgaagatacaaagcagcttgctggttggatttgtgatgtacttgataacacagataaacctgaagttatcgaagcaacgaaagcgaaagtattagaaatttgtaagcgcttacctgtatacgcttaa

SEQ ID NO: 4287 - protein, 416 aa, Photobacterium profundum SS9
MLKRDMNIADYDAELFAAIQEETARQEEHIELIASENYTSPRVMEAQGSQLTNKYAEGYPGKRYYGGCEFVDKAEQLAIDRACQLFGAEYANVQPHSGSQANNAVYMALLNPGDTVLGMSLAHGGHLTHGSPVNFSGKLYNIIPYGIDETGQIDYEEMEALALEHKPKMIIGGFSAYSQVVDWKRMREIADKVGAYFFVDMAHVAGLIAAGVYPNPVPHAHVVTTTTHKTLAGPRGGLILSNDGEALYKKLNSAVFPGGQGGPLMHVIAAKAVAFKEAMEPEFKVYQACVVENAKAMVGEFLERGYKIVSGSTENHLFLVDLIDKGITGKEADAALGAANITVNKNSVPNDPRSPFVTSGIRIGTPSITRRGFTVEDTKQLAGWICDVLDNTDKPEVIEATKAKVLEICKRLPVYA

SEQ ID NO: 4288 - DNA, 1239 bp, Geobacillus kaustophilus HTA426
  CDS (1)..(1239): transl_table=11
atgaattacttgccacaacaagatccgcaagtgttcgccgctattgagcaagagcggaagcggcaacatgcgaaaattgaactgatcgcctcggaaaactttgtcagccgcgcggtcatggaagcgcaagggtcggtgctgacgaacaaatatgcggaaggctatccgggacgccgctactacggcggttgtgaatatgtcgacatcgtcgaagatttggcgcgcgagcgagcgaagcagttgtttggagcggagcatgtgaacgtccagccgcactccggggcgcaggcgaacatggccgtttatttcaccgttcttgagcacggcgacacggtgcttggcatgaacttgtcgcacggcggccatttgacgcacggcagcccggtcaatttcagcggcattcagtacaattttgtcgaatacggcgtcgatccggaaacgcatgtcattgactatgacgacgtgcgcgaaaaagcgcgccttcaccggccgaagttgatcgtcgccggcgcgagcgcctatccgcgcatcatcgacttcgccaagttccgcgagattgccgatgaagtcggcgcctatttaatggttgacatggcccatattgccggtcttgttgcggcaggtgttcatccgaatccagtgccgtacgcccatttcgttacgacgacgacgcacaaaacgctgcgcggtccgcgcggcgggatgattttatgccaggagcagttcgccaaacagatcgacaaagccattttccctggcattcaaggcggcccgctcatgcatgtcattgccgccaaagccgtcgcgctcggcgaagcgttgcaagacgactttaaagtctacgcgaagcgcgtcgtggagaatgccaaacggctcgcagccgccttgcaaaacgaaggattcactctcatttccggcggcacggacaaccatttgctgcttgtcgatttgcgcccgcagcagctgaccgggaaaacggcggagaaagtgctcgatgaggtcgggattacggtcaacaaaaacacgattccgtacgatccggaaagcccgtttgtcacaagcggcatccgcatcggcacggccgcggtcacgacgcgcggcttcggattggaagagatggacgaaatcgccgccatcatcggccttgtgctgaaaaacgtcggcagcgaacaagcgcttgaggaagcgcgccaacgcgtcgccgctttgacggaaaagtttccgctctatcaagactaa

SEQ ID NO: 4289 - protein, 412 aa, Geobacillus kaustophilus HTA426
MNYLPQQDPQVFAAIEQERKRQHAKIELIASENFVSRAVMEAQGSVLTNKYAEGYPGRRYYGGCEYVDIVEDLARERAKQLFGAEHVNVQPHSGAQANMAVYFTVLEHGDTVLGMNLSHGGHLTHGSPVNFSGIQYNFVEYGVDPETHVIDYDDVREKARLHRPKLIVAGASAYPRIIDFAKFREIADEVGAYLMVDMAHIAGLVAAGVHPNPVPYAHFVTTTTHKTLRGPRGGMILCQEQFAKQIDKAIFPGIQGGPLMHVIAAKAVALGEALQDDFKVYAKRVVENAKRLAAALQNEGFTLISGGTDNHLLLVDLRPQQLTGKTAEKVLDEVGITVNKNTIPYDPESPFVTSGIRIGTAAVTTRGFGLEEMDEIAAIIGLVLKNVGSEQALEEARQRVAALTEKFPLYQD

SEQ ID NO: 4290 - DNA, 1305 bp, Gluconobacter oxydans 621H
  CDS (1)..(1305): transl_table=11
atgtcggaacacgccagccagtccacgctgaatcgtttctttcatgcccccctcaaggaggttgatgccgaagttgccaccatcctgaacgaggagctgacgcgccagcaggatggcatcgagctcatcgcttcggagaacatggcctcctttgccgtcatggaagcacagggttcagtgctgacgaacaagtatgcggaaggcctgccgggcaagcgctattatggcggttgcgtggatgtggaccgcgtcgagaaccttgccatcgatcgtctgaagaagatcttcggtgccgaattcgcaaacgtgcagccgcattccggcgccaatgccaaccaggccgccttcatggcgctggccaagcccggcgacacggttctgggcctgagccttgctgcgggtggacatctgacgcatggcgcagccccgaactattcgggcaagtggttcaactccgtacagtacggtgtacgcgccgaagacggtctgatcgactacgaccagatggaagccctggcccgcgagcacaagccgaagatcatcgtggctggcagctctgcctatccgcgcgtcatcgacttcgcgcgtttccgcaagattgccgatgaagtcggtgcgtatctgatggtggacatggcgcattttgccggtctggttgccgctggcctgtatccgaacccagttccgatggccgacatcaccacgtccacgacgcataagacgctgcgtggcccgcgtggtggcatcatcctgacgaacaaccccgatctggcgaagaaagtgaactccgccgtgttcccggggctgcagggcggtccgctcatgcacgtcattgcaggcaaggccgtcgcttttggcgaagccctgtcggatgagttcaaggcctatcagaagcgcgttctggccaatgcccgtgcgctggcggacgagcttcagaaccgtggcttcgacatcgtcacgggtggcacggacagccatctgatcctcgtggatctgcgtccgaagaaagtgacgggcaagctcgccgaagccatcctcgagcgcgctggcatcacggcgaacaagaacgccattccgttcgatccggaaaagccgttcgtaacctccggcatccgtctgggcagcccggcagcgacggcacgtggtttcggggaagccgagttccgcgaagtcggtcgtatgatcgacgaagtgctgacggcggctcttgaggaagacaatgccgaagccgtgacggcccgcgtgcatgaggaagtgaaggctctgtgccgccgcttcccgatctatgaccgcgcttctgcctaa

SEQ ID NO: 4291 - protein, 434 aa, Gluconobacter oxydans 621H
MSEHASQSTLNRFFHAPLKEVDAEVATILNEELTRQQDGIELIASENMASFAVMEAQGSVLTNKYAEGLPGKRYYGGCVDVDRVENLAIDRLKKIFGAEFANVQPHSGANANQAAFMALAKPGDTVLGLSLAAGGHLTHGAAPNYSGKWFNSVQYGVRAEDGLIDYDQMEALAREHKPKIIVAGSSAYPRVIDFARFRKIADEVGAYLMVDMAHFAGLVAAGLYPNPVPMADITTSTTHKTLRGPRGGIILTNNPDLAKKVNSAVFPGLQGGPLMHVIAGKAVAFGEALSDEFKAYQKRVLANARALADELQNRGFDIVTGGTDSHLILVDLRPKKVTGKLAEAILERAGITANKNAIPFDPEKPFVTSGIRLGSPAATARGFGEAEFREVGRMIDEVLTAALEEDNAEAVTARVHEEVKALCRRFPIYDRASA

SEQ ID NO: 4292 - DNA, 1254 bp, Xanthomonas campestris pv. campestris str. 8004
  CDS (1)..(1254): transl_table=11
atgttctcgcgcgacgtccgactggaaacctacgaccccgaactggccaaggccattgccgctgaagccggccgccaggaggatcacgtcgagctgatcgccagcgagaactactgcagcccgctggtgatggaagcccagggcagccagctgaccaacaagtacgccgaaggctacccgggcaagcgctactacggcggttgcgagttcgtcgacattgccgagcaattggccattgaccgcatcaagcaggtgttcggtgcggactacgccaacgtgcagccgcacagtggctcgcaggccaaccaggcggtgtacctcgcgctgctgcagccgggcgacaccatcctgggcatgagcctggcccatggcggccacctcacccacggcgccaaggtcaatgcctcgggcaagctgttcaacgccgtgcagtacggcgtgaacgagcagggcctgatcgattacgacgaggtgcagcgcctggccaccgagcacaagccgaagatggtcattgccggcttctcggcgtattcgcagaagatcgactgggcgcgcttccgcgccattgccgacagcgtcggtgcgtatctgttcgtggacatggcgcacgtggccggcctggtggccgccggtgtgtaccccagcccgatggaccatgcgcacgtggtcacctcgaccacgcacaagaccctgcgtggcccgcgtggcggcatcatcctggccaagggcgcgggcgaggacctggtcaagaagctgcagtcgatcgtgttccccggcatccagggtggcccgctgatgcacgtgatcgcggccaaggcggttgcgttcaaggaagcactggagccggagttcaagacctaccagcagcaggtggtcaagaacgcgcaggcgatggcgaacacgctgatcgcgcgcggctacaagatcgtctccggtggcaccgagaaccacctgatgctggtggacatgatcggccgcgatgtctcgggcaaggacgcagaagccgcgctcggcaaagcgcacatcaccgtcaacaagaactcggtgcccaacgacccgcgctctccctttgttacctcgggcctgcgcctgggcaccccggccattaccacccgcggttaccaggaacaggactgcgtggacctggccaactggatcgccgacgtgctggacgccccggccgacgacgccgtgctggccaaggtgcgcgatgcagtgaccgcgcagtgcaagaaatatcctgtgtatggctga

SEQ ID NO: 4293 - protein, 417 aa, Xanthomonas campestris pv. campestris str. 8004
MFSRDVRLETYDPELAKAIAAEAGRQEDHVELIASENYCSPLVMEAQGSQLTNKYAEGYPGKRYYGGCEFVDIAEQLAIDRIKQVFGADYANVQPHSGSQANQAVYLALLQPGDTILGMSLAHGGHLTHGAKVNASGKLFNAVQYGVNEQGLIDYDEVQRLATEHKPKMVIAGFSAYSQKIDWARFRAIADSVGAYLFVDMAHVAGLVAAGVYPSPMDHAHVVTSTTHKTLRGPRGGIILAKGAGEDLVKKLQSIVFPGIQGGPLMHVIAAKAVAFKEALEPEFKTYQQQVVKNAQAMANTLIARGYKIVSGGTENHLMLVDMIGRDVSGKDAEAALGKAHITVNKNSVPNDPRSPFVTSGLRLGTPAITTRGYQEQDCVDLANWIADVLDAPADDAVLAKVRDAVTAQCKKYPVYG

SEQ ID NO: 4294 - DNA, 1254 bp, Colwellia psychrerythraea 34H
  CDS (1)..(1254): transl_table=11
atgttttacaaaaatgatcaaatagccggtttcgatgacagtatttggcaagccatggagcaagaagacaaacgtcaacaagatcacgttgaattaattgcctcagaaaactataccagtgcgcgcgtgatgcaagcccaaggcagtcaactgaccaacaaatacgccgaaggttatcctggtaaacgttattacggcggctgtgaacacgttgatgtgattgagcaactggcgattgatcgtgcaaaagaattgttcggcgctgattacgccaatgtacaaccccattctggctcacaagccaatgccgcagtatttatggccttgcttaagcccggtgaaacggtgctcggcatgagcttagcgcacggtggtcatttaacccacggctctaaagtaagcttctctggtaaaatttataacgcagtgcaatacggcttaaatgaagcaaccggtgaaattgactacgaagaagtcgagcgtcttgcaaaagagcatcaaccgaaaatgattattgccggtttctcagcgtattcacgtgtggttgattggcagcgttttcgtgacattgccgatagcattggcgcgtggttatttgtcgatatggcgcacgtagctggtttagtggcggcaggtctttatcctaacccggtaccgattgcggatgtggtgactaccactacccataaaaccttacgtggtcctcgtggcggtttgattttagcgaaacaaaatgacgaactggctaagaaattaaattcagcggtattccctgccggtcaaggtggcccgttgatgcatgttatcgcggccaaagcgatttgtttcaaagaagcacttggcgagggttatgttgagtatcagcaacaggttatcgataacgcccgtgaaatggcaaaaacattccaaacccgtggttataacgtagtttctggcggtacggacaatcatttatttttattggatttaatcgataaaggtattaccggtaaagacgccgatgctgcgcttggccgcgctaatatcacggtcaataaaaactccgtgcctaacgacccacaatcaccatttgtcaccagtggtctgcgtatcggcacaccagccatcaccagtcgtggttttggacttgaggaagcagcagcattaacgggttggatttgtgatgtgttagatgacattagcaatgagcaagtgattgatgacgtgcgaagtaaagtgttggacttatgtgaaaaaaatccggtctaccgctag

SEQ ID NO: 4295 - protein, 417 aa, Colwellia psychrerythraea 34H
MFYKNDQIAGFDDSIWQAMEQEDKRQQDHVELIASENYTSARVMQAQGSQLTNKYAEGYPGKRYYGGCEHVDVIEQLAIDRAKELFGADYANVQPHSGSQANAAVFMALLKPGETVLGMSLAHGGHLTHGSKVSFSGKIYNAVQYGLNEATGEIDYEEVERLAKEHQPKMIIAGFSAYSRVVDWQRFRDIADSIGAWLFVDMAHVAGLVAAGLYPNPVPIADVVTTTTHKTLRGPRGGLILAKQNDELAKKLNSAVFPAGQGGPLMHVIAAKAICFKEALGEGYVEYQQQVIDNAREMAKTFQTRGYNVVSGGTDNHLFLLDLIDKGITGKDADAALGRANITVNKNSVPNDPQSPFVTSGLRIGTPAITSRGFGLEEAAALTGWICDVLDDISNEQVIDDVRSKVLDLCEKNPVYR

SEQ ID NO: 4296 - DNA, 1257 bp, Mycoplasma hyopneumoniae J
  CDS (1)..(1257): transl_table=4
atgtataagaaaatcaaacttagagaccaacaaatttctgagctgattaatttagaatctaaaagacagaatagccaaatcgagttaattgcaagtgaaaattatgcctcagaagacgtaattttggcaaatggaacaagtcctagtaacaaatatggtgaaggttatccggggaaaaggtattatggtggctgtacttttatcgatcaaattgaaaaaatcgcaattgaaagagtaaaaaaactttttaagattgagtatgcaaatgttcaaccttattctggatcaagtgcaaacgccgctgtttttgcagcacttttaaagcccggggataaaattcttggacttgacttaaatgctggtgggcatttaagtcatggatataaaatcaatttttcaggaatgttttattcaggaattagttattttttagatgaaaatgaacttcttgattatgacgcaatcgaaaaaatagccttaaaaacaaagccgaatttaattatttgtggttattcagcatattcaagaaaaattgattttgctcgctttcgacaaatcgctgataaagtaaatgcgtttttacttgctgatattgctcatattgccgggcttattgctgcaggccaacatccttcgccggttggatatgcccatataataacctcaacaacccagaaaactttgagaggaccaagaggcggcctgattttaactaacagtaaagaaattgctgcaaaaattgataaagttgtctttccgggaattcaaggcgggcctttttttcatacaattgcggcgaaagctgttgcttttaaagaagctttagaaccttgatttaaagaatattgtgcccaaattgttaaaaatgcatcgcattttgctagtgaatttataaaaaaaggaataagaattgtatctcagggtaccgaaaatcacctttttaccatcgacgttcttagttcttataatctaaatggcaaacaggcgcaaattttacttgaatctgttaatattatcaccaataaaaacacaattccaaatgatactttaagtccatttgtaacttcgggattacgtttgggaaccccggcgatgacttcgcggggctttaaggaacaggaatttagtcaaatggcagaaataattgattttgttctgagaaaaaaagagctaaatgcgcttgaaattaaagaaattaagaaaaaagttaaaattttaactaaaaatttcccgattaaaaaaagttactgaccttaa

SEQ ID NO: 4297 - protein, 418 aa, Mycoplasma hyopneumoniae J
MYKKIKLRDQQISELINLESKRQNSQIELIASENYASEDVILANGTSPSNKYGEGYPGKRYYGGCTFIDQIEKIAIERVKKLFKIEYANVQPYSGSSANAAVFAALLKPGDKILGLDLNAGGHLSHGYKINFSGMFYSGISYFLDENELLDYDAIEKIALKTKPNLIICGYSAYSRKIDFARFRQIADKVNAFLLADIAHIAGLIAAGQHPSPVGYAHIITSTTQKTLRGPRGGLILTNSKEIAAKIDKVVFPGIQGGPFFHTIAAKAVAFKEALEPWFKEYCAQIVKNASHFASEFIKKGIRIVSQGTENHLFTIDVLSSYNLNGKQAQILLESVNIITNKNTIPNDTLSPFVTSGLRLGTPAMTSRGFKEQEFSQMAEIIDFVLRKKELNALEIKEIKKKVKILTKNFPIKKSYWP

SEQ ID NO: 4298 - DNA, 1248 bp, Ralstonia eutropha JMP134
  CDS (1)..(1248): transl_table=11
atgttcgaacgcagccgctatacgatcgaccagatcgaccccgaggtctttgccgctatccagaaggaaaaccagcgccaggaagaccacatcgagctgatcgcctccgaaaactacacctcgccggccgtgatggctgcgcaaggctcgcaactgaccaacaagtacgccgagggctatcccggcaagcgctactacggtggctgcgagtacgtcgacatcgtcgaacagctggccatcgaccgcgtcaagcagctgttcggcgccgaagccgccaacgtgcagccgaactcgggctcgcaggccaaccagggcgtgtacttcgccgtgctgaagccgggcgacaccatcatgggcatgagcctggccgaaggcggtcacctgacccacggcatggcgctgaacatgagcggcaagtggttcaacgtggtcagctacggcctgaacgcgcaggaagacatcgactacgacgcgctggaaaagctggcacaagagaagaagccgaagctgatcatcgccggcgcatcggccttcgcgctgcgcatcgacttcgagcgcatcggcaaggtcgccaagtcgatcggtgcctacttcatggtcgacatggcccactacgccggcctgatcgccgcgggcgtgtacccgaacccggtgccgcacgccgacttcgtcaccaccaccacgcacaagagcctgcgcggcccgcgcggcggcgtgatcctgatgaaggccgagcatgagaaggccatcaactcgtcgatcttcccgggcatccagggcggtccgctgatgcacgtgatcgctggcaaggccgtcgcgttcaaggaagcgctgacgccggaattcaaggcttaccaggaacaagtggtcaagaacgccgccgtgctggccgaaacgctgatcgcgcgcggcctgcgcattgtctcgggccgcaccgaaagccacgtgatgctggtcgacctgcgcgccaagaacatcaccggcaaggaagccgagcgcatcctgggcgaagcgcacctgaccgtgaacaagaacgcgatcccgaacgatccggaaaagccgttcgtgacctcgggcattcgcgtcggctcgccggccatgaccacgcgcggcttcaaggaagaagaagcgcgtatcgtcggcaacctgatcgccgacgtgctggacaacccgcacgacgcgggcaacatcgccagcgtgcgcgagcaggtttccgccctgaccaagcgttttccggtctacggctga

SEQ ID NO: 4299 - protein, 415 aa, Ralstonia eutropha JMP134
MFERSRYTIDQIDPEVFAAIQKENQRQEDHIELIASENYTSPAVMAAQGSQLTNKYAEGYPGKRYYGGCEYVDIVEQLAIDRVKQLFGAEAANVQPNSGSQANQGVYFAVLKPGDTIMGMSLAEGGHLTHGMALNMSGKWFNVVSYGLNAQEDIDYDALEKLAQEKKPKLIIAGASAFALRIDFERIGKVAKSIGAYFMVDMAHYAGLIAAGVYPNPVPHADFVTTTTHKSLRGPRGGVILMKAEHEKAINSSIFPGIQGGPLMHVIAGKAVAFKEALTPEFKAYQEQVVKNAAVLAETLIARGLRIVSGRTESHVMLVDLRAKNITGKEAERILGEAHLTVNKNAIPNDPEKPFVTSGIRVGSPAMTTRGFKEEEARIVGNLIADVLDNPHDAGNIASVREQVSALTKRFPVYG

SEQ ID NO: 4300 - DNA, 1239 bp, Methanosarcina barkeri str. Fusaro
  CDS (1)..(1239): transl_table=11
atgtcttacattgaaaaaactgatccggaattgttcgaggctataaaaaaagaagccgagcgccaggaatataaactgaaccttatcgcatctgaaaattatgcgagtaaagccgtaatggaagctcagggatcgattctgaccaataaatatgccgaaggatattccggcaagcggtactatggtggctgcgacttcgtggacattgccgaggatctcgcgattgccagggcaaagaaaatctttaacgcaggctacgtcaacgtccagcctcactctggttctggggctaatatggctgtctatttctcggttttgaagccaggagacaccatcatgtccatggatctctctcacggcggtcatctttctcacggcagccctgtgagtttttccggaaagctctttaatattgtgccttacggggtcagtaaaaagactgagatgctggactattccgaacttatgaaaaaagcaaaggaaaacaaaccgcaaatgattgtttgtggagcttcagcttatcctcgtgaaatcgatttcaagcaattccgcgaaattgctgatgaggtaggagcctatctgcttgcagacattgcccacattgcaggtcttgtagttgcaggtgtgcacccgagtccagtaccttatgcggacttcgttaccagcacaacccacaaaactctccgaggcccaagaggcggaattattatctccaagacagaagaacttgcgaccagaattaacaaagcggttttccccggccttcagggtgggcctctcatgcacattatagccggaaaggcagtagcctttaaagaagccatgagtgaaaagttcaaacaggatcaggttcagaccgtaaagaacgcaaaaactctctgcaaatgcctgaaagagaaaggttttgatatggtatctggcgacacggataatcatcttatgcttgtcaatctcaacaatatgaatataacaggcaaggatgcagaagccgccctgagcaaagccgggattattgcaaacaaaaacacggtgccttttgagacacgcagtccatttatcacaagcggtgtaaggctcggaacccctgcctgtaccacgaggggtatgaaggaaacagaaatggaattaattgccgactatattgagaccgcaatcacaaactcagaaaacgataagatcctgtcggaaacaagtgacaaggtcagagaactctgttcaaggttccctgtttattgttaa

SEQ ID NO: 4301 - protein, 412 aa, Methanosarcina barkeri str. Fusaro
MSYIEKTDPELFEAIKKEAERQEYKLNLIASENYASKAVMEAQGSILTNKYAEGYSGKRYYGGCDFVDIAEDLAIARAKKIFNAGYVNVQPHSGSGANMAVYFSVLKPGDTIMSMDLSHGGHLSHGSPVSFSGKLFNIVPYGVSKKTEMLDYSELMKKAKENKPQMIVCGASAYPREIDFKQFREIADEVGAYLLADIAHIAGLVVAGVHPSPVPYADFVTSTTHKTLRGPRGGIIISKTEELATRINKAVFPGLQGGPLMHIIAGKAVAFKEAMSEKFKQDQVQTVKNAKTLCKCLKEKGFDMVSGDTDNHLMLVNLNNMNITGKDAEAALSKAGIIANKNTVPFETRSPFITSGVRLGTPACTTRGMKETEMELIADYIETAITNSENDKILSETSDKVRELCSRFPVYC

SEQ ID NO: 4302 - DNA, 1284 bp, Anabaena variabilis ATCC 29413
  CDS (1)..(1284): transl_table=11
gtgactagaacaaattcagattttctcactaattctgatccagcgatcgccggattgattaatcaagaactccaacgtcaacgggaccacttggagttaatcgccagtgaaaactttacctcggcggctgtcttggcggctcagggttcggtactgacaaataaatacgctgaggggctgccaggtaagcgctactacggtggttgtgagtttatcgataaaatcgagcaaatagccattgaccgcgctaaacagctatttggtgccgctcatgccaacgtccaaccccattccggcgcacaagccaattttgctgttttcctgactttactcgcaccaggagacaaaatcatggggatggatttgtctcatggtggacacctcacccacggttccccggtaaacgtttccggtaagtggttccaagtttgccactacggtgtcagtcaacaaacagaacaactagactatgaccaaattcgtgagctggcgctgagggagcgtcctaagcttttgatttgtggttattctgcttatccccgaattattgactttgaaaagttccgcagcatcgccgatgaagttggcgcgtatttgctggcggatattgcccacattgccggtttagtcgcaagtggactgcaccccgaccccataccttactgtcacgtcgtcacaactaccacccataaaaccctccgtggccccagaggtggtttaattttgaccggtgacgcagaactcggtaaaaaattggataaatccgtttttcctggaagccaagggggaccgttagaacacgtaattgctgggaaagcagttgcttttggtgaagccttaaagccagaatttcaaggctattcagcccaagtaattgagaatgctcgtgctttggcaaatcaactccagaatcgtggattaaagcttgtatccgatggtacggataaccacctaatgctcgtagatttacggtctgtgaacatgacaggtaaacgagcagaccagttagtgagtgaagtaaatatcaccgctaataaaaatacggttcccttcgatccccaatcaccatttgttaccagtggtttgcgcttgggttccccagctatgactacacgaggaatgggagaggcagaatttaccgaaattggtaatattatcgccgatcgcctactcaacccagattcagacacagtcgcccaagattgtaaacgccgggtagccgcattgtgcgatcgcttccccttatatccacacttggaaattcctgtaccagtcttagcttag

SEQ ID NO: 4303 - protein, 427 aa, Anabaena variabilis ATCC 29413
MTRTNSDFLTNSDPAIAGLINQELQRQRDHLELIASENFTSAAVLAAQGSVLTNKYAEGLPGKRYYGGCEFIDKIEQIAIDRAKQLFGAAHANVQPHSGAQANFAVFLTLLAPGDKIMGMDLSHGGHLTHGSPVNVSGKWFQVCHYGVSQQTEQLDYDQIRELALRERPKLLICGYSAYPRIIDFEKFRSIADEVGAYLLADIAHIAGLVASGLHPDPIPYCHVVTTTTHKTLRGPRGGLILTGDAELGKKLDKSVFPGSQGGPLEHVIAGKAVAFGEALKPEFQGYSAQVIENARALANQLQNRGLKLVSDGTDNHLMLVDLRSVNMTGKRADQLVSEVNITANKNTVPFDPQSPFVTSGLRLGSPAMTTRGMGEAEFTEIGNIIADRLLNPDSDTVAQDCKRRVAALCDRFPLYPHLEIPVPVLA

SEQ ID NO: 4304 - DNA, 1251 bp, Pelobacter carbinolicus DSM 2380
  CDS (1)..(1251): transl_table=11
atgtctcagactcttattcagcaagatcccgaaatcgccgaggccattcgcctcgaaaccgagcgccaggaatacaatctggaatttatcgcatcggaaaactttgtttccgagcaggtcatggaggcccagggctccatcatgaccaataaatacgccgaaggctatcctgcaaaacgctactacggcggctgcgaaatggtcgatattgccgagcgtctcgccatcgagcgtgccaaggaactgttcggtgccgaacatgccaatgtgcaggcgcatagtggatcgcaggctaacatggctgtctattttgccgcttgtaaaccgggcgacaccgtcctcggtatgaaccttgcccacggcggccatcttacccacggttcaccggtgaatttctccggtaaacttttcaatatcgtttcctacggtgtgcaaaaggaaactgggtacatcgattatgaagaggttgaacgactggctctcgaacacaaaccgactctgttggttgttggtgcaagcgcctatcctcggaccatcgattttcccgctttccgcaagatagcggataaggtcggcgccaagatcatggtcgatatggcgcatatcgcgggtctggttgcggccggagtacatcccagcccggtaccttatgccgaatttgtcaccacaaccacgcataaaaccctgcgcggtccgcgcggcgggatgattctttgtcgtgaggagtttgcaaaaactatcgacagtaatattttccccggcattcagggcggtccgttgatgcacgttatcgctgccaaggccgtttcctttaaagaagcactggcgcccgagtttaaagagtattcgacgcaagtggttaaaaatgccaaggtattggccgatgcgctggtcaaacggggactcaatctcgtttccgggggtaccgacaatcacctcatcctggtcgatttcaccggcactgaaaccaccgggaaaatggccgagaaagcccttgagaaagcgggtattacggttaataaaaactcggttcccttcgaaacccgttcgcccttcgttaccagcggtatccgtctgggaacgccggccaccacgacacgcgggctcaaggaagccgaaatggagcgtgtggccgattgggtggttcgtgctttggataacatggaaaatgatacggaacttgccgctattaagggtgaagttcgtgagatgtgcaaacggttccccctgtatgcacatcttctgaaataa

SEQ ID NO: 4305 - protein, 416 aa, Pelobacter carbinolicus DSM 2380
MSQTLIQQDPEIAEAIRLETERQEYNLEFIASENFVSEQVMEAQGSIMTNKYAEGYPAKRYYGGCEMVDIAERLAIERAKELFGAEHANVQAHSGSQANMAVYFAACKPGDTVLGMNLAHGGHLTHGSPVNFSGKLFNIVSYGVQKETGYIDYEEVERLALEHKPTLLVVGASAYPRTIDFPAFRKIADKVGAKIMVDMAHIAGLVAAGVHPSPVPYAEFVTTTTHKTLRGPRGGMILCREEFAKTIDSNIFPGIQGGPLMHVIAAKAVSFKEALAPEFKEYSTQVVKNAKVLADALVKRGLNLVSGGTDNHLILVDFTGTETTGKMAEKALEKAGITVNKNSVPFETRSPFVTSGIRLGTPATTTRGLKEAEMERVADWVVRALDNMENDTELAAIKGEVREMCKRFPLYAHLLK

SEQ ID NO: 4306 - DNA, 1254 bp, Xanthomonas campestris pv. vesicatoria str. 85-10
  CDS (1)..(1254): transl_table=11
atgttctcgcgcgatgtccgactggaaacctacgaccccgaactggccaaggccatcgctgctgaagccggccgccaggaggatcatgtcgagctgatcgccagcgaaaactattgcagcccgctggtgatggaagcgcagggcagccagctgaccaacaagtacgccgaaggctatccgggcaagcgctactatggtggctgcgagttcgtcgacattgccgaacaactggcgatcgaccgcatcaaacaggtgtttggcgccgattacgcgaacgtccagccgcacagcggttcccaggccaaccaggcggtgtatctggcgctgctgcagccgggcgacaccatcctgggcatgagcctggcacatggcggccacctgacccacggcgcaaaggtcaacgtctccggcaagctgttctacgcggtgcagtacggcgtcaacgagcagggcctgatcgattacgacgaggtccagcgcctggcgaccgagcacaagccgaagatggtggtggccggtttctccgcgtattcgcagaagatcgactgggcccgcttccgcgccatcgccgacagcgtcggcgcctatctgttcgtggacatggcgcacattgccgggctggtcgccgccggggtgtaccccagcccgatggaacatgcgcacgtggtcacttcgaccacgcacaagacactgcgtggcccgcgtggcggcatcatcgtcgccaagggtgccagcgaagagctgcagaaaaagctgcagtcgatcgtgttccccggcatccagggcggcccgctgatgcacgtcatcgcggccaaggcggtggcgttcaaggaggcgttggagccggcgttcaagacctatcagcaacaagtggtcaagaacgcccaggcgatggccaataccctcattgcgcgcggctacaagatcgtctccggcggcaccgagaaccacctgatgctggtggacatgatcggtcgcgatgtctccggcaaggacgccgaagctgcgcttggcaaggcgcacatcaccgtcaacaagaattcggtccccaacgacccgcgctcgccgttcgtcacttccggtctgcgcctgggcaccccggcgatcaccacgcgcggttaccaggaacaggacagcatcgacctggccaactggatcgccgacgtgctcgacgcgccaaccgacgaagccgtgctggcgaaggtgcgcgatgccgtgaccgcgcagtgcaagcgctatccggtttacggctaa

SEQ ID NO: 4307 - protein, 417 aa, Xanthomonas campestris pv. vesicatoria str. 85-10
MFSRDVRLETYDPELAKAIAAEAGRQEDHVELIASENYCSPLVMEAQGSQLTNKYAEGYPGKRYYGGCEFVDIAEQLAIDRIKQVFGADYANVQPHSGSQANQAVYLALLQPGDTILGMSLAHGGHLTHGAKVNVSGKLFYAVQYGVNEQGLIDYDEVQRLATEHKPKMVVAGFSAYSQKIDWARFRAIADSVGAYLFVDMAHIAGLVAAGVYPSPMEHAHVVTSTTHKTLRGPRGGIIVAKGASEELQKKLQSIVFPGIQGGPLMHVIAAKAVAFKEALEPAFKTYQQQVVKNAQAMANTLIARGYKIVSGGTENHLMLVDMIGRDVSGKDAEAALGKAHITVNKNSVPNDPRSPFVTSGLRLGTPAITTRGYQEQDSIDLANWIADVLDAPTDEAVLAKVRDAVTAQCKRYPVYG

SEQ ID NO: 4308 - DNA, 1248 bp, Burkholderia sp. 383
  CDS (1)..(1248): transl_table=11
atgttcaaccgcaccaccagcaccgttgccaacgtcgatccggaactttatgccgcgatcgagcaggaaaaccgccgccaggaagatcacatcgagctgatcgcgtcggaaaactacacgagcccggccgtgatggctgcgcagggttcgcaactcacgaacaagtacgcggaagggtatccgggcaagcgctactacggcggctgcgaatacgtggacgtggttgagcagctggcgatcgaccgcgtgaagcagctgttcggtgcggaagcggcgaacgtgcagccgaactcgggttcgcaggcgaaccagggcgtgttcttcgcgatgctcaagccgggcgacacgatcatgggcatgagcctcgcgcacggcggccacctgacgcacggctcgcccgtgaacatgtcgggcaagtggttcaacgtggtgagctacggcctgaacgaaaacgaagacatcgactacgaagcggccgagcagctcgcgcaggaacacaagccgaagctgatcgtcgcaggcgcgtcggcattctcgctgaagatcgatttcgagcgtctggcgaagatcgcgaagtcggtcggcgcgtacctgatggtcgacatggcccactacgcaggcctgatcgcagcgggcgtgtacccgaacccggtgccgcacgcagacttcgtgacgacgacgacgcacaagagcctgcgcggcccgcgcggcggcgtgatcctgatgaaggccgagtacgagaagccgatcaactcggcgatcttcccggggatccagggcggcccgctgatgcacgtgatcgcgggcaaggccgtggcgttcaaggaagcgctgtcgccggaattcaaggcgtaccaggagaaggtggtcgagaacgcccgcgtgctggctgaaacgctggtgaagcgtggcctgcggatcgtgtcgggccgtacggaaagccacgtgatgctggtggacctgcgtgcgaagaacatcacgggcaaggcagcggaagcagcgctgggtgctgcgcacatcacggtgaacaagaacgcgatcccgaacgatccggaaaagccgttcgtgacgagcggcgtgcgcctgggttcgccggcaatgacgacgcgcggcttcggcgtgaaggaagcggagatcgtcggcaacctgatcgccgatgtgctggaagcgccggaagatgcggccacgctcgagcgtgtgcgcgggcaggtcgccgaactgacgaagcgtttccccgtctacggctga

SEQ ID NO: 4309 - protein, 415 aa, Burkholderia sp. 383
MFNRTTSTVANVDPELYAAIEQENRRQEDHIELIASENYTSPAVMAAQGSQLTNKYAEGYPGKRYYGGCEYVDVVEQLAIDRVKQLFGAEAANVQPNSGSQANQGVFFAMLKPGDTIMGMSLAHGGHLTHGSPVNMSGKWFNVVSYGLNENEDIDYEAAEQLAQEHKPKLIVAGASAFSLKIDFERLAKIAKSVGAYLMVDMAHYAGLIAAGVYPNPVPHADFVTTTTHKSLRGPRGGVILMKAEYEKPINSAIFPGIQGGPLMHVIAGKAVAFKEALSPEFKAYQEKVVENARVLAETLVKRGLRIVSGRTESHVMLVDLRAKNITGKAAEAALGAAHITVNKNAIPNDPEKPFVTSGVRLGSPAMTTRGFGVKEAEIVGNLIADVLEAPEDAATLERVRGQVAELTKRFPVYG

SEQ ID NO: 4310 - DNA, 1248 bp, Geobacter metallireducens GS-15
  CDS (1)..(1248): transl_table=11
atgtcgatcctcgaaacctttgacccggcagtagccgaggccatccgtcatgaaaccgagcgccaggagtacaatctggagctcattgcgtccgaaaactttgtctccgaagcagtgatggaggcccaggggtcggttctgaccaacaaatatgctgaagggtaccctggcaagcgatactatggcggttgccaccatgtggatgtggtggagaaccttgcaattgagcgggcgaaagaactttttggtgccgatcatgcgaacgtccagccccactccggctcccaagccaatatggcggtttatttctcggtgctgaagccgggcgacaccattctcggcatgaatctctcccacggcggccaccttacccacggtagcccggtgaacttctcgggccggttcttcaacgtggttccctatggtgtttcccaggaaaccgagacgattgacttcaacgaagtcgagcgtctggcccttgagcataagccgaagctgatcgttgtgggggccagcgcctatccacgtgttctggattttgccgccttcagggccatagccgacaaagtgggggcgctggtcatggtggacatggcccatattgcggggctcgttgctgccggccttcacccaagcccggttccctatgccgagtttgtcaccacgacaacccacaaaaccctgcgtggaccccgcggcgggatgattctctgccgcgaggaatttgccaagaccctcaattccaatattttccccggtattcagggcggccctctcatgcatgtcatcgcggccaaggcagttgccttcaaagaggctcttgcgcctgaattcaagttgtatcaggagcagattgtcaagaatgcacggacccttgctgacgaactcatgaagcgcggcttccggcttgtctccggaggtaccgacaaccacctgatgcttgttaacctgacgggcaccgagttgaccggcaaggtggccgaggaggccctcgacaaagcgggtatcacggtcaacaagaacaccgtcccctttgagacacgctctccctttgttacctccggcttccggatcggtactcctgctgccacaagtcatggactcaaagaggcggagatggtggaagttgccgctttcatcgccgaggccttggcaaatgtggggaacgaggcaaagcttgcagaggtaaaggggaaagtgaacgcccttatgggccgttttccgctctatgccagccgcctgaagtaa

SEQ ID NO: 4311 - protein, 415 aa, Geobacter metallireducens GS-15
MSILETFDPAVAEAIRHETERQEYNLELIASENFVSEAVMEAQGSVLTNKYAEGYPGKRYYGGCHHVDVVENLAIERAKELFGADHANVQPHSGSQANMAVYFSVLKPGDTILGMNLSHGGHLTHGSPVNFSGRFFNVVPYGVSQETETIDFNEVERLALEHKPKLIVVGASAYPRVLDFAAFRAIADKVGALVMVDMAHIAGLVAAGLHPSPVPYAEFVTTTTHKTLRGPRGGMILCREEFAKTLNSNIFPGIQGGPLMHVIAAKAVAFKEALAPEFKLYQEQIVKNARTLADELMKRGFRLVSGGTDNHLMLVNLTGTELTGKVAEEALDKAGITVNKNTVPFETRSPFVTSGFRIGTPAATSHGLKEAEMVEVAAFIAEALANVGNEAKLAEVKGKVNALMGRFPLYASRLK

SEQ ID NO: 4312 - DNA, 1239 bp, Desulfovibrio desulfuricans subsp. desulfuricans str. G20
  CDS (1)..(1239): transl_table=11
atggacgaactgcttattcaggatccggaagtcggtcgcgccattgttcaggaagtggaacgtcagaccggcaagctggaactcatcgcctctgaaaactttgtgtcccccgcagtccgcgccgcacagggcagcgtgctgacccataaatacgccgaaggataccccggcaagcggtattacggcggttgcgaatttgtcgacgtggcggaaaacctcgccatcgaccgcgcctgcgaaatattcggcgcccagtacgccaacgtccagccccactccggcagccaggccaatatggccgtatacttttccgcgctgactcccggcgacaccattctggccatggatctgtcgcacggcggacacctgacccacggcagccccgtcaacttttcgggccggttctacaatgtggtgttctacggtgtctcgcgcgaaaccggctgcatagattatgacagcgtggcagaactggcacgcgagcaccgccccgccatgattgtggccggtgccagcgcctactcccgcatcatcgattttgcacggttccgcgccatagccgacgaagtgggttccctgcttatggtcgacatggcccacatagccggtctggtggccgccggtctgcatccttcccctgtgggcacggcgcacttcaccaccacaaccacgcacaaaaccctgcgcggtccgcgtggcggcatgattctgtcggacgaagaagccgccaaaaaactgaacagccagattttccccggcattcagggcggcccgctcatgcatgtcatcgccgccaaggctgtggccttcggcgaagcgctgcgtcccgaattcggcgcctaccagaagcaggtggtcgccaacgccgccaaactggccgccaccctgaccgatgccggttttgaactggtttccggcggcaccgacaaccacctgatgctggtggacctgacaaacaaggatatcaccggtaaagatgcccagcatgcgcttgaccttgcgggcatcaccgccaacaaaaacacggtgccttttgaaacccgctcgcctttcgtgacttcgggcatccggctgggtacccctgccctgaccacccgcggcatgaaagaagctgaaatggtcaaagtggccggctggataatcgacgcgctgggcaatatcggcaacgaaacccgtctggcggaaataagccgcgacgtggaaaagttcgcccgtcagttcccgctgttccactggtaa

SEQ ID NO: 4313 - protein, 412 aa, Desulfovibrio desulfuricans subsp. desulfuricans str. G20
MDELLIQDPEVGRAIVQEVERQTGKLELIASENFVSPAVRAAQGSVLTHKYAEGYPGKRYYGGCEFVDVAENLAIDRACEIFGAQYANVQPHSGSQANMAVYFSALTPGDTILAMDLSHGGHLTHGSPVNFSGRFYNVVFYGVSRETGCIDYDSVAELAREHRPAMIVAGASAYSRIIDFARFRAIADEVGSLLMVDMAHIAGLVAAGLHPSPVGTAHFTTTTTHKTLRGPRGGMILSDEEAAKKLNSQIFPGIQGGPLMHVIAAKAVAFGEALRPEFGAYQKQVVANAAKLAATLTDAGFELVSGGTDNHLMLVDLTNKDITGKDAQHALDLAGITANKNTVPFETRSPFVTSGIRLGTPALTTRGMKEAEMVKVAGWIIDALGNIGNETRLAEISRDVEKFARQFPLFHW

SEQ ID NO: 4314 - DNA, 1254 bp, Shigella dysenteriae Sd197
  CDS (1)..(1254): transl_table=11
atgttaaagcgtgaaatgaacattgccgattatgatgccgaactgtggcaggctatggagcaggaaaaagtacgtcaggaagagcacatcgaactgatcgcctccgaaaactacaccagcccgcgcgtaatgcaggcgcagggttctcagctgaccaacaaatatgctgaaggttatccgggcaaacgctactacggcggttgcgagtatgttgatatcgttgaacaactggcgatcgatcgtgcgaaagaactgttcggcgctgactacgctaacgtccagccgcactccggctcccaggctaactttacggtctacaccgcgctgctggaaccaggtgataccgttctgggtatgaacctggcgcatggcggtcacctgactcacggttctccggttaacttctccggtaaactgtacaacatcgttccttacggtattgatgctaccggtcatatcgactacgccgatctggaaaaacaagccaaagaacacaaaccgaaaatgattatcggtggcttctctgcatattccggcgtggtggactgggcgaaaatgcgtgaaatcgctgacagcatcggcgcttacctgttcgttgatatggcgcacgttgcgggcctggttgctgctggcgtctacccgaacccggttcctcatgctcacgttgttactaccaccactcacaaaaccctggcgggtccgcgcggcggtctgatcctggcgaaaggtggtagcgaagagctgtacaaaaaactgaactctgccgttttccctggtggtcagggcggtccgttgatgcacgtaatcgccggtaaagcggttgctctgaaagaagcgatggagcctgagttcaaaacttaccagcagcaggtcgctaaaaacgctaaagcgatggtagaagtgttcctggaacgcggctacaaagtggtttccggcggtactgataaccatctgttcctggttgatctggtagataaaaacctgaccggtaaagaagccgacgccgctctgggccgtgctaacatcaccgtcaacaaaaacagcgtaccgaacgatccgaagagcccgtttgtgacctccggtattcgcgtgggtactccggcgattacgcgtcgcggcttcaaagaagcagaagcgaaagaactggctggctggatgtgtgacgtgctggacagcatcaatgatgaagccgttatcgagcgtatcaaaggtaaagttctcgacatctgcgcacgttacccggtttacgcataa

SEQ ID NO: 4315 - protein, 417 aa, Shigella dysenteriae Sd197
MLKREMNIADYDAELWQAMEQEKVRQEEHIELIASENYTSPRVMQAQGSQLTNKYAEGYPGKRYYGGCEYVDIVEQLAIDRAKELFGADYANVQPHSGSQANFTVYTALLEPGDTVLGMNLAHGGHLTHGSPVNFSGKLYNIVPYGIDATGHIDYADLEKQAKEHKPKMIIGGFSAYSGVVDWAKMREIADSIGAYLFVDMAHVAGLVAAGVYPNPVPHAHVVTTTTHKTLAGPRGGLILAKGGSEELYKKLNSAVFPGGQGGPLMHVIAGKAVALKEAMEPEFKTYQQQVAKNAKAMVEVFLERGYKVVSGGTDNHLFLVDLVDKNLTGKEADAALGRANITVNKNSVPNDPKSPFVTSGIRVGTPAITRRGFKEAEAKELAGWMCDVLDSINDEAVIERIKGKVLDICARYPVYA

SEQ ID NO: 4316 - DNA, 1284 bp, Magnetospirillum magneticum AMB-1
  CDS (1)..(1284): transl_table=11
atgtccagcgcacccaccgatgcctttttccgcactccgctttccgagcgtgatcccgaggtcttcgcggccatcacccaggaactgaagcgtcagcaggatcagatcgaactgatcgcctccgagaacatcgtgtcgcgcgcggtgctcgaggcgcagggctcggtcatgaccaacaaatacgccgagggttatcccggcaagcgctattacggcggctgcgagttcgtggacatcgccgaaagcctggccatctcccgcgcttgccagatcttcggttgctcttatgccaacgtccagcccagctcgggctcgcaggccaaccagggcgtgttcatggcgctgctgcagccgggcgacaccatcatgggcatgagtttggccgccggcggccacctgacccatggtgccgcccccaaccagtcgggcaagtggttcaaggccgtgcagtacggcgtgcgccagcaggattcccagatcgacttcgccgaggtggaggaactggcccgtacccacaggccgaagctgatcatcgccggtggctcggcctatccgcgcaccatcgacttcgcgcgtttccgcaagatcgccgacgaggtcggggccttcttcatggtggacatggctcacttcgccggtctggtggccggcggcgtgtatcccaatccgctgccccacgcccatgtggtgaccacgaccactcacaagaccctgcgcggcccgcgtggcggcatgatcctgtccaacgacgccgacatcggcaagaagatcaactcggccattttccccggcattcagggcggcccgctgatgcatgtcatcgccggcaaggcggtggcgttcggcgaggcgctgaagcccgagttcaagctttacgccaagcaggtcgtcgacaatgcccgcgccctggccgacaccctggtgcgccgtggcctggacatcgtgtcgggcggcaccgattcccacctgatgctggtggatttgcggcccaagaagctgaccggcaaggcggccgaggccagcctcgagcatgccggcatgacctgcaacaagaacggcattcccttcgacccggaaaagcccaccatcacctcgggcgtgcgtctgggcaccccggcggcgaccacgcggggcttcggcgtcgaggagttcaagaaggtgggcgaactgatcggtgacgtgctcgacggtctggccgccaatcccgaggacaactcggcggccgaggcccgtgcccgcgccgaagtagctgaactgtgccggcgcttcccgatctaccagtag

SEQ ID NO: 4317 - protein, 427 aa, Magnetospirillum magneticum AMB-1
MSSAPTDAFFRTPLSERDPEVFAAITQELKRQQDQIELIASENIVSRAVLEAQGSVMTNKYAEGYPGKRYYGGCEFVDIAESLAISRACQIFGCSYANVQPSSGSQANQGVFMALLQPGDTIMGMSLAAGGHLTHGAAPNQSGKWFKAVQYGVRQQDSQIDFAEVEELARTHRPKLIIAGGSAYPRTIDFARFRKIADEVGAFFMVDMAHFAGLVAGGVYPNPLPHAHVVTTTTHKTLRGPRGGMILSNDADIGKKINSAIFPGIQGGPLMHVIAGKAVAFGEALKPEFKLYAKQVVDNARALADTLVRRGLDIVSGGTDSHLMLVDLRPKKLTGKAAEASLEHAGMTCNKNGIPFDPEKPTITSGVRLGTPAATTRGFGVEEFKKVGELIGDVLDGLAANPEDNSAAEARARAEVAELCRRFPIYQ

SEQ ID NO: 4318 - DNA, 1251 bp, Moorella thermoacetica ATCC 39073
  CDS (1)..(1251): transl_table=11
atgaacctggaaacagtagccaaggttgatcccgaaatagtagccgccgtcaggggcgagcttcaacgccagcggacccacctggaactaatcgcctcagagaacttcgtcagccaggccgtcatggaggcctatagctgcgtcctgaccaataaatacgccgaagggtatcccggcaaacgctattatggcggttgtgaatgggccgacgtagtcgaaaacttggcccgggaaagggccaaagccctcttcggggccgagcacgccaatgtccagccccattccggcagccaggccaacaccgccgtctacctggccgttctgaacccgggcgataaggccctgggcatgaacctggcccacggcggccatttgacccacggtagcccggtaagcctttccggcaaatactataacttctgtttctacggcgtcgatgccaaaaccggccgtattgactatgacgccgtagcccgcatcgcccgtgaggagcggcccagactgatcgtcgccggggccagcgcctacccgcgggtaatcgactttgcccgtttccgcgagattgccgacgaggtcggcgccctgctgatggtggatatggcccatatcgccggactggtggccgccggtatccatcccaacccggtaccctacgcccacttcgtgaccaccaccacccataagaccatgcgcggtccgcggggtgggattatcctgaccaccagggaatacgcccgggatatcgataaggccgtcttccccggtgtccagggcggtcccctgatgcacgtcatcgccgccaaggctgtggccttaaaggaggccatgctgccggagttcaaacgttaccaggagcaaatagttaccaatgcccgtaccctggccgacgccctcatgggctacggatttaacctggtttccggcggtaccgacaaccacctaatgctcgtcgacctacgcaataagaatataaccggccgggaggccgaagatatcctggcctcggtccagattaccgtcaacaagaacgccatccccttcgacccgcagaagcccagcgtaaccagcggcatccgcctgggaacggccgctctgacctcccggggcatggacgccgacgccatggtccaggtggcccgggccatcgacctggccctctcctacggtccggatgagaagaaactggaggaagccaggggtatcgtcgccgaactctgccgggccttccccctctaccaggagctcgactaa

SEQ ID NO: 4319 - protein, 416 aa, Moorella thermoacetica ATCC 39073
MNLETVAKVDPEIVAAVRGELQRQRTHLELIASENFVSQAVMEAYSCVLTNKYAEGYPGKRYYGGCEWADVVENLARERAKALFGAEHANVQPHSGSQANTAVYLAVLNPGDKALGMNLAHGGHLTHGSPVSLSGKYYNFCFYGVDAKTGRIDYDAVARIAREERPRLIVAGASAYPRVIDFARFREIADEVGALLMVDMAHIAGLVAAGIHPNPVPYAHFVTTTTHKTMRGPRGGIILTTREYARDIDKAVFPGVQGGPLMHVIAAKAVALKEAMLPEFKRYQEQIVTNARTLADALMGYGFNLVSGGTDNHLMLVDLRNKNITGREAEDILASVQITVNKNAIPFDPQKPSVTSGIRLGTAALTSRGMDADAMVQVARAIDLALSYGPDEKKLEEARGIVAELCRAFPLYQELD

SEQ ID NO: 4320 - DNA, 1281 bp, Hahella chejuensis KCTC 2396
  CDS (1)..(1281): transl_table=11
atgtttaccgaagatatgcggatcgctgattacgatcccgagctgtcggcggccattaatgcggaaaagcgccgtcaggaagaacacattgaattgatcgcctccgaaaactacgtcagcccgcgggtgatggaagcgcaaggcggcgtcttgaccaacaaatacgcggaaggctatcccggcaagcgttactacggcggctgcgagcacgtcgacgttgcggagcaattggccatcgaccgcgccaagcaactgttcggcgctgattacgccaacgtgcaaccccattctggatcacaggccaacgctggcgtgtatctggccctggccaagcctggcgacaccattctgggcatgagcctggaccacggcggtcatctgacccacggcgccaagcccaacttctccggcaaaattttcaacgccgtgcagtacggtctgaacccggaaaccggtgaaatcgactacgatcaggttgagcgtctggccaaagagcacaagccgaagctggttattgcgggtttctcagcttattcgcgagtggtggactggcagcgtttccgtgacattgcggacagtgttggcgcgtacctgatcgttgatatggcgcacgtcgcgggtcttgtcgcggcgggtctgtatccaagcccggtgcaaatcgccgacgtcaccacgactaccacgcacaaaaccttgcgcggcccacgcggcggtctgattttggcgaaatccaacccagagattgagaagaaactgcaatctttgattttccctggcattcagggcggtcctctgatgcacgtaatcgcagcgaaggcggtagcgtttaaagaggcgttggagccggcgttccgcgactatcagcagcaggtcgtgaataacgccagagccatggcggacgctgtgaaggcgcgcggctacaaagtcgtcagcggcggtacggataaccaccttttcctgatcgacctgatcgataagggcgtaaccggtaaagacgccgacgccgcattgggtcgggcttacattaccgttaacaagaatacggtgccgaatgatccgcagtcgccgttcgtaacttccggtctgcgcatcgggacgccaggcgtcaccactcgcggctttaaagaaaaagaagtcgtagagctggcgaactggatttgcgatgtgctggacaatatgggcgatgaaagcgtcgtagagaaagtccgtgagaaggtgctgagcatctgccgcgacttccctgtctaccgcgccaacgccaaatccggagccgccctgtga

SEQ ID NO: 4321 - protein, 426 aa, Hahella chejuensis KCTC 2396
MFTEDMRIADYDPELSAAINAEKRRQEEHIELIASENYVSPRVMEAQGGVLTNKYAEGYPGKRYYGGCEHVDVAEQLAIDRAKQLFGADYANVQPHSGSQANAGVYLALAKPGDTILGMSLDHGGHLTHGAKPNFSGKIFNAVQYGLNPETGEIDYDQVERLAKEHKPKLVIAGFSAYSRVVDWQRFRDIADSVGAYLIVDMAHVAGLVAAGLYPSPVQIADVTTTTTHKTLRGPRGGLILAKSNPEIEKKLQSLIFPGIQGGPLMHVIAAKAVAFKEALEPAFRDYQQQVVNNARAMADAVKARGYKVVSGGTDNHLFLIDLIDKGVTGKDADAALGRAYITVNKNTVPNDPQSPFVTSGLRIGTPGVTTRGFKEKEVVELANWICDVLDNMGDESVVEKVREKVLSICRDFPVYRANAKSGAAL

SEQ ID NO: 4322 - DNA, 1299 bp, Salinibacter ruber DSM 13855
  CDS (1)..(1299): transl_table=11
atgagtgcgctccgcaaccaagatcccgaaatccacgacgtcatccagaaggaggtccagcgccagaacgacgggctggagctcattgcgtccgaaaacttcgcctcccgggccgtcatggaggcgatgggcacggcccttacgaacaagtacgcggagggcctgccgggcaagcgctactacggcggatgcgaggtggtcgaccgggccgaggaactggcccgcgagcgggcgaaagagctctacgactgcgactgggtgaacgtgcagccgcacgcgggggcccaggccaactccgcggtgtatctgaccctcctggaccccggcgacaccttcctcgggctcgacctgtcgcacggcggccacctcacgcacggatcgcccgtcaacttctccggcattctttacgaggccgagtactacggggtggaggaggagaccggccgcatcgacatgaacagggtgcgcgaccgggcgaaggaggtgcagccgaagatgatctcgatcggggccagtgcctacccgcgcgacttcgactacgaggccttccgcgagatcgccgacgaggtcggcgcgttcctgtggatggacatggcgcacacggcggggctcattgcgggcggggtcctgaacgacccgatgccgcacacccacgtggtgaccaccaccacccacaagacgctccggggcccccgtggcggcatgattcttctgggcgacgactacgagaacccgatgggcaagacggcccgcaagagcgggcgcacgaagatgatgagcgagctgctcgactcggccgtctttcccggcacgcagggcggcccgttgatgcacgtgatcgccgcgaaggccgtcggcttcaaggaggccctcaagccctcgttcgccgagtacacccagcaggtcgtcgataacgcgcaggcaatgggcgccgagctccgcgagcggggctacgacctcgtctccgacgggacggacaaccacctcgtcctcatcgacctgcgcaacaaggggctcaccggcaaggaggccgagcaggccctcgaagcggccggcattacggccaacaagaacatggtgccgttcgacgacaagagcccgttcgtcacgagcgggctgcgcctgggaacgcccgcaatgaccacccgcgggttcgggccggatgagtttgcccacgtggcggagatgatcgaccgggtccttcaggatcccgaggatgaggacacgcaggcagcggtggaacgggaggtgaaggccctctgcgaccagcacccgctgtacgatgtcgctatggcgtag

SEQ ID NO: 4323 - protein, 432 aa, Salinibacter ruber DSM 13855
MSALRNQDPEIHDVIQKEVQRQNDGLELIASENFASRAVMEAMGTALTNKYAEGLPGKRYYGGCEVVDRAEELARERAKELYDCDWVNVQPHAGAQANSAVYLTLLDPGDTFLGLDLSHGGHLTHGSPVNFSGILYEAEYYGVEEETGRIDMNRVRDRAKEVQPKMISIGASAYPRDFDYEAFREIADEVGAFLWMDMAHTAGLIAGGVLNDPMPHTHVVTTTTHKTLRGPRGGMILLGDDYENPMGKTARKSGRTKMMSELLDSAVFPGTQGGPLMHVIAAKAVGFKEALKPSFAEYTQQVVDNAQAMGAELRERGYDLVSDGTDNHLVLIDLRNKGLTGKEAEQALEAAGITANKNMVPFDDKSPFVTSGLRLGTPAMTTRGFGPDEFAHVAEMIDRVLQDPEDEDTQAAVEREVKALCDQHPLYDVAMA

SEQ ID NO: 4324 - DNA, 1290 bp, Aster yellows witches'-broom phytoplasma AYWB
  CDS (1)..(1290): transl_table=11
atgcccaaaaatacaaaaagaaaaaggttgtgcccaaaaatgaatcaaaagttaggattaaaagaccaagatcaagaaatctttgatcttattgaacaagaaaaagctagacaaaaagaaaatatcttattaattgcttctgaaaattttgtttctcaagcagtattagacgcccaaggaagtattttgaccaacaaatatgcagaaggctatcctcaagctagatattataatggttgtaaaaatgtagatcaaatagaaaaaatcgccattcaaagagcaaccaagttgtttggtgctaaatatgcaaatgtccaacctcattcaggctcacaagcaaatatgggagtatttcaagctttattaaaacctggtgataaaattttaggattatctttaatggatggaggacatcttactcacggtcataaattaagtttttctggtggattttacgaagctcatttttataatgtcaatccccaaactgaaatgcttgattatgatgaaattcgtaaagttgccttagcagttaaacctaaattaattattgcaggatattcagcttattctaaaactattaattttaaaaagtttcgtcaaattgctgatgaagtaaatgcatatttaatagcagatattgcccatattgcaggtttagttgcttgtggtcttcatccttgtccctttgaagctaatgccgatgttgttacttctactatgcacaaaacgctgagaggaccgcgtggaggtttgattttaactaataaagaagaattatttaaaaaaattaatcgtggcatttttcctggtattcaaggaggaccttgcattcatactattgctgctaaagctgttgcttttcaagaagctatgatgccttcatttaaagaatatcaaaagcaagttatcaaaaatgcaaacacctttgctaaagccttccaacaaaaaggttatcgcattgtaagtggaagcactgacaatcatttatttctaattgatgttaaacataaaaatactgagtttacaggagccaaaatcgcaaacatgttagaaaaaataaatattgttgtcaataaaaatactattccttttgatcaagaaaaaccttttgtaacaagtggtattagaattggcacacctgctatgacaacagtagggtttagagaaaatgattttgttgcagttgcagatttgatggacaaagctatcaatcacttggacgatgagtcttatttatcccaaattaaacaacaagttttggctttattaagtaagtttaataaataa

SEQ ID NO: 4325 - protein, 429 aa, Aster yellows witches'-broom phytoplasma AYWB
MPKNTKRKRLCPKMNQKLGLKDQDQEIFDLIEQEKARQKENILLIASENFVSQAVLDAQGSILTNKYAEGYPQARYYNGCKNVDQIEKIAIQRATKLFGAKYANVQPHSGSQANMGVFQALLKPGDKILGLSLMDGGHLTHGHKLSFSGGFYEAHFYNVNPQTEMLDYDEIRKVALAVKPKLIIAGYSAYSKTINFKKFRQIADEVNAYLIADIAHIAGLVACGLHPCPFEANADVVTSTMHKTLRGPRGGLILTNKEELFKKINRGIFPGIQGGPCIHTIAAKAVAFQEAMMPSFKEYQKQVIKNANTFAKAFQQKGYRIVSGSTDNHLFLIDVKHKNTEFTGAKIANMLEKINIVVNKNTIPFDQEKPFVTSGIRIGTPAMTTVGFRENDFVAVADLMDKAINHLDDESYLSQIKQQVLALLSKFNK

SEQ ID NO: 4326 - DNA, 1254 bp, Syntrophus aciditrophicus SB
  CDS (1)..(1254): transl_table=11
atgtcagctttaatgaaaaccgatcctgaaatagccgaggccatccgtcttgaaacccggaggcaggcgggaaaactggaactcatcgcgtcggaaaactttgtcagcgaggctgttctcgaagcccagggatgcatcatgaccaacaagtacgcggaaggatatcccggaaaacgatactatggcggctgtgaatatgtcgacatcgcggaaaatctggcgatcgaacggtgcaaggcgctgttcggcgcggattacgtcaacgtccagcctcactcgggcacccaggccaacatggcggtttatttttccgccctttccgtgggggataccatcctggggatgaatctcgctcatggcgggcacttgtctcacggcagtccggccaacttctccggcaagttctacaatgtggtcccttacggcgtagaccgggaaacggaaacgatcgattacaaccaagtggaagacctcgccctgcagcacaaacccaggatgatcgtcgtcggcgccagcgcctatccccggaccatcgatttcgagaagttccgggccattgcggataaagtcggcgctctcgtcatggccgacatcgcacacatcgccggtctggtggcgacgggtctgcacccctctcctgtccccgtctgcgaatacgtcacctcgacgacccataaaaccctccgtggcccccgcgggggcttggtcatgtgccaggcgtcctaccagaaaacgctcagcagccgggtctttcccggtgttcagggcggtccactgatgcatatcatcgccgccaaagcggtggccttcaaggaagcccttacggatgaattcaaggattaccagagccagatcgtgaagaacgcccaggcgctggccaaagagctgatcggccggggatatcgcctcgtttccggggggacggacaaccatcttcttcttatggatttgaccgacaagggtctgacaggaaaggaagcgcaggaatcgctggattcggcgggaataactgtcaacaagaacggcatccccttcgacacccggggtcccatggtgaccagcggaatccggatcggcacgcccgccctgaccagccggggaatgaaggaagaagaaatgcggacgatagcccgcctgattgccgaggttctcgaacatcgggacaacgaaaaacatctgatggctgtcaaagaggaggtcggccggctctgtcaaaatttccccctttatgccgagcggatcgcgagcgcatga

SEQ ID NO: 4327 - protein, 417 aa, Syntrophus aciditrophicus SB
MSALMKTDPEIAEAIRLETRRQAGKLELIASENFVSEAVLEAQGCIMTNKYAEGYPGKRYYGGCEYVDIAENLAIERCKALFGADYVNVQPHSGTQANMAVYFSALSVGDTILGMNLAHGGHLSHGSPANFSGKFYNVVPYGVDRETETIDYNQVEDLALQHKPRMIVVGASAYPRTIDFEKFRAIADKVGALVMADIAHIAGLVATGLHPSPVPVCEYVTSTTHKTLRGPRGGLVMCQASYQKTLSSRVFPGVQGGPLMHIIAAKAVAFKEALTDEFKDYQSQIVKNAQALAKELIGRGYRLVSGGTDNHLLLMDLTDKGLTGKEAQESLDSAGITVNKNGIPFDTRGPMVTSGIRIGTPALTSRGMKEEEMRTIARLIAEVLEHRDNEKHLMAVKEEVGRLCQNFPLYAERIASA

SEQ ID NO: 4328 - DNA, 1245 bp, Rhodoferax ferrireducens T118
  CDS (1)..(1245): transl_table=11
atgtacaaccgtaacatcctcatcgaacaaaccgaccccgaaatttttgccgctattgcagcggaaaacgcccgccaggaacagcacatcgagctgatcgccagcgaaaactacgcctcacccgccgtcatggccgcgcagggcacgcaactgactaataagtatgctgaaggctaccccggcaaacgctactacggcggttgcgagtttgtggacattgccgagcaactggccattgaccgcgtcaagcaaatctttggcgccgatgccgccaacgtgcaaccccattgcggcgcgtccgccaacgaggcggtgtttctggcctttttgaaacccggcgataccatcatgggcatgagcctggctgaaggcggccacctgacgcacggcatggcactgaacatgagtggcaagtggttcaacgtcgtcagctacggcctgaacgacaaggaagagattgactacgacgccatggagcgaaaagcccatgagtccaaacccaaactgatcatcgccggtgcctccgcctacagcctgcgcatcgactttgctcgctttgccaaggtcgccaaagacgtgggcgccatctttatggtggacatggcgcactacgccggcctgattgccgccggcatctaccccaaccccgtgccacacgctgacgtggtgaccagcaccacccacaaaagcctgcgcggcccgcgaggcggcatcattttgatgaaagcgcagcacgagaaagccatcaacagcgccatcttccccggcctgcaaggtggcccgctgatgcatgtgattgcggccaaggcggtggcgttcaaagaagcgctacagcccgagttcaaggtctatcagcaacaagtgttgaccaacgcccgcgtcgtggctgaaacgctggtgtcgcgcggcctgcgcattgtgagtggccgcactgaaagccacgtcatgctggtcgatctgcgctccaaaagcatcactggcaaagaagctgaagcggtactgggcagcgcccacatgaccatcaacaaaaatgccatccccaatgaccctgaaaaacccatggtcaccagcggcgtgcgcatcggtaccccggccatgacgacccgcggcttcaaggacgaagaagcccgcattactgcaaatttgatagcagatgtactagataatccgagggatagcgccaatattgatgcagtacgcgccaaggtcaacgcactaaccaaacgcttccctgtttatggataa

SEQ ID NO: 4329 - protein, 414 aa, Rhodoferax ferrireducens T118
MYNRNILIEQTDPEIFAAIAAENARQEQHIELIASENYASPAVMAAQGTQLTNKYAEGYPGKRYYGGCEFVDIAEQLAIDRVKQIFGADAANVQPHCGASANEAVFLAFLKPGDTIMGMSLAEGGHLTHGMALNMSGKWFNVVSYGLNDKEEIDYDAMERKAHESKPKLIIAGASAYSLRIDFARFAKVAKDVGAIFMVDMAHYAGLIAAGIYPNPVPHADVVTSTTHKSLRGPRGGIILMKAQHEKAINSAIFPGLQGGPLMHVIAAKAVAFKEALQPEFKVYQQQVLTNARVVAETLVSRGLRIVSGRTESHVMLVDLRSKSITGKEAEAVLGSAHMTINKNAIPNDPEKPMVTSGVRIGTPAMTTRGFKDEEARITANLIADVLDNPRDSANIDAVRAKVNALTKRFPVYG

SEQ ID NO: 4330 - DNA, 1263 bp, Saccharophagus degradans 2-40
  CDS (1)..(1263): transl_table=11
atgtttgataccaagcaaacactcgacgcattcgacccagaaatttggcaatccatccaagatgaagcccagcgtcaagaagagcatattgagttaattgcttcagaaaactacaccagcccaatggtgatggaagcccaaggcaccaagcttactaacaaatatgcagaagggtacccaggcaagcgctactacggtggttgtgagtatgtagacaaagccgaagcattggctattgagcgtgcaaaaaccttgtttggtgcagattacgccaacgtacagccgcactctggttcgcaagctaactcggctgtttacgccgcattgtgttcacctggcgataccgtattaggcatgagcttggcgcacggtggtcacttaacgcacggtgcttccgttagcttctctggcaaaatgtacaacgcggtacagtacggcattaacccagatactggtttagtcgattacgaagaaattgctaacttggcgcgtgagcacaagccaaaaatgattgttgctggtttctcggcctatagccaagtactagattggcagaaattccgcgatatcgccgacgaagtaggcgcttacttaatggttgatatggctcacgttgctggtcttgttgccgctggtgtatacccatcacctgtgcaaattgccgatgtaactacctccactacccacaaaacattacgtggtccacgcggtggtattatccttgccaaagccaacccagagatagaaaagaaattaaactctgcggtattccctggcggtcaaggtggcccattgatgcacgtcattgcggctaaagcgattagctttaaagaggccatgaccgacgagtacaaagcgtatcaaaaacaagttgttgctaacgcaaaagccatggctgcaacattcaatgagcgcggcattaaaattgtatctggcggaaccgaaaaccaccttatgttggtagacttaatcggtaaagaatacaccggtaaagatgccgatgccgctttgggtgcagcgtacattaccgtaaacaaaaatgcggtacctaacgacccacgctcaccgtttgtaaccagcggtttacgcgttggtaccccggctgtaactacccgtggttttaaagagaagcagtgtatagaccttactaactggatttgcgacgtactagaaagcttagaaaacggcaattcagagcaagtaattgcagatgtaaaagcaaaagtattggctgtttgtgctgagttcccagtttacaaataa

SEQ ID NO: 4331 - protein, 420 aa, Saccharophagus degradans 2-40
MFDTKQTLDAFDPEIWQSIQDEAQRQEEHIELIASENYTSPMVMEAQGTKLTNKYAEGYPGKRYYGGCEYVDKAEALAIERAKTLFGADYANVQPHSGSQANSAVYAALCSPGDTVLGMSLAHGGHLTHGASVSFSGKMYNAVQYGINPDTGLVDYEEIANLAREHKPKMIVAGFSAYSQVLDWQKFRDIADEVGAYLMVDMAHVAGLVAAGVYPSPVQIADVTTSTTHKTLRGPRGGIILAKANPEIEKKLNSAVFPGGQGGPLMHVIAAKAISFKEAMTDEYKAYQKQVVANAKAMAATFNERGIKIVSGGTENHLMLVDLIGKEYTGKDADAALGAAYITVNKNAVPNDPRSPFVTSGLRVGTPAVTTRGFKEKQCIDLTNWICDVLESLENGNSEQVIADVKAKVLAVCAEFPVYK

SEQ ID NO: 4332 - DNA, 1293 bp, Methylobacillus flagellatus KT
  CDS (1)..(1293): transl_table=11
atgctaaaatcccgcctattcatttcatacccgagatatcgaaccatgtttagcacggccaaaaacctgagcgttgttgatcctgatctttggaaatatgtggaagcagagcgccatcgccaggacgaacacattgaactgattgcctccgagaattacaccagtcctgccgtgatgcaggcgcaaggttcgcaactgaccaacaagtatgcagagggctatccaggcaagcgattctatggcggctgtgaattcgttgatggtgtcgagcagctggcgatcgaccgcctgaagaagctgtttggcgccgagtatgccaacgtacagccacactccggctcccaggccaatcaggccgtatatttctccgtcctcaagcccggcgacaccgtcatggggatgaatctgggccatggcgggcacttgacccacggctcaccagccaacctgtccggcaagctgttcaacatcgtgccttacggcctgaatgacaaggaagagatcgactacgacgagatggaacgcattgcgctggaatgcaaacctaagctgctgatcggcggggcttctgcttacgccttgcgtttcgactgggcgcgcatggcagacatcgccaagaaagtaggcgcctatttcatggtcgatatggcgcattatgccggcctcatcgcggctggcgtctatcccaaccccgtgccgcatgccgattttgtcacctccacgacgcacaagaccttgcgtggcccgcgcggcggcctgatcatggccaaggcagagttcgagaagtcgctgaactccagcgtattccccagcctgcaaggtggtccattgatgcatgtcatcgctgctaaggcggttgccttcctcgaggccgcccagccagaattcaaggcctaccaggaacaagtattaaagaacgccgacaccatggccaagaccttggcttctcgaggcttgcgcatcatctccggcggcacgcagtcgcatgtgttcctggtcgacctgcgtcccaaggggctgactggcaaggcggctgacgcctatcttgggcaggcgcatatcaccgtgaacaagaacgccatcccaaacgaccccgagagcccattcgtcacttccggcatacgcatcggttcgcccgcgattaccacgcgcgggttcaaggaggccgaagctgcagaagtggccaacttgattgccgacatccttgataacccgactgacgagtccgtcatcgctgcgaccaaggccaaggtgcatgccttgacctcgcgcttcccggtgtacggcgcttag

SEQ ID NO: 4333 - protein, 430 aa, Methylobacillus flagellatus KT
MLKSRLFISYPRYRTMFSTAKNLSVVDPDLWKYVEAERHRQDEHIELIASENYTSPAVMQAQGSQLTNKYAEGYPGKRFYGGCEFVDGVEQLAIDRLKKLFGAEYANVQPHSGSQANQAVYFSVLKPGDTVMGMNLGHGGHLTHGSPANLSGKLFNIVPYGLNDKEEIDYDEMERIALECKPKLLIGGASAYALRFDWARMADIAKKVGAYFMVDMAHYAGLIAAGVYPNPVPHADFVTSTTHKTLRGPRGGLIMAKAEFEKSLNSSVFPSLQGGPLMHVIAAKAVAFLEAAQPEFKAYQEQVLKNADTMAKTLASRGLRIISGGTQSHVFLVDLRPKGLTGKAADAYLGQAHITVNKNAIPNDPESPFVTSGIRIGSPAITTRGFKEAEAAEVANLIADILDNPTDESVIAATKAKVHALTSRFPVYGA

SEQ ID NO: 4334 - DNA, 1245 bp, Polaromonas sp. JS666
  CDS (1)..(1245): transl_table=11
atgtaccatcgcaatattctggtcgaacagaccgaccccgaaattttcgctgccatccaggctgaaaacgcccggcaggaacaccacatcgagctgattgccagcgagaactacgcctcgcccgccgtcatggcagcccaaggctcgcagctcaccaataaatacgccgaaggctaccccggccgccgttattacggtggttgcgagtatgtggacgtggcggagcagctggcgattgaccgcatcaagcagatttttggcgcggatgccgccaatgtgcagccgcattgcggcgcttccgccaatgaggcggtgtttcttgccttcctgaagcccggcgacaccatcatggggatgagcctggccgaaggcggtcacctgacccacggcatggcactcaacatgagcggcaagtggtttaacgttgtctcctacggactcaacgacaaggaagagatcgactacgacgcgatggagcgcaaggcgcacgagacccgccccaagctcatcatcgccggcgcctcggcctacagcctgcgcatcgatttcgagcgttttgccaaagtcgccaaagccgtaggcgccatcttcatggttgacattgcgcactacgcgggcctggttgctgcgggcgtgtacccgaacccggtgccgcacgccgacgtcgtgacgtccactacgcacaagagcctgcgcggcccgcgcggcggcatcatcctgatgaaagccgagcacgagaaagccatcaacagcgcgatcttccccggcctgcagggtggcccgctgatgcacgtgattgccgcgaaggcggtggctttcaaggaagcgctctcccccgaattcaagacatatcagcagcaggtgctgacgaacgcgcgcatcgtggccgaaacgctgacgcaacgcggtttgcgtattgtcagcggccgaacagagagccacttgatgctggtcgacctgcgcgccaagggaatcaccggcaaggaagctgaagccgtactgggaagcgcccacatgactatcaataaaaacgcgattccgaatgacccggaaaagccgatggtcaccagtggcgtgcgcatcggtacaccagcgatgaccacgcgcggcttcaaggacgaagaggcacgcgtcacggccaacctgattgcagatgtgctggacaacccccgcgatgccgccaatatcgaagcggttcgcgccaaggtcaatgccctgaccagccgcttccctgtttaccgctga

SEQ ID NO: 4335 - protein, 414 aa, Polaromonas sp. JS666
MYHRNILVEQTDPEIFAAIQAENARQEHHIELIASENYASPAVMAAQGSQLTNKYAEGYPGRRYYGGCEYVDVAEQLAIDRIKQIFGADAANVQPHCGASANEAVFLAFLKPGDTIMGMSLAEGGHLTHGMALNMSGKWFNVVSYGLNDKEEIDYDAMERKAHETRPKLIIAGASAYSLRIDFERFAKVAKAVGAIFMVDIAHYAGLVAAGVYPNPVPHADVVTSTTHKSLRGPRGGIILMKAEHEKAINSAIFPGLQGGPLMHVIAAKAVAFKEALSPEFKTYQQQVLTNARIVAETLTQRGLRIVSGRTESHLMLVDLRAKGITGKEAEAVLGSAHMTINKNAIPNDPEKPMVTSGVRIGTPAMTTRGFKDEEARVTANLIADVLDNPRDAANIEAVRAKVNALTSRFPVYR

SEQ ID NO: 4336 - DNA, 1245 bp, Methanococcoides burtonii DSM 6242
  CDS (1)..(1245): transl_table=11
atgtcttacatttcagagattgacccggaaattgccaatgcattgtcattggaggcacagcgtcaggatttcaagttgaacttgatcgcttcagagaactacaccagccgcgctgttatggaagcacagggttccataatgaccaacaagtacgcagaaggctattccggaaagcgttattatggtggttgcgaatttgtcgatatggcagaggaccttgctatctcaagagcaaagcagatcttcggtgcagagcatgttaatgtccagcctcattcaggctcaggagctaacatggctgtctatttttctgttatcaagccaggcgacaagatcatgtcaatggacctttcccacggtggtcatctttcccacggaagtcctgtgagcttttcaggtcagttgtacaacatcgttccatacggtgtttcccaggataccgagatgcttgattataacgagctcatggaaatagcaaagaaagagaagccacagatgatcgttgtcggagcatctgcatattcccgtattatcgatttcaaggcattcagggaaattgctgacgaggttggagcataccttctcgcagatgttgcacacattgccggacttattgctgccggtgtacacccaaatccattcccatatgctgactttgtgacaacaaccactcataagacacttcgtggtccaaggggtggaatggtaatgtgcaaggaagagtacgcaaaagctatcaacaagtctgtattccccggaattcagggcggtcctcttatgcacataatcgctgcaaaggcagttgcattcaaggaagcattgagtgacagtttcaaaaaggatcaggaacaaaccgtcaagaacgcaaaagcactttgtgcagcgcttcaggacagggaattcgatatagtctctgatggaactgacaaccatcttatgcttatcaaccttaacaaatacgaccttacaggaaaggatgctgaggtcattatgagcaaagctggtattgttatcaacaagaataccattccattcgagacaagaggacctttcattacaagtggtctcagggcaggtacacctgcttgtactacacgtggtatgaaggaatcagcaatggatgagattgcagactttttcaagaccattattgacaacagggagaacaatgcagtccttgagactgtcaatgcagatgttcaggaactttgcagtcgcttccctatctatgagcatcttagataa

SEQ ID NO: 4337 - protein, 414 aa, Methanococcoides burtonii DSM 6242
MSYISEIDPEIANALSLEAQRQDFKLNLIASENYTSRAVMEAQGSIMTNKYAEGYSGKRYYGGCEFVDMAEDLAISRAKQIFGAEHVNVQPHSGSGANMAVYFSVIKPGDKIMSMDLSHGGHLSHGSPVSFSGQLYNIVPYGVSQDTEMLDYNELMEIAKKEKPQMIVVGASAYSRIIDFKAFREIADEVGAYLLADVAHIAGLIAAGVHPNPFPYADFVTTTTHKTLRGPRGGMVMCKEEYAKAINKSVFPGIQGGPLMHIIAAKAVAFKEALSDSFKKDQEQTVKNAKALCAALQDREFDIVSDGTDNHLMLINLNKYDLTGKDAEVIMSKAGIVINKNTIPFETRGPFITSGLRAGTPACTTRGMKESAMDEIADFFKTIIDNRENNAVLETVNADVQELCSRFPIYEHLR

SEQ ID NO: 4338 - DNA, 1257 bp, Psychrobacter cryohalolentis K5
  CDS (1)..(1257): transl_table=11
atgtttaaagatatctctatcaaagattttgatccagtacttgctgaagctatggctgctgaaagcgttcgtcaagagaaccatattgagcttatcgcttcagaaaactactgctcacaagcagtgatggaagcgcagggtactgatttgaccaacaaatacgctgaaggctatcctggtaagcgctattacggtggttgtgagcatgttgacgtcgttgagcaactagctattgaccgtgcaaaagaattgtttggtgcagaatatgtgaacgtacagccacactctggtagccaagcaaactctgctgtctttttagcattgcttgaagccaatgatactgtgcttggcatgagtttagatgctggtggtcacttaacgcatggcgcacatatcaacttctcaggtctaaactacaatgcagtacagtatggtttggtcgaaggcactggtcttatcgattatgaccaagttgagagcttggcaaaagagcataagcctaaaatgatcatcgctggtttttcagcgtattcacaagtagttgattgggcgcgtttccgtgaaatcgctgacgaagtaggcgcttacttactagtcgatatggctcacgttgctggtcttatcgctggcggcgtttacccaagcccagtaccatttgctgatgtagtgaccacgactacgcacaaaaccttacgtggcccacgttcaggtatgattcttgctcgtgatgaagtacttgctaaaaagctcaattctgccgtattcccaggtaaccaaggtggcccgttgatgcatgtcatcgcggcaaaagcagtttgctttaaagaagcattagaagagaacttcaaaacctatcagcagcaagtggttaaaaacgctcaagccatggcgaaagtcattcaagatcgcggctacgaaattatctctggtggcactgaaaaccatctgatgcttatcagcttagttaagcaagagatgaccggtaaagaagcggataaatggttgggtgacgcacacattacggtcaataaaaacgccgtaccaaacgatccaaaatctccgtttgtgacttctggtatccgtattggtacaccagcgattaccactcgcggcttcaacgaagcacaagcaggtgatttggcaggttggatttgtgatgttcttgacagccgtggcgatgaagcagtgactgctgaagtacgtggcaaagtagaagcgatctgtaaagagcttcctgtctatgctaaaaaccagtaa

SEQ ID NO: 4339 - protein, 418 aa, Psychrobacter cryohalolentis K5
MFKDISIKDFDPVLAEAMAAESVRQENHIELIASENYCSQAVMEAQGTDLTNKYAEGYPGKRYYGGCEHVDVVEQLAIDRAKELFGAEYVNVQPHSGSQANSAVFLALLEANDTVLGMSLDAGGHLTHGAHINFSGLNYNAVQYGLVEGTGLIDYDQVESLAKEHKPKMIIAGFSAYSQVVDWARFREIADEVGAYLLVDMAHVAGLIAGGVYPSPVPFADVVTTTTHKTLRGPRSGMILARDEVLAKKLNSAVFPGNQGGPLMHVIAAKAVCFKEALEENFKTYQQQVVKNAQAMAKVIQDRGYEIISGGTENHLMLISLVKQEMTGKEADKWLGDAHITVNKNAVPNDPKSPFVTSGIRIGTPAITTRGFNEAQAGDLAGWICDVLDSRGDEAVTAEVRGKVEAICKELPVYAKNQ

SEQ ID NO: 4340 - DNA, 1254 bp, Baumannia cicadellinicola str. Hc (Homalodisca coagulata)
  CDS (1)..(1254): transl_table=11
atgtttaaatatgatattaatattgctaattatgatactgctttatggaaagctatagaactagaagctaaacgtcaagaagaacacatcgaattaattgcatctgaaaactatacaagtccacgtgttatgcaagcacaaggttctattttaactaataaatatgctgaaggttattcaggtaaacgttactacggtggatgtgtatatgttgatcaagttgaaacattagctatagaccgcgctaaagcattatttgagtgtgattatgctaacgtacaaccacattctggctcacaagcaaattttgctgtgtacacagcgttattaaagccaggagatactatcttaggtatgaacttagctcatggtggtcatttaactcatggtgcttcggttaatttttctggaaaaatgtataatgtgatttcttatggcgttaataagaatggctatatcgactacgagcagttaaataaactagctacaatgcataaaccaaaaatgattattggtggtttttctgcttattctcgtgtggttgattgggatatcatgcgccaagtagctgatagtattaaagcatttttatttgtagacatggctcatattgccggtttagtagcggctggtgtttatcctaatcccgtaccttatgcagatgtcgtaactacaactacccataaaactctagctggtcctcgtggaggattaatacttgctcaaggtggtagtaaagaaatgtataaaaagcttgattctgccgtttttcctggagcgcaaggtggtccattaatgcatgtaatagcgggaaaagcaatagcattaaaggaagccatggagccagagttcaagatatatcaacaccaggtagtaaaaaatgctaaaactatggttaatgtattcttaaataggaattttaacgtagtatctggtggtacagataaccatctttttttactggatttagtagataaaaatataacaggccaagaagctgatgctgctttaagttatacaaatattacagttaacaaaaatattattccaaatgatccgcaaagttcatttgttacttctggtattcgcatcggcactccagctattactcgccgtggttttaatgaaactgatgcatatcagttagcgaactggatttgtgacgtactagaaaacattaataatgaagtagtacttaatgctacgaagaaaaaagtactaaatatttgtgctagtcatccagtttattcttga

SEQ ID NO: 4341 - protein, 417 aa, Baumannia cicadellinicola str. Hc (Homalodisca coagulata)
MFKYDINIANYDTALWKAIELEAKRQEEHIELIASENYTSPRVMQAQGSILTNKYAEGYSGKRYYGGCVYVDQVETLAIDRAKALFECDYANVQPHSGSQANFAVYTALLKPGDTILGMNLAHGGHLTHGASVNFSGKMYNVISYGVNKNGYIDYEQLNKLATMHKPKMIIGGFSAYSRVVDWDIMRQVADSIKAFLFVDMAHIAGLVAAGVYPNPVPYADVVTTTTHKTLAGPRGGLILAQGGSKEMYKKLDSAVFPGAQGGPLMHVIAGKAIALKEAMEPEFKIYQHQVVKNAKTMVNVFLNRNFNVVSGGTDNHLFLLDLVDKNITGQEADAALSYTNITVNKNIIPNDPQSSFVTSGIRIGTPAITRRGFNETDAYQLANWICDVLENINNEVVLNATKKKVLNICASHPVYS

SEQ ID NO: 4342 - DNA, 1281 bp, Candidatus Koribacter versatilis Ellin345
  CDS (1)..(1281): transl_table=11
atgtcaaatcgcatgtctcaatcgttaaacgaagaagatccgcagatcgcagaggcgatcgcgaatgaggaacgccgtcagcacgagggtctcgagctcatcgccagcgaaaattttgtcagcgaagcagtgcttcaggccgcgggctcagtattcaccaacaagtacgccgaggggtatccgggaaagcgctactacggcggctgcgagtatgccgatgtggttgagaacctggcgcgcgatcgcgcgaaggaactcttcggcgcggagcacgctaacgtgcagccgcactccgggtcatccgccaacatggaagcctatggcgcgatccttcagcccggcgacacaattcttggtctgaaccttgcgcatggtgggcacctcacccacggacatccactgaacttttccggtaagacctacaagatcgtcccgtacggcgtgaccaaagaaaccgagaccatcgattacgacgagctcgagaagcttgcgctggaacaccatccgaaggtgatcgtcggcggaggcagcgcgtatccgcgtattttcgatttcaagcgcatgcgcgaaatcgccgacaaagccggcgcgctcttcatggtagatatggcacacttcgccggactggttgccggcggcgcacatccttcgccggtgccgcatgcgcacgtcgtgacgaccaccacgcacaagacactgcgtggaccgcgcgcgggcatgatcctctccaagcaggaattcgcagcggcgattgataaagtcacattccccggcatgcagggagggccgctggtgcacatcatcgcggccaaggccgtgtgcttcaaagaagccatggagccgagcttcaaggactacgcgaaccaagtggtcgcgaacgcgaaggtgctggcgcagtcactcgccgaccagggcttccgcattatttccggaggcaccgatacgcacctgatgctgatcgatgtcttcgcggccggaatgttgggcagcgaagccgaaaaggcgttgggcgaagctggaatcacggtgaacaagaacgcaattccgtttgacaccaacccgccgatgaagccgagcggcgtccgcattggaacgccggcgcttacgacgcgcgggatgaaggaaccagagatgcggcaggtcggcatctggattgcggagtcgttacggcaccgcacggatccggatttcctcggccgcgtgcggcgacaggtgcacgagctttgcgatgcgtacccgctgtatccggagcggagagcaacccggctggcgacggtatag

SEQ ID NO: 4343 - protein, 426 aa, Candidatus Koribacter versatilis Ellin345
MSNRMSQSLNEEDPQIAEAIANEERRQHEGLELIASENFVSEAVLQAAGSVFTNKYAEGYPGKRYYGGCEYADVVENLARDRAKELFGAEHANVQPHSGSSANMEAYGAILQPGDTILGLNLAHGGHLTHGHPLNFSGKTYKIVPYGVTKETETIDYDELEKLALEHHPKVIVGGGSAYPRIFDFKRMREIADKAGALFMVDMAHFAGLVAGGAHPSPVPHAHVVTTTTHKTLRGPRAGMILSKQEFAAAIDKVTFPGMQGGPLVHIIAAKAVCFKEAMEPSFKDYANQVVANAKVLAQSLADQGFRIISGGTDTHLMLIDVFAAGMLGSEAEKALGEAGITVNKNAIPFDTNPPMKPSGVRIGTPALTTRGMKEPEMRQVGIWIAESLRHRTDPDFLGRVRRQVHELCDAYPLYPERRATRLATV

SEQ ID NO: 4344 - DNA, 1239 bp, Lawsonia intracellularis PHE/MN1-00
  CDS (1)..(1239): transl_table=11
atggatcaaataatacttcaagaccctgaattagcccaagcaattatcttagaaagtggccgacaaatagataagcttgaacttattgcatctgaaaatattgcttcaactgcagttcgagaagcacaatcaacaattttaacaaataaatatgctgagggttatcctgggaagcgttattatggtggttgtgaatatgtcgacatagctgaaaatttagcgatagaacgtgctaaagcactttttcatagtgaatatgctaatgtccaaccccactctggaagtcaagctaatatgggagcttattttgctctcattaagcctagggatacaatcttaggtatgaatttatctcatggaggacatttaactcatggaagtcctgtaaacttttcaggtcgactttttaatattgtatcgtatggtgtcaacaaagagacaggacttattgactatgaagaagtagcaaagcttgcagaaaaacataaaccacaactgattgtagctggagctagtgcttatccacgtattattgacttttctaaatttcgttcaattgctgatacaataggagcaaaacttcttgtagatatggcacatattgctgggcttgtagctacaaacttacacccttctccaataccatacgcacatataacaacaactactacacataaaacactacgtggtcctcgtggtggtatgattctttctacagaagatatggggaaggtaatcaatagccaaattttccctgggatacaaggtgggccacttatgcacgttattgcagcaaaagcagtagcattaggagaagcttcaaaagctagctttgtaacttaccaaaaacaagtaatcttaaatgctaaaacccttgcaaaacaacttttggatgctggttttaaccttgtttctggaggaacagataatcatcttctattaattgacttaacaaataaaaaaattacaggtaaagatgcagaaaaagctcttgatcaagctggcattactgtaaataaaaatacagttccttttgaaacactttctccttttgtaacatctggtattcgtattggcacaccagctttaacaactcgaggtttatgtgaacaagatatgataaaggttgctaactggattgttactgctcttaataatatcaataacgaaactcaacttaaagaaataaataaagaagttacttattttgctcgtcaatttccactcttttcatggtaa

SEQ ID NO: 4345 - protein, 412 aa, Lawsonia intracellularis PHE/MN1-00
MDQIILQDPELAQAIILESGRQIDKLELIASENIASTAVREAQSTILTNKYAEGYPGKRYYGGCEYVDIAENLAIERAKALFHSEYANVQPHSGSQANMGAYFALIKPRDTILGMNLSHGGHLTHGSPVNFSGRLFNIVSYGVNKETGLIDYEEVAKLAEKHKPQLIVAGASAYPRIIDFSKFRSIADTIGAKLLVDMAHIAGLVATNLHPSPIPYAHITTTTTHKTLRGPRGGMILSTEDMGKVINSQIFPGIQGGPLMHVIAAKAVALGEASKASFVTYQKQVILNAKTLAKQLLDAGFNLVSGGTDNHLLLIDLTNKKITGKDAEKALDQAGITVNKNTVPFETLSPFVTSGIRIGTPALTTRGLCEQDMIKVANWIVTALNNINNETQLKEINKEVTYFARQFPLFSW

SEQ ID NO: 4346 - DNA, 1296 bp, Ruegeria sp. TM1040
  CDS (1)..(1296): transl_table=11
atgactgacgcgacccgcgaccccggtttcttcacccaaagcctctctgagcgcgacccagagctttttggcgcaatcaccgatgaactcggtcgtcagcgcgacgagatcgagctgatcgcctccgaaaacatcgtctctgctgccgtcatggaagcgcagggctctgtgctgaccaacaagtatgccgaaggctacccgggccgtcgctattatggcggctgccagtatgtcgacgtggccgaaaacctcgccatcgaccgggccaagcagctgttcaactgcgaatttgccaatgtgcagcccaactccggctcgcaggcgaaccagggcgtgttccaggcgattctgaagcccggcgacaccatcctcggcatggatctcgcgtccggcggtcacctcacccatggtgcagcgccaaaccagtccggcaaatggttcaacgcggtgcactacggcgtgcgcgaatccgactgcctgatcgactatgatcaggttcaggcacttgcgaccgagcaccagcccaagctgatcatcgccggcggctccgcgatcccgcgccagatcgattttgccaagttccgtgaaatcgctgacagcgtcggtgcctatctgctggtggacatggcgcatttcgccggtcttgttgcagcaggcgagcatccttcgcccttcccgcatgctgatgtggccaccaccaccacccacaagaccctgcgcggcccgcgtggcggcatgatcctgaccaacaacccggatctggcaaagaaattcaactctgccatcttcccgggcattcagggcggcccgctgatgcacgtgatcgcaggcaaagccgccgcctttggcgaggcgctgaagcccgagttcaaatcctaccagaaacaagtgcgtgcaaacgcggttgcgctggcggatgagctgatcaaaggcggtctggacatcgtgaccggcggcaccgacacccatgtgatgctggtagacctgcgccccaaaggcgtgacgggcaacatcgtcgacaaagcgctcggccgtgcgcatatcaccaccaacaagaacggcatcccgttcgacccggaaaagcccaccgtgacctccggtatccgcctcggcacgcctgcaggcacgacccgtgggtttggtgaggaagagttccgcgagatcgcccgtctgatcgtcgaggtggtcgacggtctcgcagccaatggcgaggacggcaacgccgcggtcgaagaagccgtgcgtggcaaagtcgcggcgctctgcggccgcttcccgctctatccaaacctctga

SEQ ID NO: 4347 - protein, 431 aa, Ruegeria sp. TM1040
MTDATRDPGFFTQSLSERDPELFGAITDELGRQRDEIELIASENIVSAAVMEAQGSVLTNKYAEGYPGRRYYGGCQYVDVAENLAIDRAKQLFNCEFANVQPNSGSQANQGVFQAILKPGDTILGMDLASGGHLTHGAAPNQSGKWFNAVHYGVRESDCLIDYDQVQALATEHQPKLIIAGGSAIPRQIDFAKFREIADSVGAYLLVDMAHFAGLVAAGEHPSPFPHADVATTTTHKTLRGPRGGMILTNNPDLAKKFNSAIFPGIQGGPLMHVIAGKAAAFGEALKPEFKSYQKQVRANAVALADELIKGGLDIVTGGTDTHVMLVDLRPKGVTGNIVDKALGRAHITTNKNGIPFDPEKPTVTSGIRLGTPAGTTRGFGEEEFREIARLIVEVVDGLAANGEDGNAAVEEAVRGKVAALCGRFPLYPNL

SEQ ID NO: 4348 - DNA, 1254 bp, Shewanella sp. MR-4
  CDS (1)..(1254): transl_table=11
atgctgaaaaaagatatgaatatcgcagattatgatccggaactgttcaacgcaattcagaacgaaactctgcgtcaagaagagcatattgagctgattgcttctgaaaactacaccagtccacgcgtgatgcaagcgcaaggttcacaattaaccaacaagtacgccgaaggttatcctggcaagcgttactacggtggttgtgagtatgtggacgtagttgaaaccttagcaattgagcgtgcaaaacaactgtttggtgcgacttacgcaaacgtgcaacctcactcaggttctcaagcaaacagcgccgtttacatggcattgttaaaaccaggcgataccgttttaggtatgaacctcgctcacggtggtcacttgacccacggttcacctgtaaacttctccggtagactgtacaacatcattccttacggcatcgatgaatcaggcaaaatcgactacgacgaaatggaacgtctggcagttgaacataagcctaagatgatgatcggtggtttctctgcttactcaggcatcgttgactgggcaagaatgcgcgaaatcgcagacaaaatcggtgcttacctgtttgtcgacatggcgcacgttgcgggtcttatcgccgctggtgtgtatccaaaccctgtgccacacgcgcacgttgtgacctcaaccactcacaagaccttagccggtcctcgtggcggtatcattctgtctgcagccgatgatgaagatttatacaaaaagctgaactctgcggtattcccaggcggtcaaggcggtcctttgatgcacgttatcgcaggtaaagcggtagccttcaaagaagctttagagccagagttcaaagcttaccaacaacaagtggttaagaacgctaaagctatggttgaagtgttcttagagcgcggttacaagatcgtttctggcggtactgacaaccacttaatgctggtggacttaatcggtcgcgacctgacgggtaaagaagccgatgccgctttaggtagcgcgaacatcacagtaaacaaaaactctgtgcctaacgatccacgttctccattcgtgacctctggtgtgcgtattggtacgcctgcgatcactcgccgcggctttaaagaagctgaagcgaaagagttaaccggttggatctgtgacatcctcgacgatgcccacaacccagcagtcatcgagcgcgtaaaaggccaagtattggcactgtgcgcccgtttccctgtttacggttaa

SEQ ID NO: 4349 - protein, 417 aa, Shewanella sp. MR-4
MLKKDMNIADYDPELFNAIQNETLRQEEHIELIASENYTSPRVMQAQGSQLTNKYAEGYPGKRYYGGCEYVDVVETLAIERAKQLFGATYANVQPHSGSQANSAVYMALLKPGDTVLGMNLAHGGHLTHGSPVNFSGRLYNIIPYGIDESGKIDYDEMERLAVEHKPKMMIGGFSAYSGIVDWARMREIADKIGAYLFVDMAHVAGLIAAGVYPNPVPHAHVVTSTTHKTLAGPRGGIILSAADDEDLYKKLNSAVFPGGQGGPLMHVIAGKAVAFKEALEPEFKAYQQQVVKNAKAMVEVFLERGYKIVSGGTDNHLMLVDLIGRDLTGKEADAALGSANITVNKNSVPNDPRSPFVTSGVRIGTPAITRRGFKEAEAKELTGWICDILDDAHNPAVIERVKGQVLALCARFPVYG

SEQ ID NO: 4350 - DNA, 1260 bp, Alkalilimnicola ehrlichii MLHE-1
  CDS (1)..(1260): transl_table=11
atgttctcccgtgatatgaccatcgccagctttgacccggaactctccgaggccatggaggccgagcgccgtcggcaggaggatcacatcgagctgatcgcctccgagaactacgccagcccccgggtgctcgaggcccagggcagcgtactcaccaacaagtatgccgagggctacccgggcaagcgctattacgggggctgcgagcatgtggacgaggccgagcgcctggccatcgagcgggccaagcagctctttggcgccgactacgccaatgtgcagccgcactccggctcccaggccaacgcggccgtctatctggcgctgctccagcccggcgacaccatcctgggcatgagcctggaccacggcgggcacctgacccacggcgccaaggtgaacttctccgggcggctgttcaacgccgtgcagtacggcgtctgccccgacaccggcgagctggactacgcccagctcgagcgcctggccaaggagcaccagccgaagatgattatcggcggcttctccgcctactcccgggtggtggactggcagcgcctgcgcgacatcgccgattcggtgggcgcctacctgctggtggatatggcccacgtggcgggcctggtcgccgccggtgtctacccgagcccggtgcagatcgccgatgtcaccaccaccaccacccacaagaccctgcgcggcccgcgcggtggcctgatcctggcccgggccaacgccgaggtggagaaaaagctcaactcgctggtcttccccggcacccagggcgggccgctgatgcacgccatcgccggcaaggccgtggccttcaaagaggccctggagccggagttcaaggcctatcagcagcaggtggtcgcaaacgcccgggcgatggcccaggggctgatcgagcgcggctacaaggtggtctcgggcggcaccgacaatcacctgttcctgatcgacctggtggacaaggggctgaccggcaaggccgccgacgccgccctgggcaaggcgcacatcacggtcaacaagaacaccgtgcccaacgatccgcagtcgccctttgtcacctccggcctgcgcattggcaccccggcgatcaccacccgcggcttcaaggaagaggagtgccgcgagctggctggttggatggccgacgtgctggatgacatcgagaacgaggacgtgattgcgcgggtgcgcgagcaggtcacccaggtctgccgccgcctgccggtctaccaacagggctga

SEQ ID NO: 4351 - protein, 419 aa, Alkalilimnicola ehrlichii MLHE-1
MFSRDMTIASFDPELSEAMEAERRRQEDHIELIASENYASPRVLEAQGSVLTNKYAEGYPGKRYYGGCEHVDEAERLAIERAKQLFGADYANVQPHSGSQANAAVYLALLQPGDTILGMSLDHGGHLTHGAKVNFSGRLFNAVQYGVCPDTGELDYAQLERLAKEHQPKMIIGGFSAYSRVVDWQRLRDIADSVGAYLLVDMAHVAGLVAAGVYPSPVQIADVTTTTTHKTLRGPRGGLILARANAEVEKKLNSLVFPGTQGGPLMHAIAGKAVAFKEALEPEFKAYQQQVVANARAMAQGLIERGYKVVSGGTDNHLFLIDLVDKGLTGKAADAALGKAHITVNKNTVPNDPQSPFVTSGLRIGTPAITTRGFKEEECRELAGWMADVLDDIENEDVIARVREQVTQVCRRLPVYQQG

SEQ ID NO: 4352 - DNA, 1248 bp, Syntrophomonas wolfei subsp. wolfei str. Goettingen
  CDS (1)..(1248): transl_table=11
atggattatattcaagagtatgttaagccggttgacccagaagtggcggaagccattgaaaaggaagaggccaggcaaaacaacaaattggaactaattgcttcggaaaactttgtatcccgtgctgttatggctgcccagggttcggtgatgaccaataaatatgccgaaggtttacctggggccaggtattatggtggttgcgaatatgtggacatagtagaagaactggcccgggacagggtaaaagagattttcggagctgaacatgccaatgtgcaaccccattccggcgcccaagctaatacagcggtatattttgcggcgttgcagccgggacaaaccatcatgggtatgaatctaaatcatgggggacatcttactcacggcagtaaagtgaatatatccgggaagtatttcaatattgtggactatggggttaacagggatacagagagaattgattatgaagagttacgagaaatagcgctaaaagctcgtccccaaatgattgtggccggagccagtgcttacccccggattttggattttaaaaagttccgggaaatcgctgatgaagccggggctcttctttttgttgatatggcccacatcgctggtctggtagctgcaggccttcatcccagcccggttccctatgccgattttgtatcctctaccactcacaaaactttgcgtggaccccggggaggatttattttatgccggcaagaatgggccaacaaaatagacaaagcggttttccccggcatacagggagggcctttgatgcatgtaatagcagccaaggccgtttgcttcaaagaggctcttacgccggaatttaaagcctatcagcaggatattgttaacaatgccgctatattggcaaaggctttgatggagcagggtttacgtgtggtatcaggaggaacggacaatcacctcatgttagtggatgtccgtcccaaaggacttaatggccgggatgccgaagccattctggaatccataaatataaccgtaaacaaaaatgctatcccctttgatccagagaagccgactgttaccagtggcatccgggtaggaactccagcggttaccagccgggcgctaaaaggagacgatatgagggaattggcccgggctataaccctggtactggacaagcatgacagcgaggaagtaaaggaagaagcccggaggatagtaaaagctctctgtgataagtatccactgtatacctag

SEQ ID NO: 4353 - protein, 415 aa, Syntrophomonas wolfei subsp. wolfei str. Goettingen
MDYIQEYVKPVDPEVAEAIEKEEARQNNKLELIASENFVSRAVMAAQGSVMTNKYAEGLPGARYYGGCEYVDIVEELARDRVKEIFGAEHANVQPHSGAQANTAVYFAALQPGQTIMGMNLNHGGHLTHGSKVNISGKYFNIVDYGVNRDTERIDYEELREIALKARPQMIVAGASAYPRILDFKKFREIADEAGALLFVDMAHIAGLVAAGLHPSPVPYADFVSSTTHKTLRGPRGGFILCRQEWANKIDKAVFPGIQGGPLMHVIAAKAVCFKEALTPEFKAYQQDIVNNAAILAKALMEQGLRVVSGGTDNHLMLVDVRPKGLNGRDAEAILESINITVNKNAIPFDPEKPTVTSGIRVGTPAVTSRALKGDDMRELARAITLVLDKHDSEEVKEEARRIVKALCDKYPLYT

SEQ ID NO: 4354 - DNA, 1296 bp, Burkholderia ambifaria AMMD
  CDS (1)..(1296): transl_table=11
atgtactcggccgcaccggtcaacctgtacacacttaacggaaaccgtatgtttgacagagcccaaagcaccatcgcgaacgtcgatcccgaactctttgctgcgatcgagcaggaaaaccgccgccaggaagatcacatcgagctgatcgcgtcggaaaactacacgagcccggccgtgatggccgcccagggctcgcagctcacgaacaagtacgcggaaggttatccgggcaagcgctactacggcggctgtgaatacgtcgatgtggtcgagcagctggcgatcgaccgtgtgaagcagctgttcggcgcggaagccgcgaacgtgcagccgaactcgggttcgcaggcgaaccagggcgtgttcttcgcgatgctcaagccgggcgacacgatcatgggcatgagcctcgcgcacggtggtcacctgacgcacggctcgccggtgaacatgtcgggcaagtggttcaacgtggtgagctacggtctgaacgagcaggaagacatcgactacgacgcggccgagcagctcgcgcaggaacacaagccgaagctgatcgtcgcgggtgcatcggcgttcgcgctgaagatcgacttcgagcgtctggcgaagatcgcgaagtcggtcggtgcatacctgatggtcgacatggcgcactacgcgggcctgatcgcggcgggcgtgtatccgaacccggtgccgcacgccgacttcgtgacgacgacgacgcacaagagcctgcgcggcccgcgcggtggcgtgatcctgatgaagtcggaatacgagaagccgatcaactcggcgatcttcccgggcatccagggtggcccgctgatgcacgtgatcgcggcgaaggccgtggcgttcaaggaagcgctgtcgccggaattcaaggcgtaccaggaaaaggtggtcgagaacgcgcgcgtgctggctgaaacgctggtcaagcgcggcctgcggatcgtgtcgggccgcaccgaaagccacgtgatgctggtggacctgcgcgcgaagaacatcacgggcaaggcagcggaagcagcgctcggtgccgcgcacatcacggtgaacaagaacgcgatcccgaacgatccggagaagccgttcgtgacgagcggcatccgtctgggttcgccggcgatgacgacgcgcggctttggcccggcggaagcggaactggtcggcaacctgatcgccgacgtgctcgagaatccggaagatgcagcgacgatcgagcgcgtgcgcacgcaagtggccgagctgaccaagcgtttcccggtctatcgctga

SEQ ID NO: 4355 - protein, 431 aa, Burkholderia ambifaria AMMD
MYSAAPVNLYTLNGNRMFDRAQSTIANVDPELFAAIEQENRRQEDHIELIASENYTSPAVMAAQGSQLTNKYAEGYPGKRYYGGCEYVDVVEQLAIDRVKQLFGAEAANVQPNSGSQANQGVFFAMLKPGDTIMGMSLAHGGHLTHGSPVNMSGKWFNVVSYGLNEQEDIDYDAAEQLAQEHKPKLIVAGASAFALKIDFERLAKIAKSVGAYLMVDMAHYAGLIAAGVYPNPVPHADFVTTTTHKSLRGPRGGVILMKSEYEKPINSAIFPGIQGGPLMHVIAAKAVAFKEALSPEFKAYQEKVVENARVLAETLVKRGLRIVSGRTESHVMLVDLRAKNITGKAAEAALGAAHITVNKNAIPNDPEKPFVTSGIRLGSPAMTTRGFGPAEAELVGNLIADVLENPEDAATIERVRTQVAELTKRFPVYR

SEQ ID NO: 4356 - DNA, 1254 bp, Pseudomonas aeruginosa UCBPP-PA14
  CDS (1)..(1254): transl_table=11
atgttcagcaagcatgaccagatccgcggctacgacgacgaactgctcgccgcgatggacgccgaagaggcccgccaggaagaccatctcgaactgattgcctcggagaactacaccagcaagcgggtcatgcaggcgcagggcagcggcctgaccaacaaatatgccgagggctatccgggcaagcgctactacggcggctgcgaacacgtcgacaaggtcgagcagttggccatcgaccgcgccaggcagctgttcggcgccgactacgccaacgtccagccgcattccggttcctcggccaacgccgcggtgtacctggcgctgctcaacgccggcgacaccatcctcggcatgagcctggcccatggcggccatctcacccatggcgccaaggtgtcctcctccggcaagctgtacaacgccgtgcagtacggcctggacaccgctaccgggctgatcgactacgacgaagtcgagcgcctggccgtggagcataagccgaagatgatcgtcgccggcttctccgcctactccaagaccctcgacttcccgcgcttccgcgccatcgccgacaaggtcggcgcgctgctgttcgtcgacatggcccacgttgccgggctggtcgctgccggcctctacccgaacccgatccccttcgccgacgtggtcaccaccaccacccacaagaccctgcgcggcccgcgcggcggcctgatcctggcgcgcgccaacgaggagatcgagaagaagctcaactccgcggtatttcccggcgcccagggcggcccgctgatgcacgtgatcgcggccaaggcggtgtgcttcaaggaagcgctggagccgggcttcaaggactaccaggcgcaggtgatccgcaacgccaaggcgatggccgaggtgttcatcgggcgcggctacgacgtggtttccggcggcaccgacaaccacctgatgctgatcagcctggtgcgccagggcctgaccggcaaggaagccgacgccgccctcggccgggtcggcatcacggtgaacaagaacgccgtgccgaacgatccgcagagcccgttcgtcacctccggcatccgcatcggcaccccggccatcaccacccgcgggctgcaggaagcgcagagccgcgaactggccggctggatctgcgacatcctcgaccacctcggcgatgccgacgtggaagccaaggtcgccacccaggtcgccggtctctgcgcggacttcccggtctatcgctga

SEQ ID NO: 4357 - protein, 417 aa, Pseudomonas aeruginosa UCBPP-PA14
MFSKHDQIRGYDDELLAAMDAEEARQEDHLELIASENYTSKRVMQAQGSGLTNKYAEGYPGKRYYGGCEHVDKVEQLAIDRARQLFGADYANVQPHSGSSANAAVYLALLNAGDTILGMSLAHGGHLTHGAKVSSSGKLYNAVQYGLDTATGLIDYDEVERLAVEHKPKMIVAGFSAYSKTLDFPRFRAIADKVGALLFVDMAHVAGLVAAGLYPNPIPFADVVTTTTHKTLRGPRGGLILARANEEIEKKLNSAVFPGAQGGPLMHVIAAKAVCFKEALEPGFKDYQAQVIRNAKAMAEVFIGRGYDVVSGGTDNHLMLISLVRQGLTGKEADAALGRVGITVNKNAVPNDPQSPFVTSGIRIGTPAITTRGLQEAQSRELAGWICDILDHLGDADVEAKVATQVAGLCADFPVYR

SEQ ID NO: 4358 - DNA, 1281 bp, Solibacter usitatus Ellin6076
  CDS (1)..(1281): transl_table=11
atgaccgaatcacaacgcatgtcccgcaccctcgccgaagtagaccctgaaatttaccaggccatccagcacgagacggcgcgccaggacggtcagctcgaactgatcgccagcgagaacttcacctccgaagccgtgctcgaagccaccggcagcgtcttcaccaacaagtacgcggaaggctatcccggcaaacgctactacggcggctgcgagtataccgacgtggtcgaaaacctggcccgcgagcgcgccagcaagctcttcggcgccgagtacgtcaacgtacagccccactccggctcgcaggccaaccaggccgcttacggggccgtggtctcccccggcgataccgtgatgggcctcaacctcgcgcacggcggacacctcacccacggccatgccctcaacttctccggcaagacttacaagatcgtcccctacaacgtccgtaaggaagacgagttgatcgattacgacgaagtcgaaaagctagcccgcgagcaccagcccaagatgatcatcgcgggcgccagcgcctacccgcgcatcatcgatttcgcccgtttccgcaaaatcgccgatgccgtcggcgccgtcttcctcgtcgatatggcgcacatctccggcctggtcgccgccggcgtccatccgaacccttgcgagttcgccgacatcgtcacctccaccacccataagaccctgcgcggaccgcgcgccggcatcatcctcgcccgcgaaaaatacggcaaggagatcgataagaacgtcttccccggcacccagggcggccccctcgtccacgtcatggcggccaaggccgtctgcttcctcgaagccctgcagcccgaattcgccgtctaccagcggcaggtcgtcgccaatgccaaagccctcgcgcagagcctgatcgatgccggcttccgcgtggtctccggcggcaccgatacccacgttgtcctgctcgacgtcttctcgaaagggctccgtggcaaggagagcgaacaggccctcgaccgcgcgcgcatcacggtcaacaagaacgccatcccgttcgataccaatccgcccatgaacccgagcggtatccgcctcggctcgcccgccgtcaccacccgcggcttcaaagaggccgagatgcgcgaagtcggcacgctgatcgccgaggtgctcactaatatcgcaaacgaggatgtcatcgccggcgtacggcagaaggtgcaggcgctcaccacccgcttcccgctctacagttggaaacgcgataccgtccaggcctag

SEQ ID NO: 4359 - protein, 426 aa, Solibacter usitatus Ellin6076
MTESQRMSRTLAEVDPEIYQAIQHETARQDGQLELIASENFTSEAVLEATGSVFTNKYAEGYPGKRYYGGCEYTDVVENLARERASKLFGAEYVNVQPHSGSQANQAAYGAVVSPGDTVMGLNLAHGGHLTHGHALNFSGKTYKIVPYNVRKEDELIDYDEVEKLAREHQPKMIIAGASAYPRIIDFARFRKIADAVGAVFLVDMAHISGLVAAGVHPNPCEFADIVTSTTHKTLRGPRAGIILAREKYGKEIDKNVFPGTQGGPLVHVMAAKAVCFLEALQPEFAVYQRQVVANAKALAQSLIDAGFRVVSGGTDTHVVLLDVFSKGLRGKESEQALDRARITVNKNAIPFDTNPPMNPSGIRLGSPAVTTRGFKEAEMREVGTLIAEVLTNIANEDVIAGVRQKVQALTTRFPLYSWKRDTVQA

SEQ ID NO: 4360 - DNA, 1362 bp, Arthrobacter sp. FB24
  CDS (1)..(1362): transl_table=11
gtggttgagcagttgaacgagcgactttccgcagtcgatcccgaggtccagcaggccatcgccaatgagctgggccgccagcagtcgacgctggaaatgatcgcctcggagaatttcgccccgtccgcagtcatggaggcacagggctcggtactgaccaacaagtacgccgagggctaccccggcaagcgctactacggcggctgcgagcacgttgatgtgatcgaacagctggccatcgaccgggtgaaggcactcttcggcgccgagttcgcgaacgtccagccgcactccggcgcccaggccaacgctgctgccatgttcgcgctgctgaacccgggcgacaccatcatgggcctggacctggcccacggcggccacctgacccacggcatgcggatcaacttttccggcaagctctacaacgtggtcccgtaccacgtgcgtgaatcggacctccggatcgatatggccgaggtcgaagcgctggccctggagcaccgtccgcggctgatcgtcgccggctggtccgcctactcccgccagttggacttcgccgaattccgccgcatcgccgatctcgtggacgcgtacctgatggtggatatggcgcactttgccggcctggtggccgcagggctgcaccccaacccggtgccgtacgccgatgtcgtcaccaccaccacgcacaagaccctcggcggtccgcgcggcggcgtcatcctggccaaggaggaatacgcccgcaagatcaactccgccgtgttcccgggccagcagggcggaccgctggagcacgtcatcgccgccaaggccgtcgccttcaagctggccggcacccccgaattcaaggaacgccaggagcgcgtcctgcagggatccaagctgctggcggaacggctcctccgtgacgacgtcgccgcggctggcatctccgtagtcaacggcggcaccgatgtgcacctggtcctcgtggacctccgcaactccgaactagacgggcagcaggccgaagacgccctgcaccggatcggcatcacggtcaaccgcaacgccgtaccgttcgacccccgcccgccgatggtttcctcgggcctcaggatcggaacgcccgccctggccacccgcggcttcggcgccgtggaattcactgaggtcgcggacatcatcgcgacggcgctgattgccgcggctgccaacggcgccaccggggcaacgtccctgagtgacagcgccgtcgtcgaacttcgcgcccgggtgaccgccctcgccgaacaattccccctctacccgcatctttcccaggacagtggcgatgaaatcgccgcctttgaaacagacatgattggagcagcccagtga

SEQ ID NO: 4361 - protein, 453 aa, Arthrobacter sp. FB24
MVEQLNERLSAVDPEVQQAIANELGRQQSTLEMIASENFAPSAVMEAQGSVLTNKYAEGYPGKRYYGGCEHVDVIEQLAIDRVKALFGAEFANVQPHSGAQANAAAMFALLNPGDTIMGLDLAHGGHLTHGMRINFSGKLYNVVPYHVRESDLRIDMAEVEALALEHRPRLIVAGWSAYSRQLDFAEFRRIADLVDAYLMVDMAHFAGLVAAGLHPNPVPYADVVTTTTHKTLGGPRGGVILAKEEYARKINSAVFPGQQGGPLEHVIAAKAVAFKLAGTPEFKERQERVLQGSKLLAERLLRDDVAAAGISVVNGGTDVHLVLVDLRNSELDGQQAEDALHRIGITVNRNAVPFDPRPPMVSSGLRIGTPALATRGFGAVEFTEVADIIATALIAAAANGATGATSLSDSAVVELRARVTALAEQFPLYPHLSQDSGDEIAAFETDMIGAAQ

SEQ ID NO: 4362 - DNA, 1236 bp, Syntrophobacter fumaroxidans MPOB
  CDS (1)..(1236): transl_table=11
atgtccacgctcgaacgcatcgatcctgaaattgccgatgtgatctgtgaggaggaaaagagacagcgcggcaagttggagctcatcgcttccgagaatttcgtcagcgaggcggttcgtgaagctcagggctcagtcctgacgaacaaatacgcggaaggttaccccggaaagcgatattacggcggctgcgagttcgtggacatggccgaaagactggcgcaggaaagagccaagaaactcttcgacgcggaatatgcgaacgtgcagcctcattccggttcccaggccaatatggccatattcttcgccgtcctccagcccggcgataccgttctcggcatggaccttcgtcagggaggtcatctcacgcacggaagccctgtaagcttctcgggcaaactctataacgtcgtgtcgtacggcgtccggaaagacaccgaacagatcgacttcgaccaggtcgcgcgactggcgcgcgagcaccgccccaagctgatcattgcgggagccagcgcttatccgcgcatcatcgattttgcccgcttcgggcaaatcgccaaggaaatcgccgcgtacctcatggtcgacatggcccacatcgcaggcctcgtctgctccggtcttcatcccagcccggtgccgcacgccgacttcgtgacttccaccacgcacaagacgctcaggggaccccggggaggactgatcctttcccattcgaattacaccaggcttctcgacagccagatctttcccggtatccaaggcggcccgctgatgcacgttattgcggccaaggccgttgccttccgcgaagcactccagccctccttcaaggaataccagcagcgggtggtggccgacgccgcggccttggcgcaagagctgaaggcgctggggtaccggctggtttccgggggcaccgacaatcacttgatgctcgtcgacctcacgcctcagggcgtcaccggcagggtcgccgaagaaacgttggacaaggccggaataaccgtgaacaaaaattccatcccgttcgatcagcagaaaccccaggtcaccagcggtatccgcatcgggactccggctctggctacgaggggaattttgccccatcacatgaaagcggtggccggattcatgcaccggggtctgaaatcggcgggagacgaaccggctctggcgcgcctccgggccgaagttgccgagttctgttcggcgtttcccctgttttcgtga

SEQ ID NO: 4363 - protein, 411 aa, Syntrophobacter fumaroxidans MPOB
MSTLERIDPEIADVICEEEKRQRGKLELIASENFVSEAVREAQGSVLTNKYAEGYPGKRYYGGCEFVDMAERLAQERAKKLFDAEYANVQPHSGSQANMAIFFAVLQPGDTVLGMDLRQGGHLTHGSPVSFSGKLYNVVSYGVRKDTEQIDFDQVARLAREHRPKLIIAGASAYPRIIDFARFGQIAKEIAAYLMVDMAHIAGLVCSGLHPSPVPHADFVTSTTHKTLRGPRGGLILSHSNYTRLLDSQIFPGIQGGPLMHVIAAKAVAFREALQPSFKEYQQRVVADAAALAQELKALGYRLVSGGTDNHLMLVDLTPQGVTGRVAEETLDKAGITVNKNSIPFDQQKPQVTSGIRIGTPALATRGILPHHMKAVAGFMHRGLKSAGDEPALARLRAEVAEFCSAFPLFS

SEQ ID NO: 4364 - DNA, 1254 bp, Aeromonas hydrophila subsp. hydrophila ATCC 7966
  CDS (1)..(1254): transl_table=11
atgttgaaacgtgacatgaccattgccggctatgatccagagctgtggcaggccatcacagacgagacccgtcgtcaggaagagcatatcgagctgattgcgtccgagaactacaccagcccccgtgtcatggaagcccagggctcccagctgaccaacaagtacgccgagggttacccctccaagcgttactacggtggttgcgagtatgtggatgtggttgaaaccctggctatcgagcgcgccaaagagctgttcggtgccacctacgccaacgtgcagccgcactccggctcccaggccaacagcgccgtctacatggccctgctgcagccgggcgacaccgtgctgggcatgaatctggcccacggcggtcacctgacccacggctccccggtcaacttctccggcaagctgtacaacatcatcccctacggcatcgatgagtccggcaagatcgactatgacgacatggaacgtcaggcggtcgagcacaagccgaagatgatgatcggtggcttctccgcctactccggcatcgttgattgggctcgcatgcgggaaatcgccgacaaggtcggtgcctggctgttcgtcgacatggcccacgtggccggcctcatcgccgctggcgtctacccgaacccggtgccccacgctcacgtggttacctccactacccacaagaccctggctggtccgcgcggtggtctgatcctctccgccgccgacgacgaggagctctacaagaagctcaactccgccgtcttcccgggtggtcagggtggcccgctgatgcacgtcatcgccggtaaagcggtggccttcaaagaggcgctggaacccgagttcaagacctaccaggctcaggtcgtgaaaaacgccaaggcaatggctgcgaccttcatcgagcgcggctacaagatcgtctccggcggtaccgacaaccatctgatgctggttgacctgatcggccgcgagctgaccggcaaagaggccgatgcggcccttggtaaagccaacatcaccgtcaacaagaactccgtgcccaacgacccgcgctccccgttcgtcacctccggtgtgcggatcggtaccccggccatcacccgccgtggtttcaaggaagccgagtccatccagctgaccaactggatctgcgacgtgctggacaatcacgacaacgatgccgtgctggccaccgtacgtgaacaggtgctggacatctgccgtcgtttcccggtgtatgcctga

SEQ ID NO: 4365 - protein, 417 aa, Aeromonas hydrophila subsp. hydrophila ATCC 7966
MLKRDMTIAGYDPELWQAITDETRRQEEHIELIASENYTSPRVMEAQGSQLTNKYAEGYPSKRYYGGCEYVDVVETLAIERAKELFGATYANVQPHSGSQANSAVYMALLQPGDTVLGMNLAHGGHLTHGSPVNFSGKLYNIIPYGIDESGKIDYDDMERQAVEHKPKMMIGGFSAYSGIVDWARMREIADKVGAWLFVDMAHVAGLIAAGVYPNPVPHAHVVTSTTHKTLAGPRGGLILSAADDEELYKKLNSAVFPGGQGGPLMHVIAGKAVAFKEALEPEFKTYQAQVVKNAKAMAATFIERGYKIVSGGTDNHLMLVDLIGRELTGKEADAALGKANITVNKNSVPNDPRSPFVTSGVRIGTPAITRRGFKEAESIQLTNWICDVLDNHDNDAVLATVREQVLDICRRFPVYA

SEQ ID NO: 4366 - DNA, 1284 bp, Acidothermus cellulolyticus 11B
  CDS (1)..(1284): transl_table=11
atgaattcatcccctgaccctctcgccgctctcaccgccacggatcccacgatcgctgacctgatccgggccgaagaacggcggcagtccgagaaaattcggctgattccgtcggagaactacgtctccaaagcggtcctggaggcgacggggacggtgctcaccaacaagtactccgagggttacccgaaccgccgctattacgaagggcagcaattcatcgatcagatcgagacgattgccatcgagcgggccaaacagctgttcggggttgatcacgccaatgtgcagccgtactccggatctcccgcgaacctggccatttacctggccctgctctcccccggcgacaccgtcatgggcatggcgttgccgatgggcggacacctcacccacggctggcccgtatcggccaccggcatctggttccgctcggtccaatacggcgtgcggcgcgacaccggtcgcattgatttcgatgaggtccgcgaggtggcccggcgagagcggccgaaggtaattttcgccggcgggacggcgattccgcgcatcatcgatttcgccgcgttcgcagagatcgcccgcgaagtgaacgctgtcctcgtcgccgatatcgcgcacatctccgggctcgtcgccggcggggtgcacccgtcgccggtgggacatgccgacatcatttccaccaccacgcacaagacgcttcgcggtccgcgcggtgcgatgctgatgagcaccgagcagtatgcgaaagcgctggacaaggcggtcttcccaggattgcagggtggcccgcacaatcacaccacggcggctatcgcggttgccctcctcgaggcgatgcaacccgaattccgcgactacgcccggaacatcgtcgccaacgcggccgttctcgccgaggagctcctcgcccgtggcttcgaccttgtctccggcggcaccgacaatcacctcatcctggtggacctcacctcaaaaggtgtggcgggcaagccggttgcgcgggccctcgaccgggccggcatcgaactcaactacaacaccgtgccgttcgaccctcgcaagccgtttgacccgtcgggaatccggctcggcaccccggcggtgacgtcccgcggaatgggtcccgcggaaatgcggcaaatcgccgcctggatcgatgaggtgaccaccgccgtcgccaaaggagatgaggaagcactggccgccgttgaacagcgggtggcgggcgaggtccgcgaattgacgaagaatttccccacccccgggctggaccgctga

SEQ ID NO: 4367 - protein, 427 aa, Acidothermus cellulolyticus 11B
MNSSPDPLAALTATDPTIADLIRAEERRQSEKIRLIPSENYVSKAVLEATGTVLTNKYSEGYPNRRYYEGQQFIDQIETIAIERAKQLFGVDHANVQPYSGSPANLAIYLALLSPGDTVMGMALPMGGHLTHGWPVSATGIWFRSVQYGVRRDTGRIDFDEVREVARRERPKVIFAGGTAIPRIIDFAAFAEIAREVNAVLVADIAHISGLVAGGVHPSPVGHADIISTTTHKTLRGPRGAMLMSTEQYAKALDKAVFPGLQGGPHNHTTAAIAVALLEAMQPEFRDYARNIVANAAVLAEELLARGFDLVSGGTDNHLILVDLTSKGVAGKPVARALDRAGIELNYNTVPFDPRKPFDPSGIRLGTPAVTSRGMGPAEMRQIAAWIDEVTTAVAKGDEEALAAVEQRVAGEVRELTKNFPTPGLDR

SEQ ID NO: 4368 - DNA, 1245 bp, Acidovorax citrulli AAC00-1
  CDS (1)..(1245): transl_table=11
atgtaccaacgcaatattcttgtcgaacaagccgatcccgaagtgtgggccgccatccaggccgagaacctgcgccaggagcagcacatcgaactgatcgccagcgagaactacgcctcgcccgccgtcatggcggcacagggctcgcagctcaccaacaagtacgccgaaggctatcccggcaagcgctactacggcggctgcgagaacgtggacgtggtcgagcagctggccatcgaccgcgtgaagaagctcttcggcgccgatgccgccaacgtgcagcccaattccggctcgcaggccaaccaggccgtgctgcttgccttcctcaagcccggcgacaccatcctgggcatgagcctcgccgaaggcggccacctgacccacggcatgccgctgaacatgagcggcaagtggttcaacatcgtgtcgtacggcctgaacgagaaggaagagatcgactacgacgcgctggaagccaaggcccgcgagcacaagcccaagctgatcatcgccggtgcctccgcctacagcctgcgcatcgatttcgagcgcttcgcgaagatcgccaaggaagtcggcgcgatcttctgggtggacatcgcccactatgccggcctggtggtcgcgggtgaatatcccaaccccgtgcccttcgccgacgtggtcacctccacgacgcacaagagcctgcgcggcccgcgcggcggcatcatcctcatgaaggccgaacacgagaaggcgatcaactccgccatcttcccgggcctgcagggcggcccgctggagcacgtcatcgccgccaaggccgtggccttcaaggaagcgctgacgccggaattcaaggcctaccagcagcaggtcgcgaagaacgccaaggtgttcgccgaaacgctgatcgaacgcggcctgcgcatcatcagcggccgcacggagagccacgtcatgctcgtggacctgcgcgccaagggcatcaccggcaaggcggccgaagcggccctgggccaggcccatatcaccatcaacaagaactccattccgaacgatccggaaaagccgatggtgaccagcggcatccgcgtgggcacgcccgcgatcacgacgcggggcttcaaggaagaagagacgcgcatcaccgcgaacctgctggccgacgtgctggagaacccgaacgacgaagccaacctggccgcggtgcgcgagaaggtgcacgcgctcacgagccgcttcccggtctatcgctga

SEQ ID NO: 4369 - protein, 414 aa, Acidovorax citrulli AAC00-1
MYQRNILVEQADPEVWAAIQAENLRQEQHIELIASENYASPAVMAAQGSQLTNKYAEGYPGKRYYGGCENVDVVEQLAIDRVKKLFGADAANVQPNSGSQANQAVLLAFLKPGDTILGMSLAEGGHLTHGMPLNMSGKWFNIVSYGLNEKEEIDYDALEAKAREHKPKLIIAGASAYSLRIDFERFAKIAKEVGAIFWVDIAHYAGLVVAGEYPNPVPFADVVTSTTHKSLRGPRGGIILMKAEHEKAINSAIFPGLQGGPLEHVIAAKAVAFKEALTPEFKAYQQQVAKNAKVFAETLIERGLRIISGRTESHVMLVDLRAKGITGKAAEAALGQAHITINKNSIPNDPEKPMVTSGIRVGTPAITTRGFKEEETRITANLLADVLENPNDEANLAAVREKVHALTSRFPVYR

SEQ ID NO: 4370 - DNA, 1245 bp, Polaromonas naphthalenivorans CJ2
  CDS (1)..(1245): transl_table=11
atgtaccaccgcaatattctcatcgaacagaccgaccccgaaatctttgccgccatccaggctgaaaacgcccgccaagagcaccacatcgagctgatcgccagcgaaaactacgcctcgcccgccgtcatggccgcgcaaggctcgcaactcaccaacaaatacgccgaaggctaccccggccgccgctactacggcggctgcgaacatgtcgatgtggccgagcaactggccatcgaccgtgtcaagcagatctttggcgccgatgccgccaacgtccagccgcattgcggcgcatcggccaacgaagccgtgttccttgccttcctcaagcccggcgacaccatcatgggcatgagcctggccgaaggcggccacctgacgcacggcatggcgctcaacatgagcggcaaatggttcaacgtcgtttcctacggtctcaatgacaaggaagagatcgactacgaagcgatggagcgcaaggcgcacgaaaccaaacccaagctgatcattgccggcgccagcgcctactcgctggcaattgattttgaacgcttcgccagggtggccaaggatgtcggtgcgattttcatggttgatatggcgcattacgccggcctgattgccgccggcatttaccccaacccggtgccgcacgcggacatcgtgacttcgaccacgcacaagagcctgcgcggcccgcgcggcggcatcatcctgatgaaggcgcagcacgaaaaaatcatcaacagcgcaatcttccccggactgcagggcggcccgctgatgcatgtgattgccgcgaaagccatcgccttcaaggaagcgctgtcgccagaattcaagatttaccagcagcaagtcctgaagaatgcccagatcgtcgccgaaaccctgacccagcgcggcctgcgcatcgtcagcggccgcaccgaaagccacgtcatgctggtcgatttgcgcgccaagggcatcaccggcaaggaagccgaagccgtgctgggcagcgcccacatgaccatcaacaaaaatgcgattccgaacgacccggaaaagccgatggtcaccagcggcgtgcgcattggcacccccgccatgaccacgcgcggttttggcgacgaggaagcgcgcatgaccgccaacctggtggccgatgtgctggacaacccgcgcgatgccgccaacatcgaggcggttcgcgccaaggttcacgccctgaccagccgcttcccggtttacggctga

SEQ ID NO: 4371 - protein, 414 aa, Polaromonas naphthalenivorans CJ2
MYHRNILIEQTDPEIFAAIQAENARQEHHIELIASENYASPAVMAAQGSQLTNKYAEGYPGRRYYGGCEHVDVAEQLAIDRVKQIFGADAANVQPHCGASANEAVFLAFLKPGDTIMGMSLAEGGHLTHGMALNMSGKWFNVVSYGLNDKEEIDYEAMERKAHETKPKLIIAGASAYSLAIDFERFARVAKDVGAIFMVDMAHYAGLIAAGIYPNPVPHADIVTSTTHKSLRGPRGGIILMKAQHEKIINSAIFPGLQGGPLMHVIAAKAIAFKEALSPEFKIYQQQVLKNAQIVAETLTQRGLRIVSGRTESHVMLVDLRAKGITGKEAEAVLGSAHMTINKNAIPNDPEKPMVTSGVRIGTPAMTTRGFGDEEARMTANLVADVLDNPRDAANIEAVRAKVHALTSRFPVYG

SEQ ID NO: 4372 - DNA, 1242 bp, Listeria monocytogenes str. 1/2a F6854
  CDS (1)..(1242): transl_table=11
atggtctatttacaaaagcaagataaggaagtttttgatgcaattaagttagaacttggtagacaacgcgcgaatatcgaattaatcgcatctgagaattttgttagtgagcaagtaatggaagcaatgggttctgtattaacgaataaatatgcagaaggttacccaggaaaacgctattacggcggatgtgaattcgtggatatcgtggaagatttagcacgcgaccgcgcgaaaaaattatttggagctgaatatgcgaacgttcaaccacactcaggtgctcaagcgaatatggcggtttatcatacagtgcttgaaccaggcgataccgttcttggtatgaacctttcacatggtgggcatttaacacatggtagcccagttaattttagcggcattttatacaattttgttgaatacggcgttcgtgaagatacaaaagagattgattatgatatcgtccgtgaagctgctttaaaacataaaccaaaaatgattgtagctggcgcaagtgcttatccacgtaaaattgattttgctaaattccgtgaaattgctgatgaagttggcgcatacttaatggtagatatggcgcatatcgccggtcttgttgctgctggtttacaccaaaatccagttccttatgctgattttacaacgacaactacccataaaacgcttcgtggacctcgcggtggaatgattttagccaaagcagaatgggaacaaaaattaaataaatcgattttcccaggaattcaaggtggaccattaatgcacgtaatcgcagcgaaagcagtggcgtttggtgaagcgttacaacctgaattcacaacgtattgcgagcaaattattcgtaattctaagaaattagcagaaactcttcaagcgaatgatgttgctgttttaacaggtggttcggataatcatttattattaattgatttaaaaccacttggcttaacaggaaaagcagctgaaaaagtattagatgaagttggtattaccgtgaataaaaataccattccattcgaaacggaaagcccatttgtaacaagtggtattcgtgtaggtgttgctgcagtgacgactcgtggattcgatgaagttgcgattgaaaaagtcggcgtacttatttcggaagtactgcataacttagaaaatgaagaagttctcgcagatgtaaaagcacgcgtggctactttaacaaatgaatatccgctttatccaagtttataa

SEQ ID NO: 4373 - protein, 413 aa, Listeria monocytogenes str. 1/2a F6854
MVYLQKQDKEVFDAIKLELGRQRANIELIASENFVSEQVMEAMGSVLTNKYAEGYPGKRYYGGCEFVDIVEDLARDRAKKLFGAEYANVQPHSGAQANMAVYHTVLEPGDTVLGMNLSHGGHLTHGSPVNFSGILYNFVEYGVREDTKEIDYDIVREAALKHKPKMIVAGASAYPRKIDFAKFREIADEVGAYLMVDMAHIAGLVAAGLHQNPVPYADFTTTTTHKTLRGPRGGMILAKAEWEQKLNKSIFPGIQGGPLMHVIAAKAVAFGEALQPEFTTYCEQIIRNSKKLAETLQANDVAVLTGGSDNHLLLIDLKPLGLTGKAAEKVLDEVGITVNKNTIPFETESPFVTSGIRVGVAAVTTRGFDEVAIEKVGVLISEVLHNLENEEVLADVKARVATLTNEYPLYPSL

SEQ ID NO: 4374 - DNA, 1293 bp, Xylella fastidiosa Ann-1
  CDS (1)..(1293): transl_table=11
atgctgattgcatcccctgtgtttttttccggagttgccatgttcccgcgtgatgctcgtcttgatatgtacgatcccgagttggctaaggccatcgctgctgaagtgaggcgtcaggaggatcacgttgagttgattgccagtgaaaattattgcagtacgttggtgatgcaggtgcaggggagtcaactgactaataagtatgctgaagggtattgtggaaagcgttactacggtggttgtgagtatgtcgatatcgctgagcaattggcgattgagcgtgccaaacaactgtttggtgccgactatgccaatgtgcagccccatagcggttcacaagccaatcaagcggtgtactttgccttgttgcagccaggcgatacgatcctcgggatgagcttggcgcatggcggccacttgactcacggcgccaatgtcaatgtgtctggcaagttgttcaatgcggttcagtacggagtgaatgctcaagggttgattgattacgaggctgttgaatcgcttgcgttagagcatcggccgaagatggttgtggcgggcttttcggcgtattcgcagaaaatcgattgggcgcgcttccgtgccattgctgatcaggtgggcgcttacttgctagttgatatggcacatgttgctggcttggtggcggctggtgtctatccgaatccgctgccgcatgcgcatgttgtgacttcgacgacgcataagacactgcgcggcccacgtggcggcattattgttgcgcaggctccgcaggaggcgttggttaagaagttgcagtcgatagtgtttcctgggatccagggtggtccattgatgcatgtgatcgcggctaaagcggttgcttttaaggaggcgctggagcctgcgtttaaggtgtatcagcagcaggtggtgaagaatgcgaaggcgatggctgggaccctcatgttacgcggctataagattgtctctggtggtacagaaaatcatttgatgttggttgacatgatcggtagggatgtctctgggaaggacgctgagggcgcattgggtcaggctcatatcactgtcaataagaatgcggtaccggatgatccgcgctctccgttcgtaacctccgggttacgcttggggactccagcagtcacgacacggggttaccaggagcaggattgtgtggacttagcgcactggattgctgatgtgcttgacgcgcctgcagatgtgacggtcattgccgcagtccgtgagaaggttgcggcgcagtgcaagaagtatcctgtgtatcgctga

SEQ ID NO: 4375 - protein, 430 aa, Xylella fastidiosa Ann-1
MLIASPVFFSGVAMFPRDARLDMYDPELAKAIAAEVRRQEDHVELIASENYCSTLVMQVQGSQLTNKYAEGYCGKRYYGGCEYVDIAEQLAIERAKQLFGADYANVQPHSGSQANQAVYFALLQPGDTILGMSLAHGGHLTHGANVNVSGKLFNAVQYGVNAQGLIDYEAVESLALEHRPKMVVAGFSAYSQKIDWARFRAIADQVGAYLLVDMAHVAGLVAAGVYPNPLPHAHVVTSTTHKTLRGPRGGIIVAQAPQEALVKKLQSIVFPGIQGGPLMHVIAAKAVAFKEALEPAFKVYQQQVVKNAKAMAGTLMLRGYKIVSGGTENHLMLVDMIGRDVSGKDAEGALGQAHITVNKNAVPDDPRSPFVTSGLRLGTPAVTTRGYQEQDCVDLAHWIADVLDAPADVTVIAAVREKVAAQCKKYPVYR

SEQ ID NO: 4376 - DNA, 1278 bp, Sulfitobacter sp. EE-36
  CDS (1)..(1278): transl_table=11
atgtccggttttttcaccacccccctgtccgaagccgatcccgaaatctttgggtccattacagacgagctgggtcgccagcgcaacgagatcgaactgatcgcctccgaaaacatcgtgtctgcggctgtcatggcggcgcaggggtcggtgatgaccaacaaatacgccgaaggctacccgggccgccgctattatggcgggtgtgattttgtcgatgtggcggaaaacctggcgattgaacgcgcgtgcaaattgttcaactgcgatttcgccaacgtgcagccgaattcgggcagccaagccaaccaaggcgtgttcaccgcgctgctgcaacccggtgacaccattctgggcatgagcctcgacgcgggcggccacctgacccacggggccaagccgaaccaatccggcaaatggttcaatgccatccagtacggcgtgcgcaaacaagacaaccagcttgactatgaccaggtcgaagcgcttgcgaaggagcaccagcccaagctgatcatcgccggtggttccgccatcccgcgccagatcgacttcaagcggatgcgcgagattgccgatatggtcggtgcctacctgcaggtggacatggcccattttgccggtctggtcgctgcgggcgaacacccgtcccccttcccccatgcgcatgtggcgacaaccaccacacataaaaccctgcgcggtccgcgcggcggcatgatcctgaccaacgacgaagcactggcgaaaaagttcaactcggccatcttccccggtattcaggggggcccgctgatgcatgtgatcgcggccaaggccgtggcctttggtgaagcgctcaagcccgagttcaagacctacatccaacaggtcatcaagaacgcccaagcactcagcgaccagctgatcaaaggcgggctcgacacaatcacacacggcaccgacacccacctgctgctggtcgacctgcgccccaaaggcgtcaaaggaaacgacaccgaaaaagccctgggccgcgcgcatattacctgtaacaagaacggtgtgccgtttgaccctgaaaagcccatggtcacctccggcatccgtttgggctcgcctgcggcaacaacacgcgggtttggtgaggatgaattccgtcagatcgccgactggatcatcgaggttgtcgacgggctggccgccaatggggccgatggcaacgccgaggtcgaagccaaggtcaaagccgaagtcgaagcgctctgcgcccgcttcccgatctaccccaacctctaa

SEQ ID NO: 4377 - protein, 425 aa, Sulfitobacter sp. EE-36
MSGFFTTPLSEADPEIFGSITDELGRQRNEIELIASENIVSAAVMAAQGSVMTNKYAEGYPGRRYYGGCDFVDVAENLAIERACKLFNCDFANVQPNSGSQANQGVFTALLQPGDTILGMSLDAGGHLTHGAKPNQSGKWFNAIQYGVRKQDNQLDYDQVEALAKEHQPKLIIAGGSAIPRQIDFKRMREIADMVGAYLQVDMAHFAGLVAAGEHPSPFPHAHVATTTTHKTLRGPRGGMILTNDEALAKKFNSAIFPGIQGGPLMHVIAAKAVAFGEALKPEFKTYIQQVIKNAQALSDQLIKGGLDTITHGTDTHLLLVDLRPKGVKGNDTEKALGRAHITCNKNGVPFDPEKPMVTSGIRLGSPAATTRGFGEDEFRQIADWIIEVVDGLAANGADGNAEVEAKVKAEVEALCARFPIYPNL

SEQ ID NO: 4378 - DNA, 1305 bp, Loktanella vestfoldensis SKA53
  CDS (1)..(1305): transl_table=11
atgcaccccatgaatatcacgatccgcgaccaaggctttttcaccgaaacactcgccacgcgcgaccctgtgctgcatgccgcgatgcaggccgaactgaaacgccagcgcaaagagatcgagctgatcgcgtcggaaaacatcgtctctgccgcagtgatggaagcgcaaggcggcgtgatgacgaacaaatacgccgaaggctatccgggccgccgctattacggtggctgcgaacatgtggacgtggccgagaacctggccatcgaacgcgcctgccagctgtttgattgcgcctatgtcaacgtacagcccaattcgggatcacaggcgaaccagggcgtgtttcaggcgctgctgcagcccggcgatacgatccttggcatgtcgctggatgcgggcggccacctgacccacggggccaagcccaaccagtccggcaaatggttcaacgccatccagtatggcgtgcgccgtcaagacaacctgctagattatgacgaggtcgcgcgccttgctaccgaacaccagcccaagatgatcatcgccggtggctccgccatcccccgcatcatcgatttcgccaagatgcgcgagattgccgacagcgtgggggcctatctgctggtcgatatggcgcatttcgcgggtctggtggcggcgggcctctacccctcgcccttcccgcatgcccatgtcgccacaacgacgacccacaaaacactgcgcggcccacgcggtggcatgatcctgaccaatgacgaggatctggcgaagaaattcaactcggccattttcccgggcattcagggtggcccgttgatgcatgtgatcgcaggcaaggccgtcgcatttggcgaagcattgcggcccgagttcaagacctatcaggcacaggtcatcaagaacgcgcaggcgctggccgatcagctgatgaaaggtggtctggatatcgtcaccggcggcaccgatacgcatgtgatgctggtcgatctgcgccccaagggtgtgaagggcaatgccaccgaaaaggcactgggccgcgcgcatatcacctgcaacaagaacggtatcccgtttgaccccgaaaaaccgatggtcacatctggcatccgtcttggcacgcccgcaggcacgacgcgtggtttcggcgaggccgagttccgccagatcggtgactggatcgtcgaagtcaccgaaggtctggccgccaatggcgaggatggcaatggtgacgtcgaggccaaagtccgctccgaagtcgaggcgatgtgcgaccggttcccgatctacaccaacctgtga

SEQ ID NO: 4379 - protein, 434 aa, Loktanella vestfoldensis SKA53
MHPMNITIRDQGFFTETLATRDPVLHAAMQAELKRQRKEIELIASENIVSAAVMEAQGGVMTNKYAEGYPGRRYYGGCEHVDVAENLAIERACQLFDCAYVNVQPNSGSQANQGVFQALLQPGDTILGMSLDAGGHLTHGAKPNQSGKWFNAIQYGVRRQDNLLDYDEVARLATEHQPKMIIAGGSAIPRIIDFAKMREIADSVGAYLLVDMAHFAGLVAAGLYPSPFPHAHVATTTTHKTLRGPRGGMILTNDEDLAKKFNSAIFPGIQGGPLMHVIAGKAVAFGEALRPEFKTYQAQVIKNAQALADQLMKGGLDIVTGGTDTHVMLVDLRPKGVKGNATEKALGRAHITCNKNGIPFDPEKPMVTSGIRLGTPAGTTRGFGEAEFRQIGDWIVEVTEGLAANGEDGNGDVEAKVRSEVEAMCDRFPIYTNL

SEQ ID NO: 4380 - DNA, 1293 bp, Rhodobacterales bacterium HTCC2654
  CDS (1)..(1293): transl_table=11
atgaaggacatccgctcccccggcttcttttccgagccgctttcctcccgcgaccccgagatctgggcctcgatcacaggcgagcttggtcgccagcgcgacgagatcgaactgatcgcatccgagaacatcgtgtccgccgccgtaatggaagcgcagggcagcgtgatgaccaacaaatatgccgagggctaccccggcaaacggtattacggcggctgccaatacgtcgacgtggccgaagacctggcgatcaagcgggcctgcgagttgttcggctgcgatttcgcgaacgtccagccgaattccggctctcaggccaaccagggcgcgttcaacgcgctcatcaaaccgggcgacacgatcctcggcatgaacctcgcctccggtggtcacctgacccacggcgccccgccgaaccagtcgggcaagtggttcaacgcgatccagtacggcgtgcgcaagcaggacaacctgatcgactacgacgagatcgaggcgctggcgaaagagcaccagcccaagctcatcatcgccggcggttcggccattccgcgtcagatcgacttcgccaagttccgcgagatcgccgatatggtcggcgcctacctcatggtcgacatggcccacttcgccggtctcgtggcggcgggcgagcacccctcgcccttcccctatgccgatgtcgcaaccaccacgacccacaaaaccctgcgtgggccgcgcggcgggatgatcctgaccaacgacgaagagatcgccaagaaggtgaactcggccattttccccggcattcagggcggccccctgatgcacgtgatcgccgccaaggccgtggcgttcggcgaggcgcttcagccggagttcaagacctaccagaaagccgtgcgcgccaacgcggtggcgctggccgatcaactgatgaagggcggtctggacatcgtgacgggcggcaccgacacccacgtgatgctcgtcgacctgcgccccaagggcgtcaagggcaacgcgaccgaaaaggcactgggccgcgcgcatatcacctgcaacaagaacggcattccgttcgaccccgaaaaaccgatggtgacctcgggcattcgtctcggcaccccggcgggcaccacccgcggcttcggtgaggacgagttccgccagatcgcggatctgatcgtggaagtggtcgacgggctcgccgccaatggcgaggacgggaatggcgaggtcgaagcgacggtgaaagccaaggtcgccgccctctgcgacgccttcccgatctatccgaacctgtaa

SEQ ID NO: 4381 - protein, 430 aa, Rhodobacterales bacterium HTCC2654
MKDIRSPGFFSEPLSSRDPEIWASITGELGRQRDEIELIASENIVSAAVMEAQGSVMTNKYAEGYPGKRYYGGCQYVDVAEDLAIKRACELFGCDFANVQPNSGSQANQGAFNALIKPGDTILGMNLASGGHLTHGAPPNQSGKWFNAIQYGVRKQDNLIDYDEIEALAKEHQPKLIIAGGSAIPRQIDFAKFREIADMVGAYLMVDMAHFAGLVAAGEHPSPFPYADVATTTTHKTLRGPRGGMILTNDEEIAKKVNSAIFPGIQGGPLMHVIAAKAVAFGEALQPEFKTYQKAVRANAVALADQLMKGGLDIVTGGTDTHVMLVDLRPKGVKGNATEKALGRAHITCNKNGIPFDPEKPMVTSGIRLGTPAGTTRGFGEDEFRQIADLIVEVVDGLAANGEDGNGEVEATVKAKVAALCDAFPIYPNL

SEQ ID NO: 4382 - DNA, 1275 bp, Dokdonia donghaensis MED134
  CDS (1)..(1275): transl_table=11
atgcaacgcgacaccgccatttttgacctaatacaagaagaaaaagaacgccaacttaatggccttgagcttattgcttcagaaaattttgtaagtgaccaggtaatggaagctgcaggatctgtactaactaacaaatatgcagaagggtatcctggtaagcgttattatggtggttgtgaagtagtagacgaggtagagacacttgctatagagcgcgcaaaggaactttttggagccgcctatgcaaacgtacagccgcactcaggttctcaagcaaacacggccgtttttcacgcttgtttaaaaccaggagataaatttttaggttttgaccttgctcacggtggtcacttaacacacgggtcgccagtaaacttttctggtcgcttatataaccctgttttttacggagtagataaggaaacaggattacttaattacgataaaatacaagaaatagcgactgcagagcagcctaaaatgatcatagcaggtgcctctgcatactcacgtgagattgattataaacgcttccgcgaaattgcagactcagtaggcgccatccttcttgcagatgttgctcatccagcaggtcttattgcaaaaggaatcatagcagaccctataccacactgtcacgtagtaacaactactacgcacaaaacactaagagggccacgcggcggaatgatacttatgggtgaagattttgaaaacccttttggaatcacacttaaaagtggaaagaaacgtatgatgtcttctctactagatagtggtattttcccaggtaaccaaggaggaccattaatgcacgtgataggagcaaaggcaattgcctttggagaagcacttacagatgagtttttacactatatggtgcaggttaagaaaaatgcaactacactagcagatgcacttgtgcttaaaggctatgacattatatctggaggtacagataaccatatgatgcttatagacctacgcaataaagatgtaacgggtaaagctgccgaagaagcgctaggtaaggcagacattacggtaaacaagaatatggtaccatttgatgacaagtcaccatttgtaacttctggtatacgtataggtactgctgcagtaactacacgaggtcttgtagaaggtgatatgcacgagattgcaaactttatagacaaggcaatacagcaccacgataatgacgaggtgctagaaaacgttgcaaaaagtgtgaacgagatgatggggcacagaccattgtttaaagcatag

SEQ ID NO: 4383 - protein, 424 aa, Dokdonia donghaensis MED134
MQRDTAIFDLIQEEKERQLNGLELIASENFVSDQVMEAAGSVLTNKYAEGYPGKRYYGGCEVVDEVETLAIERAKELFGAAYANVQPHSGSQANTAVFHACLKPGDKFLGFDLAHGGHLTHGSPVNFSGRLYNPVFYGVDKETGLLNYDKIQEIATAEQPKMIIAGASAYSREIDYKRFREIADSVGAILLADVAHPAGLIAKGIIADPIPHCHVVTTTTHKTLRGPRGGMILMGEDFENPFGITLKSGKKRMMSSLLDSGIFPGNQGGPLMHVIGAKAIAFGEALTDEFLHYMVQVKKNATTLADALVLKGYDIISGGTDNHMMLIDLRNKDVTGKAAEEALGKADITVNKNMVPFDDKSPFVTSGIRIGTAAVTTRGLVEGDMHEIANFIDKAIQHHDNDEVLENVAKSVNEMMGHRPLFKA

SEQ ID NO: 4384 - DNA, 1275 bp, Leeuwenhoekiella blandensis MED217
  CDS (1)..(1275): transl_table=11
atgcaacgggatactgaaatctttgatcttattcaggaagaaaaacaacgtcaacttaatggtttagagttaattgcatcagagaacttcgtcagcgagcaagtgatggaagctgctggctctgtacttaccaataaatacgccgaagggtatcccggaaagcgctactatggaggttgtgaagtggtagatgtggtagagcaaatcgccatcgaccgcgctaaagaactttttggtgccgagtacgcaaacgtacagccacactcaggatcgcaggcaaatactgcagtttttcatgcagtgatgaagccgggcgaaacttttttaggttttgaccttgcacatggtggtcacttgacgcacggttcgcctgtaaatttttctggtcgtttatataaccctgtgttttatggggtagatcaggaaaccggtttattgaactatgataagatcgaagaacttgcggtaaaagagcagccaaaaatgatcatcgccggtgcttcagcatatagccgtgagatcgattataagcgtttccgtgagatcgcagataaagtaggagcaattttattatgcgatatggcacatcctgctggtttgatcgcaaaaggaatcataggtgatcctgtaccacattgtcatattgtaacaactacaacacataaaaccttaagaggaccacgtggaggtttgatcttgatggggaaagattttgaaaatccattcggaatcaagctgaagaacggaaacctaagaatgatgtcgtctttattagacagcggaatcttccctggaaatcaaggtggaccattagagcacatcatcgcagcaaaagcgatcgcttttggtgaagcgcttactgatgacttcttacactatatggttcaggttaagaaaaatgctgcggttatggcggctgaatttgtagctaaaggttatgatatcatttccggcggaaccgacaatcatatgatgttgatcgacttgagaaataaagatatttccggtaaagatgcagaagaagcattaggaaaagcagatattaccgttaataaaaatatggtaccgtttgatacccgttcaccctttgtaacttcaggaatgcgtattggtgttgctgccgtaacgactcgtggattggtagaagaggatatgaaaaaagtggttgagcttatcgatgctgcaattgtaaattatcaagatgatgagaagcttgaagaaattgcaggagaggtaaataacatgatgggacacagacctttattcaagcattaa

SEQ ID NO: 4385 - protein, 424 aa, Leeuwenhoekiella blandensis MED217
MQRDTEIFDLIQEEKQRQLNGLELIASENFVSEQVMEAAGSVLTNKYAEGYPGKRYYGGCEVVDVVEQIAIDRAKELFGAEYANVQPHSGSQANTAVFHAVMKPGETFLGFDLAHGGHLTHGSPVNFSGRLYNPVFYGVDQETGLLNYDKIEELAVKEQPKMIIAGASAYSREIDYKRFREIADKVGAILLCDMAHPAGLIAKGIIGDPVPHCHIVTTTTHKTLRGPRGGLILMGKDFENPFGIKLKNGNLRMMSSLLDSGIFPGNQGGPLEHIIAAKAIAFGEALTDDFLHYMVQVKKNAAVMAAEFVAKGYDIISGGTDNHMMLIDLRNKDISGKDAEEALGKADITVNKNMVPFDTRSPFVTSGMRIGVAAVTTRGLVEEDMKKVVELIDAAIVNYQDDEKLEEIAGEVNNMMGHRPLFKH

SEQ ID NO: 4386 - DNA, 1290 bp, Synechococcus sp. WH 7805
  CDS (1)..(1290): transl_table=11
atggtggatttcgcaaccgctccgatcaatgcacccctggcagactctgatcctgcgattgcccgcctgatcgatcaggagcgcgagcgtcaggaaacccatcttgagctgatcgcgtcggagaactttgcttcgagcgccgtgatggcggcccaggggtccgttttgaccaacaaatacgcggaaggccttccaaacaagcgctactacggcggttgtgagcacgtagatgccatcgaggaactggcgattgagcgggccaaggaactctttggtgcagcctgggccaacgttcagcctcacagtggtgcccaggccaatttcgctgttttcctggccctgcttcagcctggcgacacgatcatgggtctggatctgtcccatggcggtcacctgacccatggctcaccggtgaatgtgagtgggaaatggttcaacgttgtccaatacggggtcgatcaagagacccagcgattggatatggaggcgatccgtcagctggctctcgagcacaagcccaagctgatcatctgtggttactcggcctaccctcgcacgattgattttgcggcttttcgttcgattgccgatgaagttggcgcttacttgcttgccgacatggctcatatcgctggactcgtggcagcaggcgtccatcccagccctgttccgtactgcgatgtggtcaccacaacaacgcataagacgctgcgcggtcctcgcggtggtctgattctctgccgggatgcagatttcgccaagaagttcgacaaggccgtgttccctggcacgcaaggcgggcctctcgaacatgtgatcgcggcaaaggccgtggccttcggtgaggctctccggccatcattcaaggtctacagccagcaggttgtggctaacgctcaagcgttggccgaccgattgatggcccgcggcattgacgtggtgagtggggggactgataaccatgtggtgctgcttgatctgcgcagcatcggtatgaccggcaaggtggctgatctcctggtgagcgatgtgcacatcacggccaacaagaacacggttccttttgatccagaatcccccttcgtgaccagcgggctgcgcttagggaccgctgctctcaccacccgaggctttgataccgatgcatttgctgaggtggcggaggtgattgccgatcgcctcttgaatcccgcagacgacgcggttcagtcgcgctgtcttgagcgagtggcgaatctctgccgtcgcttccccctttacgcacaggcgacggagccggcgcttgtctga

SEQ ID NO: 4387 - protein, 429 aa, Synechococcus sp. WH 7805
MVDFATAPINAPLADSDPAIARLIDQERERQETHLELIASENFASSAVMAAQGSVLTNKYAEGLPNKRYYGGCEHVDAIEELAIERAKELFGAAWANVQPHSGAQANFAVFLALLQPGDTIMGLDLSHGGHLTHGSPVNVSGKWFNVVQYGVDQETQRLDMEAIRQLALEHKPKLIICGYSAYPRTIDFAAFRSIADEVGAYLLADMAHIAGLVAAGVHPSPVPYCDVVTTTTHKTLRGPRGGLILCRDADFAKKFDKAVFPGTQGGPLEHVIAAKAVAFGEALRPSFKVYSQQVVANAQALADRLMARGIDVVSGGTDNHVVLLDLRSIGMTGKVADLLVSDVHITANKNTVPFDPESPFVTSGLRLGTAALTTRGFDTDAFAEVAEVIADRLLNPADDAVQSRCLERVANLCRRFPLYAQATEPALV

SEQ ID NO: 4388 - DNA, 1263 bp, Nitrococcus mobilis Nb-231
  CDS (1)..(1263): transl_table=11
atgttctccagtgagatgaccattgccggacttgatcctgaactggccgaggcgatcgagcgggagaaacatcgccaggaggagcacatcgagctcatcgcatccgagaactacgccagcccgcgggtgctcgaggcccaaggcagtgttctgaccaacaaatacgcggaaggctacccggccaaacgctactatggcggctgcgagtacgtggatattgctgagcaactggccatcgaccgggctaagcgactgttcggcgcggcctacgccaacgtgcaaccccactcgggctcccaggccaatgccgccgtctacctggcgctggccaagccgggtgacaccatcttgggcatgagcctcgatcacggcggccacctgacccatggcgccaagccgaatttctcgggcaaactgttcaacgccgtgcagtacggcatcgatgcgcgaaccggcgagatcgactacgcgcaagtcgagcgccttgccctcgagcaccggcccaagctggtaatcgccggtttttcagcctattcacgagtgattgattggcagcgttttcgcgaaatagccgacgagatcggcgcctacctgatcgtcgacatggctcacgtagcgggtctcgtggccgccggcctttatcccaacccggctcagatcgccgatgtcaccaccacgacgactcacaaaaccttgcgtggcccacgcggcggcctgattctggcacgcgctaacgatcgggtcgagaaggccttacaatccctggtctttccaggcactcagggtggaccgctgatgcatgtcatcgccgccaaagcggtcgcgctgaaggaagcgttggaaccggccttcaccgattatcaacagcaggttctggccaactcccgagcgatggcggccaccgttatggaccggggctttcaggtggtcagcggcggcaccgataatcacctgttcttgatcaacctcatcaagcagggcttgaccggcaaggaggccgacgccgttttgggtcgagcgaatatcacggtgaacaaaaataccgtaccgaacgacccgcaatcgccatttgttaccagcggcttgcgtatcggctcaccggccgttaccacccgcggttttggtgaggcggaagtccggcaattggcggggtggatatgcgacatcctggatgacatccataatgagcaaattatcgcccgggtccgcagtcaagtactggagatctgccgacgcttcccggtctaccaggcaagtgcttga

SEQ ID NO: 4389 - protein, 420 aa, Nitrococcus mobilis Nb-231
MFSSEMTIAGLDPELAEAIEREKHRQEEHIELIASENYASPRVLEAQGSVLTNKYAEGYPAKRYYGGCEYVDIAEQLAIDRAKRLFGAAYANVQPHSGSQANAAVYLALAKPGDTILGMSLDHGGHLTHGAKPNFSGKLFNAVQYGIDARTGEIDYAQVERLALEHRPKLVIAGFSAYSRVIDWQRFREIADEIGAYLIVDMAHVAGLVAAGLYPNPAQIADVTTTTTHKTLRGPRGGLILARANDRVEKALQSLVFPGTQGGPLMHVIAAKAVALKEALEPAFTDYQQQVLANSRAMAATVMDRGFQVVSGGTDNHLFLINLIKQGLTGKEADAVLGRANITVNKNTVPNDPQSPFVTSGLRIGSPAVTTRGFGEAEVRQLAGWICDILDDIHNEQIIARVRSQVLEICRRFPVYQASA

SEQ ID NO: 4390 - DNA, 1257 bp, Pseudoalteromonas tunicata D2
  CDS (1)..(1257): transl_table=11
atgttagaacgcagcatgaacatcgcagattttgatccagagttattcgaagcaatcaataaagaaacggctcgtcaagaagagcacattgagcttatcgcttcagaaaactactgtagcccacgcgttttagaggctcaaggctcacaattaactaacaaatatgcagaaggatacccaggtaagcgttactacggtgggtgtgagcatgttgatgtagtagagcaattggcaatcgaccgtgcaaatgaattatttggcactgattacgcaaacgtacagccgcatgcgggttctcaagcaaatgctgctgtttttcaagcattacttcaaccacacgatactgtattagggatgagtcttgctcacggtggtcacttaactcacggttcacacgtaaacttttcaggtaaaacatataatgcgattcaatatggtttgaatgaagaaacaggtgaaatcgattatgcacaagttgaggcgttagcccttgaacataaaccaaaaatgattatcgctggtttctctgcatattcaggaattgttgactgggcaaaattccgtgaaatcgcggataaagtaggcgcgtatttattcgtcgatatggctcacgttgcaggcttaattgctgctggcgtttacccaagtccaattccatttgctcacgttgttacaacaacaactcacaaaacattagcaggccctcgtggtggtttaattgtttcggcatgtggcgatcaagaaatttataaaaagttaaacagtgctgtgttccctggtggtcaaggcggtcctttatgtcacattattgcagcaaaagctgtggcatttaaagaagcgttacagcctgagtttaaagtgtatcaagcgcaagttgtaaaaaatgcacaagctatggttgaagttcttcaagagcgtggctataaagttgtatctggtaaaacagacaaccacttatttttacttgatttgattgataaagatatcacaggtaaagatgctgatgcggcactaggtaatgctaacattactgttaacaaaaactcagtacctaacgatccacgttcaccatttgtgacctcaggcttacgtatcggttctcctgcaatcactcgtcgtggttttaaagaagctgaatcaaaagagttagcgggttggatttgtgatgttctagacaacatcaacgatgcatcagtgcaagcgcaagtaaaagaaaaagtaaaagcaatttgtaaaaagcttcctgtttacgcttaa

SEQ ID NO: 4391 - protein, 418 aa, Pseudoalteromonas tunicata D2
MLERSMNIADFDPELFEAINKETARQEEHIELIASENYCSPRVLEAQGSQLTNKYAEGYPGKRYYGGCEHVDVVEQLAIDRANELFGTDYANVQPHAGSQANAAVFQALLQPHDTVLGMSLAHGGHLTHGSHVNFSGKTYNAIQYGLNEETGEIDYAQVEALALEHKPKMIIAGFSAYSGIVDWAKFREIADKVGAYLFVDMAHVAGLIAAGVYPSPIPFAHVVTTTTHKTLAGPRGGLIVSACGDQEIYKKLNSAVFPGGQGGPLCHIIAAKAVAFKEALQPEFKVYQAQVVKNAQAMVEVLQERGYKVVSGKTDNHLFLLDLIDKDITGKDADAALGNANITVNKNSVPNDPRSPFVTSGLRIGSPAITRRGFKEAESKELAGWICDVLDNINDASVQAQVKEKVKAICKKLPVYA

SEQ ID NO: 4392 - DNA, 1299 bp, Oceanicola granulosus HTCC2516
  CDS (1)..(1299): transl_table=11
atgagcgcgcccaccagagacgacgacggcttcttcaccgagaaactcgcgggccgcgaccccgagatctggggcgcgatccagaaggagctgggccgccagcgcaacgagatcgagctgatcgcgtcggaaaacatcgtctccgccgccgtgctcgaggcgcagggctcggtgatgaccaacaagtacgccgagggctatccgggccggcgctactacggcggctgccagtatgtcgacatcgccgagaacctggccatcgagcgcgcctgcgaactcttcgagtgcgagttcgccaacgtgcagcccaactccggcagccaggccaatcagggcgtctacaccgccctgctccagcccggcgacacgatcctcggcatgagcctcgacgccggcggccacctgacccacggcgcgcggcccaaccagtcgggcaagtggttcaacgcggtgcagtacggcgtgcgcaagcaggacagccagatcgactacgaccagatccagcagctcgccaccgagcaccggcccaagatgctgatcgccggcggctcggccatcccccgcatcatcgacttcgcccgcatgcgcgagatcgccgacagcgtcggcgcgctgctgctcgtggacatggcgcacttcgccggcctcgtggcggcgggcatctatccctcgcccttcccgcacgcccacgtcgccaccaccaccacacacaagaccttgcgcgggccccgcggcgggatgatcctgaccaacgacgccgacatctcgaagaaggtgaactccgccatcttccccggcatccagggcggcccgctgatgcacgtgatcgcgggcaaggccgtggccttcggcgaggcgctgcgccccgagttcaagacctatcaggaacaggtcgtcgccaacgcccgcgcgctggccgaccagctgatgaagggcgggctcgacatcgtcaccggcggcaccgacagccacctgatgctcgtcgacctgcggcccaaggcggtcaagggcaacgccaccgagaaggcgctcaaccgcgcccacatcacgaccaacaagaacggcatccccttcgatcccgaaaagcccaccgtcacctccggcatccgcctcggcacgccggcgggcaccacgcgcggtttcggcgaggaggagttccgccaggtcggcgactggatcgtcgaggtggtcgacgggctcgcggccaacggcgaggacagcaacggcgaggtcgaggccaaggtgcgggccgaggtggaggcgctgtgcgagcgcttcccgctctacccgaccctgtga

SEQ ID NO: 4393 - protein, 432 aa, Oceanicola granulosus HTCC2516
MSAPTRDDDGFFTEKLAGRDPEIWGAIQKELGRQRNEIELIASENIVSAAVLEAQGSVMTNKYAEGYPGRRYYGGCQYVDIAENLAIERACELFECEFANVQPNSGSQANQGVYTALLQPGDTILGMSLDAGGHLTHGARPNQSGKWFNAVQYGVRKQDSQIDYDQIQQLATEHRPKMLIAGGSAIPRIIDFARMREIADSVGALLLVDMAHFAGLVAAGIYPSPFPHAHVATTTTHKTLRGPRGGMILTNDADISKKVNSAIFPGIQGGPLMHVIAGKAVAFGEALRPEFKTYQEQVVANARALADQLMKGGLDIVTGGTDSHLMLVDLRPKAVKGNATEKALNRAHITTNKNGIPFDPEKPTVTSGIRLGTPAGTTRGFGEEEFRQVGDWIVEVVDGLAANGEDSNGEVEAKVRAEVEALCERFPLYPTL

SEQ ID NO: 4394 - DNA, 1251 bp, Vibrio alginolyticus 12G01
  CDS (1)..(1251): transl_table=11
atgcttaagcgtgatatgaacatcgcagattacgatgcggaactgttcgcagctatccaggaagaaactcttcgccaggaagaacacattgaacttatcgcttctgaaaactacacaagcccacgtgtaatggaagcgcaaggttctcagctaacgaacaaatacgctgaaggctacccaggtaagcgttactacggcggttgtgagtacgtagataaagctgaagcactagcaattgagcgtgcatgccaattatttggttgtgagtacgctaacgtacagcctcactcaggttctcaagcaaacagcgcagtttacatggcgcttcttaaccctggcgatacagttttaggcatgagcctagcacacggtggtcacctaactcacggttcaccagtaaacttctcgggtaagcactacaacgttatcccttacggtatcgatgaagctggtcaaatcaactacgacgagatggaacagctagcacttgaacacaaacctaagatgatcatcggtggtttctctgcttactcgcaaatcgttgattggaaacgcatgcgtgaaatcgctgacaaagcaggtgcttacttatttgttgatatggcgcacgtagcgggtcttatcgccgccggtgaatacccaacaccagtaccgcatgctcacgtggtaacaacaacgacgcacaaaacactagcaggtcctcgcggtggtcttatcttgtcaaatgctggcgaagatatgtacaagaaactgaactcagcagtgttccctggtggtcaaggtggccctctaatgcacgttatagctggtaaagcagtagcgttcaaagaagcgatggagccagagttcaaagcttatcaagctcgcgtagtgaaaaacgcaaaagcaatggttggtcagttccaagaacgtggctacaaaatcgtatctaacggtacagaaaaccacttgttccttgttgacctaatcgacaaagatatcactggtaaagacgcagacgcggcactaggtgcagcaaacatcactgtaaacaagaactcagtaccaaatgacccacgcagcccattcgtaacgtctggtattcgtgtaggtacgccagcgatcactcgccgtggcttcactgaagaagatgcaaaagagctagcaaactggatgtgtgacgttctagataacatcggcaacgaagaagttatcgaagcgacaaaacagaaagtgctagaaatttgtaagcgtctaccagtttacgcctaa

SEQ ID NO: 4395 - protein, 416 aa, Vibrio alginolyticus 12G01
MLKRDMNIADYDAELFAAIQEETLRQEEHIELIASENYTSPRVMEAQGSQLTNKYAEGYPGKRYYGGCEYVDKAEALAIERACQLFGCEYANVQPHSGSQANSAVYMALLNPGDTVLGMSLAHGGHLTHGSPVNFSGKHYNVIPYGIDEAGQINYDEMEQLALEHKPKMIIGGFSAYSQIVDWKRMREIADKAGAYLFVDMAHVAGLIAAGEYPTPVPHAHVVTTTTHKTLAGPRGGLILSNAGEDMYKKLNSAVFPGGQGGPLMHVIAGKAVAFKEAMEPEFKAYQARVVKNAKAMVGQFQERGYKIVSNGTENHLFLVDLIDKDITGKDADAALGAANITVNKNSVPNDPRSPFVTSGIRVGTPAITRRGFTEEDAKELANWMCDVLDNIGNEEVIEATKQKVLEICKRLPVYA

SEQ ID NO: 4396 - DNA, 1257 bp, Alteromonadales bacterium TW-7
  CDS (1)..(1257): transl_table=11
atgttagaacgtagcatgaatatttcggactttgatccagagttatttgacgcgatgagtaaagaaacatcacgtcaagaagagcacattgagttaattgcatctgaaaactactgtagcccacgcgtacttgaagcacagggttctcaacttactaacaaatatgcggaaggttatcctggcaagcgttactacggtggctgtgagcacgtagacgtggttgagcaattagctattgaccgcgcaaacgaattgtttggtactgactacgcaaacgttcagccgcatgcaggttcgcaagccaatgccgctgttttccaagccttattaagcccgcttgatacagtacttggcatgagcctagcacacggtggccatttaactcatggttcacacgtaaacttttcaggtaaaacatataacgcgattcagtatggcctaaacgaagagactggcgaaattgattacgcacaagttgaagcgttagcactagagcacaagccaaaaatgattatcgcaggtttttctgcttattcaggtattgttgattgggctaagtttcgcgaaattgcagataaagtagatgcttacttgtttgttgatatggcgcatgttgcaggtttaattgctgcgggtgtttacccaagcccagtaccatttgcacatgttgttactacaacaacgcataaaacattagcgggccctcgtggcggtttaataatttctgcatgtggtgacgaagcaatttacaaaaagcttaacagtgctgtattccctggtggccaaggtggtcctttatgtcacgttattgctgcaaaagcagtggcattcaaagaagctttacaaccagagtttaaagaataccaaacacaagttgttaaaaatgcgcaagcaatggttagcgtattacaagagcgtggctacaaagttgtttctggtaaaacagacaatcacttgttcttacttgatttaatcgataaagacattacgggtaaagatgctgatgcagcactaggtaatgcgaacattacggttaacaaaaactcagttcctaatgatccgcgttctccgtttgtaacgtctggcttacgcattggttctcctgcaatcacgcgccgtggtttcaaagaggctgaatctaaagagcttgctggctggatttgtgatgtactagacaacattgctgatgagtctgttcaagcgcaagtaaaagaaaaagtgaaagcaatttgtgcaaaactacctgtttacgcttaa

SEQ ID NO: 4397 - protein, 418 aa, Alteromonadales bacterium TW-7
MLERSMNISDFDPELFDAMSKETSRQEEHIELIASENYCSPRVLEAQGSQLTNKYAEGYPGKRYYGGCEHVDVVEQLAIDRANELFGTDYANVQPHAGSQANAAVFQALLSPLDTVLGMSLAHGGHLTHGSHVNFSGKTYNAIQYGLNEETGEIDYAQVEALALEHKPKMIIAGFSAYSGIVDWAKFREIADKVDAYLFVDMAHVAGLIAAGVYPSPVPFAHVVTTTTHKTLAGPRGGLIISACGDEAIYKKLNSAVFPGGQGGPLCHVIAAKAVAFKEALQPEFKEYQTQVVKNAQAMVSVLQERGYKVVSGKTDNHLFLLDLIDKDITGKDADAALGNANITVNKNSVPNDPRSPFVTSGLRIGSPAITRRGFKEAESKELAGWICDVLDNIADESVQAQVKEKVKAICAKLPVYA

SEQ ID NO: 4398 - DNA, 1284 bp, Nodularia spumigena CCY 9414
  CDS (1)..(1284): transl_table=11
gtgactagaacgaattccgaatttttggcgaactccgatcccgcgatcgcggagttaattaaccaagaactacagcgtcaacgcgaccacctagagttaattgctagtgaaaactttacctcagctgctgtcctagcagcccaaggttccgcattaaccaataaatacgccgaaggattaccaggtaaacgttactatggcggttgtgaatttgtcgatcaaatcgagcaaatcgccatcgaccgagctaaacagctatttggtgcagctcatgcgaatgttcaaccccattccggcgctcaggcaaattttgcagttttcctgacattactgcaacccggtgacaaaatcatggggatggatttgtcacatggcggacacctcacccacggttcacctgtaaatgtttcgggtaaatggttccaagtttgccattacggtgtcagcaaagaaacagaacagctagactacgaacaaattcgggagcaggcgctgagggagcgtcccaagctcttaatttgtggatattctgcttatcctcgtgtaattgattttgaaaagttccgtagtattgctgatgaaatcggcgcttacttgctggcggatattgcccatatcgctggtttagtggctagcggtctgcatcctaacccccttccttactgtgatgtcgtcaccaccacaactcataaaaccctccgtggccctcgtggtgggttgattttgacccgcgatgccgaattaggtaaaaagttcgataaatccgttttccctggcactcaaggcggtcccttagaacacgtaattgccgggaaagcagtggcttttggagaagcactgaagccagattttaaagactattcagcgcaagtaattgaaaatgctcgtgctttggcaagtcaactgcaaaaccgtggtttaaagctggtgtcaaatggtacagacaatcatttgatgttagtagatttacagaacattggacttaccggaaagcaagccgatcaactggtgagtggagtgaatattaccgctaacaaaaatacagttccctttgatccgcaatcaccatttgttaccagtggtttgaggttaggttctccagccatgacgacacggggcatgggtgtaacagaatttaccgagattgggaatattatcgctgacagactgctgtcgcctgattctgagacagtagcacaagattgtcggcaacgggtagcggcattgtgcgatcgcttccccttgtacccacatctccaaattcccgtaccagccttagcttaa

SEQ ID NO: 4399 - protein, 427 aa, Nodularia spumigena CCY 9414
MTRTNSEFLANSDPAIAELINQELQRQRDHLELIASENFTSAAVLAAQGSALTNKYAEGLPGKRYYGGCEFVDQIEQIAIDRAKQLFGAAHANVQPHSGAQANFAVFLTLLQPGDKIMGMDLSHGGHLTHGSPVNVSGKWFQVCHYGVSKETEQLDYEQIREQALRERPKLLICGYSAYPRVIDFEKFRSIADEIGAYLLADIAHIAGLVASGLHPNPLPYCDVVTTTTHKTLRGPRGGLILTRDAELGKKFDKSVFPGTQGGPLEHVIAGKAVAFGEALKPDFKDYSAQVIENARALASQLQNRGLKLVSNGTDNHLMLVDLQNIGLTGKQADQLVSGVNITANKNTVPFDPQSPFVTSGLRLGSPAMTTRGMGVTEFTEIGNIIADRLLSPDSETVAQDCRQRVAALCDRFPLYPHLQIPVPALA

SEQ ID NO: 4400 - DNA, 1242 bp, Thermosinus carboxydivorans Nor1
  CDS (1)..(1242): transl_table=11
ttgaacgtacttgccggaattgaccccgaaatcgctcaggctatagacctggagcgtcagcgccagcaaaacaaactggaacttatcgcctcggaaaactttgtcagcaaagcggtaatggaagcccagggatcagtgctaaccaacaagtacgccgaggggtatcccggccaccgctactatggcggctgcgaatatgtggatattgttgaaaatctggccattgagcgggctaaagcactgtttggggccgaacatgtcaatgttcagccgcattcgggcgcgcaggccaacaccgctgtctatttcgctctgttggagcccggggatgtcatcatgggcatgaacctgtctcacggcggccatcttacccatggcagcccggttaacatctcgggcaaatatttcaaagttattccctacggcgttaatcccactacccagcagctcgattacgacgccgtccgcgccgaggccatccgccagcggcccaagatgattgtggccggcgctagcgcctatccgcgcatcattgactttgccaagctcggcgaaattgcccgtgaggtgggcgccatcctgtttgtcgacatggcccatattgccggcttggtggctgccgggctgcatcccagccccattcctcacgccgatgtggtgacaacgacgacccacaagacgctgcgcggaccgcgcggcggtatgatcatgtgccgggcggagctagccaaggcgattgacaaggccgtcttccccggcatccagggcgggccgcttatgcatgtcatcgccgccaaagcggtggcgctgaaagaggcaatgaccgaagaatttcgcctttatcaggcccaaatcctgaaaaacgccaagacgctggccgaagagctcatggccgccggctttaccctcgtgtccggcggtaccgacaaccacctcctgctggtagatgtcaggagcctcaatctcaccggcaaggaggccgaacggctgctggatgaagtgggcgtcacggtcaacaaaaacaccattccttttgacccggccagtccgtttgtcaccagcggcatccgcatcgggacgccggccgttacctcccgcggcatgaaggaggaagacatggtgacaattgcgcgcatcatcaccatggtgctcaagcatcctgacgacagccgggccaaagccgaagccgtcaccttggtgggacagctctgcgccaaatatcctctttatgccaacttatag

SEQ ID NO: 4401 - protein, 413 aa, Thermosinus carboxydivorans Nor1
MNVLAGIDPEIAQAIDLERQRQQNKLELIASENFVSKAVMEAQGSVLTNKYAEGYPGHRYYGGCEYVDIVENLAIERAKALFGAEHVNVQPHSGAQANTAVYFALLEPGDVIMGMNLSHGGHLTHGSPVNISGKYFKVIPYGVNPTTQQLDYDAVRAEAIRQRPKMIVAGASAYPRIIDFAKLGEIAREVGAILFVDMAHIAGLVAAGLHPSPIPHADVVTTTTHKTLRGPRGGMIMCRAELAKAIDKAVFPGIQGGPLMHVIAAKAVALKEAMTEEFRLYQAQILKNAKTLAEELMAAGFTLVSGGTDNHLLLVDVRSLNLTGKEAERLLDEVGVTVNKNTIPFDPASPFVTSGIRIGTPAVTSRGMKEEDMVTIARIITMVLKHPDDSRAKAEAVTLVGQLCAKYPLYANL

SEQ ID NO: 4402 - DNA, 1302 bp, Microscilla marina ATCC 23134
  CDS (1)..(1302): transl_table=11
atgcaagcgacgactgagactaatatcactgaccagcaggtgtttgacctgataggggcagaaaaaaaacgacaattagagggtatagaactgattgcttctgaaaacctggtttctgagcaggtaatgaaggcaatgggtactgtgctgaccaacaaatatgcagaaggtttgccgggcaagcgttattatggcggttgcgaggtggtagaccagatagagcaacttgccattgaccgtgccaaagagttgtttggggcaacctgggcaaacgtacagcctcactctggcgcccaagccaacgcagcggcatttttggccatgttgaacccaggcgacaagattttaggtttcgacctatcgcacggtggccaccttactcacggctctacggtaaacttttcgggtaaaatataccaaccttcgttttatggagtagaaaaagaaaccgggctgattgactgggacaaagtagaacaaacggccgtaaaagagcagcctaagctgatcatttgtggagcttctgcctattcccgcgattgggactatgcgcgtttgcgtgccattgccgacaaaataggcgctttgttattggccgacgtgtcgcaccccgccgggctaatcgccaaaggtttactcaacgacccattggagcactgccatgtagtaactactaccacccacaaaactttgcgtggtcctcgtggtggtctgattatgatgcgcaatgattttgaaaatccttatggcattaaaactcctaaaggcaaaacccgcatgatgtcttcattgcttgactctggtgtttttccgggtacgcagggtggtcctttagagcacgtcattgctgccaaagctatagcttttggagaagcattgagcgatggtttccaaacttatattgagcaagtgcgcaaaaatgcagtagctatggcagatgcatttgtaaaaaaaggctacaatattatttcaggcggtaccgacaaccacttgatgttgattgacttacgctcaaaagatttgaccggtaaaattgccgaaaacacgttgatcaaagccgacattaccatcaacaaaaatatggtgcctttcgacgataagtcgccatttgttacttcggggatgcgtataggtacgcctgcggttacttctcgtggcttggtagaggctgatatggctaaaatcgttgatttgattgatacggttttgatgaaccacgaaaatgagtctaaaattgcagaagtaaaacaagaagtaaacaactggatgaaccaataccctttgtttacctggggtgagtaa

SEQ ID NO: 4403 - protein, 433 aa, Microscilla marina ATCC 23134
MQATTETNITDQQVFDLIGAEKKRQLEGIELIASENLVSEQVMKAMGTVLTNKYAEGLPGKRYYGGCEVVDQIEQLAIDRAKELFGATWANVQPHSGAQANAAAFLAMLNPGDKILGFDLSHGGHLTHGSTVNFSGKIYQPSFYGVEKETGLIDWDKVEQTAVKEQPKLIICGASAYSRDWDYARLRAIADKIGALLLADVSHPAGLIAKGLLNDPLEHCHVVTTTTHKTLRGPRGGLIMMRNDFENPYGIKTPKGKTRMMSSLLDSGVFPGTQGGPLEHVIAAKAIAFGEALSDGFQTYIEQVRKNAVAMADAFVKKGYNIISGGTDNHLMLIDLRSKDLTGKIAENTLIKADITINKNMVPFDDKSPFVTSGMRIGTPAVTSRGLVEADMAKIVDLIDTVLMNHENESKIAEVKQEVNNWMNQYPLFTWGE

SEQ ID NO: 4404 - DNA, 1353 bp, Roseobacter sp. SK209-2-6
  CDS (1)..(1353): transl_table=11
atgaagtttccgataggaaatctcgcaagaaccttctctcaaacttacggagccaccatgagcgcgaccacccgtgaccccggatttttcacccagccgctttccgagcgtgacccagagctttttggtgcgatcaccaatgagctggggcgccagcgtgatgagatcgagctgattgcctcggaaaacatcgtctccgccgccgtgatggaggcgcagggttccgtcctgaccaacaaatatgccgaaggctaccccgggcgccgctactatggcggctgccagtatgtcgacgtggcagagaacctggccattgaccgcgccaaggaactctttggttgtgagtttgccaatgtgcagccgaactccggctctcaggccaaccagggtgtgttccaagcgctgatccagcccggcgataccatcctcggcatggacctcgcctccggcggccacctgacccatggcgcgcgcccaaaccagtcgggtaagtggttcaacgcggtgcattacggcgtgcgcgaggatgacaacctcattgactacgatcagatccaggccctggccacagagcaccagcccaagctgatcatcgcaggcggttcagccatcccgcgccagatcgattttgccaagttccgcgagattgccgacagcgttggcgcctatttcatggttgatatggcccatatcgccggtctcatcgcggctggcgagcaccccagccccttcccgcatgcccatgtggccaccaccaccacgcataagaccctgcgcggcccccgcggcggcatgatcgtcaccaatgacgaggcgattgccaagaaggtgaactcggcgatcttccccggcatccagggcggcccgctgatgcatgtgattgcaggcaaggcagcagcctttggcgaggcgctgaagcccgagttcaaagactaccagaagcaggtgcgcgccaatgcagcagcgctggcagaccagctgatcaagggcggcctcgacatcgtcaccggcggtactgacacccatgtgatgctggtggacctgcgccccaagggcgtcactggcaatatcaccgataaggcgctcggccgcgctcatatcaccaccaacaagaacggcatcccgtttgatccggaaaagcccaccgtgacctcgggcatccgcctcggcaccccggccggcaccacccgcggctttggtgaggcagagttccgccagatcgccgatctgatcgtggaagtggtcgacggcctcgcggccaatggcgaagagggcaacggcgaagtcgaagccgcggtgcgcgccaaagtcgccaaactctgcgccgaattccccctctacccgaacctgtaa

SEQ ID NO: 4405 - protein, 450 aa, Roseobacter sp. SK209-2-6
MKFPIGNLARTFSQTYGATMSATTRDPGFFTQPLSERDPELFGAITNELGRQRDEIELIASENIVSAAVMEAQGSVLTNKYAEGYPGRRYYGGCQYVDVAENLAIDRAKELFGCEFANVQPNSGSQANQGVFQALIQPGDTILGMDLASGGHLTHGARPNQSGKWFNAVHYGVREDDNLIDYDQIQALATEHQPKLIIAGGSAIPRQIDFAKFREIADSVGAYFMVDMAHIAGLIAAGEHPSPFPHAHVATTTTHKTLRGPRGGMIVTNDEAIAKKVNSAIFPGIQGGPLMHVIAGKAAAFGEALKPEFKDYQKQVRANAAALADQLIKGGLDIVTGGTDTHVMLVDLRPKGVTGNITDKALGRAHITTNKNGIPFDPEKPTVTSGIRLGTPAGTTRGFGEAEFRQIADLIVEVVDGLAANGEEGNGEVEAAVRAKVAKLCAEFPLYPNL

SEQ ID NO: 4406 - DNA, 1248 bp, Caminibacter mediatlanticus TB-2
  CDS (1)..(1248): transl_table=11
atgagtttaagagattatgatattgatgtttattcaattttagaaaaagaattaaaaagacaaacagaccatcttgaaatgattgcaagtgaaaattttactcttccagaagttatggaagcacaaggtagtgtatttactaataaatatgcagaaggttacccaaacaaaagatattatggtggatgtgaatatgcggatttagttgagcaacttgcaatcgatagagcaaaagaactttttggatgtgaatttgcaaatgttcagcctcattcaggttctcaggcaaatggagctgtatacgttgcactattaaaaccatatgataagttacttggaatggatttaagcaatggtgggcatttaactcatggtgcaaaagttaacttttcaggtaaacattatcatagttttagttatggtattgatgaaaaaacaggtagaattgattatgatagagtaaaagatattgcaaaaatagtcaaaccaaaaatgattgtttgtggggcaagtgcatatccaagagagattgattttgcaaaatttaaagaaattgctgatgaagttggagctattttaatggcagatgttgctcatatagcaggtcttgttgtagctaacgaacatcctcacccttttcctcattgtgatgttgtaacaactactactcataaaactctaagaggtccaagaggaggtttaattcttacaaataatgaagagtatgctaaaaaaataaattcggcaatattcccaggaattcaaggtggaccacttgtacatgttattgcagcaaaagctgttggatttaaaatgaatttagcaccaagttggaaagaatatgcaaaacaagtaaaagcaaatgcaagagttttagctgaggttttacttgagagaggttatgatttagtaagtggtggtacagataatcatttagtattagtgagttttctaaataaagaatttagtggaaaagaagcagaagaagcacttggaagagctggaattacagtgaataaaaacacagtacctggtgagaagaggagtccttttgttacaagtggtataagaattggctcacctgcacttacagcaagaggtatgaaagaagaagagtttagatttattgcaaataaaatagcagatgttttagatgatatttataatttagagcttcaagataaagtaaaagaagaactaaaagaattagcaagtaaatttgttatttatgatagaccaacttattaa

SEQ ID NO: 4407 - protein, 415 aa, Caminibacter mediatlanticus TB-2
MSLRDYDIDVYSILEKELKRQTDHLEMIASENFTLPEVMEAQGSVFTNKYAEGYPNKRYYGGCEYADLVEQLAIDRAKELFGCEFANVQPHSGSQANGAVYVALLKPYDKLLGMDLSNGGHLTHGAKVNFSGKHYHSFSYGIDEKTGRIDYDRVKDIAKIVKPKMIVCGASAYPREIDFAKFKEIADEVGAILMADVAHIAGLVVANEHPHPFPHCDVVTTTTHKTLRGPRGGLILTNNEEYAKKINSAIFPGIQGGPLVHVIAAKAVGFKMNLAPSWKEYAKQVKANARVLAEVLLERGYDLVSGGTDNHLVLVSFLNKEFSGKEAEEALGRAGITVNKNTVPGEKRSPFVTSGIRIGSPALTARGMKEEEFRFIANKIADVLDDIYNLELQDKVKEELKELASKFVIYDRPTY

SEQ ID NO: 4408 - DNA, 1263 bp, Bacillus selenitireducens MLS10
  CDS (1)..(1263): transl_table=11
atgaaaacaatggaacgtcgtgatttagtcgaattgcaggcacaggacgccgaagtattcgcagccatcgaagcggaacgaaaacgccagcaacagaatattgagctcatcgcgtcagagaatttcgtatccgaagccgttatggaaacacagggctccgttctgacgaacaagtatgcggaagggtatccgtccaaacgctactacggtggatgcgagtacgttgacgttgcggaaaaccttgcaagagaccgtgcgaaagagctttttggtgccgaacatgccaacgtgcagcctcattcaggtgcacaggcgaatatggccgtttattttgcgtttctcgagcacggcgataccgtcctcggcatgaatctgtcccacggcggacacctgacccacggaagcccggtcaacttcagcggcaagcagtttaactttgttgattacggcgtggacaaagatacgggtctcctcgaatatgatgatgtattggcaaaagcccgagaacataagccgaaaatgatcgtggccggtgcgagtgcctacccgcgggcgatcgatttcgcccgtttccgtgaaattgcggatgaagtgggggcatatctgatggtggacatggcgcacatcgccggtctcgtcgccacaggtgaacacgaaagtccggttccttatgcggattttgtcacgacaacgacgcacaaaaccctgcgaggcccgcgcggcgggatgattctctgtaaggaagagtatgccaagaaggtagacaaatccatcttccccggtatccagggtggcccgctcatgcacgtcatcgccgcgaaagccgtggcattcggtgaagcactgacggaagatttcaaggcgtattcgacgcaggttaagatgaacgccaaggctcttgctcagtcccttatgtctgaaggagtgaaccttgtatcgaacggcacggacaatcacctggttctccttgacctcagaaatcttgaactgacagggaaagatgccgaagcggcgctcgatgcagtcgggattacaacgaataaaaacacgatcccgttcgacccggaaagcccgtttgtcacaagcggtatccggatcggaaccgcagccatcacgtcccgcggttttgacgaaaaggacgcgacgaccgtcggtaagattattgcacttgttctgaagaatcacgataacgaagaggcactgaacgatgcccgtaaggctgttcaggacctgacgagccaatacccgctttacgaacggtaa

SEQ ID NO: 4409 - protein, 420 aa, Bacillus selenitireducens MLS10
MKTMERRDLVELQAQDAEVFAAIEAERKRQQQNIELIASENFVSEAVMETQGSVLTNKYAEGYPSKRYYGGCEYVDVAENLARDRAKELFGAEHANVQPHSGAQANMAVYFAFLEHGDTVLGMNLSHGGHLTHGSPVNFSGKQFNFVDYGVDKDTGLLEYDDVLAKAREHKPKMIVAGASAYPRAIDFARFREIADEVGAYLMVDMAHIAGLVATGEHESPVPYADFVTTTTHKTLRGPRGGMILCKEEYAKKVDKSIFPGIQGGPLMHVIAAKAVAFGEALTEDFKAYSTQVKMNAKALAQSLMSEGVNLVSNGTDNHLVLLDLRNLELTGKDAEAALDAVGITTNKNTIPFDPESPFVTSGIRIGTAAITSRGFDEKDATTVGKIIALVLKNHDNEEALNDARKAVQDLTSQYPLYER

SEQ ID NO: 4410 - DNA, 1287 bp, Hydrogenivirga sp. 128-5-R1-1
  CDS (1)..(1287): transl_table=11
atggaaaacctgctgagaaccgaccccgagatatttgacgttgtatttaaggagtacgaaaggcagttctaccaccttgagctgatagcctcagagaacttcacctccctcgcagtcatggaggcgaccggtagcgtccttacgaacaagtacgccgaggggttgccgggaaggagatactacggaggttgtgagttcgttgatatagctgaaaaccttgccatagaaagggttaaaaagctcttcggcgctgagcatgccaacgtccagccacactcgggctctcaggctaacatggcagtttacatggcagtcctccagcctggagataccataatgggcatgaacctcgcccacggaggacacctgacccacggagcgaaggtcaacttctcaggaaagctgtacaacgtagttcactatggggtaaacccggaaacggagctgatagactacgaccagatgtatcaacttgcaaaggagcacaagcccaagctgatagttggtggagcctcagcctacccgagggttatagactgggcaaagctcagggagatagcggacgaggtgggagcgctcctgatggttgacatggcacactacgctggactgatagcggccggagagtatccaaacccggttcctgtgtctcacttcgtaacgtcaactacccacaagaccctgagaggaccgcgcagcggttttatactatgcaaagaagagttcaggaaggaagttgataagtccgttttcccgggtatacagggtggacctctcatgcacgttatagctgcaaaggctgttgcctttaaggaggctatgacggaagagttcaggagctacgcaaagcaggtgatactcaacgcaaagacccttgcggaggagcttgcaaaggaaggcttcaagataataacgggcggaacagacagccacatagttctaatagaccttagaaacatgaacctgactggcaaggaagttgaggaggctcttggacgcgcaaacataacggtcaataaaaacgccgttccctttgacccgcagaaacccatgataacgagcggcataaggataggaacctcagctctgaccacgaggggaatgaaggaagccgagatgagaagtatagcgaggatgatctccgaggttgtaaagaacttaggagacgataagattatagaaaaggtgagggaagaggtgagagagctgtgcgagcagttccccctttatcccgaactcagggagcggatgaatgagcttcgcaatagcaaggcagccggtatttga

SEQ ID NO: 4411 - protein, 428 aa, Hydrogenivirga sp. 128-5-R1-1
MENLLRTDPEIFDVVFKEYERQFYHLELIASENFTSLAVMEATGSVLTNKYAEGLPGRRYYGGCEFVDIAENLAIERVKKLFGAEHANVQPHSGSQANMAVYMAVLQPGDTIMGMNLAHGGHLTHGAKVNFSGKLYNVVHYGVNPETELIDYDQMYQLAKEHKPKLIVGGASAYPRVIDWAKLREIADEVGALLMVDMAHYAGLIAAGEYPNPVPVSHFVTSTTHKTLRGPRSGFILCKEEFRKEVDKSVFPGIQGGPLMHVIAAKAVAFKEAMTEEFRSYAKQVILNAKTLAEELAKEGFKIITGGTDSHIVLIDLRNMNLTGKEVEEALGRANITVNKNAVPFDPQKPMITSGIRIGTSALTTRGMKEAEMRSIARMISEVVKNLGDDKIIEKVREEVRELCEQFPLYPELRERMNELRNSKAAGI

SEQ ID NO: 4412 - DNA, 1245 bp, Carnobacterium sp. AT7
  CDS (1)..(1245): transl_table=11
atgatgaacgataaatattttgataaagaggtattcgatgccattgaaaaagaaagcaatcgtcaagagcaaaacattgaattaattgcctcagaaaactttgtatctgaagctgtattagctgtacaaggaagcattctaaccaacaaatatgcagaaggttatcctgggaaaagatattatggtggctgcgaatttattgatgtcgttgaaaatctggctattgaacgtgcgcagaaactttttggagcagactatgttaatgttcaaccccattcaggttctagtgcaaatatggctgctcttaacgctattttgtctcctggagatactgtattaggaatggatttaacacatggcgggcatctgacgcatgggtcaccggtaaactttagcggtaaaacttatgattttgtttcttatggtgtagaaaaagagacagaacaaatcgattatgaagtgattcgagctttagctgttgaacataaaccaaaattaattattgctggagcgagtgcttattctagaaaaattgattttgcacgatttagagcaatagcagatgaagttggagcatacttaatggttgatatggctcatattgctggattagttgcggcaggattacatcaaaatcccgttccgtatgcagatatcgtcactacaactacgcataaaaccttaagaggaccacgtgggggtatgattttagctaaagaaaaataccgtaaagcactaaatagtgctattttccctggaattcaaggtggaccattagaacacgttattgcagctaaagctgttgcctttaaagaagcatctgctccagagtttaaaagttatgctgctcaaatcataaaaaatgctaaagcaatggaaaccgttttaaatgcgtctaaaggtcatgtaatcagtggcggaacagataatcacttattgttatttgatgtaacaaactttggtttgaatggcaaagaagcagaagtactcttagacaaagttagcattactgttaataaaaatacgattccgtttgaaaccttaagcccttttaaaacaagtggaattcgaattgggacacctgctattacaacacgtgggtttgacgaagaagattctaaaaaagttgcagaactgattattgaaacattgacagctaatggggatattgaaaaaatgaccgctattcaaatgaaagttcatcaattgacagctgaccaccctttatacgagtcaaaaatgtaa

SEQ ID NO: 4413 - protein, 414 aa, Carnobacterium sp. AT7
MMNDKYFDKEVFDAIEKESNRQEQNIELIASENFVSEAVLAVQGSILTNKYAEGYPGKRYYGGCEFIDVVENLAIERAQKLFGADYVNVQPHSGSSANMAALNAILSPGDTVLGMDLTHGGHLTHGSPVNFSGKTYDFVSYGVEKETEQIDYEVIRALAVEHKPKLIIAGASAYSRKIDFARFRAIADEVGAYLMVDMAHIAGLVAAGLHQNPVPYADIVTTTTHKTLRGPRGGMILAKEKYRKALNSAIFPGIQGGPLEHVIAAKAVAFKEASAPEFKSYAAQIIKNAKAMETVLNASKGHVISGGTDNHLLLFDVTNFGLNGKEAEVLLDKVSITVNKNTIPFETLSPFKTSGIRIGTPAITTRGFDEEDSKKVAELIIETLTANGDIEKMTAIQMKVHQLTADHPLYESKM

SEQ ID NO: 4414 - DNA, 1236 bp, Coprococcus eutactus ATCC 27759
  CDS (1)..(1236): transl_table=11
atgttcagttttgacgagattacaaaagtagatcctgagatagcagccgctatgacagatgagcttaacagacagaataacaacctggagcttatcgcatctgagaatattgtatcaaaggcagttatggcagccatgggcagccaccttacaaacaagtatgcagagggttatcctggaaagagatattacggcggatgccagtatgtagatgttgtagaggatcttgcaagagagagagcaaaagagctgtttggatgcgagtacgttaatgtacagccacattcgggtgcacaggctaacatggcagtgttcttcgctatccttaatcctggcgatacattcatgggtatgaatcttgatcacggcggacatctcacacacggttcaccggtcaacatgtctggaaagtatttccactgtgttccttacggtgtaaacgatgatggatttatagattatgataaggtgcttgagatcgcaaaggagtgcaagccaaagctcatcgtggcaggtgcttcagcatacgccagagcgatagatttcaagagattcagagagatagcagatgaggtcggagcatacctcatggtggatatggcacatatcgcaggtcttgtggcagcaggtcttcacatgagtcctatcccatatgcacacgtaacaactaccacaactcacaagacactccgcggacctcgtggcggaatgatcatgtgcagcaatgagatcaatgagaagtttaacttcaacaaggcagtattccctggaatccagggtggccctcttatgcatgtcatagccggtaaggcagtatgttttaaggaggcactcacacctgagttcaaggcatatcaggagcaggtcgtaaagaatgcagcagcccttgctaaggctcttatggcaagaggatttgacatagtatcaggcggtacagacaatcacctcatgcttatggatctcaagagacttggccttacaggtaaggaagttgagaagctcctcgatgaggttcatatcacagccaacaagaacacagttccaaatgatcctaagtcaccatttgtcacaagcggtataagacttggaactcctgcagttacaacaagaggtgcagatgaggctgatatggataccattgccgaggcaatcaaggcagcagttctcgatcatgacaaggagagagcagaggcgcttgtaaagagtattgttgagaagtatccattatatgaataa

SEQ ID NO: 4415 - protein, 411 aa, Coprococcus eutactus ATCC 27759
MFSFDEITKVDPEIAAAMTDELNRQNNNLELIASENIVSKAVMAAMGSHLTNKYAEGYPGKRYYGGCQYVDVVEDLARERAKELFGCEYVNVQPHSGAQANMAVFFAILNPGDTFMGMNLDHGGHLTHGSPVNMSGKYFHCVPYGVNDDGFIDYDKVLEIAKECKPKLIVAGASAYARAIDFKRFREIADEVGAYLMVDMAHIAGLVAAGLHMSPIPYAHVTTTTTHKTLRGPRGGMIMCSNEINEKFNFNKAVFPGIQGGPLMHVIAGKAVCFKEALTPEFKAYQEQVVKNAAALAKALMARGFDIVSGGTDNHLMLMDLKRLGLTGKEVEKLLDEVHITANKNTVPNDPKSPFVTSGIRLGTPAVTTRGADEADMDTIAEAIKAAVLDHDKERAEALVKSIVEKYPLYE

SEQ ID NO: 4416 - DNA, 1239 bp, Fusobacterium mortiferum ATCC 9817
  CDS (1)..(1239): transl_table=11
atgaataagctttataaaattgatagagaaatttttgaagcaattgaggcagaaaagaaaaggcaaaatgaagggattgaattaatagcatctgaaaactttgtatctgaagctgtacttgaagcagctggaagtataatgacaaacaaatatgctgaaggttatcctgataaaagatactatggtggttgccatattgtagatatagctgaaaaattagctattgaaagagctaaaaaactttttaatgtaaattatgtaaatgttcaacctcactctggttcacaagcaaatatgggagtctataaggcacttcttaatattggagatacagttttaggaatgaaattagatcatgggggacatcttactcatggaaaaaatgtaaatttctctggaaaagattataatattgtttcgtatagtgtttctaaagaagacgaaagaatagattatgatgaagtagaaagaatagctcttgaaactaaaccaaaaatgataatagctggagctagtgcatattcaagagtaatagattttaaaagatttagagagattgctgataaagttggagcttatttaatggtagatatggcacacatagctggacttattgctgctggggtgcatccttcacctgttccatatgctcatgtagtaactaccactactcataaaacactaagaggtcctcgtggtggagtaattatgactaatgatgaagagatagctaaaaaaattgataaaactatattccctggaatacaaggtggaccacttatgcatataatagctgctaaagctgtggcttttaaagaggctttaactccagaatttatagagtatcaaaagcaaattgtaaaaaatgctcaaactttagcaaaagtattagaaaatggtggacttagaatagtaagtggtggaactgataatcatatgatgcttatagatgtaaaatctaaagggcttactggagctcaagttgaaaaagcattagatatggctggtataactgtaaataaaaatggtattccttatgatactgaaaaacctatggttacaagtggaataagagtaggaactcctgctatgacaactagaggaatgaaagaaaaagagatggaagagattggaagctttattcttagagttatggaaaatattgataatgaaactgaacttttaaaaataaaagaaaaagttaaagctctttgtttaaaatttccactatatcaataa

SEQ ID NO: 4417 - protein, 412 aa, Fusobacterium mortiferum ATCC 9817
MNKLYKIDREIFEAIEAEKKRQNEGIELIASENFVSEAVLEAAGSIMTNKYAEGYPDKRYYGGCHIVDIAEKLAIERAKKLFNVNYVNVQPHSGSQANMGVYKALLNIGDTVLGMKLDHGGHLTHGKNVNFSGKDYNIVSYSVSKEDERIDYDEVERIALETKPKMIIAGASAYSRVIDFKRFREIADKVGAYLMVDMAHIAGLIAAGVHPSPVPYAHVVTTTTHKTLRGPRGGVIMTNDEEIAKKIDKTIFPGIQGGPLMHIIAAKAVAFKEALTPEFIEYQKQIVKNAQTLAKVLENGGLRIVSGGTDNHMMLIDVKSKGLTGAQVEKALDMAGITVNKNGIPYDTEKPMVTSGIRVGTPAMTTRGMKEKEMEEIGSFILRVMENIDNETELLKIKEKVKALCLKFPLYQ

SEQ ID NO: 4418 - DNA, 1248 bp, Oxalobacter formigenes HOxBLS
  CDS (1)..(1248): transl_table=11
atgtttgctaaagaccataccctcgctcaggtcgatccggagttgtgggacgctattttgcgtgagaacacccgtcaggaagaccacattgagctgatcgcttccgaaaactattgctcgccggcggtcatgcaggcgcagggttctcaactgacgaacaaatatgcggaaggttatcccggcagacgttactacggcggttgcgaatatgtcgatatcgcggaacagctggcgctggatcgtgtcaaacagctgttcggcgcggaagccgccaatgtgcagccgaattcgggttcgcaggccaatcaggccattttccttgccatgctgcaacccggcgatacgatcatgggcatgtctctggcggaaggaggccatctgacgcacggcatggccttgaacatgtcgggcaagtggtttaacgtcgtttcgtacggcctgaacgaaaaagaggaaattgattatgacgccatggagcggcttgcgcacgaacacaagccaaagctgatcatcgctggcgcttcagcctattccctgcgcattgatttcgaacgtttcgcaaaggttgccaaagatgtgggcgcttacttcatggtggatatggcgcattatgccggcctgatcgccgccggggtttatccgaatccggttccccatgccgatttcgtcacgtccactacgcacaaatccttgcgcggcccgagaggcgggttcattttgatgaaacaggaattcgaacgcaagatcaattccgccgttttccccggcttgcagggcggtccgctgatgcatgtgattgccgcgaaagcggtcgccttcagggaagcgcttcaacctgaattcaaaacgtatcaggagcaggtcgtcaaaaacgccagtgtcctgtccaaaacgcttatcgaacgcggtttccggatcatttccggccgtaccgaatcccacgtgatgctggtcgatctgcaaagcaagaatattaccggccgtcaggcagaaacgatcctgaacagcggccatatcacctgcaacaagaatgccattcccaatgatccgcagacgccgttcgtcacttccggtatccgtcttggcagtcccgccatgacgacgcgcggtttcaaggacgcggaatccgcgctggttggcaatttgctggccgatgtggtggaaaatccggaagatccggcaacccttgacagggttcgtgcggaagtccggaagctgactgccgctttcccggtttatcagcgctag

SEQ ID NO: 4419 - protein, 415 aa, Oxalobacter formigenes HOxBLS
MFAKDHTLAQVDPELWDAILRENTRQEDHIELIASENYCSPAVMQAQGSQLTNKYAEGYPGRRYYGGCEYVDIAEQLALDRVKQLFGAEAANVQPNSGSQANQAIFLAMLQPGDTIMGMSLAEGGHLTHGMALNMSGKWFNVVSYGLNEKEEIDYDAMERLAHEHKPKLIIAGASAYSLRIDFERFAKVAKDVGAYFMVDMAHYAGLIAAGVYPNPVPHADFVTSTTHKSLRGPRGGFILMKQEFERKINSAVFPGLQGGPLMHVIAAKAVAFREALQPEFKTYQEQVVKNASVLSKTLIERGFRIISGRTESHVMLVDLQSKNITGRQAETILNSGHITCNKNAIPNDPQTPFVTSGIRLGSPAMTTRGFKDAESALVGNLLADVVENPEDPATLDRVRAEVRKLTAAFPVYQR

SEQ ID NO: 4420 - DNA, 1248 bp, Oxalobacter formigenes OXCC13
  CDS (1)..(1248): transl_table=11
atgtttgctaaagattattccctcgctcaggtggattccgagttgtgggacgctattttgcgtgagaatacccgtcaggaagaacatattgaactgatcgcttccgaaaactattgctcacctgccgtcatgcaggctcagggttctcagctgaccaataaatatgcggaaggttatcccggcaaacgttattacggtggttgtgagtacgtcgacattgccgaacaactggctctggatcgtgtaaaaaaactgttcggtgccgaagcggccaacgttcagcccaattccggttcgcaggccaatcaggctattttcctggcaatgttgaatcccggtgataccatcatggggatgtcccttgccgaaggtggtcatctgacccacggtatggccctgaacatgtccggcaaatggttcaacgtcgtttcctatggtctgaatgaaaaggaagagattgattacgacaggatggaacagctggctcacgaacacaagccgaagctgatcattgccggtgcatccgcttattccctgcgtattgatttcgaacgctttgccaaagtcgccagggatgtcggcgctttcttcatggtcgatatggcacactatgccggtctgatcgcggcaggagtgtatccaagcccggttccttacgctgactttgtgacgtccaccactcacaaatccctgcgtggcccacgtggcggtttcattctgatgaaaccggaattcgaacgcaagatcaattccgctgttttccctggcttgcagggcggtccattgatgcacgtcatcgctggcaaggcagtggctttcaaggaagccttgcagcctgaattcaaaacgtatcaggaacaggttctcaaaaatgcaagcgtactggccaaaacgttggttgaccgtggtttccgcattatttccggacgtaccgaatcccacgtcatgctggtcgatctgcaaagcaagaatatcactggccgtcaggcagaaacgattttgaacagcggtcatatcacctgtaacaagaatgcgattccaaacgatccgcaaacgccatttgtcacttccggcgtccgtctgggcagccctgccatgacgactcgcgggttcaaggaaaccgaatcggcaatcgtcggtaacctgctggctgatgtgatcgaaaatccaaacgatcaggctacaattgaacgggtacgcgccgaagtcaagaaactgacgacggctttcccggtttatcagcactga

SEQ ID NO: 4421 - protein, 415 aa, Oxalobacter formigenes OXCC13
MFAKDYSLAQVDSELWDAILRENTRQEEHIELIASENYCSPAVMQAQGSQLTNKYAEGYPGKRYYGGCEYVDIAEQLALDRVKKLFGAEAANVQPNSGSQANQAIFLAMLNPGDTIMGMSLAEGGHLTHGMALNMSGKWFNVVSYGLNEKEEIDYDRMEQLAHEHKPKLIIAGASAYSLRIDFERFAKVARDVGAFFMVDMAHYAGLIAAGVYPSPVPYADFVTSTTHKSLRGPRGGFILMKPEFERKINSAVFPGLQGGPLMHVIAGKAVAFKEALQPEFKTYQEQVLKNASVLAKTLVDRGFRIISGRTESHVMLVDLQSKNITGRQAETILNSGHITCNKNAIPNDPQTPFVTSGVRLGSPAMTTRGFKETESAIVGNLLADVIENPNDQATIERVRAEVKKLTTAFPVYQH

SEQ ID NO: 4422 - DNA, 1251 bp, Helicobacter winghamensis ATCC BAA-430
  CDS (1)..(1251): transl_table=11
atgaattatattttagagcagactgatccaaagattttagagttaatcaatcaagagctagagcgtcaaaatacgcatttagagatgattgcaagtgagaattttactttccctagtgtaatggaggcaatggggagtgttttaacaaataaatatgctgaaggttatccttataagcgttattatggaggttgtgagtttgtagataagattgaagaaatcgcaatcgagagagcaaaagagctttttggttgtgcttttgcaaatgtgcaaccccacgcaggaagtcaagcaaacacagcggtgtattctgcgcttttaaaaccttatgataagattttaggaatggatttaagccatggagggcatttgacacacggagcaaaggttagcattacagggcaaatgtatcagagctttttttatggtgtagagctcgatggatatattaattatgataaagttgctgaaattgcaaaagtagtgaagccaaatttaattgtgtgtgggtttagtgcgtattctagagtgctagattttgctaagtttagagagattgccgatagtgtaggggcagttttaatggcagatgttgctcatattgcagggcttgtggtagcgggtgaatatgcaaatccttttccttatgcagatgtagttaccacaacaacacataaaacactaagaggtcctaggggtggattaattttgactaataacgaagaatatgcaaagaaaattgataaagcagtgtttccaggaatgcaagggggaccgctaatgcatgtgattgcaggtaaggcggtaggctttggagagaatcttaagccctcttggaagggatacgcaaaacaagttaaggctaatgcaaagactttggcaaatgtgcttatgcaaaggggatataaaattgtaagtgatggcacggataatcatttggttttattgtcctttcttgataaagaatttagcggaaaagaggcagatttagccttaggaaatgctgggattactgttaataaaaacactgttccaggggagattagaagtccatttgtaacaagtggtgttagaattggatctccagcattaaccgctaggggttttaaagagagagaatttgacattgtggcaaataaaatcgccgatgtattagatgatattcaaaatacacaaaagcaagaaaaaataaaaatggaattaaaggaacttgcgctacaatttccaatttacaataaagcaattttttaa

SEQ ID NO: 4423 - protein, 416 aa, Helicobacter winghamensis ATCC BAA-430
MNYILEQTDPKILELINQELERQNTHLEMIASENFTFPSVMEAMGSVLTNKYAEGYPYKRYYGGCEFVDKIEEIAIERAKELFGCAFANVQPHAGSQANTAVYSALLKPYDKILGMDLSHGGHLTHGAKVSITGQMYQSFFYGVELDGYINYDKVAEIAKVVKPNLIVCGFSAYSRVLDFAKFREIADSVGAVLMADVAHIAGLVVAGEYANPFPYADVVTTTTHKTLRGPRGGLILTNNEEYAKKIDKAVFPGMQGGPLMHVIAGKAVGFGENLKPSWKGYAKQVKANAKTLANVLMQRGYKIVSDGTDNHLVLLSFLDKEFSGKEADLALGNAGITVNKNTVPGEIRSPFVTSGVRIGSPALTARGFKEREFDIVANKIADVLDDIQNTQKQEKIKMELKELALQFPIYNKAIF

SEQ ID NO: 4424 - DNA, 1596 bp, Oryza sativa subsp. indica
  CDS (1)..(1596)
atggcgatggcttcgcaccacctcgcccagccgcccacgcgcgcggctctctcctcgcgccccacctacccgctctccagccatcaccactcctcccgtctccagctcccgctcttcagtggggcgcggcgcagcaggttgtcccccgcggtggcgacgtccccggtcgccgccccagcgatggacgccgtggccgactgggggctgaccacgctggaggaaaccgacccggaggtgtacgacctcgtcgagcgcgagaagcggcggcagcgcgcgggcgtcgagctcatcgcgtcggagaacttcacctcgctcgccgtcatggaggcgctgggctcgccgctcaccaacaagtactccgagggcatgccgggggcccgctactacggcggcaacgaggtcatcgacgaggtggaggagctctgccgcgcccgcgcgctcgccgccttccacctcgaccccgaggcctggggcgtcaacgtgcagccctactccggctcgccggcgaacttcgccgcctacaccgggctgctccaaccccacgagcggatcatggggctcgatttgccgtccggcggccacctcacgcacggctactacaccgccggcggcaaaaagatctccgccacgtccatctacttcgagagcctgccgtacaaggtgagctccgagacaggatacgtcgattatgataagctggaggagaaggccatggattttcggcccaagctcatcatctgcggcgggagcgcgtacccgcgggattgggattacgccaggttcagggccatcgcggataagtgcggcgccatgttgctctgcgacatggctcacatcagtggcctagttgccgctcaggaggctgcaaatccttttcaatattctgatgtggttaccactaccacccacaagagtctccgagggccaagatctggtatgatcttctacaggaagggcccgaagcctcccaagaaaggccagcctgagggcgctctgtatgactacgaggacaggatcaacttcgcagtgtttccgtcgctccaagggggccctcacaaccaccaaattgctgcgctagcggttggtttgaagcagactatgtcacctggattcaagtcttatattaagcaggtcaaggccaatgctgttgcccttggtaaccatttgatgagtaagggctacaaattggttactgacggaacagagaaccatcttgttctctgggatctgcgccctcttggcttgactggtaacaaagttgagaaggtctgtgatttgtgcagcattacactgaataaaaatgctgtctttggggatagcagtgcaatgtcacctggtggtgtccgcattggtacacctgccatgacatcaaggggtttggtagagaaggactttgtacagatcgccgagttccttcaccaggcagtgaccatctgcttggatgttcagaaggagcgtggcaagcttctcaagtacttcaacgagggcctggagaacagcaaggacattgaggacctcagggcggaggtggagaagtttgccacttcattcgagatgcctggcttcagggtatccgacatgaagtacaaggattag

SEQ ID NO: 4425 - protein, 531 aa, Oryza sativa subsp. indica
MAMASHHLAQPPTRAALSSRPTYPLSSHHHSSRLQLPLFSGARRSRLSPAVATSPVAAPAMDAVADWGLTTLEETDPEVYDLVEREKRRQRAGVELIASENFTSLAVMEALGSPLTNKYSEGMPGARYYGGNEVIDEVEELCRARALAAFHLDPEAWGVNVQPYSGSPANFAAYTGLLQPHERIMGLDLPSGGHLTHGYYTAGGKKISATSIYFESLPYKVSSETGYVDYDKLEEKAMDFRPKLIICGGSAYPRDWDYARFRAIADKCGAMLLCDMAHISGLVAAQEAANPFQYSDVVTTTTHKSLRGPRSGMIFYRKGPKPPKKGQPEGALYDYEDRINFAVFPSLQGGPHNHQIAALAVGLKQTMSPGFKSYIKQVKANAVALGNHLMSKGYKLVTDGTENHLVLWDLRPLGLTGNKVEKVCDLCSITLNKNAVFGDSSAMSPGGVRIGTPAMTSRGLVEKDFVQIAEFLHQAVTICLDVQKERGKLLKYFNEGLENSKDIEDLRAEVEKFATSFEMPGFRVSDMKYKD

SEQ ID NO: 4426 - DNA, 1344 bp, Oryza sativa subsp. japonica
  CDS (1)..(1344)
atggactccgtcgcgtcgtgggggctgaccccgctcgccgcggccgacccgctcgtccacgacctcctcgagcgggagaagcggcggcagcggagcggcatcgagctcatcgcctcggagaacttcacctccttcgccgtcatggaggccctcggctccgcgctcaccaacaagtactccgaggggatgcccggggcgcgctactacggcgggaacgacgtcatcgacgagatcgagaacctgtgccgcgaccgcgccctcgccgcgttccgcctcgacgccgcgtcgtggggcgtcaacgtgcagccctactccggctcgccggccaacttcgccgcctacacggcgctcctcaacccgcacgaccgcatcatggggctcgacctccccctccgcctcccctacaaggtgagcgccgccacggggtacatcgactacgagaagctggaggagaaggcgctcgacttccgccccaagctcatcatctgcggcggcagcgcgtacccgagggactgggactacgccaagctcagggccgtcgccgacaaggtcggggcgctgctcctctgcgacatggcgcacatcagcggcctcgtcgccgcgcaggaagctgcaaatccttttgagtactgtgatgtggttaccaccaccacgcacaagtccctccgaggaccaagagctggcatgatcttctacaggaagggccctaagcctcccaagaagggccagcctgagggtgctgtctatgactacgaggacaagatcaacttcgcagtgttcccgtcactgcaaggtggtcctcacaaccaccagattgcagcccttgctgttgctctgcagcaaaccatgacacctggattcaaggcctacgcaaagcaggtcaaggccaacgctgtcgccattggcaagtatcttatgagcaagggctacaaaatggtgactgatggaactgagaaccaccttgttctctgggatcttcgccctcttggcttgactggcaacaaggttgagaagatgtgtgacctttgcagcattacacttaacaagaatgctgtctttggtgacagcagtgcattggctcctggcggtgtccgcattggtactcctgcgatgacatccaggggtcttgtcgagaaggactttgagcagatcggcgagttcctccaccaggccgtgaccatctgcctcaacatccagaaggagcacggcaagctcctcaaggacttctccaagggcctggtgaacaacaaggacatcgagaacctcaagctggaggtcgagaagttcgccacctccttcgacatgcccggcttcaccctcgacagcatgaagtacaaggagtag

SEQ ID NO: 4427 - protein, 447 aa, Oryza sativa subsp. japonica
MDSVASWGLTPLAAADPLVHDLLEREKRRQRSGIELIASENFTSFAVMEALGSALTNKYSEGMPGARYYGGNDVIDEIENLCRDRALAAFRLDAASWGVNVQPYSGSPANFAAYTALLNPHDRIMGLDLPLRLPYKVSAATGYIDYEKLEEKALDFRPKLIICGGSAYPRDWDYAKLRAVADKVGALLLCDMAHISGLVAAQEAANPFEYCDVVTTTTHKSLRGPRAGMIFYRKGPKPPKKGQPEGAVYDYEDKINFAVFPSLQGGPHNHQIAALAVALQQTMTPGFKAYAKQVKANAVAIGKYLMSKGYKMVTDGTENHLVLWDLRPLGLTGNKVEKMCDLCSITLNKNAVFGDSSALAPGGVRIGTPAMTSRGLVEKDFEQIGEFLHQAVTICLNIQKEHGKLLKDFSKGLVNNKDIENLKLEVEKFATSFDMPGFTLDSMKYKE

SEQ ID NO: 4428 - DNA, 1572 bp, Vitis vinifera
  CDS (1)..(1572)
  misc_feature (696)..(696): y is t or c
  misc_feature (878)..(878): r is g or a
  misc_feature (1218)..(1218): r is g or a
  misc_feature (1251)..(1251): y is t or c
  misc_feature (1334)..(1334): y is t or c
  misc_feature (1392)..(1392): m is a or c
  misc_feature (1403)..(1403): y is t or c
  misc_feature (1430)..(1430): m is a or c
  misc_feature (1482)..(1482): s is g or c
  misc_feature (1536)..(1536): y is t or c
atggcgatggcaatggcgctttggaggctttcatcgtccgtcaacaagcccgttcgtagcgtcttcaatggcggttccatctattacatggcatctttaccgaatgaagctgtatacgaggaggagaaatctcgtgttacatggccaaagcagttgaatgctccgctgggggttgtggatcctgaaattgcagacattatagagctcgagaaagcaagacaatggaaggcacttgaactcgtaccctccgagaacttcacttctgtgtcagttatgcaagctgttgggtctattatgacaaacaatgtcagcgaaggatatccaggcgctagatactatggaggaaatgagtacattgacatggcagaatccttgtgccagaagcgtgctttggaagcatttcggttggatcctgcaaaatggggagtgaacgtgcagtctttatctggctcgcctgcaaattttcaagtttacactgcactattaaaacctcatgaaagaattatggcacttgatcttcctcatggtggacatctttctcatggctatcagactgacaccaagaaaatatctgcagtgtctatattttttgagacaatgccatatagattgaatgagagcactggctacattgactatgaccagttggaaaaaagtgccacactcttcagaccaaaacttatagttgctggtgcyagtgcttatgcccgtctctatgattatgcacatattcgcaaggtttgtgacaagcagaaagctatcttgttggcagatatggcacatattagtgggttggttgcggctggtgttatcccatcaccatttgagtatgcagatatagtgacaaccacaacctacaagtcgctccgtggaccacrtggagccatgattttcttcaagaagggggtaaaagaggttaataaacaagggaaagaggttttgtatgactatgaagacaaaatcaatcaggctgtctttcctggacttcaaagtgcccctcacaatcacacaattgctggcttagctgttgcattgaaacaggctactactccagaatacaaagcttatcaagaacaagttctctctaattgttcaaagtttgcagagactttgatgaagaagggttatgaacttgtttctggtggaactgagaaccatttagtcttagtgaatttgaagaacaagggtattgatggctccagagttgaaaaggtgttrgaatctgttcatattgtagctaacaaaaacacygttcctggagatgtgtcggccatggttcctagtggcatcaggatgggtagagattttgttaaagtagcagaatactttgacgytgctgtgaccgtggcagtgaagatcaaggctgaaactacagggacaaagttgaaggamttcttagccayaatgcagtctagccctcacctccaatmtgagattgcaaagcttcgccacgagggggtagaaaccttacaaattttcctsttgcctaaagaagtatcctttacaaagtttaggcttcaaaagtttgttaccatygaccatttgactgctaatgtttccacacatacatga

SEQ ID NO: 4429 - protein, 523 aa, Vitis vinifera
  misc_feature (293)..(293): The Xaa at location 293 stands for Arg, or His.
  misc_feature (445)..(445): The Xaa at location 445 stands for Ala, or Val.
  misc_feature (464)..(464): The Xaa at location 464 stands for Asp, or Glu.
  misc_feature (468)..(468): The Xaa at location 468 stands for Ile, or Thr.
  misc_feature (477)..(477): The Xaa at location 477 stands for Ser, or Tyr.
MAMAMALWRLSSSVNKPVRSVFNGGSIYYMASLPNEAVYEEEKSRVTWPKQLNAPLGVVDPEIADIIELEKARQWKALELVPSENFTSVSVMQAVGSIMTNNVSEGYPGARYYGGNEYIDMAESLCQKRALEAFRLDPAKWGVNVQSLSGSPANFQVYTALLKPHERIMALDLPHGGHLSHGYQTDTKKISAVSIFFETMPYRLNESTGYIDYDQLEKSATLFRPKLIVAGASAYARLYDYAHIRKVCDKQKAILLADMAHISGLVAAGVIPSPFEYADIVTTTTYKSLRGPXGAMIFFKKGVKEVNKQGKEVLYDYEDKINQAVFPGLQSAPHNHTIAGLAVALKQATTPEYKAYQEQVLSNCSKFAETLMKKGYELVSGGTENHLVLVNLKNKGIDGSRVEKVLESVHIVANKNTVPGDVSAMVPSGIRMGRDFVKVAEYFDXAVTVAVKIKAETTGTKLKXFLAXMQSSPHLQXEIAKLRHEGVETLQIFLLPKEVSFTKFRLQKFVTIDHLTANVSTHT

SEQ ID NO: 4430 - DNA, 1533 bp, Triticum monococcum
  CDS (1)..(1533)
atggccatggcgacggcgctccgcaagctctccgcccgcggccagcccctctcccgcctcacgccgctctactccatggcgtccctgccggcgacggaggagagatccgcagtcacctggccgaagcagttgaacgcgccgctggaggaggtcgaccccgagattgccgacatcatcgagctcgagaaggcccgccaatggaaggggctggagctcatcccgtcggagaacttcacctccctgtcggtgatgcaggcggtggggtccgtcatgaccaacaagtacagcgaggggtaccccggcgcgagatactacggtggaaacgaatacatcgatatggccgagacgctgtgccagaaacgtgctttggaggcctttaatttggacccggagaagtggggagtgaatgtgcaacccctatcgggttcacctgccaacttccatgtatacactgctctgctgaagccacatgatagaattatggctctggatcttcctcacggtggacatctttcccatggttaccagactgacacaaagaaaatctcagcagtttcaatattctttgagacaatgccttacagactggatgaaagcactggcttgattgattatgaccagttggagaaaagtgccgttctgtttaggccaaagttgattgttgctggtgctagtgcatatgcccgcctttatgattataaccgcatgcggaagatctgtgacaagcagaaggcagttcttctcgcagacatggcacatatcagtgggctagttgctgctggtgtcattccgtctccttttgagtatgcagatgtggtgactaccactacccacaagtcactccgtggtccacgtggagccatgatctttttccggaagggggtgaaagaaataaacaaacaagggaaggaggttaagtatgattttgaggacaaaatcaatgcagctgtcttcccaggtctgcaaggtggaccccataaccatactattactggcctggccgttgcgcttaagcaggcaactactcaggagtacagagcttatcaagagcaagttatgagtaactctgctagatttgctgagagcttaacttcaaaaggctacgacattgtctctggtgggactgataaccatttagttttggtgaacctcaagaaaaagggaatagatggttcacgagtggagaaggttttagaaaatgtgcatattgcagcaaacaagaacacagttcctggtgatgtttcagctatggtacccggaggcatcaggatgggaacccccgcgcttacatcaagaggatttgttgaggaggacttcgccaaggttgccgacttcttcgattcggcagtgaacttggctttgaaggttaaagctgcagcagcaggtaccaaactgaaggactttgttgccactttgcaatccgacagcaacatccaagctgaaattgcaaagcttcgccacgatgtggaggaatatgcgaaacaattcccaacaattggattcgagaaagagaccatgaagtacaagaactaa

SEQ ID NO: 4431 - protein, 510 aa, Triticum monococcum
MAMATALRKLSARGQPLSRLTPLYSMASLPATEERSAVTWPKQLNAPLEEVDPEIADIIELEKARQWKGLELIPSENFTSLSVMQAVGSVMTNKYSEGYPGARYYGGNEYIDMAETLCQKRALEAFNLDPEKWGVNVQPLSGSPANFHVYTALLKPHDRIMALDLPHGGHLSHGYQTDTKKISAVSIFFETMPYRLDESTGLIDYDQLEKSAVLFRPKLIVAGASAYARLYDYNRMRKICDKQKAVLLADMAHISGLVAAGVIPSPFEYADVVTTTTHKSLRGPRGAMIFFRKGVKEINKQGKEVKYDFEDKINAAVFPGLQGGPHNHTITGLAVALKQATTQEYRAYQEQVMSNSARFAESLTSKGYDIVSGGTDNHLVLVNLKKKGIDGSRVEKVLENVHIAANKNTVPGDVSAMVPGGIRMGTPALTSRGFVEEDFAKVADFFDSAVNLALKVKAAAAGTKLKDFVATLQSDSNIQAEIAKLRHDVEEYAKQFPTIGFEKETMKYKN

SEQ ID NO: 4432 - DNA, 1410 bp, Saccharomyces cerevisiae (strain YJM789)
  CDS (1)..(1410)
atgccttacactctatccgacgctcatcataagttgatcacctctcatttggtggacaccgaccctgaagtggactccattatcaaggatgaaattgaaagacaaaagcactccatcgatttgattgcttctgaaaatttcacctcaacctccgttttcgatgcccttggaactccattgtccaacaaatattctgaaggttatccaggtgctcgttactacggtggtaatgaacacattgacagaatggaaattctatgtcaacaaagagctttgaaagctttccatgttactccagacaaatggggtgttaacgtccaaactttatctggttctcctgctaacttgcaagtttatcaagctattatgaagcctcatgaaagattgatgggtctatacctaccagatggtggtcatttgtctcacggttacgctactgaaaacagaaaaatttctgctgtttccacatactttgaatctttcccatacagagttaacccagaaaccggtattatcgactacgatactttagaaaagaacgccatcctatatagaccaaaggttcttgttgctggtacttcagcatactgtcgtttaattgactacaagagaatgagagaaatcgccgacaaatgtggtgcttacttgatggtagacatggcccacatttctggtttgatcgccgcaggtgtcatcccatctcctttcgaatacgctgatatcgttaccaccaccactcacaagtctttgagaggtccacgtggtgctatgattttcttcagaagaggtgtgagatctatcaaccctaagaccggtaaggaagttctatacgacttggaaaacccaattaacttctctgttttcccaggtcaccaaggtggtccacacaaccataccattgctgctttggccactgctttgaagcaagctgccactccagaattcaaggaataccaaactcaagtcttgaagaatgctaaggctttggaaagtgaatttaagaacttgggctacagattagtttccgacggtaccgattctcacatggttctagtatccttgagagaaaagggtgttgatggtgctcgtgttgaatacatttgtgaaaagattaacattgctttgaacaaaaattctattccaggtgacaaatctgctttggttccaggtggtgtccgtattggggctccagccatgaccactagaggaatgggtgaagaagatttccacagaattgttcaatacattaacaaggctgtagaattcgctcaacaagttcaacaaagcttgccaaaggatgcttgtagattaaaggacttcaaagccaaggtcgacgaaggctctgatgttttgaacacctggaaaaaggaaatttacgactgggctggcgaatacccattggctgtgtaa

SEQ ID NO: 4433 - protein, 469 aa, Saccharomyces cerevisiae (strain YJM789)
MPYTLSDAHHKLITSHLVDTDPEVDSIIKDEIERQKHSIDLIASENFTSTSVFDALGTPLSNKYSEGYPGARYYGGNEHIDRMEILCQQRALKAFHVTPDKWGVNVQTLSGSPANLQVYQAIMKPHERLMGLYLPDGGHLSHGYATENRKISAVSTYFESFPYRVNPETGIIDYDTLEKNAILYRPKVLVAGTSAYCRLIDYKRMREIADKCGAYLMVDMAHISGLIAAGVIPSPFEYADIVTTTTHKSLRGPRGAMIFFRRGVRSINPKTGKEVLYDLENPINFSVFPGHQGGPHNHTIAALATALKQAATPEFKEYQTQVLKNAKALESEFKNLGYRLVSDGTDSHMVLVSLREKGVDGARVEYICEKINIALNKNSIPGDKSALVPGGVRIGAPAMTTRGMGEEDFHRIVQYINKAVEFAQQVQQSLPKDACRLKDFKAKVDEGSDVLNTWKKEIYDWAGEYPLAV

SEQ ID NO: 4434 - DNA, 1713 bp, Vitis vinifera
  CDS (1)..(1713)
atggatgcgtctcatgctcagtcgggtctctctctagggtttcattcgcattcatcgctagctcccatgacgccgctcgctgacgattcggtgaagctgcagattgcttcggattttagcagtctggggaatcctattcaatccgttccactgcaattgtttgagcaaagatgcgagaaattttctaatggaagtggaggacagtctgaagacggagaggatgaggagtttcatattttggggcatcccatgtgtttgaagaggccgagagacgagcaattttcgaggtcttctagcccttctaaggtggctttggttgagtccgggcttgagcagaggcgagtagcggtgagggcttggggaaaccagccgcttagtgttgctgatcctgatgttttccaaataatggagaaggagaagaagaggcagtttaaaggaattgagcttatagcttctgagaattttgtgtgtagggctgtgatggaagcccttgggagccatttgacaaacaaatattcagaaggaatgccaggtgcaagatattacacgggtaatgactacattgatcagattgaattactttgctgcaggcgtgccttggcggcttttcatcttgattctgagaaatggggtgtaaatgtccagccatattcgtgtacatcagctaattttgctgtgtacactgggcttttacttcccaaggatcggattatgggtttggattcgccctctggtggtcatctgagtcatgggtattacatgccaagcgggaaaaaggtttcaggtacatcaatattttttgagagtctcccttataaagtgaacccacaaactgggtatattgattatgataaactagaggagaaggctcttgatttccgtcccaagatacttatttgtggtgggagttcatatccacgggagtggaattacgcaaggttcaggcagattgcagataaatgtggcgcagtattaatgtgtgacatggctcagattagcggtattgtggcggctaaggagtgtgcaagtccgtttgattattgtgatattgttacctcgacaactcacaaaaatctccgaggtcctaggggaggtattattttttacagaaaagatgatagtaaccaatatgattttgaggagaggataaactttgctgtcttcccttcattacaagggggccctcacaataatcacatagctgctcttgccatagccttaaaacaagtggccacaccagagtacaaagcatatatgcaacaggtgaaaaaaaatgctcaggctttagcagctgctttgctcagaaaaagttgcaaattggtgacagaaggtactgacaaccatttgttgctctgggatcttacagatctacacataacaggcaagaactatgagaaggtctgtgagctgtgccacattactctcaataaaactgctatatatggtgacaatggtgccatttcccctggaggggtaaggatcggttctcctgccatgacaacaagaggttgtctggaggctgattttgagacaattgcagagtttctctacagagcagctgtgattacaagtgcagttgttacacaaagagaacttagaaagtttccgcgagattttttcaagtgtctccagaacaacaaggatattgttgagctccgaaatcaagtggagacatttgcttcccagtttgcaatgccagggtttgacatttga

SEQ ID NO: 4435 - protein, 570 aa, Vitis vinifera
MDASHAQSGLSLGFHSHSSLAPMTPLADDSVKLQIASDFSSLGNPIQSVPLQLFEQRCEKFSNGSGGQSEDGEDEEFHILGHPMCLKRPRDEQFSRSSSPSKVALVESGLEQRRVAVRAWGNQPLSVADPDVFQIMEKEKKRQFKGIELIASENFVCRAVMEALGSHLTNKYSEGMPGARYYTGNDYIDQIELLCCRRALAAFHLDSEKWGVNVQPYSCTSANFAVYTGLLLPKDRIMGLDSPSGGHLSHGYYMPSGKKVSGTSIFFESLPYKVNPQTGYIDYDKLEEKALDFRPKILICGGSSYPREWNYARFRQIADKCGAVLMCDMAQISGIVAAKECASPFDYCDIVTSTTHKNLRGPRGGIIFYRKDDSNQYDFEERINFAVFPSLQGGPHNNHIAALAIALKQVATPEYKAYMQQVKKNAQALAAALLRKSCKLVTEGTDNHLLLWDLTDLHITGKNYEKVCELCHITLNKTAIYGDNGAISPGGVRIGSPAMTTRGCLEADFETIAEFLYRAAVITSAVVTQRELRKFPRDFFKCLQNNKDIVELRNQVETFASQFAMPGFDI

SEQ ID NO: 4436 - DNA, 1287 bp, Vitis vinifera
  CDS (1)..(1287)
atgaaaagcttagaacttattgcctcagagaatttcacatcccgggcagtgatggaagctgttggttcttgcctcacaaacaaatattctgagggattgcctggtaaaaggtactatggtggtaatgagttcattgatgagctggaaactctgtgtcagaagagggctttggcagcattccacttagatggaaagaagtggggtgtcaatgttcaaccattgtctggttctccagctaactttgaagtatacactgcccttctcaatccacatgacagaatcatgggcttggacttacctcatgggggccacttgtctcatggtttcatgactcctaaaagacgggtatcaggcacatcaatttattttgagtctatgccttatcgacttgatgaatctacaggtcttgttgattatgacatgcttgagaaaacagctaatctttttcgaccaaaactcattattgctggtgctagtgcttatcctcgagattttgattatcctcgtatgaggaagattgcagatggtgttggtgcttttctcatgatggatatggctcacattagtggacttgttgctgcttctgtggttgctgacccctttgagtactgtgatattgtgacaacaacaacacacaagtctcttagaggtcctagaggtggcatgatcttcttcaagaaagattctgttctgggagttgacttagaatctgccatcaacaatgctgtttttccaggtttacagggtggtccgcataaccacacaatcgggggactttcagtctgcttaaagcatgcccaatccccagaattcaaggcttaccagaaccaggtagtgtcaaactgtagagctcttgctggccggttaatcgaattgggatataacctggtttccgggggaagtgataaccaccttattcttgtggatcttaggccattgggtattgatggggctcgggcggagaagattcttgacatggcttctatcaccctcaacaagaattcagtgcctggcgacaagagtgccctcgtgcctggtggcattcgcatcggatcacctgcgatgactaccaggggattctccgagaaggaattcatagcaactgcagatttcattcacgagggcgtgcagctatctcttgaagcaaaaaaatcggtttcaggatcaaagctcctagacttcatgaagtttgtaacgtccccagatttctctttgatagaccgggtgtcggatttgcagaggagagtcgaaactctcacaacccagttcccaatgcctggattataa

SEQ ID NO: 4437 - protein, 428 aa, Vitis vinifera
MKSLELIASENFTSRAVMEAVGSCLTNKYSEGLPGKRYYGGNEFIDELETLCQKRALAAFHLDGKKWGVNVQPLSGSPANFEVYTALLNPHDRIMGLDLPHGGHLSHGFMTPKRRVSGTSIYFESMPYRLDESTGLVDYDMLEKTANLFRPKLIIAGASAYPRDFDYPRMRKIADGVGAFLMMDMAHISGLVAASVVADPFEYCDIVTTTTHKSLRGPRGGMIFFKKDSVLGVDLESAINNAVFPGLQGGPHNHTIGGLSVCLKHAQSPEFKAYQNQVVSNCRALAGRLIELGYNLVSGGSDNHLILVDLRPLGIDGARAEKILDMASITLNKNSVPGDKSALVPGGIRIGSPAMTTRGFSEKEFIATADFIHEGVQLSLEAKKSVSGSKLLDFMKFVTSPDFSLIDRVSDLQRRVETLTTQFPMPGL

SEQ ID NO: 4438 - DNA, 1692 bp, Vitis vinifera
  CDS (1)..(1692)
atggatttgaactccagctccaatctctctcttgggttctcatcgtcttcatcggtgcaaatagccgacgattctatcgcttttcagattgattccagcttccgcgaatccacgaacccgatgccaaccgcgccactgcagttgttggaggagaatcacaggggcgagaatggtggaggcgggggagagagcgcggatgaggaagagaaggtggaggagttcaggatattggggcattcgatgtgcttgaagaggcggagagacggggaggtcacttgttcggcggtgagaagagatccgatggaggcggagctcgaggcgcggcggagcgctgtgagggcgtggggaaaccagcggctctgcgtggccgatcctgatgtgtttgatattatggaaaaagagaagcggaggcaattcaagggaattgagttgatcgcttcggagaatttcgtgtgcagggcggtgatggaagccctgggaagccatttgacgaataagtattccgagggaatgccgggtgctaggtattactgtgggaatcagtatattgatgagattgaatggctttgttgcaagcgcgcattgaaggcattcgatcttgatccggagaattggggagtgaatgttcagccatattcatgtacttctgcaaatttcgcagtttacacaggtttacttcttccgggtgatagaatcatggggttggatactccatcaggtggaaatactagtcatgggtactacactcctaatggcaggaaagtttcgggggcgtctatcttctttgagagtttaccctataaggtgaacccacaaactgggtatatagattttgataagctggaagagagggcgctagattttcgccccaagattcttatttgtggtgggagttcatatcctcgtgaatgggattatgctaggtttagacagattgctgataagtgtggagcagtgcttttgtgcgacatggctcaaattagcggacttgttgcggctaaggaatgtgtaaacccttttgattactgtgatattgttacctcaacaactcacaaaagtctacggggtcccaggggaggcatcattttttatagaaaggatgataatgatcactatgactatgaggaaaagataaactttgctgttttcccatcattgcaagggggccctcacaataaccacattgctgcccttgcaatagccctaaaacaagtggctactccagagtacaaggcatatatgctgcaggtaaagaaaaatgctcaggctttagcatctgctttactgagaagaaaatgtaggctggtaactggaggcacagacaaccatttgttactttgggatcttagaactctgggattgacaggtaagaactatgagaaggtctgtgaaatgtgccacattacactcaataaaattgctatattcggtgataatggcactattactcctggaggtgtaaggattggtactcctgctatgacatcaagaggttgtctagaggccgattttgagactattgctgactttttgctcagagctgcacagattgcaagtgtcgtacagagagagcatgggaaaatgcagaaggcttttctgaagggccttgagagcaataaagatattgttgagctcagaacccgagttgaaatttttgctactcaatttgtaatgccaggatttgatggttga

SEQ ID NO: 4439 - protein, 563 aa, Vitis vinifera
MDLNSSSNLSLGFSSSSSVQIADDSIAFQIDSSFRESTNPMPTAPLQLLEENHRGENGGGGGESADEEEKVEEFRILGHSMCLKRRRDGEVTCSAVRRDPMEAELEARRSAVRAWGNQRLCVADPDVFDIMEKEKRRQFKGIELIASENFVCRAVMEALGSHLTNKYSEGMPGARYYCGNQYIDEIEWLCCKRALKAFDLDPENWGVNVQPYSCTSANFAVYTGLLLPGDRIMGLDTPSGGNTSHGYYTPNGRKVSGASIFFESLPYKVNPQTGYIDFDKLEERALDFRPKILICGGSSYPREWDYARFRQIADKCGAVLLCDMAQISGLVAAKECVNPFDYCDIVTSTTHKSLRGPRGGIIFYRKDDNDHYDYEEKINFAVFPSLQGGPHNNHIAALAIALKQVATPEYKAYMLQVKKNAQALASALLRRKCRLVTGGTDNHLLLWDLRTLGLTGKNYEKVCEMCHITLNKIAIFGDNGTITPGGVRIGTPAMTSRGCLEADFETIADFLLRAAQIASVVQREHGKMQKAFLKGLESNKDIVELRTRVEIFATQFVMPGFDG

SEQ ID NO: 4440 - DNA, 1811 bp, Picea sitchensis
  CDS (36)..(1595)
gaggcagaggttgagaatcgagattggggtggacaatggcgatgagaacagttgctgcttttgcgacgagggtttccacacgtgatgtgttcaaatcctctgtcactcaatttgctcaacgatactcctctgaggcggcttactctcgaactgaaaaagaaaaatcacatgtcacgtggccaaagcaattgaatgcaccattgcacgaggtggatcctgagattacagacatagttgagctagagaagaataggcaatggaagggacttgaacttattccttcagaaaacttcacctcattatcagttatgcaggctgtagggtcagttatgaccaataagtacagtgaaggctatcctggtgcaagatactatggaggaaatgagtttattgatatggcagagtctttatgtcagaaaagagccttggaagcatttcgtctggatccaaagaaatggggagttaatgtacaacctttatcaggatctcccgcaaattttcatgtgtatacagctttgttgaagccacatgatcgaatcatggcacttgatctcccacatggtggtcatttatcgcatggttaccagacagataccaaaaagatttcagcagtctcggcatactttgagacaatgccatatagattgaatgaatcaactggtattatcgattatgaccagctggagaagagcgcaacccttttcagacccaaactcatcattgcaggtgctagtgcttatgcacgccattatgactatgctaggatgcgcaagatttgtgacaagcaaaaagctgtgctgctggcggatatggctcatataagtggactggtagcaggtggtgttgttccgtctccttttgattttgcagatgtagtgacaacaactacacacaagtcactacgtggtccacgtggtgcaatgatcttttacaggaagggtctcaaggaagttaacaagcaaggtcaagaagttatatatgattacgaggacaagattaatgcagctgtattcccaggtcttcaaggtggtccgcataatcatactataacagggttggctgttgcactcaaacaggctgctactcctgaatttaaatcgtatcaagagcaagttctcagcaactgtgctcattttgcacattgccttatcaaaagagggtatgaacttgtttctggtgggacagacaatcatttggtcctggtaaatttgaagaataagggaattgatggttccagggttgaaagagtgttggaactggctcacatagcagctaataaaaacacagttcctggagatgtttcggcaatgattcctggcggaattcgcatgggaacccccgctctgacctcaagaggtttccttgaggatgattttgcaaaagttgcggagttctttgatcttgcagttcaattaagtatcaaaatcaaatctgaaacaaaaggtggttcaaagttgaaggacttcaaggccaccattgaaagcagtccagccatacaagatgagataagaaatcttcgacatgaagttgaggagtatgcaaagcagtttccaacaattggatttgaaaaatcatccatgaaatataaggaatgagaatacctgtggtggaacaggtcatgccaggctttggtttacatagttccaaagcgcattacttaccagaattcccctgatttcaacttctgatctgtactttaactaatacaaatgatcataatctagctcaaagggtgatgtaagttttcaatccagatgtgttgtaataaaaaattccaaaatgcatagtagagaataaaaaaaaaaaaaaaa

SEQ ID NO: 4441 - protein, 519 aa, Picea sitchensis
MAMRTVAAFATRVSTRDVFKSSVTQFAQRYSSEAAYSRTEKEKSHVTWPKQLNAPLHEVDPEITDIVELEKNRQWKGLELIPSENFTSLSVMQAVGSVMTNKYSEGYPGARYYGGNEFIDMAESLCQKRALEAFRLDPKKWGVNVQPLSGSPANFHVYTALLKPHDRIMALDLPHGGHLSHGYQTDTKKISAVSAYFETMPYRLNESTGIIDYDQLEKSATLFRPKLIIAGASAYARHYDYARMRKICDKQKAVLLADMAHISGLVAGGVVPSPFDFADVVTTTTHKSLRGPRGAMIFYRKGLKEVNKQGQEVIYDYEDKINAAVFPGLQGGPHNHTITGLAVALKQAATPEFKSYQEQVLSNCAHFAHCLIKRGYELVSGGTDNHLVLVNLKNKGIDGSRVERVLELAHIAANKNTVPGDVSAMIPGGIRMGTPALTSRGFLEDDFAKVAEFFDLAVQLSIKIKSETKGGSKLKDFKATIESSPAIQDEIRNLRHEVEEYAKQFPTIGFEKSSMKYKE

SEQ ID NO: 4442 - DNA, 1780 bp, Populus trichocarpa
  CDS (65)..(1480)
ggccagccacgaagccaccaccctctgcgaagtgcaaacccattccttcccccctccctcgaacatggatccagtaactgtgtggggaaactcctccctccaaacagttgacccagaaatccacgacttaatcgagaaggaaaaacgccgccaatgcagaggaatcgaactgatcgcatcagaaaacttcacttctttcgccgttatagaggctcttggaagcgctctcaccaacaagtactctgagggtatgccaggtaaccgctactacggcggtaatgaatatattgatgagattgaaaatctctgcagagctcgggcccttcaagcttttcatttagaccccactaaatggggtgtaaatgtccagccctattctggttcccctgcaaatttcgctgcgtacacagcagttctccagccccatgacagaatcatgggcttggatttgccttcaggggggcatttgactcatgggtattacacatctgggggtaaaaagatttcagctaccagtatttattttgagagtttgccttacaaggtgaacccgcaaactgggtttcttgattatgataggttggaagaaaaggctttggattttaggcctaagcttattatttgtggtggaagtgcttatcctagagactgggattataagaagtttagatctgttgctgataagtgtggtgctcttttgctttgtgacatggctcacatcagtggccttgttgctgctcaggaagctgccaacccgtttgagtactgtgacatagtcaccaccactacccacaaaagtttgaggggtcccagggctggtatgatcttctaccgcaagggccctaagccacccaagaagggtcagccggaggatgcagtttatgactttgaagacaagatcaactttgcagttttcccatctcttcagggtggtcctcacaaccaccagattggtgctctggctgttgcattgaaacaggcccagagccctgggttcaaggcctatgctaagcaagtcaaggccaatgcagttgcccttggaaactacttgatgagcaagggatacaagcttgttactgaaggcaccgagaaccaccttgttctgtgggatcttaggccccttgggttgacaggcaacaaggttgaaaaactatgtgaccttgcaaacatcactgtgaacaagaatgccgtgtttggtgacagcagtgctttggcacctggtggagtgagaatcggtgcccccgccatgacttctagaggtttggttgagaaggatttcgagcagattggagaattcctccaccgtgctgtgaccatcacactgagcatccaaaaggaacatggaaagctcttgaaggacttcaacaagggtctggtgaacaacaaggaaatcgaggccctcaaggctgatgttgaacagttctcaggctcctttgagatgcctggctttctgatgtctgagatgaagtataaggattaggtcccaactattcaattatcattagcttgtctgttctggtcttcgcaaataccattcttcctggaaagaaaaagcttccatctttgtctgttcttgtagttagctgtcaatttttcatttgattttaatttgttgcttttctccttattatttaccttcttgggatgaatggtcctcgtgtcattcgagctatgaaaatgtttcactatctcaatgacttgatgatctattattatgtatctgattcaataaatcaatgataagctttcgtgcaagtgatgattaaaaaaaaaaaaaaaa

SEQ ID NO: 4443 - protein, 471 aa, Populus trichocarpa
MDPVTVWGNSSLQTVDPEIHDLIEKEKRRQCRGIELIASENFTSFAVIEALGSALTNKYSEGMPGNRYYGGNEYIDEIENLCRARALQAFHLDPTKWGVNVQPYSGSPANFAAYTAVLQPHDRIMGLDLPSGGHLTHGYYTSGGKKISATSIYFESLPYKVNPQTGFLDYDRLEEKALDFRPKLIICGGSAYPRDWDYKKFRSVADKCGALLLCDMAHISGLVAAQEAANPFEYCDIVTTTTHKSLRGPRAGMIFYRKGPKPPKKGQPEDAVYDFEDKINFAVFPSLQGGPHNHQIGALAVALKQAQSPGFKAYAKQVKANAVALGNYLMSKGYKLVTEGTENHLVLWDLRPLGLTGNKVEKLCDLANITVNKNAVFGDSSALAPGGVRIGAPAMTSRGLVEKDFEQIGEFLHRAVTITLSIQKEHGKLLKDFNKGLVNNKEIEALKADVEQFSGSFEMPGFLMSEMKYKD

SEQ ID NO: 4444 - DNA, 1416 bp, Populus tremuloides
  CDS (1)..(1416)
atggatccagtcactgcatggggaaacacctccctggaatcagtggacccagaaatccacgacttgatcgagaaggaaaaacgccggcaatgcagaggtatcgagctcatcgcttcagaaaatttcacatctttcgccgttatagaggcccttggcagcgctctgactaataagtactcagagggtatgccaggaaaccgctactacggcgggaatgaatatattgatcagattgaaaatctctgcagatctcgggctcttgaagcttttcatttagaccccacaaaatggggtgtaaatgttcagccatattcaggttctcctgcaaattttgctgcttatacagcagttcttcagccccatgacagaatcatggggttggatttgccttctggagggcatttgactcacgggtattacacatctgggggcaagaagatttcagccaccagtatttattttgagagtttgccttacaaggtgaattcgcaaactgggtatattgattatgatagattggaggagaaggctctggattttaggcctaagcttattatttgtggtggaagtgcttatccgagagattgggattataaaaggtttagatctgtcgctgataagtgtggtgctcttttgctttgtgatatggctcacatcagtggccttgtcgctgctcaggaagctgccaacccctttgagtactgtgacatagtcaccaccactacccacaaaagtttgaggggtcctagggctggtatgatcttctatcgcaagggccctaaaccaccaaagaagggtcagccagagaatgcggtttatgacttcgaagacaaggtcaactttgctgttttcccatctcttcagggtggtccccacaatcaccagatcggtgctctggctgttgccctgaaacaggtccaaacccctgggttcaaggcctatgccaagcaagtcaaggcgaatgccgttgcccttggaaaatacttgatgggccagggatacaagcttgttactgaaggaactgagaaccacctcgttctgtgggatcttagaccccttggattgacaggcaacaaggtcgaaaagctctgtgaccttgcaaacatcaccgtcaacaaaaatgccgtgtttggtgacagcagtgctttggctccgggaggagtaagaatcggtacccccgccatgacttcaagaggtttggtagagaaggatttcgaacagattggagagttcctccaccgtgctgtgaccatcacgctgagcatccaaaaggaatatggaaagctcttgaaggacttcaacaagggtctggtgaacaacaaggacattgaggcactcaaggctgatgttgaaaagttttctggttccttcgacatgcctgggtttctgatgtctgagatgaagtacaaggattag

SEQ ID NO: 4445 - protein, 471 aa, Populus tremuloides
MDPVTAWGNTSLESVDPEIHDLIEKEKRRQCRGIELIASENFTSFAVIEALGSALTNKYSEGMPGNRYYGGNEYIDQIENLCRSRALEAFHLDPTKWGVNVQPYSGSPANFAAYTAVLQPHDRIMGLDLPSGGHLTHGYYTSGGKKISATSIYFESLPYKVNSQTGYIDYDRLEEKALDFRPKLIICGGSAYPRDWDYKRFRSVADKCGALLLCDMAHISGLVAAQEAANPFEYCDIVTTTTHKSLRGPRAGMIFYRKGPKPPKKGQPENAVYDFEDKVNFAVFPSLQGGPHNHQIGALAVALKQVQTPGFKAYAKQVKANAVALGKYLMGQGYKLVTEGTENHLVLWDLRPLGLTGNKVEKLCDLANITVNKNAVFGDSSALAPGGVRIGTPAMTSRGLVEKDFEQIGEFLHRAVTITLSIQKEYGKLLKDFNKGLVNNKDIEALKADVEKFSGSFDMPGFLMSEMKYKD

SEQ ID NO: 4446 - DNA, 1551 bp, Populus tremuloides
  CDS (1)..(1551)
atggccattgctcttcgcaggctctcttcctccctcaggaacccaatcaaaccttacctcaatggcggttctctctattacaacatgtcttctttgcctcataaagctctgtccgacgaagacacagctcgcgccaattggataaagcaattgaatgctccgttagaggaaatcgatccggaaattgctgacatcatcgaactcgagaaagcaaggcaatggaagggattggaactcattccttcagagaatttcacgtcggtgtcggtgatgcaagcggttggttcggttatgaccaataaatacagtgaagggtacccgggggctagatattatggaggaaatgagtacattgacatggctgagacgttatgtcagaagcgtgcattagaagcttttgggttggatcctcaaaaatggggagtcaacgtgcagtcactatctggatcccctgctaactttcaagtttacacggcactgctgaaacctcatgagagaatcatggcacttgatctgccacatggtgggcatctttcacatggttatcagactgacacaaagaagatatctgctgtatccatattttttgagacaatgccatacagattgaatgagagtacaggctatgtggactatgatcagctggagaaaagtgccacactctttagaccaaaacttatagttgctggtgcaagtgcttatgctcgcctttatgactatgcacgtatccgtaaggtctgtgacaagcaaaaggcagttttgttggctgatatggcacacatcagtgggcttgttgcagcaggtgttattccatctcctttcgaatatgcagatgtcgttacaaccaccacgcacaagtcacttcgaggtccacggggggctatgatcttcttcaggaagggggtgaaagaaattaacaaacaagggaaagaagtgatgtatgactatgaagacaaaatcaatcaggcagtctttcctggacttcaaggtggtccacacaatcataccatatctggtttagcggttgcactaaagcaggcgagaactccagagtacaaggcctaccaagagcaagttctcagcaactgttcaaaatttgctcagagcttgatagagaagggctatgaactggtatctggtggcactgagaaccatctagtcctggtgaatttaagaaacaagggtattgatggatcaagagttgaaaaggttctggaattagtccacattgcagctaataaaaacactgttcctggagatgtatctgccatggttcctggtggaattcgtatgggaaccccggctctcacttcaaggggttttattgagagagattttgtgaaagtagctgaattcttcgatgctgctgtgaagttggccttgaagatcaaggcagatgcacaaggtacaaagttgaaggattttgtagcagccatgaagtcagatggatatcaatctgagattgcaaggctccgtcatgatgttgaagagtatgcaaagcaattccctacagttggatttgagaaggaaacaatgaaatacaaggactaa

SEQ ID NO: 4447 - protein, 516 aa, Populus tremuloides
MAIALRRLSSSLRNPIKPYLNGGSLYYNMSSLPHKALSDEDTARANWIKQLNAPLEEIDPEIADIIELEKARQWKGLELIPSENFTSVSVMQAVGSVMTNKYSEGYPGARYYGGNEYIDMAETLCQKRALEAFGLDPQKWGVNVQSLSGSPANFQVYTALLKPHERIMALDLPHGGHLSHGYQTDTKKISAVSIFFETMPYRLNESTGYVDYDQLEKSATLFRPKLIVAGASAYARLYDYARIRKVCDKQKAVLLADMAHISGLVAAGVIPSPFEYADVVTTTTHKSLRGPRGAMIFFRKGVKEINKQGKEVMYDYEDKINQAVFPGLQGGPHNHTISGLAVALKQARTPEYKAYQEQVLSNCSKFAQSLIEKGYELVSGGTENHLVLVNLRNKGIDGSRVEKVLELVHIAANKNTVPGDVSAMVPGGIRMGTPALTSRGFIERDFVKVAEFFDAAVKLALKIKADAQGTKLKDFVAAMKSDGYQSEIARLRHDVEEYAKQFPTVGFEKETMKYKD

SEQ ID NO: 4448 - DNA, 1668 bp, Populus tremuloides
  CDS (1)..(1668)
atggatttaacacaagcagcgcaatcaggtctctcgcttcgatttcactcaagttcaattccaattcaactgcaattactcgatcaaaaacaagaaacccacatcgataacgaagaaaaccaaacagaagatgaacaatttagcattttgggtcatcaagtgtgtataaagagaccaagagataacagttctcaatcatcatcttcatcatcgacgacaagttcttccaaacgggttgctatggatccgggtttggagtctcgtcgggccatggttcgggcatggggaaaccaccctcttcccgtcgcggatcctgaaattcatgagattatggagaaagagaagcaaaggcagtttaaaggtattgaattgattgcatctgagaattttgtttgccgtgcagttatggaagctcttggtagtcatttaactaataaatattcggagggattgcctggttccagatacttatacggaaatcaatatattgatcaaattgaattgatttgttggagccgcgcgctggcagcttttggacttgattctgataaatggggtgttaatgtgcagccatattcgtgtacttcagcgaatttttctgttttcactgggcttttattgcctggggataggatcatggggttagactcgccttctggagggcatttaagtcatgggtattatacacctggagggaagaatgtgtcagcttcgtcaattttttttgagagtctgccatataaagtgaatccacaaaccgggtatattgattatgataagatggaggagaaggctatggattttagacctaagatactgatctgtggtgggagttcgtacccgagggagtgggattatgcgaggtttagacaagttgctgataagattggtgctgttttgatgtgtgatatggctcacattagcgggctcgtagcagctaaggaatgtgtaagtccatttgaatattgtgatattgttacctctacaacacacaaaagtcttcgaggtcctagaggggggattattttttataggaaaggcccaaaattgaggaagcagggtatgcttcttagtcatggtgatggtagcagccattatgattttgaagaaaaaataaattttgcagtccatccatcaacacaagggggtcctcacaataatcacatcgctgctcttgccatagccttaaaacaagtggccacaccagagtacaaagcatatatgcaacaggtaaggaaaaatgctcaggcattagcatctgctttgttgaaaagaaaatgcagactcgtgactggtgggactgataaccatttgttgctgtgggatctaactacctggggattaacaggcaagtgttatgagaaggtgtgtgaaatgtgccacatcactctaaataaaagtgccatatttggtgacaatggtgcgatctatcctggaggagtgagaattggtgctcctgctatgacatcaagaggttgcatagaggctgattttgagacgattgctgactttcttcttaaggctgctcagattacgactgttgtgcagagggaacatggaaaaaaggatttcctcaaaggtcttcataacaataaagatattgttgagcttcgaaaccgggttgagatttttgcttctcagtttgccatgccaggatttgacatttga

SEQ ID NO: 4449 - protein, 555 aa, Populus tremuloides
MDLTQAAQSGLSLRFHSSSIPIQLQLLDQKQETHIDNEENQTEDEQFSILGHQVCIKRPRDNSSQSSSSSSTTSSSKRVAMDPGLESRRAMVRAWGNHPLPVADPEIHEIMEKEKQRQFKGIELIASENFVCRAVMEALGSHLTNKYSEGLPGSRYLYGNQYIDQIELICWSRALAAFGLDSDKWGVNVQPYSCTSANFSVFTGLLLPGDRIMGLDSPSGGHLSHGYYTPGGKNVSASSIFFESLPYKVNPQTGYIDYDKMEEKAMDFRPKILICGGSSYPREWDYARFRQVADKIGAVLMCDMAHISGLVAAKECVSPFEYCDIVTSTTHKSLRGPRGGIIFYRKGPKLRKQGMLLSHGDGSSHYDFEEKINFAVHPSTQGGPHNNHIAALAIALKQVATPEYKAYMQQVRKNAQALASALLKRKCRLVTGGTDNHLLLWDLTTWGLTGKCYEKVCEMCHITLNKSAIFGDNGAIYPGGVRIGAPAMTSRGCIEADFETIADFLLKAAQITTVVQREHGKKDFLKGLHNNKDIVELRNRVEIFASQFAMPGFDI

SEQ ID NO: 4450 - DNA, 1659 bp, Populus tremuloides
  CDS (1)..(1659)
atggatttaacacaagcagcacaatcaggtctctcacttggatttcactcaagtccaattccactacaattactcgatcaaaaacaagaaacccgcatcgataacgaagagaatcaaaccgaagatgagcaatttagcattttgggtcaccaaatgtgtattaagagaccgagagataacagttctcaatcatcagcgtcatcgtcgtcgacgaattcttccaaacgggttgctatggaccctggtttggagtctcgtcgggccatggttcgggcatggggaaaccacccgcttccaatcgcagatcctgagattcatgagattatggagaaggagaagcaaaggcagtttaaaggtattgaattgattgcgtctgagaattttgtttgccgtgctgttatggaagctcttggtagtcatttaactaataaatattctgagggattgcctggttccagatattatacgggaaatcaaaatattgatcaaattgaattgatttgttggagtcgcgccttggcagcttttggacttgattctgataaatggggtgttaatgtgcagccatattcctgtacttcagcgaattttgctgtttacaccgggcttttgttgcctggggataggatcatggggttagattctccttctggaggacatttgagtcatgggtattatacaccgggagggaaaagggtctcggcttcttcgattttttttgagagtctgccttataaagtgaacccgcaaactgggtatattgattatgataagatggaggagaaggctatggattttagacctaagatactgatctgtggtgggagttcctatccgagggagtgggattatgcgaggtttagacaagttgctgataggattggtgctgttttgatgtgtgatatggctcacattagcgggcttgtggcagctaaggaatgtgttagtccatttgaatattgtgatattgttacctctacaactcacaaaagccttcgaggtcctagaggggggattattttttataggaaaggcccaaaattgaggaagcagggcatgcttagtcatggtgatggtagcagccattatgattttgaagaaaagataaattttgcagtccatccatcattacaagggggtcctcacaataatcacatcgctgctcttgccatagccttaaaacaagtggctacaccagagtacaaagcatatatgcaacaggtgaggaaaaatgctcaggcattagcgtctgctttgttgagaagaaaatgcagattggtgactggcggtactgataaccatttggtgctgtgggatctaacaacttggggcttagcaggcaagtgttatgagaaggtgtgtgaaatgtgccaaatcactctaaataaaagtgccatatttggtgacaatggtgctatctgtcctggaggagtgagaatcggtactcctgctatgacatcaagaggttgcttagaggctgatttcgagaaaattgctgactttcttcttaaggcctctcatataacgactgttgtgcagagggaacatggaaagaaggattttctcaaaggtcttcataacaataaagaaattgttgagcttcgaaaccgggttgagatatttgcttctcagtttgccatgccaggatttgacgtttga

SEQ ID NO: 4451 - protein, 552 aa, Populus tremuloides
MDLTQAAQSGLSLGFHSSPIPLQLLDQKQETRIDNEENQTEDEQFSILGHQMCIKRPRDNSSQSSASSSSTNSSKRVAMDPGLESRRAMVRAWGNHPLPIADPEIHEIMEKEKQRQFKGIELIASENFVCRAVMEALGSHLTNKYSEGLPGSRYYTGNQNIDQIELICWSRALAAFGLDSDKWGVNVQPYSCTSANFAVYTGLLLPGDRIMGLDSPSGGHLSHGYYTPGGKRVSASSIFFESLPYKVNPQTGYIDYDKMEEKAMDFRPKILICGGSSYPREWDYARFRQVADRIGAVLMCDMAHISGLVAAKECVSPFEYCDIVTSTTHKSLRGPRGGIIFYRKGPKLRKQGMLSHGDGSSHYDFEEKINFAVHPSLQGGPHNNHIAALAIALKQVATPEYKAYMQQVRKNAQALASALLRRKCRLVTGGTDNHLVLWDLTTWGLAGKCYEKVCEMCQITLNKSAIFGDNGAICPGGVRIGTPAMTSRGCLEADFEKIADFLLKASHITTVVQREHGKKDFLKGLHNNKEIVELRNRVEIFASQFAMPGFDV

SEQ ID NO: 4452 - DNA, 1416 bp, Populus tremuloides
  CDS (1)..(1416)
atggatccagtaactgtgtggggaaactcctccctccaaacagttgacccagaaatccacgacttaatcgagaaggaaaaacgccgccaatgcagaggaatcgaactaatcgcatcagaaaacttcacttctttcgctgttatagaggctcttggaagcgctctcaccaacaagtactctgagggtatgccaggtaaccgctactacggaggtaatgaatatattgatgagattgaaaatctctgcagagctcgggcccttcaagcttttcatttggaccccactaaatggggtgtaaatgtccagccctattctggttcccctgcaaatttcgctgcgtacacagcagttctccagccccatgacagaatcatgggcttggatttgccttcaggggggcatttgactcatgggtattacacatctgggggtaaaaagatttcagctacaagtatttattttgagagtttgccttacaaggtgaacccgcaaactgggtttcttgattatgataggtgggaagaaaaggctttggattttaggcctaagcttattatttgtggtggaagtgcttatcctagagactgggattataagaagtttagatctgttgctgataagtgtggtgctcttttgctttgtgacatggctcacatcagtggccttgttgctgctcaggaagctgccaacccgtttgagtactgtgacatagtcaccaccactacccacaaaagtttgaggggtcccagggctggtatgattttttaccgcaagggccctaagccacccaagaagggtcagccggaggatgcagtttatgactttgaagacaagatcaactttgcagttttcccatctcttcagggtggtcctcacaaccaccagattggtgccctggctgttgcattgaaacaggcccagagccccgggttcaaggcctatgctaagcaagtcaaggccaatgcagttgcccttggaaactacttgatgagcaagggatacaagcttgttactgaaggcaccgagaaccaccttgttctgtgggatcttaggccccttgggttgacaggcaacaaggttgaaaaactatgcgaccttgcaaacatcactgtgaacaagaatgccgtgtttggtgacagcagtgctttggcacctggtggagtgagaatcggtgcccccgccatgacttctagaggtttggttgagaaggatttcgagcagattggagaattcctccaccgtgctgtgaccatcacactgagcatccaaaaggaacatggaaagctcttgaaggacttcaacaagggtctggtgaacaacaaggaaatcgaggccctcaaggctgatgttgaacagttctcaggctcctttgagatgcctggctttctgatgtctgagatgaagtataaggattag

SEQ ID NO: 4453 - protein, 471 aa, Populus tremuloides
MDPVTVWGNSSLQTVDPEIHDLIEKEKRRQCRGIELIASENFTSFAVIEALGSALTNKYSEGMPGNRYYGGNEYIDEIENLCRARALQAFHLDPTKWGVNVQPYSGSPANFAAYTAVLQPHDRIMGLDLPSGGHLTHGYYTSGGKKISATSIYFESLPYKVNPQTGFLDYDRWEEKALDFRPKLIICGGSAYPRDWDYKKFRSVADKCGALLLCDMAHISGLVAAQEAANPFEYCDIVTTTTHKSLRGPRAGMIFYRKGPKPPKKGQPEDAVYDFEDKINFAVFPSLQGGPHNHQIGALAVALKQAQSPGFKAYAKQVKANAVALGNYLMSKGYKLVTEGTENHLVLWDLRPLGLTGNKVEKLCDLANITVNKNAVFGDSSALAPGGVRIGAPAMTSRGLVEKDFEQIGEFLHRAVTITLSIQKEHGKLLKDFNKGLVNNKEIEALKADVEQFSGSFEMPGFLMSEMKYKD

SEQ ID NO: 4454 - DNA, 1563 bp, Populus tremuloides
  CDS (1)..(1563)
atggcagtggcaatgaccatggcccttcgccgtctctcctcttcctttgacaagccccttcgccctgctctcttcaaagccacctccctctattatatgtcttctttgccaaacgaagctgtgtatgagaaggagaaacctggtgtcagctggccaaagcagctgaatgcacccttagaggctgttgatcctcaggttgctgatattattgagctcgagaaagctaggcaatggaaggggcttgagcttataccctcagagaacttcacttcggtatcagtgatgcaagctgtgggttctgtcatgaccaacaagtacagtgaaggataccctggtgcaagatactatggtggaaacgagtatattgacatggcagaatccttatgtcagaagcgtgctctggaagcatttcgcctggatcctgctcaatggggagtgaacgtgcaatctctatctggatctccagctaattttcaagtctacactgcattgttaaagcctcatgaaagaatcatggcacttgatcttcctcatggaggccatctttctcatggctatcagacagacaccaaaaaaatatctgcagtgtcaatattttttgagacaatgccatacagattgaatgagagcactggctatattgactatgatcagctggagaaaagtgccacgcttttcagaccaaaattaatagtagctggtgctagtgcttacgcacgactatatgattatgctcgcattcgcaaggtttgcgacaaacaaaaagctatactgttggcagatatggcacacattagtggattggttgcagctgatgtcatcccgtcaccttttgagtatgcagatatagtgactaccacaactcacaagtcacttcgcgggccacgtggggcaatgattttcttcaggaaggggttaaaagaggttaacaaacaggggaaagaagtgttttatgactacgaggacaaaatcaatcaagctgtctttcctgggcttcaaggtggtccacacaaccacacaattgctggtttagcagttgctttgaaacaggctacaactgtagagtacaaagcgtatcaagagcaagttcttagtaattgtgcaaaatttgcccagagtttagttgagaaaggctacgaacttgtttctggtggaactgagaaccatttagttttggtgaatttgaagaacaagggtatagatggctccagagttgaaaaggtgcttgaatctgttcacattgctgcaaacaaaaacactgttcctggagatgtgtctgccatggttcctggtggcatcaggatgggaacgccggctcttacttctaggggattcgttgaagaggattttgctaaggtggcagatttctttgatgccgctgtgaaggtggcagtgaagatcaaggctgaaaccaaagggacaaagttgaaggatttcttggctacgcagtctgctcctcactttcaatctgagatttcaaaactccgtcatgacgtggaagagtacgctaagcaattcccaacaattggatttgaaaaggaaaccatgaagtacaagaattga

SEQ ID NO: 4455 - protein, 520 aa, Populus tremuloides
MAVAMTMALRRLSSSFDKPLRPALFKATSLYYMSSLPNEAVYEKEKPGVSWPKQLNAPLEAVDPQVADIIELEKARQWKGLELIPSENFTSVSVMQAVGSVMTNKYSEGYPGARYYGGNEYIDMAESLCQKRALEAFRLDPAQWGVNVQSLSGSPANFQVYTALLKPHERIMALDLPHGGHLSHGYQTDTKKISAVSIFFETMPYRLNESTGYIDYDQLEKSATLFRPKLIVAGASAYARLYDYARIRKVCDKQKAILLADMAHISGLVAADVIPSPFEYADIVTTTTHKSLRGPRGAMIFFRKGLKEVNKQGKEVFYDYEDKINQAVFPGLQGGPHNHTIAGLAVALKQATTVEYKAYQEQVLSNCAKFAQSLVEKGYELVSGGTENHLVLVNLKNKGIDGSRVEKVLESVHIAANKNTVPGDVSAMVPGGIRMGTPALTSRGFVEEDFAKVADFFDAAVKVAVKIKAETKGTKLKDFLATQSAPHFQSEISKLRHDVEEYAKQFPTIGFEKETMKYKN

SEQ ID NO: 4456 - DNA, 1590 bp, Populus tremuloides
  CDS (1)..(1590)
atgcaagccaccagtggagccgcagtgatgggttctttgcaacaacctgttttgtcaaaagggccagcctttccaatgaaaaggagtgttatcattgggtttccatatcaagttaagcttaattcagtgaagccatgcagggcttcttcccttgaaggaagcttggtcactggcagacccccctcttctgtttctgtgcctatccctgaaactggagctgacataagtagcttcaaagattatggacttagtgaagctgatcctgaagtgcttgaaattataaaaaaggaaaaggataggcagttcaaaagccttgaacttattgcatcagagaatttcacatctcgagcagtgatggaagcagttggttcgtgcttaacaaataagtattctgaaggacttcctggtaaaagatactatggtggaaatgagtacattgatgagcttgaaaccctttgtcaaaaaagggctctggcatcatttaacttggatggaaagaagtggggtgttaatgttcaaccattgtctggatcccctgctaattttgaggtttatactgcccttcttaaaccacatgaccgaatcatgggtttggacttgcctcatgggggacacttgtctcatgggttcatgactcctaaaaggcgggtatctgggacatcaatttactttgagtctatgccatatcgacttgatgaatctacaggcctggttgattatgatatgcttgagaaaacagctatcctctttcgaccaaaactcattattgctggtgctagtgcttatcctcgagattttgattaccctcgcatgaggaagattgcagatgctgtcggtgcctttctcatgatggatatggctcatataagtggtcttgttcctgcttctgttgttgccgacccctttgagtactgtgatgttgtgacaactacaacacacaagtccctacgaggtccaagaggtggaatgatctttttcaaaaaggatcctgttctaggagttgacatggaatctgccatcaacaatgctgtttttccaggcttacaaggcggtcctcataatcacacaattggtggactggcagtttgcttgaagcatgcacaatcccctgaatttaaagcttaccagaagcaggtcatctgtaactctagagcacttgcaaaccgaatggttgaattaggatataaactggtttctggtgggagcgacaatcatctcattcttgtagatctgaggccattgggacttgatggggctcgggtggagaaaatccttgacattgcttctatcaccctcaacaagaattctgtgcctggtgataagagcgccctagttcctggtggcattcgcattggatcccctgcgatgactaccagaggatttacagagagagaatttgtagctaccgccgacttgattcatgaaggagtacaaataagtcttgaagctaaaaaatcagtatccggatccaagctccaggatttcttaaagtttgttaaatcccctgatttccctctaacagataaagtatcagatcttcgaagaagagttgaagcacttacaactcagtttccaatcccaggattatga

SEQ ID NO: 4457 - protein, 529 aa, Populus tremuloides
MQATSGAAVMGSLQQPVLSKGPAFPMKRSVIIGFPYQVKLNSVKPCRASSLEGSLVTGRPPSSVSVPIPETGADISSFKDYGLSEADPEVLEIIKKEKDRQFKSLELIASENFTSRAVMEAVGSCLTNKYSEGLPGKRYYGGNEYIDELETLCQKRALASFNLDGKKWGVNVQPLSGSPANFEVYTALLKPHDRIMGLDLPHGGHLSHGFMTPKRRVSGTSIYFESMPYRLDESTGLVDYDMLEKTAILFRPKLIIAGASAYPRDFDYPRMRKIADAVGAFLMMDMAHISGLVPASVVADPFEYCDVVTTTTHKSLRGPRGGMIFFKKDPVLGVDMESAINNAVFPGLQGGPHNHTIGGLAVCLKHAQSPEFKAYQKQVICNSRALANRMVELGYKLVSGGSDNHLILVDLRPLGLDGARVEKILDIASITLNKNSVPGDKSALVPGGIRIGSPAMTTRGFTEREFVATADLIHEGVQISLEAKKSVSGSKLQDFLKFVKSPDFPLTDKVSDLRRRVEALTTQFPIPGL

SEQ ID NO: 4458 - DNA, 1737 bp, Populus tremuloides
  CDS (1)..(1737)
atggactctaaattaaatctagggtttcaccgtacacaaatcgccgacgattcaatctctctccagctcgactgtagcctccgcgacctccccaccgcaaacccggtttcacccgttcctctccaattgctcgagccactgaccgagtctcactactgcaataaccaaaacggcgagaaagaagaagacgacgatgacagagatgtcgaggagtttaggatattagggcactctttgtgtttcaaacgccgaagagagagcgattctttgacgagcaataaaagagaggcatcctcctcttctaatggattggatgttgaagagcgcaggagtcttgtcaaaacatgggggaaccagccgctaagcgcggcggattcggagatttttgagataatggagaaagagaaagagaggcagtttaaagggattgaattgattgcgtcggagaattttgtatgtagagcggtaatggaggctcttggaagtcatttaacgaataagtattcggagggaatgcctgcagcgcgatattatggtgggaatcagtacattgatgagattgaactgctgtgttgtaagagagcactggaggcttttggtttggattctgagagttggggagtaaatgtgcagccgtattcgtgtacttcggctaatttcgctgtgtatactgggttgttgttgccgggggataggattatggggttggacacaccatctggagggaatacgagtcatggctattatacccctcacgggcggaaggtttccggtgcatctattttcttcgagagtttgccttataaggtcaatcctcaaactgggtatattgatttcgataagttagaggagagggcacttgattttaggccaaaaatactcatttgtggtggtagctcgtatccaagggagtggggttatgcgaggttaaggcatatcgcagataagtgtggtgctgtgcttatgtgtgatatggcacagattagtggtcttgttgctgctaaggaatgtctgaacccctttgtttactgtgatattgttacctcaacaacccataaaagtcttcgaggtccaaggggaggcatcattttctacaggaagggtacaaaaccaaggaaaagggggatccatctaggtcaaggagatgagagtgatcaatatgatttcgaggaaaagattaattttgctgtttttccatcactgcaaggtggaccacataataaccacattgctgctcttgccatagcctttaaacaagtggcgacccctgagtacaaggcatacatgcaacaggtgaagaaaaacgcacagtatttagcagctgctttgctgagaagaaaatgcaggcttgtaactggaggcacagataaccatttgctactctgggatctcaggcctttgggattaacaggtaaagcttatgaaaaggtctgcgagttgtgccacatcacagtaaataaaattgctatttttggggagaatggaactattactcctggaggtgtaaggattggtactcctgccatgacttcaagaggttgcctggaatctgattttgagacaattgctgattttctcctgaaagctgcacatattgcttgtatggtgctgcgtgaacatgggaagctgcagaaggctttcatgaatggtctgcaaaccaagaaagaaattttagagctccagaagcaagttgaaaattttgcaactcagtttgcaatgccaggttttgacatgtga

SEQ ID NO: 4459 - protein, 578 aa, Populus tremuloides
MDSKLNLGFHRTQIADDSISLQLDCSLRDLPTANPVSPVPLQLLEPLTESHYCNNQNGEKEEDDDDRDVEEFRILGHSLCFKRRRESDSLTSNKREASSSSNGLDVEERRSLVKTWGNQPLSAADSEIFEIMEKEKERQFKGIELIASENFVCRAVMEALGSHLTNKYSEGMPAARYYGGNQYIDEIELLCCKRALEAFGLDSESWGVNVQPYSCTSANFAVYTGLLLPGDRIMGLDTPSGGNTSHGYYTPHGRKVSGASIFFESLPYKVNPQTGYIDFDKLEERALDFRPKILICGGSSYPREWGYARLRHIADKCGAVLMCDMAQISGLVAAKECLNPFVYCDIVTSTTHKSLRGPRGGIIFYRKGTKPRKRGIHLGQGDESDQYDFEEKINFAVFPSLQGGPHNNHIAALAIAFKQVATPEYKAYMQQVKKNAQYLAAALLRRKCRLVTGGTDNHLLLWDLRPLGLTGKAYEKVCELCHITVNKIAIFGENGTITPGGVRIGTPAMTSRGCLESDFETIADFLLKAAHIACMVLREHGKLQKAFMNGLQTKKEILELQKQVENFATQFAMPGFDM

SEQ ID NO: 4460 - DNA, 1557 bp, Medicago truncatula
  CDS (1)..(1557)
atggcaatggcaatggctcttcgtaggctttcttcttccatcaacaaatcttcacgtcctctcttcagtgcttcttctgtttactacaagtcatctttgcctgatgaagctgtgtatgataaagagaattcacgtgtttcgtggccaaagcaattgaattcttcacttgaggaaattgaccctgaaattgctgatattattgagcttgagaaagctagacaatggaaggggctggaactgattccatcagaaaacttcacttctttatctgttatgcaagctgttggctctatcatgacaaacaaatacagtgaaggttatcccggagcaagatattacggaggaaatgagtatattgacatggcagaaacactatgccaaaagcgtgccttggaagcatttcggttggatccagctaaatggggagtgaacgtgcagcctttgtctggttcaccttcaaattttcatgtttacactgcattgttgaaacctcatgacagaatcatggcacttgatctccctcatggaggacatctttctcatggttaccagaccgacaccaaaaagatatctgcagtctctatattttttgagacaatgccatatagattggatgaaagcacaggatacattgattatgaccagctagagaaatctgctaccctcttcaggccaaaactaattgttgccggtgctagtgcctatgcacgtctgtatgattatgcacgcattcgcaaggtgtgcgataaacaaaaagctgtgatgttagcagatatggcacatatcagtggactggttgcagctggtgttatcccttcaccttttgattatgcagatgtagtgactaccacaactcacaagtcacttcgtggaccacgtggagctatgatctttttccggaagggattaaaagaagtcaacaaacaaggaaaagaggtgttctatgactatgaggataaaatcaatcaagctgtcttccctggactgcaaggtggtcctcacaaccataccatcactggtttagccgttgcattgaaacaggctacaactccagagtataaagcataccaagagcaggttctcagcaattgcgcaaaatttgcacaggctttgagtgagaaaggctatgagcttgtttctggtgggactgagaatcatctagttttggtgaatcttaagaacaagggtattgatggctccagagttgagaaggtgttggaagcagtacatattgcagctaataaaaacactgttccaggagatgtgtctgctatggttcctggtggtatcaggatgggaactcctgctcttacttcaaggggatttgttgaggaggatttcgttaaggtagcagagtattttgatgcatccgtgaatttggctttgaagatcaaggcagagagcaaaggaacaaaattaaaggacttcgtagaaacattgcagtcatcctcctacgtgcagtcagagatctccaaacttcgtcatgatgttgaggagtttgcaaaacaatttccaaccattggttttgaaaaatcaagcatgaagtacaacaaataa

SEQ ID NO: 4461 - protein, 518 aa, Medicago truncatula
MAMAMALRRLSSSINKSSRPLFSASSVYYKSSLPDEAVYDKENSRVSWPKQLNSSLEEIDPEIADIIELEKARQWKGLELIPSENFTSLSVMQAVGSIMTNKYSEGYPGARYYGGNEYIDMAETLCQKRALEAFRLDPAKWGVNVQPLSGSPSNFHVYTALLKPHDRIMALDLPHGGHLSHGYQTDTKKISAVSIFFETMPYRLDESTGYIDYDQLEKSATLFRPKLIVAGASAYARLYDYARIRKVCDKQKAVMLADMAHISGLVAAGVIPSPFDYADVVTTTTHKSLRGPRGAMIFFRKGLKEVNKQGKEVFYDYEDKINQAVFPGLQGGPHNHTITGLAVALKQATTPEYKAYQEQVLSNCAKFAQALSEKGYELVSGGTENHLVLVNLKNKGIDGSRVEKVLEAVHIAANKNTVPGDVSAMVPGGIRMGTPALTSRGFVEEDFVKVAEYFDASVNLALKIKAESKGTKLKDFVETLQSSSYVQSEISKLRHDVEEFAKQFPTIGFEKSSMKYNK

SEQ ID NO: 4462 - DNA, 1245 bp, Herbaspirillum seropedicae
  CDS (1)..(1245): transl_table=11
atgtttgacaagaaccagactctcgcgaaagtcgatcccgacctgtggtctgccatccagaaggaaaacgcacgccagcaggatcacatcgagctgatcgcttctgaaaactacacctcgccggccgtcatggaagcgcaaggttcgcaactgaccaacaagtacgccgaaggctatccgggcaagcgctactacggcggctgcgaatacgtggacgtggccgagcaactggccatcgaccgcttgaaggccctgttcggcgccgaagccgccaacgtgcagccgaactccggctcccaggccaaccagggcgtgttcttcgccatgttgaagccgggcgacaccatcatgggcatgtcgctggcagaaggcggccacctgacccacggcatggcgctgaacatgtcgggcaagtggttcaacgtggtttcctatggcctgaacgacaaggaagagatcgactacgaggccatggagcgcctggcccgtgagaagaagcccaagctgatcatcgctggcgcctcggcttactcgctgcgcatcgacttcgagcgcttcgccaagatcgccaaggaagtcggcgcctacttcatggtcgacatggcccactacgccggcctgatcgccgctggcgtctatccgaacccggtgcccttcgccgacttcgtcacctcgaccacccacaagtccctgcgcggcccgcgcggtggtgtgatcctgatgaaggccgagcacgagaaggccatcaactcggccatcttcccgggtatccagtgtggtccgctgatgcacgtcatcgcggccaaggccgtggccttcaaggaagcggcttcgccggaattcaaggcctatcagcagcaagtggtgaagaacgccgacgtgctggccaagaccctgatcaagcgcggcctgcgcatcgtctccggcggcaccgagtcgcacgtgatgctggtggatctgcgcccgaagggcctgaccggcaaggaagccgaagccatcctgggttcggcccacatgacctgcaacaagaatggcatccccaacgatccggaaaagccgttcgtgacctcgggcatccgcctgggcagcccggccatgaccacccgtggtttcaaggaagccgaagccgagaaggtcggtaacttcatcgccgacgtgctggacaacccgcatgacgcggccaccatcgaacgcgtcaaggccgaggtgaagaagctgaccgacgctttcccggtctacggctga

SEQ ID NO: 4463 - protein, 414 aa, Herbaspirillum seropedicae
MFDKNQTLAKVDPDLWSAIQKENARQQDHIELIASENYTSPAVMEAQGSQLTNKYAEGYPGKRYYGGCEYVDVAEQLAIDRLKALFGAEAANVQPNSGSQANQGVFFAMLKPGDTIMGMSLAEGGHLTHGMALNMSGKWFNVVSYGLNDKEEIDYEAMERLAREKKPKLIIAGASAYSLRIDFERFAKIAKEVGAYFMVDMAHYAGLIAAGVYPNPVPFADFVTSTTHKSLRGPRGGVILMKAEHEKAINSAIFPGIQCGPLMHVIAAKAVAFKEAASPEFKAYQQQVVKNADVLAKTLIKRGLRIVSGGTESHVMLVDLRPKGLTGKEAEAILGSAHMTCNKNGIPNDPEKPFVTSGIRLGSPAMTTRGFKEAEAEKVGNFIADVLDNPHDAATIERVKAEVKKLTDAFPVYG

SEQ ID NO: 4464 - DNA, 1416 bp, Zea mays
  CDS (1)..(1416)
atggaccccgtcgccacatgggggctaaccccgctcgcgggcgccgacccggagatctacgacctcctggagcgcgagaagcggcgccagcgtcgcggcatcgagctcatcgcctccgagaacttcacctccttcgccgtcatggaggcgctcggctccgcgctcactaacaagtactccgagggcatgcccggcgcccgctactacggcggcaacgacgtcatcgacgagatcgagaacctctgccggtcacgcgcgctcgctgccttccaccttgacgccgcgtcctggggcgtcaacgtgcagccctactcgggctcccccgccaacttcgccgcctacaccgcgctgctcaacccgcacgaccggatcatggggctcgaccttccctccggcggacacctcactcacgggtactacacggccggcggtaagaagatctccgccacctcgatctactttgagagcctgccgtacaaggtgagcgccgcaacggggtacatcgactacgagaagctcgaggagaaggcacttgacttccgccccaagctcatcatctgcggtggcagtgcgtacccgagggactgggattacgccaagctcagggccgtcgccgacaaggtcggggccctgctgctctgcgacatggcgcacatcagcgggctcgtcgccgcgcaggaagctgcaaatccttttgaatattgtgatgtggttaccacaaccacgcacaagtccctcagagggccaagggctggcatgatcttctacaggaaaggccctaagccccccaagaagggccagcctgagggtgctgtttatgattacgaagacaagatcaactttgcagtgttcccatctctccaaggtggccctcacaaccaccagattgctgcacttgctgttgctctacagcaaactatgtcgcctggcttcaaggcctatgcaaagcaagtgaaggccaatgctgttgcaattggaaactatctcatgagcaagggctacaagatggtgactgatggaactgagaaccaccttgttctctgggatctccgcccccttggcttgactggaaacaaggtcgaaaagctatgtgatctttgccacatcacattgaacaagaatgctgtcttcggtgacagcagtgcattgtctccgggtggtgtccgcattggcgcgccagcaatgacctcgaggggtctactggagaaggatttcgagcagattggggagttcctccaccaggcagtgaccatctgcctgaacatccagaaggagtacggcaagctcctcaaggacttcaacaagggcctggtgaacaacaaggacatcgagaacctcaaggtccaggtggagaagtttgccgactccttcgacatgcctgggttcacgcttgagagcatgaaatacaaggagtag

SEQ ID NO: 4465 - protein, 471 aa, Zea mays
MDPVATWGLTPLAGADPEIYDLLEREKRRQRRGIELIASENFTSFAVMEALGSALTNKYSEGMPGARYYGGNDVIDEIENLCRSRALAAFHLDAASWGVNVQPYSGSPANFAAYTALLNPHDRIMGLDLPSGGHLTHGYYTAGGKKISATSIYFESLPYKVSAATGYIDYEKLEEKALDFRPKLIICGGSAYPRDWDYAKLRAVADKVGALLLCDMAHISGLVAAQEAANPFEYCDVVTTTTHKSLRGPRAGMIFYRKGPKPPKKGQPEGAVYDYEDKINFAVFPSLQGGPHNHQIAALAVALQQTMSPGFKAYAKQVKANAVAIGNYLMSKGYKMVTDGTENHLVLWDLRPLGLTGNKVEKLCDLCHITLNKNAVFGDSSALSPGGVRIGAPAMTSRGLLEKDFEQIGEFLHQAVTICLNIQKEYGKLLKDFNKGLVNNKDIENLKVQVEKFADSFDMPGFTLESMKYKE

SEQ ID NO: 4466 - DNA, 1698 bp, Saccharomyces cerevisiae (strain AWRI1631)
  CDS (1)..(1698)
atgattctctccgttatctgctggttcttagtccactgtctgttctgtcccccttctgtccaagagatagaatataaaaaagactcattatttttttttaggtacttcgcttattggtggtcaatgagaaaaaaaatactaaaagccatcgcctcttggagaagagcaaactatcaaaaatcatcaagccgacatttccacatcgagtctcatagtctttcaatcatgtttcccagagcttctgcattggccaaatgtatggcaactgttcatcgtcgtgggctactcaccagtggtgcacaatcgctagtctccaaaccagtctcggagggagatccagagatgtttgacatcttgcaacaagaacgtcacagacaaaaacactctatcacccttatcccatcagaaaacttcacctcgaaggccgttatggatttgctaggttctgagctccaaaacaagtattctgaaggttatccaggtgaaagatactacggaggtaacgaaatcatcgataagtccgaatccttgtgtcaagcaagagctctggaactgtacggattagaccctgccaagtggggagttaatgttcaaccattaagcggggcacctgccaatttgtatgtttactccgctatcatgaacgttggtgaaagattaatgggattggatttgccagatggtggtcacttgtctcacgggtaccaacttaagtcaggaacgccaatttctttcatttccaaatacttccaaagtatgccataccatgtcgaccacactacggggctaatcgattacgataacttgcaagtattggccaaggcattcagaccaaaggtgatcgtggccggtacttccgcgtactcgagattaatagactacgctagattcaaggaaatttcccaaggatgcggcgcatatttgatgagtgatatggcacacatatccggtttggtggcagccaatgttgtcccatctccatttgaacattccgatatagttaccacaaccactcacaagtccttgagaggcccaagaggtgctatgattttcttcagaaagggtatcaagtctgtcaccaaaaagggcaaggaaatcccatatgagttagaaaagaaaatcaacttctcagttttcccaggacatcaaggtggtcctcacaaccatactatcggtgcaatggcagtggcattaaagcaagcgatgtctccagaattcaaagaataccaacaaaaaattgtcgacaacagcaaatggtttgctcaggaactaaccaagatgggttataagttggtttccggcggtaccgataaccacttgattgttattgacttatccggtactcaggtagacggtgctcgtgtcgagacaattttaagtgccttgaacattgctgctaacaagaacaccatcccaggtgataagagtgctcttttcccctctggtctaagaatcggtactccagcaatgaccacgagaggatttggccgtgaagagttttctcaagtcgcaaagtacattgattctgccgttaagctcgctgaaaatttgaaaactttggaaccaacaacgaaactagatgcaagatcaagactcaatgagttcaagaagttgtgtaatgaatctagtgaagtcgctgctttgtctggcgagatttccaagtgggtcggtcaataccctgtcccaggtgatatctaa

SEQ ID NO: 4467 - protein, 565 aa, Saccharomyces cerevisiae (strain AWRI1631)
MILSVICWFLVHCLFCPPSVQEIEYKKDSLFFFRYFAYWWSMRKKILKAIASWRRANYQKSSSRHFHIESHSLSIMFPRASALAKCMATVHRRGLLTSGAQSLVSKPVSEGDPEMFDILQQERHRQKHSITLIPSENFTSKAVMDLLGSELQNKYSEGYPGERYYGGNEIIDKSESLCQARALELYGLDPAKWGVNVQPLSGAPANLYVYSAIMNVGERLMGLDLPDGGHLSHGYQLKSGTPISFISKYFQSMPYHVDHTTGLIDYDNLQVLAKAFRPKVIVAGTSAYSRLIDYARFKEISQGCGAYLMSDMAHISGLVAANVVPSPFEHSDIVTTTTHKSLRGPRGAMIFFRKGIKSVTKKGKEIPYELEKKINFSVFPGHQGGPHNHTIGAMAVALKQAMSPEFKEYQQKIVDNSKWFAQELTKMGYKLVSGGTDNHLIVIDLSGTQVDGARVETILSALNIAANKNTIPGDKSALFPSGLRIGTPAMTTRGFGREEFSQVAKYIDSAVKLAENLKTLEPTTKLDARSRLNEFKKLCNESSEVAALSGEISKWVGQYPVPGDI

SEQ ID NO: 4468 - DNA, 1410 bp, Penicillium chrysogenum (strain ATCC 28089 / DSM 1075 / Wisconsin 54-1255)
  CDS (1)..(1410)
atgtcttacgctctttctgagtcccaccgggaccaaatgcacaactctctcgtgtccagcgacccagaggttgcttccatcatggagaaggagatccagcgtcagcgtgagtcagtcgtcctgattgcctccgagaacttcacttctcgtgctgtcttcgatgccctcggttcgcccatgtgcaacaagtactccgagggttaccccggtgctcgttactacggtggcaaccagcacatcgacgccattgagatcacctgccagcagcgtgctcttaaggccttcaacctcgaccccgccaagtggggcgtcaacgtccagtgcctttccggtagccccgccaacctccaggtctaccaggctctcatgcgtccccatgaccgcttgatgggcttggatctcccccacggtggtcacctgagccacggctaccagaccccctccaagaagatctctgccgtttccacctacttcgagaccttcccttaccgtgtcgaccttgagaccggtattatcgactatgacactctcgagcgtaatgctgagatgtaccgccctaagtgtctggtcgccggtacctccgcctactgccgtctgattgactacaagcgcatgcgcgagattgccgacaaggttggcgcctaccttatcgtcgacatggcccacatctctggcctgatcgccgctggtgtcattccctctcccttcgagtacgctgatgttgtgaccaccaccactcacaagtctctccgtggtccccgtggtgctatgatcttcttccgcaagggtgtccgcagcaccgataagaacggaaaggaggtcctttacgacctggagaaccctatcaacttctccgtcttccctggccaccagggtggtccccacaaccacaccatcactgctttggccgttgctctcaagcaggttgacacccctgagttcaagcagtaccaggagcaggtcatcaagaacgccaaggctctcgaggaggagttcaaggcccttggccacaagctcgtctccgacggcaccgacagccacatggttctcgttgacctccgcgccaagagccttgatggtgctcgtgttgaggctgttctggagcagatcaacattgcctgcaacaagaactctattcccggtgacaagtcggccctcactccttgcggtatccgcattggtgcccccgccatgtcttcccgtggtatgggtgtggaggacttcaagcgcattgcccgctacattgaccagtccatcaccctctgcaagaagatccagggtgagcttcccaaggaggccaacaagctcaaggacttcaaggccaaggttgccgatgacagcgttcctgagatccttgctctccgcaaggagattgctgagtgggctagcgcattccctcttcccgtctaa

SEQ ID NO: 4469 - protein, 469 aa, Penicillium chrysogenum (strain ATCC 28089 / DSM 1075 / Wisconsin 54-1255)
MSYALSESHRDQMHNSLVSSDPEVASIMEKEIQRQRESVVLIASENFTSRAVFDALGSPMCNKYSEGYPGARYYGGNQHIDAIEITCQQRALKAFNLDPAKWGVNVQCLSGSPANLQVYQALMRPHDRLMGLDLPHGGHLSHGYQTPSKKISAVSTYFETFPYRVDLETGIIDYDTLERNAEMYRPKCLVAGTSAYCRLIDYKRMREIADKVGAYLIVDMAHISGLIAAGVIPSPFEYADVVTTTTHKSLRGPRGAMIFFRKGVRSTDKNGKEVLYDLENPINFSVFPGHQGGPHNHTITALAVALKQVDTPEFKQYQEQVIKNAKALEEEFKALGHKLVSDGTDSHMVLVDLRAKSLDGARVEAVLEQINIACNKNSIPGDKSALTPCGIRIGAPAMSSRGMGVEDFKRIARYIDQSITLCKKIQGELPKEANKLKDFKAKVADDSVPEILALRKEIAEWASAFPLPV

SEQ ID NO: 4470 - DNA, 1587 bp, Penicillium chrysogenum (strain ATCC 28089 / DSM 1075 / Wisconsin 54-1255)
  CDS (1)..(1587)
atgtatttgtctcgctgtggtaggtctgctgctcgcttgctcccccttgggagctcccgggcagccgttgtctccgctcgcgcctctatcgtgcccagattagccccccaatcgcggggagtagcgacatccacccgtgatacgcaacacaagttgctcgcagcctctctggaggagtccgaccccaccgtttggaacattctgcagaaggagaaacaacgtcaaaagcacttcattaacctgatcccttccgagaatttcacatcgcaagctgttctcgatgccctaggcagtgttatgcaaaacaaatattctgagggataccccggtgcccggtactatggaggaaacgaacacattgatgcctccgagcggttgtgccagcagcgtgccctagagaccttccgtctgaacccggaggaatggggagtgaacgttcaacctctgtctggctcacccgctaacctcatggcctactccgccctcctcaacacccacgaccgcatcatgggcttggaccttcctcacggtggccacctgtcccacggttatcagactcctaccaagaagatttccgctatctccaaatacttcgagaccttcccttaccgcctcgacgagtcaactggtctgattgactacgacgcgttggagaagtcggccaccctatacaggcctaagctgattatcgcgggtacctcggcctatagtcgcctgattgactacccgcgtatgcgcgcgatcgctgactccgtgggtgcctacttgctggccgatatggcccatatctcgggtcttgtggctgccgatgtgctcccatctcccttcccctactcagatgtcgtgaccaccaccacccataagtctctgcgtggcccgcgtggcgctatgatcttctaccgtaagggcgtgcgtagcacagacaagaagggcaaccccgtcatgtacgatctcgagaacccaatcaacgcatccgtcttccccggccaccagggtggccctcacaaccacactatcactgcgctatccgtggccctcaagcaggctcagtcgcccgacttcgaggcctaccagaagacagtactccgcaacgcatctgctctggccggccgtctaggtgactccaccagcaacggtggactcggctacaacattgtgtccggtggcaccgacaaccacctggtgctagtggaccttaaaaaccgcggtgtggacggtgctcgtgttgagcgcgttctcgagctgtgtggtgtcgccagcaacaagaacaccgttcccggtgacaagtctgccctcaagcccggcggtctgcgtctaggaaccccagccatgacttcccgtggcttccagcccgaggacttcacccgcgtcgccgatatcgtcgaccgtgcggtcaccatcacccagaagctggacaaggctgcccgcgagtcggctcagtcccgcggtgtcaagaaccccaatactgtcaaggcgttcttggactacgtgggtgagggtgaggagatctcggagattgttgtgctccgccaagaagtcgaggactgggttggtaccttcagcttgccgtgggctgatgaccagtag

SEQ ID NO: 4471 - protein, 528 aa, Penicillium chrysogenum (strain ATCC 28089 / DSM 1075 / Wisconsin 54-1255)
MYLSRCGRSAARLLPLGSSRAAVVSARASIVPRLAPQSRGVATSTRDTQHKLLAASLEESDPTVWNILQKEKQRQKHFINLIPSENFTSQAVLDALGSVMQNKYSEGYPGARYYGGNEHIDASERLCQQRALETFRLNPEEWGVNVQPLSGSPANLMAYSALLNTHDRIMGLDLPHGGHLSHGYQTPTKKISAISKYFETFPYRLDESTGLIDYDALEKSATLYRPKLIIAGTSAYSRLIDYPRMRAIADSVGAYLLADMAHISGLVAADVLPSPFPYSDVVTTTTHKSLRGPRGAMIFYRKGVRSTDKKGNPVMYDLENPINASVFPGHQGGPHNHTITALSVALKQAQSPDFEAYQKTVLRNASALAGRLGDSTSNGGLGYNIVSGGTDNHLVLVDLKNRGVDGARVERVLELCGVASNKNTVPGDKSALKPGGLRLGTPAMTSRGFQPEDFTRVADIVDRAVTITQKLDKAARESAQSRGVKNPNTVKAFLDYVGEGEEISEIVVLRQEVEDWVGTFSLPWADDQ

SEQ ID NO: 4472 - DNA, 1608 bp, Penicillium marneffei (strain ATCC 18224 / CBS 334.59 / QM 7333)
  CDS (1)..(1608)
atgtccttcaatcggtgcagccgccaggcctcgaagctgttggcgaccaacggaagctccttgagagctgcgacctcgacgctatatcgttcacagagagctgccagcatccacccctcacaagtagcctctcagaaacgcaatgtgtctgatactcatcatgatagccaacaaaagttgctctccacacacctcgaggaagccgatcccacgatcttcgccattctacaaaaagaaaagcaaagacaaaagcatttcatcaacttgatcccatccgagaacttcacatcccaggccgttctcgatgcacttggcagtgtgatgcaaaacaaatattccgagggataccctggagctagatattacggcggtaacgagttcatcgaccaggccgaatcgctatgtcagaaacgtgctctggagacttttagattgaatcccgacgaatggggcgtcaatgtccaagctctctcgggttcacctgcaaacttgtacgcatactccgctctactcaacacccacgaccgtctcatgggactcgacctaccccatggcggccatttgtctcacggctaccaaatccccaacaagaaaatctcgtttatttccaaatacttcgaaaccctcccgtatcgtctcgacgagtccaccggcttgattaactacgatcaactagaagaattggccaatatataccgccccaagttgatcgttgcaggcacatccgcttacagcagactgattgactatgcccgaatgcgcaaaatcaccgactcgattggcgcatacctccttagtgatatggctcatatctcgggtcttgttgccgccgacgtcatcccctctcccttctcatactccgatgtagtcacaacgacaacgcacaagtcgctgcgtggtcctcgtggcgccatgattttctaccgaaagggtgttcgtcgcactgacaagaagggtaaccaggaaatgtacgatcttgagaaccctatcaacgcctcggtctttcctgggcaccagggtggtccccacaaccacaccatcacagctcttgctgttgctctaggacaggcccaaaccaaggagttccgcgagtatcaactcaccgttctcgaaaatgccaaggctctatctgacagactcggcaactccgtcaacgaaggcggattgggatacaacattgtttccggtggtacagacaaccatttggtcctcgtcgatctcaagaaccgcggtgtagatggcgcacgcgtcgagcgagttcttgaactctgcggtgtcgccgctaacaagaacaccgtccccggtgacaaatccgctctcaagcccggcggtcttcgtatcggaacacccgccatgacttcgcgcggtttccagccagaagatttccgacgggtcggagacatcgttgatcgcgctgttacaatcacgcaaaagcttgacaaagctgcaaaggagagcgcggaggccaagggacgcaagaaccctggagtcttgaaggcgtttacagagtacgttggaaacggagatgatatttcagaaattgtacaattgcgacgagaagttgaggactgggtgggaacatttgatgttccatggaaggatgaatag

SEQ ID NO: 4473 - protein, 535 aa, Penicillium marneffei (strain ATCC 18224 / CBS 334.59 / QM 7333)
MSFNRCSRQASKLLATNGSSLRAATSTLYRSQRAASIHPSQVASQKRNVSDTHHDSQQKLLSTHLEEADPTIFAILQKEKQRQKHFINLIPSENFTSQAVLDALGSVMQNKYSEGYPGARYYGGNEFIDQAESLCQKRALETFRLNPDEWGVNVQALSGSPANLYAYSALLNTHDRLMGLDLPHGGHLSHGYQIPNKKISFISKYFETLPYRLDESTGLINYDQLEELANIYRPKLIVAGTSAYSRLIDYARMRKITDSIGAYLLSDMAHISGLVAADVIPSPFSYSDVVTTTTHKSLRGPRGAMIFYRKGVRRTDKKGNQEMYDLENPINASVFPGHQGGPHNHTITALAVALGQAQTKEFREYQLTVLENAKALSDRLGNSVNEGGLGYNIVSGGTDNHLVLVDLKNRGVDGARVERVLELCGVAANKNTVPGDKSALKPGGLRIGTPAMTSRGFQPEDFRRVGDIVDRAVTITQKLDKAAKESAEAKGRKNPGVLKAFTEYVGNGDDISEIVQLRREVEDWVGTFDVPWKDE

SEQ ID NO: 4474 - DNA, 1416 bp, Penicillium marneffei (strain ATCC 18224 / CBS 334.59 / QM 7333)
  CDS (1)..(1416)
atggctacctacgctctgtctgagtcccacaaggagttgatggaagtccaccttgcggactttgatcctgagattgctgagatcatcaaaaaagaaatccagcgccaacgcgagtccatccttctcattgcctctgagaacgtcacctctcgcgccgtcttcgatgccctcggcaccccaatgtccaacaagtactctgagggataccccggagctcgctactatggtggcaaccagcacattgatgccgtcgaattgacctgccaggcccgtgccttgaaggtcttcaacctcgatcccgagaagtggggtgtcaatgtccagactctttccggttcgcctgccaacttgcaggtctaccaggctctcatgaagcctcatgaccgtttgatgggtctcgatttgcctcatggcggtcacttgagtcacggataccagaccccccagcgcaagatctccgctgtctctacctactttgagaccttcccttaccgcgtcaactccgagaccggtatcatcgactacgacaccttggaggccaacgctcaattgtaccgccccaagatccttgttgctggtacctccgcctactgccgcttgatcgactacgctcgtatgcgcaagatcgccgactccgttggtgcctacttggttgtcgacatggctcacatttccggtctcattgctgccggcgttattccttctccctttgagtacgccgatgttgttaccaccaccacccacaagtccctccgtggaccccgtggtgccatgatcttcttccgcaagggtgtgcgtagcaccgaccccaagaccggcaaggagatcctctacgatctcgaaggacccatcaacttctccgttttccccggtcaccagggcggtcctcacaaccacaccatcaccgctttggccgtcgccctcaagcaagcttccacccccgaattccgtcaataccaggaacaaaccatcaagaacgccaaggctctcgaggttgctttcaaggagtacggatacaagctcgtcgccgacggcaccgacagtcacatggtcctcgtcgacttgcgccccaatggcattgacggtgcccgcgttgaaaccgtcttggaacagatcaacattgcatgcaacaagaacgccgtgcccggcgacaaatccgctctcagccccggtggtatccgtgtcggtgcccctgccatgactacccgtggtcttggagaggaggacttcaagcgtgttgttggatacattgaccaggccatcaagatcagcaagagcatccaggctagtttgcccaaggaggctaacaagctcaaggatttcaaggccaaggcttccagcgagactatccctgagattctcaatctgcgtaaggagatttctgcttgggccagcaccttccctctcccagtttaa

SEQ ID NO: 4475 - protein, 471 aa, Penicillium marneffei (strain ATCC 18224 / CBS 334.59 / QM 7333)
MATYALSESHKELMEVHLADFDPEIAEIIKKEIQRQRESILLIASENVTSRAVFDALGTPMSNKYSEGYPGARYYGGNQHIDAVELTCQARALKVFNLDPEKWGVNVQTLSGSPANLQVYQALMKPHDRLMGLDLPHGGHLSHGYQTPQRKISAVSTYFETFPYRVNSETGIIDYDTLEANAQLYRPKILVAGTSAYCRLIDYARMRKIADSVGAYLVVDMAHISGLIAAGVIPSPFEYADVVTTTTHKSLRGPRGAMIFFRKGVRSTDPKTGKEILYDLEGPINFSVFPGHQGGPHNHTITALAVALKQASTPEFRQYQEQTIKNAKALEVAFKEYGYKLVADGTDSHMVLVDLRPNGIDGARVETVLEQINIACNKNAVPGDKSALSPGGIRVGAPAMTTRGLGEEDFKRVVGYIDQAIKISKSIQASLPKEANKLKDFKAKASSETIPEILNLRKEISAWASTFPLPV

SEQ ID NO: 4476 - DNA, 1416 bp, Zea mays
  CDS (1)..(1416)
atggaccccgtctccacatgggggctaaccccgctcgcgggcgccgacccggagatctacgacctcctggagcgcgagaagcggcgccagcgtcgcggcatcgagctcatcgcctccgagaacttcacctccttcgccgtcatggaggcgctcggctccgcgctcactaacaagtactccgagggcatgcccggcgcccgctactacggcggcaacgacgtcatcgacgagatcgagaacctctgccggtcacgcgcgctcgctgccttccaccttgacgccgcgtcctggggcgtcaacgtgcagccctactcgggctcccccgccaacttcgccgcctacaccgcgctgctcaacccgcacgaccggatcatggggctcgaccttccctccggcggacacctcactcacgggtactacacggccggcggtaagaagatctccgccacctcgatctactttgagagcctgccgtacaaggtgagcgccgcaacggggtacatcgactacgagaagctcgaggagaaggcacttgacttccgccccaagctcatcatctgcggtggcagtgcgtacccgagggactgggattacgccaggctcagggccgtcgccgacaaggtcggggccctgctgctctgcgacatggcgcacatcagcgggctcgtcgccgcgcaggaagctgcaaatccttttgaatattgtgatgtggttaccacaaccacgcacaagtccctcagagggccaagggctggcatgatcttctacaggaaaggccctaagccccccaagaagggccagcctgagggtgctgtttatgattacgaagacaagatcaactttgcagtgttcccatctctccaaggtggccctcacaaccaccagattgctgcacttgctgttgctctacagcaaactatgtcgcctggcttcaaggcctatgcaaagcaagtgaaggccaatgctgttgcaattggaaactatctcatgagcaagggctacaagatggtgactgatggaactgagaaccaccttgttctctgggatctccgcccccttggcttgactggaaacaaggtcgaaaagctatgtgatctttgccacatcacattgaacaagaatgctgtcttcggtgacagcagtgcattgtctccgggtggtgtccgcattggcgcgccagcaatgacctcgaggggtctactggagaaggatttcgagcagattggggagttcctccaccaggcagtgaccatctgcctgaacatccagaaggagtacggcaagctcctcaaggacttcaacaagggcctggtgaacaacaaggacatcgagaacctcaaggtccaggtggagaagtttgccgactccttcgacatgcctgggttcacgcttgagagcatgaaatacaaggagtag

SEQ ID NO: 4477 - protein, 471 aa, Zea mays
MDPVSTWGLTPLAGADPEIYDLLEREKRRQRRGIELIASENFTSFAVMEALGSALTNKYSEGMPGARYYGGNDVIDEIENLCRSRALAAFHLDAASWGVNVQPYSGSPANFAAYTALLNPHDRIMGLDLPSGGHLTHGYYTAGGKKISATSIYFESLPYKVSAATGYIDYEKLEEKALDFRPKLIICGGSAYPRDWDYARLRAVADKVGALLLCDMAHISGLVAAQEAANPFEYCDVVTTTTHKSLRGPRAGMIFYRKGPKPPKKGQPEGAVYDYEDKINFAVFPSLQGGPHNHQIAALAVALQQTMSPGFKAYAKQVKANAVAIGNYLMSKGYKMVTDGTENHLVLWDLRPLGLTGNKVEKLCDLCHITLNKNAVFGDSSALSPGGVRIGAPAMTSRGLLEKDFEQIGEFLHQAVTICLNIQKEYGKLLKDFNKGLVNNKDIENLKVQVEKFADSFDMPGFTLESMKYKE

SEQ ID NO: 4478 - DNA, 1542 bp, Zea mays
  CDS (1)..(1542)
atggccatggcgacggccctccgcaagctctccgccaacgctctgcgccgccagccgctctcccgcatcacgccgctctactacatggcgtcccttccggcgacggaggagagatccggaatcacctggactaagcagttgaacgcgccgctggaagaggtcgaccccgagattgctgacatcatcgagcacgagaaggcccgccaatggaagggtctggagctcatcccgtcggagaatttcacgtcggtgtcagtgatgcaggcagtgggttccgtcatgaccaacaagtacagcgaggggtaccctggcgcaagatactacgggggaaatgagtttattgatatggcagagtccttgtgtcagaaacgtgctttggaggctttccgtttggacccggcgaaatggggagtgaatgtgcaacctctatccggttcgcccgccaacttccatgtatacactgcactcttgaagccacatgaaaggatcatggctttggatcttcctcacggtggacatctttctcatggttaccagactgacactaagaagatatctgcaacttcaatattttttgagacaatgccttacagattggatgaaagcactggattgattgattacgatcagttggagaaaagcgctgttctttttaggccaaagttgatcattgctggtgcaagtgcatatgctcggctatatgattatgaccgtatgcggaagatatgcaacaagcagaaggcaatacttctagcagacatggcacatattagtgggcttgttgcagctggtgttgttccatctccttttgattatgcagatgtagtgactaccactactcacaaatcactccgtgggccacgtggagccatgatcttttacaggaagggagtcaaagaaataaataaacaaggaaaagaggttatgtatgattttgaggacaaaatcaatgctgctgtctttcctggtctgcaaggtgggcctcataaccataccattactggcttggctgttgcgctcaaacaggcaactactccagaatacagagcttaccaagagcaagttatcagtaattgtgctaaatttgcgcagagcctgatttcaaaaggatatgaactcgtctctggtgggactgacaaccatttagttctggtgaatctcaagaataaggggatagatggttcaagggtggagaaggttttagaaagtgtgcatattgcagcaaacaagaacacagttcctggtgatgtttcagctatggtgccaggaggcatcaggatgggaaccccagcccttacgtcgagaggatttgttgaagaagatttcgctaaagttgctgacttcttcgatgcagcagtgaatctggccttgaagattaaggctgcaacgacaggtggaacaaagctgaaggactttgttgccactttgcaatctgatagcatccaagttgagattgcaaagcttcgccatgatgtagaggaatttgcaaaacaattcccaacaattggatttgagaaagagaccatgaaatacaagaactaa

SEQ ID NO: 4479 - protein, 513 aa, Zea mays
MAMATALRKLSANALRRQPLSRITPLYYMASLPATEERSGITWTKQLNAPLEEVDPEIADIIEHEKARQWKGLELIPSENFTSVSVMQAVGSVMTNKYSEGYPGARYYGGNEFIDMAESLCQKRALEAFRLDPAKWGVNVQPLSGSPANFHVYTALLKPHERIMALDLPHGGHLSHGYQTDTKKISATSIFFETMPYRLDESTGLIDYDQLEKSAVLFRPKLIIAGASAYARLYDYDRMRKICNKQKAILLADMAHISGLVAAGVVPSPFDYADVVTTTTHKSLRGPRGAMIFYRKGVKEINKQGKEVMYDFEDKINAAVFPGLQGGPHNHTITGLAVALKQATTPEYRAYQEQVISNCAKFAQSLISKGYELVSGGTDNHLVLVNLKNKGIDGSRVEKVLESVHIAANKNTVPGDVSAMVPGGIRMGTPALTSRGFVEEDFAKVADFFDAAVNLALKIKAATTGGTKLKDFVATLQSDSIQVEIAKLRHDVEEFAKQFPTIGFEKETMKYKN

SEQ ID NO: 4480 - DNA, 1254 bp, Providencia alcalifaciens DSM 30120
  CDS (1)..(1254): transl_table=11
atgttaaagcgtgaaatgaatattgcagattacgacccacaactgtgggaagcaatggaaaaagaagtacaacgtcaagaagaacacattgaattaattgcttctgaaaactacaccagcccacgagttatgcaagctcaaggctctcagctgaccaataaatatgcggaaggttacccaactaaacgttattacggtggttgtgaatttgttgacgttgttgagcaattagctatcgaccgtgcgaaagagttatttggtgctgattacgcaaacgtacagccacactcaggttcacaagctaacgcggctgtctatatggcacttctgcaaccaggcgacactgtattaggtatgaaccttgcgcacggtggtcacttaactcatggttctccagtcaacttctccggtaagctgtataacatcgttccttatggtatcgatgaaagcggtaaaattgattacgacgatatcgctgcacaagcgaaaaaacaccaaccaaaaatgatcatcggcggtttctccgcgtattctggtgtggttgattgggcaaaaatgcgtgaaatcgctgatagcatcggtgcttatctgttcgttgatatggctcacgttgcgggtctggtggctgcgggggtgtatcctaacccagttccacatgctcatgtcgtcacgacgacaacacacaaaactttagcaggtccacgcggtggtttgatcctggctaaaggtggtgatgaagatctgtataaacgtctgaactctgcggtattcccaggttcacaaggtggtcctctgatgcacgttatcgcgggtaaagcggtagcactgaaagaagcgatggagcctgcgtttaaaacttaccaacagcaagtcgctaaaaatgcgaaagccatggtggaagttttccaacagcgcggctttaaagtcgtttctggcggtactgaaaaccacctgttcttagttgacttagttgacaaagacatcacaggtaaagacgcggatgctgcattgggtcgcgcaaatatcactgtgaacaaaaacagcgtacctaacgatccgaagagcccatttgtaacttctggtgttcgtattggttctcctgcaattacacgtcgtggcttcaatgaagcagatgctcgcgagctagctggctggatgtgtgatattctggacaacctcaatgacgaagcgaccattgaagccgttaaacagaaagtattagctatctgtaaaaaatacccagtttacgcataa

SEQ ID NO: 4481 - protein, 417 aa, Providencia alcalifaciens DSM 30120
MLKREMNIADYDPQLWEAMEKEVQRQEEHIELIASENYTSPRVMQAQGSQLTNKYAEGYPTKRYYGGCEFVDVVEQLAIDRAKELFGADYANVQPHSGSQANAAVYMALLQPGDTVLGMNLAHGGHLTHGSPVNFSGKLYNIVPYGIDESGKIDYDDIAAQAKKHQPKMIIGGFSAYSGVVDWAKMREIADSIGAYLFVDMAHVAGLVAAGVYPNPVPHAHVVTTTTHKTLAGPRGGLILAKGGDEDLYKRLNSAVFPGSQGGPLMHVIAGKAVALKEAMEPAFKTYQQQVAKNAKAMVEVFQQRGFKVVSGGTENHLFLVDLVDKDITGKDADAALGRANITVNKNSVPNDPKSPFVTSGVRIGSPAITRRGFNEADARELAGWMCDILDNLNDEATIEAVKQKVLAICKKYPVYA

SEQ ID NO: 4482 - DNA, 1257 bp, Alicyclobacillus acidocaldarius LAA1
  CDS (1)..(1257): transl_table=11
ttgaccacccttctgcagcaggttgacccggatgtcgcgtctgcgatgcaggccgagcttcggcggcagcagcggaacatcgaactcatcgcttcggaaaactttgtcagcgaggccgtcctcgaggcccttggatccgtcctgacgaacaaatacgccgaaggctacccaggccggcgctattacggaggctgcgagtacgtcgacgtggtcgagcgcatcgccatcgatcgcgtcaaagagctgttcggcgccgagtacgcgaacgtccagccccacagcggttcgcaggcgaatatgacggtgtacttcagcgtcctcaagccgggcgacacggtgctcggcatgaacctggcgcacggcggccacttgacgcatgggagcccggtgaacttctccgggcagctgtacaagttcgtttcgtacggcgtggacccggagacccatctcatcgattacgacgaggtgctgaaggtcgcgaaggaacaccggccgaagatgatcgtggccggcgcgagcgcgtacccgcgcgtcatcgatttcaaacgcatgcgggagatcgcggacgaggtcggcgcgtatctgatggtggacatggcccacatcgcggggctcatcgcggcggggctccacccgtcccccgtgccgtacgcgcacttcgtgacgtccacgacgcacaagacgcttcggggtccgcgcggcggattcatcctctgccagaaggacgtcgccaagctgatcgacaagacgaatttccccggcgtgcagggcggtcccctcatgcacgtgatcgcggcgaaggccgtggcgttcggggaagctttgaagcccgaattcaaggcgtaccaggagcagattgtgaagaacgcgaaggcgctcgccgaagcgctcaaagcgtacgggttccgcctcgtgtccggcggcaccgacaaccacttgatgctcatcgacgtccgcagcgcggggctgaccggtaaagaagccgagcggaggttggacgagatcggcatcacggtcaacaagaacgccatcccgttcgatccggagagcccaatggtgacgagcggcatccgcgtcggcacgcctgccgccacgtcgcgcggcatggacgagggcgcgatgcaggaaattgccgagattttcaagctcgtgctccttggcgatttcagcgacgaggtgaagcgcgaagctcgggctcgcgtcgacagcttgacggatcgattcccgctctacccaactttgtcctacgtcgaatga

SEQ ID NO: 4483 - protein, 418 aa, Alicyclobacillus acidocaldarius LAA1
MTTLLQQVDPDVASAMQAELRRQQRNIELIASENFVSEAVLEALGSVLTNKYAEGYPGRRYYGGCEYVDVVERIAIDRVKELFGAEYANVQPHSGSQANMTVYFSVLKPGDTVLGMNLAHGGHLTHGSPVNFSGQLYKFVSYGVDPETHLIDYDEVLKVAKEHRPKMIVAGASAYPRVIDFKRMREIADEVGAYLMVDMAHIAGLIAAGLHPSPVPYAHFVTSTTHKTLRGPRGGFILCQKDVAKLIDKTNFPGVQGGPLMHVIAAKAVAFGEALKPEFKAYQEQIVKNAKALAEALKAYGFRLVSGGTDNHLMLIDVRSAGLTGKEAERRLDEIGITVNKNAIPFDPESPMVTSGIRVGTPAATSRGMDEGAMQEIAEIFKLVLLGDFSDEVKREARARVDSLTDRFPLYPTLSYVE

SEQ ID NO: 4484 - DNA, 1284 bp, Oryza sativa subsp. japonica
  CDS (1)..(1284)
atgcaggcggtgggatccgtcatgaccaacaagtacagcgaggggtaccccggcgcgagatactacggtggaaacgaatacattgatatggccgagtcattgtgccagaaacgtgctttggaggccttccgcttggacccagcgaaatggggagtgaatgtgcaacctctatcagggtcacctgccaacttccatgtttacactgccctattgaaaccacatgagagaatcatggctttggatcttcctcatggtggacatctttctcacggctaccagactgatactaagaagatttcagcagtttcgatattctttgagacaatgccctacagattggatgaaagcactggcttgattgattatgatcagatggagaaaagtgccgttctttttaggccaaagttgatcgttgcgggtgcaagtgcatatgcgcgtctttatgactatgaccgcatgcggaaggtttgtgacaagcagaaggcaatacttctagcagatatggcacatatcagtgggcttgtcgcagctggtgttgttccatctccttttgattatgcagatgtagtgactaccactactcacaagtcactccgtggaccacgtggagccatgatcttttacaggaagggggtgaaaggagtaaacaagcaaggcaaagaggttatgtatgactttgaggacaagatcaatgctgctgtcttcccaggtctgcaaggtggaccacataatcataccattactggcttagctgttgcgcttaagcaggcaactactccggagtacagagcttatcaagagcaagttatgagtaactgtgcaaaatttgcacagagcttgacagcaaaaggctacgaacttgtctctggtgggactgacaaccatttagtgttggtaaatctcaagagcaagggcatagatggttcaagagtggagaaggttttagaaaacgtgcacattgcagcaaacaagaacacagttcctggtgatgtttcagctatggtaccaggaggcatcaggatgggaaccccagcactgacctcaagaggatttgttgaggaggactttgctaaggttgctgatttcttcgatgcagcagtgaacttggctttgaaggttaaggctgcagcaggtggaacaaaactgaaggactttgttgccactttgcaatctgatagcaacattcaatccgagattgcaaaacttcgccatgatgtggaggaatatgcaaaacagttccccacaattgggtttgagaaagaaaccatgaagtacaagaactaa

SEQ ID NO: 4485 - protein, 427 aa, Oryza sativa subsp. japonica
MQAVGSVMTNKYSEGYPGARYYGGNEYIDMAESLCQKRALEAFRLDPAKWGVNVQPLSGSPANFHVYTALLKPHERIMALDLPHGGHLSHGYQTDTKKISAVSIFFETMPYRLDESTGLIDYDQMEKSAVLFRPKLIVAGASAYARLYDYDRMRKVCDKQKAILLADMAHISGLVAAGVVPSPFDYADVVTTTTHKSLRGPRGAMIFYRKGVKGVNKQGKEVMYDFEDKINAAVFPGLQGGPHNHTITGLAVALKQATTPEYRAYQEQVMSNCAKFAQSLTAKGYELVSGGTDNHLVLVNLKSKGIDGSRVEKVLENVHIAANKNTVPGDVSAMVPGGIRMGTPALTSRGFVEEDFAKVADFFDAAVNLALKVKAAAGGTKLKDFVATLQSDSNIQSEIAKLRHDVEEYAKQFPTIGFEKETMKYKN

SEQ ID NO: 4486 - DNA, 1341 bp, Enterocytozoon bieneusi (strain H348)
  CDS (1)..(1341)
atgatatataaaactcttaatattatagatcctgaggttaataaaattattgaattagaagaacaacgacaaaaaaatagtttagaattaatagctagcgaaaatttcacctcgattagcgtattacaaacagagtcttctatcttaaataatatttataatgaatattctctcgataataattatttaaatattaaacatatacttgaattagaaacattgtgcaaatatcgcgcattacaattatttaatttaaattctgaaatatgggatgttaatatttatccattaagtggatctaatgcaaatttagctgtttatctagcattaataggtaaaaatggccgattaatgggattagatttaccatctggaggccatctgactcatggatataaaactgttaagaaaaaagtttctgcatcaagtattttttttgaaagtaaattgtataaaagtgataatattaatggaattgattataataatcttgaaaaagaggctaaacaatttcaaccacaaattattatatgtggtgcatctgcgtattctttagattttaattataaaaaacttagagaaattgctggcaataattatctaatggctgatatatcacatatttctggatttatagctcatggattaatgaaaaatgcttttgaatatgctgatattattacaatgacaacacattttttattacgaggaccacgaggtggaatgattttttataaaaaaagaaaaataattaataatataagcattaatgtaaaatgtttaattgataacgctatattcccccaattgaatgactggcctcaaatacaaaaacttgctggcttagctgtatcattaaaacaagctttatctccagaatacaaacaatattgtaaacaagtcctaaataatgctaaaataatggcagaaacattaaaaaatcatgggtgtacaattatttataataaaacagaatgtaatttattcttaataacatataaaggtgtaaatggagctgaaattcaacgaatttgtgaattagccaatattagtgtaaataaaaattgtattactggagatacaagtcctatggaaccatctgctattaaaattggattatcagctatgactacaagaggatttctagaaaaagatgctattgaagcaggaaatttagtgtttcaagcaattcagatagcagttaaaataaaacaacaaacaaaaactaaaaatgaatttaatcatacagcactaaattatgaagaaatcactcaacttaaaactaaagttattacttttttaaaaccattccctttcccagtatttacttttaaaatataa

SEQ ID NO: 4487 - protein, 446 aa, Enterocytozoon bieneusi (strain H348)
MIYKTLNIIDPEVNKIIELEEQRQKNSLELIASENFTSISVLQTESSILNNIYNEYSLDNNYLNIKHILELETLCKYRALQLFNLNSEIWDVNIYPLSGSNANLAVYLALIGKNGRLMGLDLPSGGHLTHGYKTVKKKVSASSIFFESKLYKSDNINGIDYNNLEKEAKQFQPQIIICGASAYSLDFNYKKLREIAGNNYLMADISHISGFIAHGLMKNAFEYADIITMTTHFLLRGPRGGMIFYKKRKIINNISINVKCLIDNAIFPQLNDWPQIQKLAGLAVSLKQALSPEYKQYCKQVLNNAKIMAETLKNHGCTIIYNKTECNLFLITYKGVNGAEIQRICELANISVNKNCITGDTSPMEPSAIKIGLSAMTTRGFLEKDAIEAGNLVFQAIQIAVKIKQQTKTKNEFNHTALNYEEITQLKTKVITFLKPFPFPVFTFKI

SEQ ID NO: 4488 - DNA, 1368 bp, Enterocytozoon bieneusi (strain H348)
  CDS (1)..(1368)
atgatttatcaaagtcttgaggttattgaccctgaagttgatcgtatcattagggcagaagaagaacgacagcgtacaagtttagaactcattgcaagtgaaaattttgcaccaatttcagttcttcaagcgtcagcctctgtaatggctaataaatatagtgaaggtcaagttggggctcgctattacggaggaacagaaaatattgatgagttagaaactctttgtaagtctcgtgctcttgctcttttttctctagacccaaatgtttgggatgttaatgttcagcctcttagtggttcaaatgctaatttagctgtatatcttgctcttataggaaaagatggtcgtttaatgggtttagatcttccttcgggcggtcatttaactcatggatataaaacatctcgtaaaaagatttctgcttcaagcattttctttgaaagtatgctttataaatgtaatttaaatggtgaaattgattacgatgctttagaagcacaagctatagaatttaaaccgggtattattgtttgcggaggttcagcttatcctcttgatttagactatcaacgtcttagacaaatagctggagatgcatatcttatgaccgatatggcacatatttcaggttttattgcaaccggtattatgaataatgcttttaaatattcagatgttgtcacaactacaacacataaacttttacgaggtcctcgctctgctatgattttttatcgaaaaaaaaaagacataggcacaacatctattgatgttaaatctcttattgattcagcagtgtttcctggacttaatggaggccctcataatcaaaaaattgcagcattagccgttgctttaaaattagcagctactccagaatattcattatattgtgctcaagttcttgcgaatgctaaagctatggcagcacgattagctgagcatgggtttaatattatttcaggtcgcactgaatgccatcttgttctattttcctgtaaagatattgatggcgcttccattgagagagtttgtgaacttgcacatatctctcttaataaaaattcaattatttcggatcagagtcctttaaggccttcaggtgttagaattggtactcccgcaatgacaactcgtggatttcgtgaaaaggactgtatttatgcagctgatctcatagcaaaagctgtggatattgcccgaaaaattaaacaagtatcttcaacaaatgaagagtttaatcgattagctcttcaagaccaaaatataaaagatcttaaagcagtggttatttcttttgtttcacagtttcccattccaaaatttaattttagaatttcagaacaaactacaccatataaataa

SEQ ID NO: 4489 - protein, 455 aa, Enterocytozoon bieneusi (strain H348)
MIYQSLEVIDPEVDRIIRAEEERQRTSLELIASENFAPISVLQASASVMANKYSEGQVGARYYGGTENIDELETLCKSRALALFSLDPNVWDVNVQPLSGSNANLAVYLALIGKDGRLMGLDLPSGGHLTHGYKTSRKKISASSIFFESMLYKCNLNGEIDYDALEAQAIEFKPGIIVCGGSAYPLDLDYQRLRQIAGDAYLMTDMAHISGFIATGIMNNAFKYSDVVTTTTHKLLRGPRSAMIFYRKKKDIGTTSIDVKSLIDSAVFPGLNGGPHNQKIAALAVALKLAATPEYSLYCAQVLANAKAMAARLAEHGFNIISGRTECHLVLFSCKDIDGASIERVCELAHISLNKNSIISDQSPLRPSGVRIGTPAMTTRGFREKDCIYAADLIAKAVDIARKIKQVSSTNEEFNRLALQDQNIKDLKAVVISFVSQFPIPKFNFRISEQTTPYK

SEQ ID NO: 4490 - DNA, 1239 bp, Geobacillus sp. Y412MC61
  CDS (1)..(1239): transl_table=11
atgaattacttgccacaacaagatccgcaagtgttcgccgccattgaacaagagcggaaacggcagcatgcaaaaattgagttgattgcgtcggaaaattttgtaagccgcgcggtcatggaagcgcaagggtcggtgctgacgaacaaatatgcggaaggctatccgggacgccgctactacggcggttgtgaatatgtcgacatcgtcgaagatttggcgcgcgagcgagcgaagcagttgtttggagcggagcatgtgaacgtccagccgcactccggggcgcaggcgaacatggccgtttatttcaccgttcttgagcacggcgacacggtgcttggcatgaacttgtcgcacggcggccatttgacgcacggcagcccggtcaatttcagcggcattcagtacaattttgtcgaatacggcgtcgatccaaaaacgcatgtcattgactatgacgacgtgcgcgaaaaagcgcgccttcatcggccgaagttgatcgtcgccggcgcgagcgcctatccgcgcatcatcgacttcgccaagttccgtgagattgccgatgaagtcggcgcctatttaatggttgacatggcccatattgccggtcttgttgcggcaggtgttcatccgaatccagtgccgtacgcccatttcgttacgacgacgacgcacaaaacgctgcgcggtccgcgcggcgggatgattttatgccaggagcagttcgccaaacagatcgacaaagccattttccctggcattcaaggcggcccgcttatgcatgtcattgccgccaaagccgtcgcgctcggcgaagcgttgcaagacgactttaaagtctacgcgaagcgcgtcgtggagaatgccaaacggctcgcagccgccttgcaaaacgaaggattcactctcatttccggcggcacggacaaccatttgctgcttgtcgatttgcgcccgcagcagctgaccgggaaaacggcggagaaagtgctcgatgaggtcgggattacggtcaacaaaaacacgattccgtatgatccggaaagcccgtttgtcacaagcggcatccgcatcggcacggccgccgtcacgacgcgcggcttcggattggaagagatggacgaaatcgccgccatcatcggccttgtgctgaaaaacgtcggcagcgaacaagcgcttgaggaagcgcgccaacgcgtcgccgctttgacggaaaagtttccgctctatcaagactaa

SEQ ID NO: 4491 - protein, 412 aa, Geobacillus sp. Y412MC61
MNYLPQQDPQVFAAIEQERKRQHAKIELIASENFVSRAVMEAQGSVLTNKYAEGYPGRRYYGGCEYVDIVEDLARERAKQLFGAEHVNVQPHSGAQANMAVYFTVLEHGDTVLGMNLSHGGHLTHGSPVNFSGIQYNFVEYGVDPKTHVIDYDDVREKARLHRPKLIVAGASAYPRIIDFAKFREIADEVGAYLMVDMAHIAGLVAAGVHPNPVPYAHFVTTTTHKTLRGPRGGMILCQEQFAKQIDKAIFPGIQGGPLMHVIAAKAVALGEALQDDFKVYAKRVVENAKRLAAALQNEGFTLISGGTDNHLLLVDLRPQQLTGKTAEKVLDEVGITVNKNTIPYDPESPFVTSGIRIGTAAVTTRGFGLEEMDEIAAIIGLVLKNVGSEQALEEARQRVAALTEKFPLYQD

SEQ ID NO: 4492 - DNA, 1716 bp, Oryza sativa subsp. indica
  CDS (1)..(1716)
atggaccatcggcccgacctgtccctcgccctccacccgccgccgccgcccgagggctcgtccgccgccgccgccgaggaggtgggggaggaggaggccgaaggcggcgaggggcggttctccctcatgggccagccgctcttcctcaagcggccgcggccgcggcccccgcgcccgccccgcgcgcgcggggtgggggacgacgtcgacgtcgacgtcgacgacgactcatccccgtgctgctcctcctcctgcctctcgcccgcggcgaagcggcgggcggcggcgggaggactcgaggcgcgccgcgcggccgtgcgcgcgtggggatgccagccgctcccggaggcggacccggacgtgcacgagctgatggagcgggagcggcgccggcaggcgggcggggtcgagctcatcgcctccgagaactacgcctgccgcgcggtgctcgacgcgctcggcagccacctcaccaacaagtactccgagggcctccccggcgcgcgctactactgcggcaaccagcacatcgacgccatcgagcgcctctgctgcgaccgcgcgctcgccgccttcggcctcgacccgtcgcgctggggcgtcaacgtgcagccctactcctgcacctccgccaacttcgccgtctacacggggctcctcctccccaacgacaggatcatgggcctcgactcgccgtccggcggccacgtcagccacgggtactacacgcccagcggcaagaaggtctccggcgcctccatcttcttcgagaacctctcctacagggtgaacccgcacaccgggtacatcgattacgataaggtagaggagaaggccgtggatttccaccccaagattctcatctgcggcgcgagctcgtatccaagggattgggactatgcacggatgcggcttgttgctgataagtgcggcgcagtactcatgtgtgacatggcacaaatcagtggtcttgtggcagcgaaggaatgtcgaaatccctttgactactgcgatattgttacttcaaccacacacaagagcttgaggggtcctagaggtggtataatatttttcaggaaagggaaaaatctaaggaaacgggtcggatctttaactcaagtggttgaaaatgatcagtatgattttgaggaccgtataaattttgctgttttcccttcaatgcaaggtggaccccacaataaccatattgctgctctggctatagctctaaaacaagtagccatgccagaattcaaagcatacattcaacaagtcaagaaaaatgcccaagctttggcgatggccttgctcaggaggaaatgcagactggttactggtggcacagataatcatttggtgctctgggacctaagaacatttggcttgacagggaagaactttgagaaggtctgtgaggcatgtcatatctctcttaataaaacaccaatatatggagataatggttcgatttctcctggaggtgtgcggattggaactcctgccatgacaactagaggttgcttggagagtgactttgagataatggcagaattccttttgagggcagcacatatagcaagtattgttttgaaggagcatggaaggcttcagaaggattttctgaaaggtctggagaacaataatgacattattgaactccagaatcaggtggagacatttgccttacaatttgccatgccgggatttgatgtataa

SEQ ID NO: 4493 - protein, 571 aa, Oryza sativa subsp. indica
MDHRPDLSLALHPPPPPEGSSAAAAEEVGEEEAEGGEGRFSLMGQPLFLKRPRPRPPRPPRARGVGDDVDVDVDDDSSPCCSSSCLSPAAKRRAAAGGLEARRAAVRAWGCQPLPEADPDVHELMERERRRQAGGVELIASENYACRAVLDALGSHLTNKYSEGLPGARYYCGNQHIDAIERLCCDRALAAFGLDPSRWGVNVQPYSCTSANFAVYTGLLLPNDRIMGLDSPSGGHVSHGYYTPSGKKVSGASIFFENLSYRVNPHTGYIDYDKVEEKAVDFHPKILICGASSYPRDWDYARMRLVADKCGAVLMCDMAQISGLVAAKECRNPFDYCDIVTSTTHKSLRGPRGGIIFFRKGKNLRKRVGSLTQVVENDQYDFEDRINFAVFPSMQGGPHNNHIAALAIALKQVAMPEFKAYIQQVKKNAQALAMALLRRKCRLVTGGTDNHLVLWDLRTFGLTGKNFEKVCEACHISLNKTPIYGDNGSISPGGVRIGTPAMTTRGCLESDFEIMAEFLLRAAHIASIVLKEHGRLQKDFLKGLENNNDIIELQNQVETFALQFAMPGFDV

SEQ ID NO: 4494 - DNA, 1413 bp, Picea sitchensis
  CDS (1)..(1413)
atggatcccgtgaacgaatggggcaacacgccactgaaggttgtggacgaggagatcttcgatctgattgagaaggagaagagaaggcaatgcaggggaatcgaactcatagcctctgagaacttcacatccctggcagtcattgaagctctcggaacccccctcacaaacaaatactcagagggcatgcctggcaacagatactacggtgggaacgaattcatagatctcattgagaatctgtgtagatcaagggccctcgaggccttccatctggattccgagaaatggggtgtgaatgtgcagccttactctgggagccctgctaacttcgcggcctacacagcccttctgaacccacatgaccgcattatgggactggacctaccttctggtggccatctcactcacgggtattacacctctggtggtaagaagatttctgctacatctatttacttcgagagtttgccttacaaggtcagtcaggagactgggttcattgactatgacaagctggaggagaaagccttggatttcaggcctaaacttattatatgcggaggcagtgcttatcccagggactgggattatgccaggttccgctccattgctgacaaatgtggtgccatgctcttatgtgacatggctcacatcagtggtcttgttgctgctcaggaagctggaaatccatttgactattgtgatttggttactacaaccactcacaagagtttgagaggtccaagagcagggatgatcttctataggaaaggccccaaacctcctaaaaagggacagccagagggtgccctctatgattacgaggatagagtaaacttttctgtgttcccatctcttcagggaggaccacacaaccaccaaattgcagcattggctgtggctcttaagcaggttatgactcctggttttaaggcctatgccaagcaggtcaaggcaaatgcggttgctgttggtaactacttgatgaacaaaggatacaagcttgttacaagtgggacagaaaatcacttagttctgtgggatctccgtccaattggactgactggaaataaggtggagaaagtgtgtgatctgtgtaacataacaatcaacaagaatgcagtttacggtgacagcagtgctctgtcccctggtggtgttcgtattggtacccctgcaatgacctccagaggtctgaaggaagccgattttgagcagattggagagttcctccaccagtctattaacatcactttgtctattcagaaggaatatgggaagcttctcaaggacttcaacaaagggttggcaggcaacaaggacatggaaaatctgaaagctgaagtcgagaaattctctgctaaatttgacatgcctggctttgatgtagctacaatgaagtaccaataa

SEQ ID NO: 4495 - protein, 470 aa, Picea sitchensis
MDPVNEWGNTPLKVVDEEIFDLIEKEKRRQCRGIELIASENFTSLAVIEALGTPLTNKYSEGMPGNRYYGGNEFIDLIENLCRSRALEAFHLDSEKWGVNVQPYSGSPANFAAYTALLNPHDRIMGLDLPSGGHLTHGYYTSGGKKISATSIYFESLPYKVSQETGFIDYDKLEEKALDFRPKLIICGGSAYPRDWDYARFRSIADKCGAMLLCDMAHISGLVAAQEAGNPFDYCDLVTTTTHKSLRGPRAGMIFYRKGPKPPKKGQPEGALYDYEDRVNFSVFPSLQGGPHNHQIAALAVALKQVMTPGFKAYAKQVKANAVAVGNYLMNKGYKLVTSGTENHLVLWDLRPIGLTGNKVEKVCDLCNITINKNAVYGDSSALSPGGVRIGTPAMTSRGLKEADFEQIGEFLHQSINITLSIQKEYGKLLKDFNKGLAGNKDMENLKAEVEKFSAKFDMPGFDVATMKYQ

SEQ ID NO: 4496 - DNA, 1287 bp, Picea sitchensis
  CDS (1)..(1287)
atgcaggctgtaggatcagtcatgaccaataaatatagtgaaggctatcctggtgcaagatactatggaggaaatgaattcattgacatggcagagtcattatgccagaaaagagcattggaagcatttcgtttggatccagataaatggggagttaatgtacaacccttgtcaggctctccggctaattttcaagtttacactgctttgttgaagccccatgatcggatcatggcacttgatcttccgcatggtggtcatttgtctcatggttaccagactgatactaaaaagatctcagcagtttcaatattctttgaaacaatgccttacagattggatgaatctacaggctatattgattatgaccagctggagaaaagtgcagtcctcttcaggcctaaactcattgttgctggtgctagtgcttatgcgcgccattatgactatgctcggatgcgcaaggtttgtgacaagcaaaaagctgtgttgttagcggacatggcacatataagtggacttgttgcaggtggtgtagttccatctccttttgagtttgcagatgtagtgaccaccactacacacaagtcactccgcggtcctcgtggtgcaatgatcttttatagaaagggcgtcaaagagataaacaagcaggggcaagaggttaagtatgactacgaggaaaagattaatgcagctgtgttccctggtcttcaaggtggtcctcacaatcatactataacaggcttagctgttgctcttaaacaggcaactacctcagagtataaagcatatcaagagcaggttctcagtaactgtgctcattttgctaagtgtctaagtgaaagaggatatgaacttgtttcgggtggaacagacaaccatttggtcttggtgaacttgaagaataagggaattgatggttccagggttgaaagggtactggagttggttcacattgcagctaataaaaatacagttcctggagatatttctgcaatggttcctggtggaattcgcatggggacaccagctttgacatccagaggtttcatcgaggatgattttgcaaaagtagcagaattttttgatattgctgctcaactagccattagaatcaaatctgaaacaaagggtggttcaaagctgaaggacttcaaagccacaatggaaagcagcccacacttccaagctgaaattgcaagccttcgacacaatgtagaggagtatgcaaaacagtttccgacaattgggtttgaaaaaacatctttgaaatacaaagattga

SEQ ID NO: 4497 - protein, 428 aa, Picea sitchensis
MQAVGSVMTNKYSEGYPGARYYGGNEFIDMAESLCQKRALEAFRLDPDKWGVNVQPLSGSPANFQVYTALLKPHDRIMALDLPHGGHLSHGYQTDTKKISAVSIFFETMPYRLDESTGYIDYDQLEKSAVLFRPKLIVAGASAYARHYDYARMRKVCDKQKAVLLADMAHISGLVAGGVVPSPFEFADVVTTTTHKSLRGPRGAMIFYRKGVKEINKQGQEVKYDYEEKINAAVFPGLQGGPHNHTITGLAVALKQATTSEYKAYQEQVLSNCAHFAKCLSERGYELVSGGTDNHLVLVNLKNKGIDGSRVERVLELVHIAANKNTVPGDISAMVPGGIRMGTPALTSRGFIEDDFAKVAEFFDIAAQLAIRIKSETKGGSKLKDFKATMESSPHFQAEIASLRHNVEEYAKQFPTIGFEKTSLKYKD

SEQ ID NO: 4498 - DNA, 1608 bp, Talaromyces stipitatus (strain ATCC 10500 / CBS 375.48 / QM 6759 / NRRL 1006)
  CDS (1)..(1608)
atgtctttcaaccgttgcagccgccaggtatcgaagctgttggtgacgaacggaagctcattcagagctacgaccccgacgctatgtcgttctcacagagctgcgagcatccacccctcgcaagcggtctcgcagaaacgcaatgtatctgatgctaatcaagatagccaacaaaagttgctctccacacacctcgaagaagccgatccgacgatatttgccattttacagagagaaaaacgaagacagaaacatttcatcaacttgattccatctgaaaacttcacctcccaagccgttctcgatgcactcggcagtgtgatgcaaaacaaatattccgaaggataccccggagctagatattacggcggcaacgagtttatcgacgaggccgaatctctatgtcagaaacgtgctttggagacttttaggttagatcctgaagaatggggtgtaaatgtgcaagctctctcgggatcacccgcaaacttgtacgcctactcagctctactcaacactcatgaccgtctcatgggcctcgacctgcctcacggtggacatttgtctcatggctaccagatacccaacaagaaaatctcgtttatctccaaatattttgaaacccttccttatcgtcttgacgagtccaccggtctgatcaactacgaccaattggaagaattggccaatatataccgccccaaactgatcgttgcaggaacatctgcttacagcaggctgatcgactatgctcgaatgcgcaaaattaccgagtcgattggtgcatacctactaagtgatatggctcatatatcgggccttgttgctgccgatgtcatcccctctcccttccaatactcggatgtagtcacgacgacaacacacaagtcactgcgcggtcctcgtggtgctatgatcttctaccgaaagggcgttcgccgcactgataagaagggtaacaaggaattgtacgatcttgagggtcctatcaacgcctcagtctttcctggacatcagggtggtccccacaaccacaccatcactgctcttgcggttgctctaggacaagctcagaccaaggaattccgcgactatcaactcactgtacttgaaaacgccaaagctctgtctgaccgactgggcaactcagtcaatgaaggtggattgggatacaatattgtctctggtggcacagacaaccatttggtacttgtcgatctcaagaaccgtggcgtagacggagcacgcgtcgagcgagtcctcgaactctgcggtgttgccgcaaacaagaataccgtcccaggcgacaaatccgcactcaaacccggtggtctccgtctcggaactcccgccatgacatcccgcggtttccagcctgaagatttccgacgagttggcgatatcgttgaccgtgcagtcacaatcacacaaaaactcgataaagcggccaaggaaagtgcggaagttaagggacgcaagaatcctggaagcctgaaggcgtttacagaatatattggcagtggagaagatatttccgagattgtacagttgcgacaagaagttgaggactgggtgggcacattcagcgttccatggaagaatgaatag

SEQ ID NO: 4499 - protein, 535 aa, Talaromyces stipitatus (strain ATCC 10500 / CBS 375.48 / QM 6759 / NRRL 1006)
MSFNRCSRQVSKLLVTNGSSFRATTPTLCRSHRAASIHPSQAVSQKRNVSDANQDSQQKLLSTHLEEADPTIFAILQREKRRQKHFINLIPSENFTSQAVLDALGSVMQNKYSEGYPGARYYGGNEFIDEAESLCQKRALETFRLDPEEWGVNVQALSGSPANLYAYSALLNTHDRLMGLDLPHGGHLSHGYQIPNKKISFISKYFETLPYRLDESTGLINYDQLEELANIYRPKLIVAGTSAYSRLIDYARMRKITESIGAYLLSDMAHISGLVAADVIPSPFQYSDVVTTTTHKSLRGPRGAMIFYRKGVRRTDKKGNKELYDLEGPINASVFPGHQGGPHNHTITALAVALGQAQTKEFRDYQLTVLENAKALSDRLGNSVNEGGLGYNIVSGGTDNHLVLVDLKNRGVDGARVERVLELCGVAANKNTVPGDKSALKPGGLRLGTPAMTSRGFQPEDFRRVGDIVDRAVTITQKLDKAAKESAEVKGRKNPGSLKAFTEYIGSGEDISEIVQLRQEVEDWVGTFSVPWKNE

SEQ ID NO: 4500 - DNA, 1416 bp, Talaromyces stipitatus (strain ATCC 10500 / CBS 375.48 / QM 6759 / NRRL 1006)
  CDS (1)..(1416)
atggctacctacgctttgtccgactcccacaaggagttgatggaagttcaccttgcggactttgatcctgagattgctgagatcattaaaaaagaaatccaacgtcaacgcgagtccattcttctcatcgcctctgagaacgttacttctcgcgctgtctacgatgccctcggcacgccaatgtccaataaatactccgagggttaccccggtgctcgctactacggcggtaaccaacacattgatgccgttgagttgacttgccaggcccgtgctttgaaggccttcaacctcgaccctgagaagtggggtgtcaatgttcagactctttctggaagtcctgccaacttgcaggtttaccaggctttgatgaagcctcatgaccgtttgatgggtcttgatcttcctcatggtggtcacttgagtcacggataccagactcctcagcgaaagatttccgctgtttccacctacttcgagaccttcccatatcgtgtcaacgccgagaccggtatcattgactatgataccttggaggccaacgctcaattgtaccgccccaagattctcgttgctggtacttccgcctactgccgtctcatcgactatgctcgtatgcgtaagattgccgactctgttggtgcctacttggttgtcgatatggctcatatctccggtttgattgccgccggtgtcattccctcacccttcgaatacgccgatgtcgtcaccacgaccacccacaagtctctccgtgggccccgtggtgctatgatcttcttccgtaagggcgtccgcagcaccgaccccaagaccggcaaggagatcctctacgatctcgaaggtcccatcaacttctccgttttccccggtcaccagggtggtcctcacaaccataccatcactgctttggcagttgccctcaagcaagccgctacccctgaattccgtcaataccaggaacaagtcatcaagaacgccaaggctcttgaggttgccttcaaggaatacggatacaagctcgtcgccgatggtaccgacagccacatggtcctggttgacctgcgccccaacggtgttgacggtgctcgtgtcgaagctgtcttggaacaaatcaacattgcctgcaacaagaacgccgtccccggtgacaagtccgctctcagccccggtggtatccgtgtcggtgcccctgccatgaccacccgtggtctcggcgaggaggacttcaagcgcgttgttggatacattgacaaggccatcaaaatcagcaaggagacccaggctggtttgcccaaggaggctaacaagctcaaagatttcaaggccaaggtcgccagcgattctattcctgagatccttagtctgcgcaaggagattgctgcctgggccagcactttccctcttccagtttaa

SEQ ID NO: 4501 - protein, 471 aa, Talaromyces stipitatus (strain ATCC 10500 / CBS 375.48 / QM 6759 / NRRL 1006)
MATYALSDSHKELMEVHLADFDPEIAEIIKKEIQRQRESILLIASENVTSRAVYDALGTPMSNKYSEGYPGARYYGGNQHIDAVELTCQARALKAFNLDPEKWGVNVQTLSGSPANLQVYQALMKPHDRLMGLDLPHGGHLSHGYQTPQRKISAVSTYFETFPYRVNAETGIIDYDTLEANAQLYRPKILVAGTSAYCRLIDYARMRKIADSVGAYLVVDMAHISGLIAAGVIPSPFEYADVVTTTTHKSLRGPRGAMIFFRKGVRSTDPKTGKEILYDLEGPINFSVFPGHQGGPHNHTITALAVALKQAATPEFRQYQEQVIKNAKALEVAFKEYGYKLVADGTDSHMVLVDLRPNGVDGARVEAVLEQINIACNKNAVPGDKSALSPGGIRVGAPAMTTRGLGEEDFKRVVGYIDKAIKISKETQAGLPKEANKLKDFKAKVASDSIPEILSLRKEIAAWASTFPLPV

SEQ ID NO: 4502 - DNA, 1260 bp, Burkholderia multivorans CGD1
  CDS (1)..(1260): transl_table=11
atgttttccaaagaacagaccatcgcccgattcgatccggatctgcatgaggccatgcgtctcgaacgacagcgccaggaggcgcacatcgagctgatcgcttcggaaaactatacgagcccgcgcgtgctcgaggcacagggatcggtgctgaccaacaaatacgccgaaggctacccgggcaagcgctactacggcggctgcgaacacgtcgacgtggtcgaacagctggcgatcaaccgtgcaaaggcgctgttcaatgccgatttcgcgaacgtgcagccgcatagcggctcgcaggccaacgcggctgtctatctggcgttgctcacgcccggcgacacgatcctcggcatgagcctcgcgcacggcggccacctgacgcacggtgcgaaggtgtcgttttcggggaaggtgttcaatgcggtccagtacggcgtcgatgcgacaaccgggctgatcgattacgacgagatcgaacgtctcgcgctcgagcatcggccgaagatgatcgtcgccggcttttccgcgtattcgcgggtgctcgatttcgtgcgcttccgcgcgatcgccgacaaggtcggcgcctatctgttcgtcgacatggcgcacgtcgccgggcttgtcgcggcaggcctgtatccgaacccggtgccgttcgccgacgtcgtgacgaccacgacgcacaagacgctgcgcgggcctcgtggcggcctgattctggcccgcgccaacgaggcgatcgagaagaagctgaacgcgatggtgtttccgggtacgcaaggcgggccgctgatgcatgtcattgccgcgaaggcggtcgccttcaaggaagcactggggccggagttcgtcacgtatcagaagcagacgctcgcgaacgcgcgggcgatggtcgaggtgttcaacgcgcgcggctacgacgtcgtgtcgggcggcaccgacgatcacctgttcctcgtcagcctcgtcaagaagggcatcaccggcaaggatgccgatgcggcgctggggcgcgcgcacatcacggtgaacaagaacacggtgccgaacgatcctcaatcgccgttcgtgacgagcggcatccgcatcggcacgccggcgatcacgacgcgcggctttctcgaggcggacgccgcacataccgcgcaactgatttgcgacgtgctcgaccggctcggtgacgcgcaggtcgaggctgcggtgcgcacccaggtggcgcagctgtgcgagcgcttcccggtttatctcggactgtga

SEQ ID NO: 4503 - protein, 419 aa, Burkholderia multivorans CGD1
MFSKEQTIARFDPDLHEAMRLERQRQEAHIELIASENYTSPRVLEAQGSVLTNKYAEGYPGKRYYGGCEHVDVVEQLAINRAKALFNADFANVQPHSGSQANAAVYLALLTPGDTILGMSLAHGGHLTHGAKVSFSGKVFNAVQYGVDATTGLIDYDEIERLALEHRPKMIVAGFSAYSRVLDFVRFRAIADKVGAYLFVDMAHVAGLVAAGLYPNPVPFADVVTTTTHKTLRGPRGGLILARANEAIEKKLNAMVFPGTQGGPLMHVIAAKAVAFKEALGPEFVTYQKQTLANARAMVEVFNARGYDVVSGGTDDHLFLVSLVKKGITGKDADAALGRAHITVNKNTVPNDPQSPFVTSGIRIGTPAITTRGFLEADAAHTAQLICDVLDRLGDAQVEAAVRTQVAQLCERFPVYLGL

SEQ ID NO: 4504 - DNA, 1764 bp, Oryza sativa subsp. japonica; identical to SEQ ID NO: 3812
  CDS (49)..(1764)

SEQ ID NO: 4505 - protein, 571 aa, Oryza sativa subsp. japonica
MDHRPDLSLALHPPPPPEGSSAAAAEEVGEEEAEGGEGRFSLMGQPLFLKRPRPRPPRPPRARGVGDDVDVDVDDDSSPCCSSSCLSPAAKRRAAAGGLEARRAAVRAWGCQPLTEADPDVHELMERERRRQAGGVELIASENYACRAVLDALGSHLTNKYSEGLPGARYYCGNQHIDAIERLCCDRALAAFGLDPSRWGVNVQPYSCTSANFAVYTGLLLPNDRIMGLDSPSGGHVSHGYYTPSGKKVSGASIFFENLSYRVNPHTGYIDYDKVEEKAVDFHPKILICGASSYPRDWDYARMRLVADKCGAVLMCDMAQISGLVAAKECRNPFDYCDIVTSTTHKSLRGPRGGIIFFRKGKNLRKRVGSLTQVVENDQYDFEDRINFAVFPSMQGGPHNNHIAALAIALKQVAMPEFKAYIQQVKKNAQALAMALLRRKCRLVTGGTDNHLMLWDLRTFGLTGKNFEKVCEACHISLNKTPIYGDNGSISPGGVRIGTPAMTTRGCLESDFEIMAEFLLRAAHIASIVLKEHGRLQKDFLKGLENNNDIIELRNQVETFALQFAMPGFDV

SEQ ID NO: 4506 - DNA, 1512 bp, Oryza sativa subsp. japonica
  CDS (1)..(1512)
atggcgatggcttcgcaccacctcgcccagccgcccacgcgcgcggctctctcctcgcgccccacctacccgctctccagccatcaccactcctcccgtctccagctcccgctcgtcagcggggcgcggcgcagcaggctgtcccccgcggtggcgacgtccccggtcgccgccccagcgatggacgccgtggccgactgggggctgaccactctggaggaggctgacccggaggtgtacgacctcgtcgagcgcgagaagcggcggcagcgcgcgggcgtcgagctcatcgcgtcggagaacttcacctcgctcgccgtcatggaggcgctgggctcgccgctcaccaacaagtactccgagggcatgccggggtcccgctactacggaggcaacgaggtcatcgacgaggtggaggagctctgccgcgcccgcgcgctcgccgccttccacctcgaccccgaggcctggggcgtcaacgtgcagccctactccggctcgccggcgaacttcgccgcctacaccgggctgctccaaccccacgagcggatcatggggctcgatttgccgtccggcggccacctcacgcacggctactacaccgccggcggcaaaaagatctccgccacgtccatctacttcgagagcctgccgtacaaggtgagctccgagacaggatacgtcgattatgataagctggaggagaaggccatggattttcggcccaagctcatcatctgcggcgggagcgcgtacccgcgggattgggattacgccaggttcagggccatcgcggataagtgcggcgccatgttgctctgcgacatggctcacatcagtggcctagttgccgcgcaggaggctgcaaatccttttcaatattctgatgtggttaccaccaccacccacaagagtctccgagggccaagatctggtatgatcttctacaggaagggcctgaagcctcccaagaaaggccagcctgagggcgctctgtatgactacgaggacaggatcaacttcgcagtgtttccgtcgctccaagggggccctcacaaccaccaaattgctgcgctagcggttggtttgaagcagactatgtcacctggattcaagtcttatattaagcaggtcaaggccaatgctgttgcccttggtaaccatttgatgagtaagggctacaaattggttactgacggaacagagaaccatcttgttctctgggatctgcgccctcttggcttgactggtaacaaagttgagaaggtctgtgatttgtgcagcattacactgaacaaaaatgctgtctttggggatagcagtgcaatgtcacctggtggtgtccgcattggtacacctgccatgacatcaaggggtttggtagaggaggactttgtacagatcgccgcagttccttcaccaggcagtgaccatctgcttggatgttcagaaggagcgtggcaagcttctcaagtacttcaacgagggcctggagaacaacaaggacattga

SEQ ID NO: 4507 - protein, 503 aa, Oryza sativa subsp. japonica
MAMASHHLAQPPTRAALSSRPTYPLSSHHHSSRLQLPLVSGARRSRLSPAVATSPVAAPAMDAVADWGLTTLEEADPEVYDLVEREKRRQRAGVELIASENFTSLAVMEALGSPLTNKYSEGMPGSRYYGGNEVIDEVEELCRARALAAFHLDPEAWGVNVQPYSGSPANFAAYTGLLQPHERIMGLDLPSGGHLTHGYYTAGGKKISATSIYFESLPYKVSSETGYVDYDKLEEKAMDFRPKLIICGGSAYPRDWDYARFRAIADKCGAMLLCDMAHISGLVAAQEAANPFQYSDVVTTTTHKSLRGPRSGMIFYRKGLKPPKKGQPEGALYDYEDRINFAVFPSLQGGPHNHQIAALAVGLKQTMSPGFKSYIKQVKANAVALGNHLMSKGYKLVTDGTENHLVLWDLRPLGLTGNKVEKVCDLCSITLNKNAVFGDSSAMSPGGVRIGTPAMTSRGLVEEDFVQIAAVPSPGSDHLLGCSEGAWQASQVLQRGPGEQQGH

SEQ ID NO: 4508 - DNA, 1704 bp, Ricinus communis
  CDS (1)..(1704)
atggatttatcgcaatcccaatcgggtctatcgctagggtttcactcacacacatcatcgaatccaattcctttacagttacttgaccaaaaagaagagaatttcaacctgattttgaaaaatgataataatgatgataatttaactgaggaagaggagaattttagcattttaggtcacccaatgtgtctgaagaggcaaagaggaggcgatggtcaatcatcctcatcatcatcgtcatcacctaacccttccaagcgaactgccatcgaaccacctgggcttgagtctcggcgagccatggttcgagcttgggggaaccagccacttccttttgcagacccagagattcatgaaattatggagaaagagaagcagaggcaaattaaaggtattgaacttatagcttctgagaattttgtttgtcgggctgttatggaagctcttggtagccacttgactaataaatactctgagggattgcctgggtcgagatattacacgggtaatcagcttattgaccagatagaatcaatatgttgtaatcgggcactagtggcgtttgggcttgattctgataaatggggtgtcaatgtgcagccgtattcatgtacttctgcaaattttgctgtttacactgggcttttgttacctggggataggattatgggtttggattctccttctggcgggcatttgagccatgggtattgtgttcctggaggtaaaaaggtgtctgcttcgtccattttctttgagagtctgccttataaagtgaatcctcaaactggctatattgattatgataagatggaggagaaggctatggattttagacccaagatacttatttgtggtggaagctcatacccgagggaatgggattatgccaggtttaggcaagttgctgataagattggagcggtgctaatgtgtgacatggctcatattagtggccttgtagcagctaaggagtgtgcaagtccatttgattattgtgatgttgttacttccacgactcataaaagtcttcgaggtccaagaggaggaataatttttttccggaagggccaaaaatcaaggaagcaaggaaatcttcttaatcatggtgatagtagtagccattatgattttgaagaaaggataaactttgcagttcatccatcattacaaggtggtcctcacaataatcacattgctgctcttgctatagccttaaaacaagtagctagcccagagtatagaacatatatgcaacaggtgaagaaaaacgcccgcacgttagcatctgccttattgagaagaaaatgcagattggtgactgggggtactgacaaccatttgttgctatgggatctaactactcttggcttggcagggaagaactatgagaaagtatgtgaaatgtgtcacatcactttaaataaaagtgctatatttggtgagaatggtgctatctgtcttggtggggtgagaattggcactcctgctatgacatcaagaggctgtttagagggtgattttgaaacgattgctgactttcttcttagggcagctcaaatcgcgtgtgcgatacaaagggaacatgggaaaattcagaaagagtttctcaagggtctacaaaacaatagagacattgttgagctccgaaatcgcgttgagacatttgcttcccagtttgcaatgccaggatttgacttttga

SEQ ID NO: 4509 - protein, 567 aa, Ricinus communis
MDLSQSQSGLSLGFHSHTSSNPIPLQLLDQKEENFNLILKNDNNDDNLTEEEENFSILGHPMCLKRQRGGDGQSSSSSSSSPNPSKRTAIEPPGLESRRAMVRAWGNQPLPFADPEIHEIMEKEKQRQIKGIELIASENFVCRAVMEALGSHLTNKYSEGLPGSRYYTGNQLIDQIESICCNRALVAFGLDSDKWGVNVQPYSCTSANFAVYTGLLLPGDRIMGLDSPSGGHLSHGYCVPGGKKVSASSIFFESLPYKVNPQTGYIDYDKMEEKAMDFRPKILICGGSSYPREWDYARFRQVADKIGAVLMCDMAHISGLVAAKECASPFDYCDVVTSTTHKSLRGPRGGIIFFRKGQKSRKQGNLLNHGDSSSHYDFEERINFAVHPSLQGGPHNNHIAALAIALKQVASPEYRTYMQQVKKNARTLASALLRRKCRLVTGGTDNHLLLWDLTTLGLAGKNYEKVCEMCHITLNKSAIFGENGAICLGGVRIGTPAMTSRGCLEGDFETIADFLLRAAQIACAIQREHGKIQKEFLKGLQNNRDIVELRNRVETFASQFAMPGFDF

SEQ ID NO: 4510 - DNA, 1584 bp, Ricinus communis
  CDS (1)..(1584)
atgcaaggttgcactggagctcaagtgatgggttctttacagcagccagtttggattaaaggatcatctctccctctgaaacagtcgaactttgttgggtttccacatcagataaagctcaattcttttaggccttgtagatatcttaatattcaggggagcttggtcgctggtagaccaccctcttctgtttctgtccctgaaattgaaggtgacagaagcagctttaaagattatggcctcagtgaagcagatcctgaggtgcgtgaaattattgagaaggaaaagaataggcagttcaaaagcctcgagctgattgcatctgagaattttacatctcgagcagtgatggaagcagttggctcatgccttacaaataagtattctgaaggactgcctggtaaaagatattacggtggaaatgaacacattgatgagcttgaaactctttgtcaagaaagggctttggctgcatttggcttagatagaaagaaatggggtgttaatgtccaaccgttgtctggttctcctgctaattttgaggtttatacagcacttcttaatccacatgacaggataatgggtttggacttgcctcatggggggcatttgtctcatggattcatgactcctaaaagacgagtatctggcacatcaatttatttcgagtctatgccatatcgacttgatgaatcaacaggcctggttgattatgatatgcttgagaaaacagctaatctcttccgaccaaagctcattattgctggtgccagtgcctatcctcgagattttgattatccccgcatgagaaagattgcagatgctgttggcgcttttctcatgatggacatggctcatataagtgggcttgttgctgcctctgtggttggtgatccctttgaatactgcgatattgtgacaacaacaacacacaagtctctacgggggcctagaggtggcatgatcttctttcgaaaggatactattcttggggttgatctggaatctgccatcaacaatgctgtttttccaggcctgcagggtggtcctcataaccacacaatcggtggactagcagtctgcttgaagcatgcacaatcccctgaatttaaagcttatcagaaacaggtcatctccaactgtagggctctggcataccgattggttgaattagggtataaattggtttctgggggcagtgataatcaccttgttcttgtagacctgaggccacttggcattgatggagctcgtgtggagaaaattcttgacatggcatctattactctcaacaaaaattcagttcctggggataagagtgctctagttccaggtgggattcgcattggatcacctgccatgactactaggggttttacagagagagaatttatagcaactgctgattttatacacgagggtgtgcagataactactgaagctaaaaaatcagtatcaggatcaaagcttcaagatttcatgaagttggttgcttctcctgatttctcattggcgagtgaagtgtccgatcttcaaacaagagttgaagccctggcaacccaattctcgatacccggagtataa

SEQ ID NO: 4511 - protein, 527 aa, Ricinus communis
MQGCTGAQVMGSLQQPVWIKGSSLPLKQSNFVGFPHQIKLNSFRPCRYLNIQGSLVAGRPPSSVSVPEIEGDRSSFKDYGLSEADPEVREIIEKEKNRQFKSLELIASENFTSRAVMEAVGSCLTNKYSEGLPGKRYYGGNEHIDELETLCQERALAAFGLDRKKWGVNVQPLSGSPANFEVYTALLNPHDRIMGLDLPHGGHLSHGFMTPKRRVSGTSIYFESMPYRLDESTGLVDYDMLEKTANLFRPKLIIAGASAYPRDFDYPRMRKIADAVGAFLMMDMAHISGLVAASVVGDPFEYCDIVTTTTHKSLRGPRGGMIFFRKDTILGVDLESAINNAVFPGLQGGPHNHTIGGLAVCLKHAQSPEFKAYQKQVISNCRALAYRLVELGYKLVSGGSDNHLVLVDLRPLGIDGARVEKILDMASITLNKNSVPGDKSALVPGGIRIGSPAMTTRGFTEREFIATADFIHEGVQITTEAKKSVSGSKLQDFMKLVASPDFSLASEVSDLQTRVEALATQFSIPGV

SEQ ID NO: 4512 - DNA, 1416 bp, Ricinus communis
  CDS (1)..(1416)
atggatccagtaaatgtttggggcaatactcccctgcaaacagtagacccagaaatccatgacttgatcgagaaggagaagcgccgacaatgcaccgggatcgagctcatcgcctccgagaacttcacctccttcgccgtcatcgaggcattaggcagtgccctcaccaacaaatactccgaaggaatgcccggaaaccgctattatggaggcaatgagtacatcgacgagatcgaaaacctgtgtcgctcccgcgccctccaagccttccatttagagccaaccaaatggggtgtcaatgtgcagccttactccggttctccggccaatttcgccgcctacactgcggtgcttcagccccatgataggattatgggtttggatctgccatcaggtgggcatttgacacatgggtattatacttctggtggtaaaaagatatctgctacctcaatttatttcgagagtttgccttataaggttaactcacaaactgggtatattgattatgagaaattggaggagaaagctttggacttcagaccaagattgattatttgtggtggcagtgcttacccaagggactgggattatgccaagttcaggtctgttgctgacaagtgcggtgccctcttgctttgtgatatggctcatattagtggtctagttgctgctcaggaagctgccaacccctttgaattctgtgatattgttactaccaccacccacaaaagcttgaggggccctagggctggtatgatcttctacagaaagggacctaaaccacccaagaagggccagccagaggatgcagtttacgactttgaagacaagatcaacttctcagttttcccctcgcttcagggtggacctcacaatcaccagattggtgctctggctgttgcgttgaaacaatccatgacccctgggttcaaggcttatgccaaacaagtcaaggctaatgcagttgccctcggaaaatacttgatgggccagggatacaagctggtcactggaggaactgagaaccaccttgtcctttgggatcttcgtcctcttggattgactggcaacaaggttgaaaagctatgtgatctttgcaacatcactgtaaacaagaatgctgtgtttggtgatagcagtgctttggctcctggaggagtgagaattggtacccctgccatgacctccagaggtttggttgagaaggattttgagaagattggagaattcctccaccgtgctgtgtccctcactttgagcatccagaaggaacatgggaagctcttgaaggacttcaacaagggtctggtgaataacaaggacattgaggctctcaaggctgacgtagagaagttttcgagctccttcgacatgcctggtttcctcatgtctgaaatgaaatacaaggattag

SEQ ID NO: 4513 - protein, 471 aa, Ricinus communis
MDPVNVWGNTPLQTVDPEIHDLIEKEKRRQCTGIELIASENFTSFAVIEALGSALTNKYSEGMPGNRYYGGNEYIDEIENLCRSRALQAFHLEPTKWGVNVQPYSGSPANFAAYTAVLQPHDRIMGLDLPSGGHLTHGYYTSGGKKISATSIYFESLPYKVNSQTGYIDYEKLEEKALDFRPRLIICGGSAYPRDWDYAKFRSVADKCGALLLCDMAHISGLVAAQEAANPFEFCDIVTTTTHKSLRGPRAGMIFYRKGPKPPKKGQPEDAVYDFEDKINFSVFPSLQGGPHNHQIGALAVALKQSMTPGFKAYAKQVKANAVALGKYLMGQGYKLVTGGTENHLVLWDLRPLGLTGNKVEKLCDLCNITVNKNAVFGDSSALAPGGVRIGTPAMTSRGLVEKDFEKIGEFLHRAVSLTLSIQKEHGKLLKDFNKGLVNNKDIEALKADVEKFSSSFDMPGFLMSEMKYKD

SEQ ID NO: 4514 - DNA, 1548 bp, Ricinus communis
  CDS (1)..(1548)
atggcaatggcaatggcgcttcggagactatcttcttccattgacaagcctattcgtcctctcttcaatgctacatctcactgttacatgtcttctttgcctaatgaagctgtgtacgagaaggagaaatctggtgccacttggccaaagcaacttaatgcaccactggaggttgtggaccctgagattgctgacattattgagctcgagaaagcccgtcaatggaagggtcttgaacttataccctcagagaacttcacttctgtatcagtgatgcaagctgttggatctgtcatgaccaacaagtacagtgaaggatatcctggtgcaagatactatggaggaaatgagtatattgacatggcagaatccttatgtcagaagcgtgcattagaagcatttagattggatcctgctaaatggggagtgaatgtgcagtctctatctggatctccagcaaatttccaagtctacactgcattgttaaaacctcatgacagaatcatggcccttgatcttcctcacggtgggcacctttcacatggttatcagacggacaccaaaaagatatctgcagtgtcaatattttttgagacaatgccatacagattgaatgagagcactggctatattgactatgatcagctggagaaaagtgccgtcctcttcagaccaaagttgatagttgctggtgctagcgcttatgctcgtctatatgattatgaacggattcgcaaggtttgcgacaaacaaaaagctatactgttggcagatatggcacatattagcgggttagttgcagctggtgtcatcccatcaccttttgactatgcagatgtagtgaccaccaccactcacaagtcccttcgtggacctcgtggagctatgattttctacaggaagggggtaaaagaggttaacaaacaaggcaaagaggtcttgtatgactatgaagacaaaatcaatcaatctgtttttcctggacttcaagggggccctcacaaccacacaattactggtttagcagttgctctgaaacaggccacaacctcagaatacaaagcttaccaagagcaagttctcagtaattgtgcaaaatttgcacagacgttagctcagaagggatatgaactcgtgtctggcggaactgagaaccatttagttttggtgaatttgaagaacaagggtattgatggctccagagttgaaaaggtgctggaagctgttcacattgctgcaaacaaaaacaccgttcctggagatgtatctgccatggttcctggtggcataaggatgggaacccctgctcttacatctaggggatttattgaggaggactttgctaaggtagcagaattctttgatgctgccgtgaagttggcagtcaagatcaagggtgaaaccaaagggacaaagttgaaggacttcttggctacaattcctcagttccaatctgatatcacaaaacttcgccatgctgttgaagaatatgccaaacaattcccaactattggatttgagaaaggaaccatgaagtacaagaactga

SEQ ID NO: 4515 - protein, 515 aa, Ricinus communis
MAMAMALRRLSSSIDKPIRPLFNATSHCYMSSLPNEAVYEKEKSGATWPKQLNAPLEVVDPEIADIIELEKARQWKGLELIPSENFTSVSVMQAVGSVMTNKYSEGYPGARYYGGNEYIDMAESLCQKRALEAFRLDPAKWGVNVQSLSGSPANFQVYTALLKPHDRIMALDLPHGGHLSHGYQTDTKKISAVSIFFETMPYRLNESTGYIDYDQLEKSAVLFRPKLIVAGASAYARLYDYERIRKVCDKQKAILLADMAHISGLVAAGVIPSPFDYADVVTTTTHKSLRGPRGAMIFYRKGVKEVNKQGKEVLYDYEDKINQSVFPGLQGGPHNHTITGLAVALKQATTSEYKAYQEQVLSNCAKFAQTLAQKGYELVSGGTENHLVLVNLKNKGIDGSRVEKVLEAVHIAANKNTVPGDVSAMVPGGIRMGTPALTSRGFIEEDFAKVAEFFDAAVKLAVKIKGETKGTKLKDFLATIPQFQSDITKLRHAVEEYAKQFPTIGFEKGTMKYKN

SEQ ID NO: 4516 - DNA, 1542 bp, Ricinus communis
  CDS (1)..(1542)
atggcgatggctcttcgaagactctcttcctctatccgaacacctttcttcaatgccaatggttccctctactacatgtcttctttgcctaaccctgcagttgctgataaagagaaagctcctgctgcttggataaagcaattgaattctccattggaggaaaccgatcctgaaattgctgacatcatcgaacttgagaaagctaggcaatggaagggacttgaacttattccatcagagaatttcacctcagtgtcagttatgcaagcagttggttctgttatgactaataaatacagcgaagggtaccctggagcccgatattatggaggcaatgagtacattgacatggctgagaccttgtgccagaagcgtgcgttagaagcttttcagttggatcctgaaaagtggggagtcaacgtgcagtcgctatctggatctcctgctaactttcaagtttacactgcattattaaaacctcatgagagaatcatggcgctggatcttcctcatggtggacatctttcacatggttatcagactgacacaaagaagatatctgcggtttccatattttttgagacaatgccttacagattggatgagaatactggttatattgattatgaacagttggagaaaagtgccacactctttagaccaaaacttatagttgctggtgcaagtgcttatgcacggctatatgactatgcacgcatccgcaaggtttgtgacaagcaaaaagctgttatgttggctgatatggcacacattagtggcttagttgccgcaggtgttatcccatctccttttgaatatgcagatattgtgacaaccacaacgcataaatcacttcgtggtccacgtggagctatgatcttctttaggaagggagtaaaagagatcaacaaaaaaggggaagaagtgaagtatgactttgaagacaaaattaatcaggcagtttttcctggacttcaaggtggtcctcataatcacacgatatctggtttagcagttgctctaaagcaggtcatgactcctgagtacaaggcctaccaagagcaagttctcaaaaactgttcaaagttttctcagagcttactagagaagggctatgaactggtgtctggtggaacagaaaaccatttagtcttggtcaatttgagaaacaaggggattgatggatcaagagttgaaaaggttttggaatcagttcatattgcagctaacaaaaatactgtccctggtgatgtatctgccatggttcctggtgggattcgcatgggaaccccagctctcacatcaagggggtttgttgaggaagattttgcgaaagtagcagagttctttgatgcagctgtaaaattggccttgaagatcaaggcagatactaaaggaacgaagttgaaggattttgtagcaactatgaagtcttcagatattcaatctgggatcgcacagctgcgacatgatgttgaggaatatgcaaagcaattcccaacagttggttttgagaaagaaacaatgaaatacaaggactaa

SEQ ID NO: 4517 - protein, 513 aa, Ricinus communis
MAMALRRLSSSIRTPFFNANGSLYYMSSLPNPAVADKEKAPAAWIKQLNSPLEETDPEIADIIELEKARQWKGLELIPSENFTSVSVMQAVGSVMTNKYSEGYPGARYYGGNEYIDMAETLCQKRALEAFQLDPEKWGVNVQSLSGSPANFQVYTALLKPHERIMALDLPHGGHLSHGYQTDTKKISAVSIFFETMPYRLDENTGYIDYEQLEKSATLFRPKLIVAGASAYARLYDYARIRKVCDKQKAVMLADMAHISGLVAAGVIPSPFEYADIVTTTTHKSLRGPRGAMIFFRKGVKEINKKGEEVKYDFEDKINQAVFPGLQGGPHNHTISGLAVALKQVMTPEYKAYQEQVLKNCSKFSQSLLEKGYELVSGGTENHLVLVNLRNKGIDGSRVEKVLESVHIAANKNTVPGDVSAMVPGGIRMGTPALTSRGFVEEDFAKVAEFFDAAVKLALKIKADTKGTKLKDFVATMKSSDIQSGIAQLRHDVEEYAKQFPTVGFEKETMKYKD

SEQ ID NO: 4518 - DNA, 1773 bp, Ricinus communis
  CDS (1)..(1773)
atggaatcatcagacttatccctagggtttgcatcgaatacgacatcgtcttcgtcttcccgccgtgctcaaattgctgatgactccatctctctccagcttgattctagcttccgtggccctgaccatccacccgtcccactccaaccactaacagagaacattcataattatcatcaaaacggtattttagataggcaaaacgacaattataaagaagaagattatgaagaagaagaagaagaagaaaacgagaaagaagttagaattttagggtattcaatgtgcttgaaaaggcgaagagatagcgaattaccctcatcgacatcaaattcatcatcaaaaagaacaggattagaccttgaagggcggcgaaatttggttaaatcatgggggaatcaaccaattagtgtgttagattctgagatttttgaaatgatggagaaagagagagacaggcaatataaaggaattgaattgatagcgtcagagaattttgtttgtagagcagtaatggaagcattaggtagtcatttaactaataagtattcagaaggagcacccggtttgcgatactatggtgggaatcagtacattgatgaaatagaaatgctttgttggaaaagagcattggacgcttttaatttggattcagagaattggggtgtaaatgtgcagccatattcgtgtacttctgcgaatttcgctgtctttactgggttgctattacctggagataggattatggggttggataatccttctggagggaatacaagtcatggatattatatgcctagtggaaggaaagtgtctgctgcatcgattttctttgagagtttgccttataaagtgaatccacaaactgggtatattgattttgataagctagaggagagagcacttgattttagacctaaaatacttatttgtggtgggagttcgtatccaagggaatgggattatgccagatttaggcaaattgcagataggtgtggcgctgtactgttgtgtgatatggctcagattagtggtcttgttgctgccaaggaatgtgtaaacccctttgattactgtgacattgttacctcaacaactcataaaagtcttcgaggtcctagaggaggtatcattttttataggagaggaatgaagccaagaaaaatgggaatgctagtaggccaaggagatgatagtaattactatgactttgaggaaaagataaactttgctgtctttccatcactgcaaggtggaccacataataaccatattgctgctctcgccatagctttaaaacaagtggctactcctgagtacaaggcatacatgcaacaggtgaagaaaaatgcacaggctttcgcatgcacgctgttgagaagaaaatgcaggctggtaactggaggcacagacaaccacatgctactttgggatctgaggcctttaggattaacagggaaaatttatgagaaggtctgcgagatgtgccacatcactgtaaataaaattgctgtttttggtgacaatggcaccattagtcctggaggagtaaggataggtactcctgctatgacatcaagaggttgcctagaatctgattttgagacaatagctgattttcttctgaaagctgcacgtattgcgaatattttgcagcgtgagcatgggaaggctcttctaaagggtctgcaaagcaataaagatattttagagctccggaatcgagttgaaacttttgcaactcagtttgcaatgcctggttttgacttgtga

SEQ ID NO: 4519 - protein, 590 aa, Ricinus communis
MESSDLSLGFASNTTSSSSSRRAQIADDSISLQLDSSFRGPDHPPVPLQPLTENIHNYHQNGILDRQNDNYKEEDYEEEEEEENEKEVRILGYSMCLKRRRDSELPSSTSNSSSKRTGLDLEGRRNLVKSWGNQPISVLDSEIFEMMEKERDRQYKGIELIASENFVCRAVMEALGSHLTNKYSEGAPGLRYYGGNQYIDEIEMLCWKRALDAFNLDSENWGVNVQPYSCTSANFAVFTGLLLPGDRIMGLDNPSGGNTSHGYYMPSGRKVSAASIFFESLPYKVNPQTGYIDFDKLEERALDFRPKILICGGSSYPREWDYARFRQIADRCGAVLLCDMAQISGLVAAKECVNPFDYCDIVTSTTHKSLRGPRGGIIFYRRGMKPRKMGMLVGQGDDSNYYDFEEKINFAVFPSLQGGPHNNHIAALAIALKQVATPEYKAYMQQVKKNAQAFACTLLRRKCRLVTGGTDNHMLLWDLRPLGLTGKIYEKVCEMCHITVNKIAVFGDNGTISPGGVRIGTPAMTSRGCLESDFETIADFLLKAARIANILQREHGKALLKGLQSNKDILELRNRVETFATQFAMPGFDL

SEQ ID NO: 4520 - DNA, 1482 bp, Candida dubliniensis (strain CD36 / CBS 7987 / NCPF 3949 / NRRL Y-17841)
  CDS (1)..(1482): transl_table=12
atgctttcatcaacattgcgtcgttctgtgagagctccatccaagaacttgccagtctttgcaagaagatcttatgccatttctccttctgctcaagcattgatttcaaaatctgtccaggaggttgacccagagatggctgatattttgaatcaagaaagaatcagacaaaagaactcaattactttgatcccatcagagaattttacctctaaagcagttatggatttgttgggttcagaaatgcaaaacaaatattctgaaggataccctggagaaagatactatgggggaaatgaaataatcgataaggctgaagcattatgtcaaaaaagagctttagaagccttcgggttggatccatctcaatggggggtcaatgttcaaccgttatctggtgctccagctaatttgtatgcttatagtgccattttggaagtcggtgacagaatcatgggattagatttacctcatggtggtcatttatctcatggatatcaaaccaacactaccaagatttcatatatttccaaatatttccaaaccatgccatacagattgaatgaagaaactggtataattgattacgacactttagaaaaaaatgctcaattgtttagacctaaagtaattgttgctggtgcgtcagcttattctcgtgtcattgactataaaagaatgagacaaattgccgataaggttggagcttacttattatctgatatggctcatatctcaggattggtttctgctggagttactgatgcaccattcccatattctgatattgtcaccaccaccactcataaatcattaagaggaccaagaggagccatgattttctttagaaaaggaattagaaaggtaaccaaaaagggaaaagaaattccatacgaattggaaagaaaaatcaatttctcagttttcccaggacatcaaggtggtccacataatcacaccatttctgctttggcagttgctttaaaacaatgtacagaaccagaatacgttaaataccaacaagaagttgtttccaatgctaaacattttgctgatgcattggtctccaagggattcaaattggtttctgatggtactgacacccatttgatattggttgatttaagatcaagaaacatcgatggtgctcgagttgaagctgttttggaaagagcgaacattgctgccaacaaaaacactgttcctggtgatgtatctgctcttttcccatcaggtttaagagttggtaccccagctatgaccactagaggatttggaccagaagaatttgataaagttgctgaattcattgatcaagctgtcaacattgccattgaattaaaagctcaagaacaaggtaaagtaccaaaggaattgttagcgtcatttaaacaattggctgatgaaagtaataaagttaaacaattagataaagaagttgtcagttgggtcagtaaataccctgtccctggtgaattataa

SEQ ID NO: 4521 - protein, 493 aa, Candida dubliniensis (strain CD36 / CBS 7987 / NCPF 3949 / NRRL Y-17841)
MLSSTLRRSVRAPSKNLPVFARRSYAISPSAQALISKSVQEVDPEMADILNQERIRQKNSITLIPSENFTSKAVMDLLGSEMQNKYSEGYPGERYYGGNEIIDKAEALCQKRALEAFGLDPSQWGVNVQPLSGAPANLYAYSAILEVGDRIMGLDLPHGGHLSHGYQTNTTKISYISKYFQTMPYRLNEETGIIDYDTLEKNAQLFRPKVIVAGASAYSRVIDYKRMRQIADKVGAYLLSDMAHISGLVSAGVTDAPFPYSDIVTTTTHKSLRGPRGAMIFFRKGIRKVTKKGKEIPYELERKINFSVFPGHQGGPHNHTISALAVALKQCTEPEYVKYQQEVVSNAKHFADALVSKGFKLVSDGTDTHLILVDLRSRNIDGARVEAVLERANIAANKNTVPGDVSALFPSGLRVGTPAMTTRGFGPEEFDKVAEFIDQAVNIAIELKAQEQGKVPKELLASFKQLADESNKVKQLDKEVVSWVSKYPVPGEL

SEQ ID NO: 4522 - DNA, 1236 bp, Dethiobacter alkaliphilus AHT 1
  CDS (1)..(1236): transl_table=11
atgtccacattaagtctttttgatccggagattgctcaatccattgaaaaggagcatcaccggcagcaaagcggaattgaacttattgcttcagagaactatgtcagccaggcggtgctggaagcacaagggtctgtgctgaccaataaatacgcagaagggtatccctccaaacgctactatgggggatgcgaatttgtggatgaggtggagactctggcccgcaagcgcgctgtggagctctttggcgcagagcatgccaacgtgcaggcccactccggagccagcgccaatatggcggtatttctggcggcactgaaagtgggtgacaccgtgctgggcatgaatttgtcccacggcggacatctgacccacggcagcccggttaatatttccggcaagtatttcaacatctattcctacggggtaaaccgcgaaaccggttatcttgattatgacgaagtggaagcgttggccaccaagcacaagccgaaaatgattgtggccggtgccagtgcctacgcccgcatcatcgactttgcagcgtttcgccagattgccgataaggtaggcgcctacctgatggtagacatggctcatattgccggcctggtggcggcggggctccatcccactcccattccccacgcggagtttgttacctccaccacccataaaacactgcgcggcccgaggggtggcctgattctctgccgccaggagtatgccgcagcaatagacaaggccattttccccggactgcagggcggcccgctgatgcatgtcattgccgccaaagcggtgagctttaaggaagcactgcagcctgaatttggtacttatgcccgccaggtggtggccaatgccaaaacctttgcctcccggctgaaaaaacacggttttaacctggtctccgacggtaccgataaccatctgatgcttgtggatttgcgcaataaagggttgaccggcaagcaggccgaggaagttttggatgaggtgggaatcaccgccaacaaaaacacggtgccctttgacacggaaagcccctttgttaccagcgggttgcgtatcggcactcccgccgttacctcccggggtatgcaggaagatgaaatggagaaaatagcggacatgattgccgatatattgcataatataggagatgaggttgtaaaggcgcgggtcaaagagcaggtaaaagagctctgtgccgcttttgcaatctaccagtga

SEQ ID NO: 4523 - protein, 411 aa, Dethiobacter alkaliphilus AHT 1
MSTLSLFDPEIAQSIEKEHHRQQSGIELIASENYVSQAVLEAQGSVLTNKYAEGYPSKRYYGGCEFVDEVETLARKRAVELFGAEHANVQAHSGASANMAVFLAALKVGDTVLGMNLSHGGHLTHGSPVNISGKYFNIYSYGVNRETGYLDYDEVEALATKHKPKMIVAGASAYARIIDFAAFRQIADKVGAYLMVDMAHIAGLVAAGLHPTPIPHAEFVTSTTHKTLRGPRGGLILCRQEYAAAIDKAIFPGLQGGPLMHVIAAKAVSFKEALQPEFGTYARQVVANAKTFASRLKKHGFNLVSDGTDNHLMLVDLRNKGLTGKQAEEVLDEVGITANKNTVPFDTESPFVTSGLRIGTPAVTSRGMQEDEMEKIADMIADILHNIGDEVVKARVKEQVKELCAAFAIYQ

SEQ ID NO: 4524 - DNA, 1254 bp, Halothiobacillus neapolitanus c2
  CDS (1)..(1254): transl_table=11
atgttctcaaagacgatgtcgattgcagatttcgatcccgtactggctcaagccatggcggacgaagtggtgcgccaggaagatcacgtcgaactgatcgcatccgaaaactatgccagcccgcgtgtcatggaagcccaaggttcggtgctgaccaacaagtatgccgaaggttatccgggcaaacgttactacggcggctgtgagtatgtcgatgtggccgagcaattggcaatcgatcgtgcaaaggagttgttcggcgccgattatgccaacgttcagccgcactccggctcacaggcgaacgccgcggtgttcatggctttgatcaaccccggtgacacgattctcggtatgagccttgcgcatggcggtcatctgacgcacggggctaaggtgaatttttccggcaagatctacaacgccgttcaatatggcatcgatgagcaaggctatatcgattacagcgaagtcgagtctctggcgcgtgagcacaagccaaaattgattgttgccggtttttccgcgtactcccgcgtgattgattggtctcgtttccgtgcgattgccgatgaggtaggtgcttacctgctcgttgatatggcacacgtggctggtctggtcgcggcgggtgtttatcccagccctgtccagatcgccgatgtcacgacctcgaccacgcacaaaaccctgcgcggcccacgcggtggcatcatcctcgccaaagccaaccccgaagtggaaaagaaactcaattccttggttttccccggcacacagggcggcccattgatgcatgtgattgccgccaaggccgtcgcgttcaaggaagcccttgagccttcgttcaaaacgtaccagcaacaggttgttgacaacgcgcgcgcgatggccaaggtgtttgtcgagcgtggcctggatgtggtttccggcggtacggacaatcatttgttcctcgttagcctggtgaaaaagggtctgaccggtaaagcggtcgacgcggccctgggccaagcgcatatcactgtaaacaaaaacgccgtgcccaatgatccgcagtcacctttcgtgacctctggtattcgtgtcggcaccgctgccatcacgacgcgcggatttggtattcaggaagccaccgaattggcaggctggatgtgcgatgtgatcgacgccgttgacgatgcggccgtcatcgccgaagtgcgtggcaaggtcactgcattgtgccgtcgcttcccggtctacggtaagtaa

SEQ ID NO: 4525 - protein, 417 aa, Halothiobacillus neapolitanus c2
MFSKTMSIADFDPVLAQAMADEVVRQEDHVELIASENYASPRVMEAQGSVLTNKYAEGYPGKRYYGGCEYVDVAEQLAIDRAKELFGADYANVQPHSGSQANAAVFMALINPGDTILGMSLAHGGHLTHGAKVNFSGKIYNAVQYGIDEQGYIDYSEVESLAREHKPKLIVAGFSAYSRVIDWSRFRAIADEVGAYLLVDMAHVAGLVAAGVYPSPVQIADVTTSTTHKTLRGPRGGIILAKANPEVEKKLNSLVFPGTQGGPLMHVIAAKAVAFKEALEPSFKTYQQQVVDNARAMAKVFVERGLDVVSGGTDNHLFLVSLVKKGLTGKAVDAALGQAHITVNKNAVPNDPQSPFVTSGIRVGTAAITTRGFGIQEATELAGWMCDVIDAVDDAAVIAEVRGKVTALCRRFPVYGK

SEQ ID NO: 4526 - DNA, 1767 bp, Zea mays; identical to SEQ ID NO: 3862
  CDS (427)..(1767)

SEQ ID NO: 4527 - protein, 446 aa, Zea mays
MEQELDRQVRGIELIASENFVCRAVLDALGSHLTNKYSEGAPGARYYGGNQHIDAIERLCHERALTAFGLDPACWGVNVQPYSCTSANLAVYTGLLQPKDRIMGLEPPSGGHVSHGYYTPSGKKVSGASIFFESMSYKVNPQTGYIDYDKLEERAMDFHPKILICGGSSYPREWDFARMRLIADKCGAVLLCDMAHISGLVAAKECRSPFDYCDVVTSTTHKNLRGPRGGIIFFRKGKNLRKRAGSFSQGDENEYDFEDRINFGVFPSMQGGPHNNHIAGLAITLKQVATSEYKAYIQQVKKNAQALASALIRRKCRLVTGGTDNHLVLWDLRTLGLTGKIFEKVCEACHISVNKTPIYGDNGSISPGGVRIGTPAMTTRGCLEEDFEVIADFLIRATQIANNVLKEHGKVQKEFLRGLQNNNDVIELRNQVEAFASQFAMPGFDV

SEQ ID NO: 4528 - DNA, 1263 bp, Thermobaculum terrenum ATCC BAA-798
  CDS (1)..(1263): transl_table=11
atggcaataagcgaaagcaaagtaagatttccctctctggcagaatttgatcccgagatctatgaggctatacagaacgaaaagcaccgcgagatgagcactctggagctcatagcttcagagaacttcgtttccaaagcggtgatggaggctcaaggctctgtacttactaataagtacgccgaagggttgccaggcaaaagatactacggcggctgcaaatatgtggacgttgtggagagcttggctatagagagggctaagcagctcttcggcgccgaccacgttaacgtacagcctcacagcggtgcgcaagcaaataccgctgtatatctggctacccttaagcccggggatacagtgctcggcatggaccttactcatggtggccaccttacgcatgggcacccaattaacatatcaggcatgtacttcacttttttccgttatggagtctcgagagagactggatacatagactatgaccaagtaagggcccttgctaagcagcacaatcccaaaatgattattgctggcgctagcgcttacccaagagagataaggtttgacatcttcagagagatagccgacgaggtcggagcctatctattcgttgatatggcccacatagcagggttggtagcagctggactgcatcagtcacccattccatacgccgatttcgttagcactaccacccacaaaacccttcgtggaccaagaggcgggctagtcttctgcaaggcagaacatgccaaggcccttgataaagctgtattccctggtgtacagggtggaccgctaatgcatgtcattgctgccaaggctgtggccctcaaggaggctctgcagcctgaattcaaggagtatcagagacagatagtgaagaacgcctcaactcttgctcaatccctaacaaagcatgggtttaacctcgtcagtggtggaactgataaccatctgatgctcgtggatctaaggaataagaatatcactggcaaggaggctgaatcccttctagacgaggtgggaatcactgttaataaaaacaccgtgccttacgatacacagtccgccttcgtcactagtggtataagaataggtactcctgcagtgacgactagggggatgaaggaaccagagatggaggagatcgccgatataatctctacggtaatagatgcaaggcagggtgaagcgctcgacgaagcgcgagaaagagtgaagaccctaacagacaggtttcctttctacacagactag

SEQ ID NO: 4529 - protein, 420 aa, Thermobaculum terrenum ATCC BAA-798
MAISESKVRFPSLAEFDPEIYEAIQNEKHREMSTLELIASENFVSKAVMEAQGSVLTNKYAEGLPGKRYYGGCKYVDVVESLAIERAKQLFGADHVNVQPHSGAQANTAVYLATLKPGDTVLGMDLTHGGHLTHGHPINISGMYFTFFRYGVSRETGYIDYDQVRALAKQHNPKMIIAGASAYPREIRFDIFREIADEVGAYLFVDMAHIAGLVAAGLHQSPIPYADFVSTTTHKTLRGPRGGLVFCKAEHAKALDKAVFPGVQGGPLMHVIAAKAVALKEALQPEFKEYQRQIVKNASTLAQSLTKHGFNLVSGGTDNHLMLVDLRNKNITGKEAESLLDEVGITVNKNTVPYDTQSAFVTSGIRIGTPAVTTRGMKEPEMEEIADIISTVIDARQGEALDEARERVKTLTDRFPFYTD

SEQ ID NO: 4530 - DNA, 1269 bp, Micromonas sp. RCC299
  CDS (1)..(1269)
atggaggctctgggctcgtgcctcaccaacaagtactccgagggtctccccggcgcgcgctactacggcggcaacgagaacatcgacaaggtcgagatcctctgccaggaccgcgcgctcgccgcttaccgcctcgacaagtccaagtggggcgtcaacgtgcaaccttactccggttcccccgccaacatggccgtgtacaccgcgctcctcaacccccacgacaggatcatgggcctcgaccttccctcgggcggccacctcacccacgggtattacaccgcgaatggcaagaagatctccgccacctccatcttctttgagtccctcccctacaagctcgacccggccaccggctacatcgacttcgccaagctcgaggagaaggccatggacttcaggcccaagatgatcatctgcggcggctccgcgtacccccgcgactgggagtacgccaagtttcgcgagattgcggacaagtgcggcgccatgctcatgatggacatggcccacatctccggcctcgtcgccgccgaggagcaggcgcagcccttcgagtactgcgacatcgtcaccaccaccacgcacaagtccctccgcggcccgcgcgcgggcatgatcttcttccgccgcggtcccaggccctccaagaagggcgaacccgagggcatgacgtacgactacgagtcccgcatcaacatggctgtcttccccgcgctccagggcgggccccacaaccaccagatcggcgcgctcgcggtggcgctcaagcacgcctcgggccccgagttcaagaggtaccagcagcaggtgaaggcgaacgcccgtgcgctcgcgtcggctctcatgtccaaggggtacaagctcgtgacggatggcaccgataaccacctcgtgctctgggaccttcgcccctgtggcctgaccggatccaagatggagaccatctgcgacatgctccacatcaccctcaacaagaacgcggtgtttggtgacgcctcggcgctcacccccggcggctgccgcatcggcgcgccggccatgacctcccgcggcctcaaggagaacgatttcgagaagattgccgactttctccacaaggcggttgagctcgcgctggaggtgcaggcgagccacggcaagatgctcaaggactggaagctgggcctcgagggcaaccccgcggttgataccctccgcgcggaggtggaggcgttcgccgaatccttcccgatgccgggattcacccgcgagtccgtcgacatctaa

SEQ ID NO: 4531 - protein, 422 aa, Micromonas sp. RCC299
MEALGSCLTNKYSEGLPGARYYGGNENIDKVEILCQDRALAAYRLDKSKWGVNVQPYSGSPANMAVYTALLNPHDRIMGLDLPSGGHLTHGYYTANGKKISATSIFFESLPYKLDPATGYIDFAKLEEKAMDFRPKMIICGGSAYPRDWEYAKFREIADKCGAMLMMDMAHISGLVAAEEQAQPFEYCDIVTTTTHKSLRGPRAGMIFFRRGPRPSKKGEPEGMTYDYESRINMAVFPALQGGPHNHQIGALAVALKHASGPEFKRYQQQVKANARALASALMSKGYKLVTDGTDNHLVLWDLRPCGLTGSKMETICDMLHITLNKNAVFGDASALTPGGCRIGAPAMTSRGLKENDFEKIADFLHKAVELALEVQASHGKMLKDWKLGLEGNPAVDTLRAEVEAFAESFPMPGFTRESVDI

SEQ ID NO: 4532 - DNA, 1476 bp, Micromonas sp. RCC299
  CDS (1)..(1476)
atggcggcggcgtccaacgcggacgcgtacaagtccctcgcctccggggtctcgtggcccgaggcgtgcaacaaatccctcgcggagatggacccggagatggccgacatcatcgaacacgagaaggcgcgccagtggaaaggcctcgagctcatcccgtccgagaacttcaccagccgctccgtcatggaagccgtgggcagcgtcatgacaaacaagtactccgaggggtacccgggcgcgaggtactacggcgggaacgagttcatcgatcaggccgagacgctgtgccagaagagggcgctggaggcgttccgtctggaccccgagaagtggggagtgaacgtccagtccctctccggatcgccctccaacttccaggtgtacaccggcttgctcaacccccacgacaggatcatgggcctcgacctgccccacggcggccacctctcccacgggttccagacggacacgaagaagatctccgcggtgtccatcttcttcgagtccatgccgtacaggctcgacgagtccaccggtttgatcgactacgacgcgtgccagacgctcgccaccgcgtaccgtccgaagctcctcatcgcgggcgcgtctgcgtacagcagactgtacgattacaagcgcatgcgcgaaatcgccgacagcaccggggcgtacctcctggcggacatggcgcacatctccggcctcgtcgccgcggacatgatcccgtcgccgttcgagtattccgacgtggtgaccaccaccacgcacaagtcccttcgcggccctcgcggcgcgatgatcttctaccgcaagggccagaagggcgtcgacaagaagggcgcgccggtcatgtacgaccttgaggacaagatcaacttcagcgtcttccctgggctccagggcggtccccataaccacacgatcgcgggtttggccgtcgcgttgaagcaggcggcgtcgcccgagttcaaggcgtaccagacgcaggtgatgcgcaacatgcacgccatgtccgagaggctcaagagccacggcatcgagctcgtctccggaggtacggacaaccacctcgtgctcgcggacctccgcccgctcggcgtggacggctcgcgcgtcgaacgcgtcctcgagctcgcgcacatcgcgtgcaacaaaaacaccgtaccgggagacaagagcgcgatggtccccggcggcttgcgcttgggcacacccgcgctcacgacgcgcggattcgtcgaggcggatttcgagaaggtggcggactttgtcgtccgcggcatccacatcgcgaaggacctcaagacgaagctcgggccgaagctgaaggatttccgcgacggtttgtctcacgcgcccgagggtaagttcccggagatcgacgcgctcaaggcggaggttgaggcgttcgcggcgacgttccccaccatcgggttcgacaaggctgagggcaagtacactcagtcgctgtga

SEQ ID NO: 4533 - protein, 491 aa, Micromonas sp. RCC299
MAAASNADAYKSLASGVSWPEACNKSLAEMDPEMADIIEHEKARQWKGLELIPSENFTSRSVMEAVGSVMTNKYSEGYPGARYYGGNEFIDQAETLCQKRALEAFRLDPEKWGVNVQSLSGSPSNFQVYTGLLNPHDRIMGLDLPHGGHLSHGFQTDTKKISAVSIFFESMPYRLDESTGLIDYDACQTLATAYRPKLLIAGASAYSRLYDYKRMREIADSTGAYLLADMAHISGLVAADMIPSPFEYSDVVTTTTHKSLRGPRGAMIFYRKGQKGVDKKGAPVMYDLEDKINFSVFPGLQGGPHNHTIAGLAVALKQAASPEFKAYQTQVMRNMHAMSERLKSHGIELVSGGTDNHLVLADLRPLGVDGSRVERVLELAHIACNKNTVPGDKSAMVPGGLRLGTPALTTRGFVEADFEKVADFVVRGIHIAKDLKTKLGPKLKDFRDGLSHAPEGKFPEIDALKAEVEAFAATFPTIGFDKAEGKYTQSL

SEQ ID NO: 4534 - DNA, 1302 bp, Micromonas sp. RCC299
  CDS (1)..(1302)
atggccgccatcatgaagaaggagaagcagcgccagcgcctcggcctcgagctcatcgcgtctgagaacttcacgtcgagggcggtgatggaggtgaacggctcgtgcctcaccaacaagtactccgagggccttcccggcaagcgctactacggcggcaacgagttcatcgacgagaccgagcgcctgtgccagaagcgcgcgctcgaggcgttcaggctcaaggatgacgagtggggcgtcaacgtccaggcgctctccggctcccccgccaactttgccgtgtacaccgcgctgctcaacccgcacgacaggatcatgggcctcgacctgccccacggcggccacctcacgcacgggttctacacccccaagaagaagatctccgccacctccatcttcttcgagtccctgccgtacaggctcgacgaggacaccggcctcatcgactacgacgccctcgaggccaacgccatgctgtaccgccccaagctgatcatcgccggcgcgtccgcgtacccgcgcaactacgactacaagcgcatgagggagatctgcgacaaggtgggcgcctacctcatgtccgacatggcgcacatctccggcctcgtcgccgcgaacatcgtggacgaccctttcccctacagcgacatcgtcaccaccacgacgcacaagtccctccgaggcccccgcggcggcatgatcttctacaagaaggagcacgagcaggccatcaacagcgcggtgttccccggcctccagggcggtccccacaaccacaccatcggcgccctcgccgtcgccctcaagcaggcgaccacccccgagtttgtcgagtaccagaagcaggttgtgaagaactgcgccgcgctcgctggcaggctcaccgagctcggctacaccctcgtctccggcggtaccgataaccacctcatcctctgcgaccttcgtcccaagggcatcgacggcgccagggtcgagcgcatcctcgacctcgcccacatcaccctgaacaagaacagcgtcccccgcgacacctcggcgctcatccccggcggcatccgcatcggcgcccccgccatgaccacccgcggcatgctcgaggaggacttcgtccgcgtcgccgacctcatccacaagggcgtcgagatcgccatcgagtgcaaggctgcggcggagggacccaagctcaaggacttcaacgactacctcgccgccaacgaccgcgccgacatcaaggctctgcgcgaggaagtggagagcttcgcggatgggttccacatgcccgggggtgtctactaa

SEQ ID NO: 4535 - protein, 433 aa, Micromonas sp. RCC299
MAAIMKKEKQRQRLGLELIASENFTSRAVMEVNGSCLTNKYSEGLPGKRYYGGNEFIDETERLCQKRALEAFRLKDDEWGVNVQALSGSPANFAVYTALLNPHDRIMGLDLPHGGHLTHGFYTPKKKISATSIFFESLPYRLDEDTGLIDYDALEANAMLYRPKLIIAGASAYPRNYDYKRMREICDKVGAYLMSDMAHISGLVAANIVDDPFPYSDIVTTTTHKSLRGPRGGMIFYKKEHEQAINSAVFPGLQGGPHNHTIGALAVALKQATTPEFVEYQKQVVKNCAALAGRLTELGYTLVSGGTDNHLILCDLRPKGIDGARVERILDLAHITLNKNSVPRDTSALIPGGIRIGAPAMTTRGMLEEDFVRVADLIHKGVEIAIECKAAAEGPKLKDFNDYLAANDRADIKALREEVESFADGFHMPGGVY

SEQ ID NO: 4536 - DNA, 1554 bp, Micromonas pusilla CCMP1545
  CDS (1)..(1554)
atgctcgcgtccacgctccgccgctcctccgcgatcttccgcgatgccggccgcgtcgcgtccgtccgcttcatggccagctccaacgcggacgagtacaagaagttcgtcggcgacaaggcgcacgtgacgtggccagaggcgtgcaacaagtcgctcgcggagatggaccccgaggtgaacgagatcgtcgaaaaggagaaaagccggcagtggaaaggcttggagctgatcccgtccgagaacttcacgtcgcggtccgtcatggacgcgctcgggagcgtgatgacgaacaagtacagcgaggggtatccgggcgcgaggtactacggcgggaacgagttcatcgatcagtgcgagacgctctgtcaacaacgcgcgctcgcggcgtttcatctcgacccggagaagtggggcgtcaacgtgcagtcgctgtcgggctcgcccgcgaacttccaggtctacaccgggctgctcaaaccgcacgatcgcatcatgggtctggacttgccccacggcgggcacctctcgcacggcttccagacggacacgaagaagatcagcgcggtgagcatctttttcgagtcgatgccgtaccgcctggacgagtccaccgggctcatcgattacgagtcgtgcgacaagctcgcgaccgcgttccgaccgaagctcatcgtcgccggcgcgtccgcgtattcgcgcctgtacgactacccgaagatgcgcgccatcgcggacaaggtgggcgcgtttttgctcgcggacatggcgcacatctccggcttggtcgccgcgcagatgatcccgagcccgttcgatcacgcggacgtcgtgacgacgacgacgcacaagtcgctccgcggcccccgcggcgcgatgatcttttaccgtaaaggtcagaagggcgtcgacaagaagggcaacccgatcatgtacgacctcgaggaaaagatcaacttttccgtcttcccgggtttacagggcggcccgcacaaccacacgatcgccggcctcgccgtcgcgctgaagcaggcgatgtccccggatttcaaaaagtaccagaaccaggtcatgaagaacatggtcgcgatgagcgaccgcctcaagaagcacggcgtcgagctcgtctccgggggcacggataaccatctcgtcctcgcggatcttcgcccgctgggcgtcgacggctcgcgcgtggagcgcgtcctcgagctcgcgcacatcgcgtgcaacaaaaacaccgtccccggagataagagcgcgatggtccccggcggcttgcggctcggcacccccgcgttgacgacgcgcgggttcgtggaggcggatttcgaacgcgtcgcggacatggtctggaaagggatcgagatcacgaagaagctgaaggaggtgcacgggccgaagttgaaggatttccgcgtagcgctcgcggacgcgcctccggggaagtttccggagatcgacgccctgaagtcggaggttgaggcgttcgccgcgcagttcccgacgatcggattcgacaagaaggacgggaagtacacgcagtcgttgtga

SEQ ID NO: 4537 - protein, 517 aa, Micromonas pusilla CCMP1545
MLASTLRRSSAIFRDAGRVASVRFMASSNADEYKKFVGDKAHVTWPEACNKSLAEMDPEVNEIVEKEKSRQWKGLELIPSENFTSRSVMDALGSVMTNKYSEGYPGARYYGGNEFIDQCETLCQQRALAAFHLDPEKWGVNVQSLSGSPANFQVYTGLLKPHDRIMGLDLPHGGHLSHGFQTDTKKISAVSIFFESMPYRLDESTGLIDYESCDKLATAFRPKLIVAGASAYSRLYDYPKMRAIADKVGAFLLADMAHISGLVAAQMIPSPFDHADVVTTTTHKSLRGPRGAMIFYRKGQKGVDKKGNPIMYDLEEKINFSVFPGLQGGPHNHTIAGLAVALKQAMSPDFKKYQNQVMKNMVAMSDRLKKHGVELVSGGTDNHLVLADLRPLGVDGSRVERVLELAHIACNKNTVPGDKSAMVPGGLRLGTPALTTRGFVEADFERVADMVWKGIEITKKLKEVHGPKLKDFRVALADAPPGKFPEIDALKSEVEAFAAQFPTIGFDKKDGKYTQSL

SEQ ID NO: 4538 - DNA, 1410 bp, Micromonas pusilla CCMP1545
  CDS (1)..(1410)
atggagcccgtcttcccggaggcgctgaaaaccctcaaggacgcggacccggaaatctaccagctcgtgcagaaggagaagctccgtcagatccgagggatcgagctcatcgcgtccgaaaacttcacgtccgcgcccgtgatggaagccctcgggtcgtgcctcacgaacaagtacagcgaaggcctccccggggcgcggtactacggcggaaacgagaacatcgaccaggtggagaggctctgccaagaccgcgcgctcgccgcgttccgcctcgacaagtccaagtggggggtcaacgtccaaccgtacagcggctcccccgcgaacatggcagtgtacaccgcgctcctcgtcccgcacgacaggatcatgggtctggacctcccctcgggcggccacctcacgcacgggtactacaccgcgggcgggaagaagatctccgcgacgtccatcttcttcgagtccctcccgtacaaggtgaactactccacagggtacatcgactacgacaagctcgaggagaaggcgatggacttccgcccgaagatgctcatctgcggcgggagcgcgtacccgcgcgattgggactacaagcgcttccgcgatatcgccgacaagtgcggcgcgatgctcatgatggacatggcccacatctcaggtttagtcgccgcggaggagcaagcgagccctttcgaatacgccgacatcgtcacgacgacgacgcacaagtccctccgcggtccgcgcgcggggatgatcttcttccgccgcggtccgcgcccctcgaagcgaggcgagccggaggggcagacgtacgactacgagagcaagatcaacatggcggtgtttccggcgctgcaaggcggcccgcacaaccaccagatcggcgcgctcgcggtggctctgaaatacgccaccgggccggtgttcaaggcgtatcaagcgcaggtcaaggcgaacgcggcggcgctcgcgaacgcgctcatgtcgcgcgggtataagctcgtgacggacggcacggagaatcatctggtgctgtgggatctccgccccaacggcctcaccgggtcgaagatggagaccatctgcgatatgctgcacatcacgctcaacaaaaacgcggtgtacggcgacgcgagcgcgctcacgcccgggggatgccggatcggcgcgcccgcgatgacgtcgagagggttgaaagaagcggacttcgtgaccatcgcggatttcctccacgaagccgtcgagctcgcgctggaggtgcagtcgtcgcacgggaagatgctgaaagactggaagatgggcctggaagggaacccgaaggtggacgagcttcgggcgcgggtggaggcgttcgcggagggattcgacatgcccgggttcacgcgcggggacgtggacatgtga

SEQ ID NO: 4539 - protein, 469 aa, Micromonas pusilla CCMP1545
MEPVFPEALKTLKDADPEIYQLVQKEKLRQIRGIELIASENFTSAPVMEALGSCLTNKYSEGLPGARYYGGNENIDQVERLCQDRALAAFRLDKSKWGVNVQPYSGSPANMAVYTALLVPHDRIMGLDLPSGGHLTHGYYTAGGKKISATSIFFESLPYKVNYSTGYIDYDKLEEKAMDFRPKMLICGGSAYPRDWDYKRFRDIADKCGAMLMMDMAHISGLVAAEEQASPFEYADIVTTTTHKSLRGPRAGMIFFRRGPRPSKRGEPEGQTYDYESKINMAVFPALQGGPHNHQIGALAVALKYATGPVFKAYQAQVKANAAALANALMSRGYKLVTDGTENHLVLWDLRPNGLTGSKMETICDMLHITLNKNAVYGDASALTPGGCRIGAPAMTSRGLKEADFVTIADFLHEAVELALEVQSSHGKMLKDWKMGLEGNPKVDELRARVEAFAEGFDMPGFTRGDVDM

SEQ ID NO: 4540 - DNA, 1530 bp, Micromonas pusilla CCMP1545
  CDS (1)..(1530)
atggccgccatcaccgctacccccgtggtcctctccgcgcgcgctcgcgtcgcgcccagcggctccgccgtgcgcgccgccgcggtcgtccgccccaagctctccaagcgaagcgtcaccgtcttcgcgaagaagggtcccgagcccccgaacgcgggcgctgtcgccgcggagacgatgcgcagcgcgccgttcgcagacacctccgtcgaggagctcgacccggagatgtacgcgatcatgatgaaggagaagacgcgccagaggctaggcctcgagctcatcgcgtccgaaaacttcacctcgcgcgcggtcatggaagtcaacggctcgtgcctcacgaacaagtacagcgagggtctccccgggaagcggtactacggcggcaacgaattcatcgacgagaccgagaggctgtgccaagaccgcgcgctcgcggcgttccgcctcccgtccgacgagtggggcgtgaacgtgcaagtcttgtccggctctcccgcgaacttcgcggtgtacaccgcgctgctcaacccgcacgatcgcatcatgggtctggacctgccccacggcggccacctcacgcacggcttcttcaccccgaagaagaagatctccgcgacgtccatcttcttcgagtcgatgccgtaccgtctcaacgaagagaccgggatcatcgactacgaccagctcgaggcgaacgcgatgctgttccgcccgaagctcatcatcgccggcgcgtcggcgtatccgcgcaactacgactacaaacgcatgcgggagatctgcgacaaggtgggcgcgtacctgatgtccgacatggcgcacatctccggtttagtcgccgcggagctcgtggacgatccgttcccgtactcggacatcgtcacgacgacgacgcacaaatccctccgcggcccccgcggcgggatgatcttctacaagaaggagttcgaacagcagatcaacagcgcggttttccccgggcttcaaggcggcccgcacaaccacacgatcggcgcgctcgcggtcgcgctcaagcaggcgatgaccccggagttcatcgggtaccagaagcaggtcatctccaactgcgcgacgctcgcgaacaggctgacggagctcggctacacgctcgtctcgggcggcacggataaccacctcatcttgtgcgaccttcgaccgatgggcgtcgacggcgcgcgcgtggagtacattctcgaccaagcgcacatcacgctgaacaagaactccgtccccagggacacgtccgcgctcgtcccgggcggcatccgcatcgggacgccggcgatgacgacgcgcgggatgttggaagatgatttcgtcaaagtcgcggacctgatcgacgagggcgtgaagatcgcgatcgactgcaaggcgcaggcgggcgggccgaagctcgctgactttaagcagtacgtccagtcgaccgatcgcgcggacatcgcggcgctcagggagaaggttgagtcgttcgcgggcgacttccacatgcccggcggcctcttctga

SEQ ID NO: 4541 - protein, 509 aa, Micromonas pusilla CCMP1545
MAAITATPVVLSARARVAPSGSAVRAAAVVRPKLSKRSVTVFAKKGPEPPNAGAVAAETMRSAPFADTSVEELDPEMYAIMMKEKTRQRLGLELIASENFTSRAVMEVNGSCLTNKYSEGLPGKRYYGGNEFIDETERLCQDRALAAFRLPSDEWGVNVQVLSGSPANFAVYTALLNPHDRIMGLDLPHGGHLTHGFFTPKKKISATSIFFESMPYRLNEETGIIDYDQLEANAMLFRPKLIIAGASAYPRNYDYKRMREICDKVGAYLMSDMAHISGLVAAELVDDPFPYSDIVTTTTHKSLRGPRGGMIFYKKEFEQQINSAVFPGLQGGPHNHTIGALAVALKQAMTPEFIGYQKQVISNCATLANRLTELGYTLVSGGTDNHLILCDLRPMGVDGARVEYILDQAHITLNKNSVPRDTSALVPGGIRIGTPAMTTRGMLEDDFVKVADLIDEGVKIAIDCKAQAGGPKLADFKQYVQSTDRADIAALREKVESFAGDFHMPGGLF

SEQ ID NO: 4542 - DNA, 1629 bp, Ostreococcus tauri
  CDS (1)..(1629)
atgatttcgacggtgtctctcgcgcccgcgcgcgcgcgcgcgaccgctcggagggatgggcgcgcgacggtgtccgcgcggtcgtccgggtcgatgaaagtcgcgaatccgcgctcgagagcggtcgtcgggagggccaagccgcagccgttcgaggacgtctcggtgcgagagctcgacggcgagctgcacgagatcctgctcaaggagaagcgacgacagaggctcgggttggagctgatcgcgagtgaaaacttcacgagcaaggcggtgatggaggtgaacgggtcgtgcctgacgaataagtattcggagggtttgccgggacagcggtactacggcgggaacgagttcatcgacgaggtggagcgattgtgtcaaaaccgtgcgctgagcacctaccgcctcgatccggcggaatggggggtgaacgtacaagtgctctctggttccccggccaactttgcggtgtacaccgcgcttcttcagccgcacgagcgtatcatgggtctcgacttgccgcacggcggtcacctcacgcacggcttctatacgccgaagaagaagatctccgcgacgtccgtgtacttcgagtcgatgccgtatcgcttgaacgaggccacgggtttggtggattacgacaagctcgaggagaacgcgatgcttttccgaccgaagttgatcatcgctggcgcctcggcgtacgctcgtaactttgattacaagcgcatgcgcgagatttgcgacaaggttggcgcatacctgatgtccgacatggcccatatctccggtctcgtcgccgctcagctcgcggacgatcctttcaagtactctgacattgtcaccacgacgacgcacaagtctcttagaggtccgcgcggcggcatggtcttctacaggaaggaacacgagcaagccgtcaactctgccgtctttccgggtctccaaggcggcccgcacaaccacaccatcggtgccctggctgtggcgctcaagcaagcgcaaactcccgggtttgtcaagtaccaagagcaagtcatcaagaactgcgccgcaatggcaaagcgcttgatggaactcggatacacgctcgtctctggcggtaccgacaaccacttggtgctgtgtgatttgcgtccgaagggcgtggacggtgcgcgcgttgagaagatcctcgacctgtgccacatcacgttgaataagaactccgttcctggcgacacctctgcgctcgtcccgggcggcatccgcatcggatctccggcgatgacgacgcgcggcatgacggaggcggatttcattcgcgtcgccgacctcatcgataagggcgtcaatatcgctatcgatatcaagggtaagaccgaaggcggtaagttgaaggatttcaaggcgtatttagaagccaacgacgtgccggccatcgccgagttgagggctgaggttgaggctttcgccgatgagttccacatgcccggcgggatttcgaaaataatgtatgtgtcgaaaaaacctgaattaattaacatgcgcgttttctcgcgccgtcgctcgtcactccgcgtcgcgcgcgcgcccgggcggcgcggagggacatcatctatccgtttctcgcgagatccgaccgtttaa

SEQ ID NO: 4543 - protein, 542 aa, Ostreococcus tauri
MISTVSLAPARARATARRDGRATVSARSSGSMKVANPRSRAVVGRAKPQPFEDVSVRELDGELHEILLKEKRRQRLGLELIASENFTSKAVMEVNGSCLTNKYSEGLPGQRYYGGNEFIDEVERLCQNRALSTYRLDPAEWGVNVQVLSGSPANFAVYTALLQPHERIMGLDLPHGGHLTHGFYTPKKKISATSVYFESMPYRLNEATGLVDYDKLEENAMLFRPKLIIAGASAYARNFDYKRMREICDKVGAYLMSDMAHISGLVAAQLADDPFKYSDIVTTTTHKSLRGPRGGMVFYRKEHEQAVNSAVFPGLQGGPHNHTIGALAVALKQAQTPGFVKYQEQVIKNCAAMAKRLMELGYTLVSGGTDNHLVLCDLRPKGVDGARVEKILDLCHITLNKNSVPGDTSALVPGGIRIGSPAMTTRGMTEADFIRVADLIDKGVNIAIDIKGKTEGGKLKDFKAYLEANDVPAIAELRAEVEAFADEFHMPGGISKIMYVSKKPELINMRVFSRRRSSLRVARAPGRRGGTSSIRFSRDPTV

SEQ ID NO: 4544 - DNA, 1632 bp, Ostreococcus tauri
  CDS (1)..(1632)
atgcacaccgcgctgacgatcgcgcgacgatgcgcgcgacgcgcggtgacgtccggacggcatctcggccggccgtacgcggcggtgccgcagggcgcgagcggggtgaactcgaacgcggatgcgtacgcggcgattcgcgccgtgaacgcgaacgtgacggtgcggagtcgccggggactgacgatcgtgccgcgacgctcgccgcgctcgcagtggccggagatgattaataagccgctggaggagatcgatccggagatgtgcgagatcatcgagcacgaaaaggctcgacagtggaagggcctcgagctcattccgagcgaaaactttgtctctcgctcggtgatggacgccgtgggttccatcatgaccaacaagtactccgagggttacccgggggcgagatactacggtggtaatgaattcatcgatatggcggaaacgttgtgccaagagcgcgcgctcaaggctttcggtttggacccggcgaagtggggcgtgaacgtgcagtcgttgtccggttccccggccaacttccaggtgtacacggcgctcttgcagccgcacgataagatcatggcgctcgacttgccgcatggcggtcacttgtcccacggctaccaaacggacacgaagaagatcagcgccacgtccatcttcttcacgtcggtgccgtaccgcctcaacgaggaaaccggtttcattgattacgaaatgtgcgaaaagacggcgacgctcgtccgtccgaagttaatcgtcgctggtgcctctgcgtacgcgcaactttacgactacaagaagatgcgtgacatctgcgacaagacgaactccatcttgctcgccgacatggcgcacatctccggcttggtcgccgcgggcgtcgttccgtctccgttcgagtacgccgacgtcgtgaccacgactacgcacaagtccctccgaggtccgcgcggtgccatgatcttctaccgcaagggtgagaagggcaaggacaagaagggtaacgcgatcatgtacgactacgaggacaagatcaactttgccgtcttcccgggtctccaaggcggtccacacaaccacaccatcaccggtctcgcggttgccctcaagcaagcggcgagcccggagttcaaggcttaccaactgcaggtgttgagcaacatgcaagcctgcgcgaagcgcctccaagagcacggcgtcaagctcgtctctggcggcaccgtcaaccacttggctttgcttgacttgcgcccaatgggtgtcgacggctcccgtgttgaacgtgttttagagctcgcgcacatcgcgtgcaacaagaacacggttccgggtgacgtctctgccatggttccgggcggcttgcgcattggtaccccagcgttgacttcccgaggcttcttggagaaggatttcgaaaccgtcgccgacttgatcgtccgaggcatccacatcaccaaaactatcaacgactccgccaagggcaccaagctcaaggatttccgcgaggctttggcctccaaggagtggccggagctcacgcaacttaccaaggacgtcgagaacctcgccacgcgcttcccgaccattggtttcgagaaggcggagggcaagtacacgcaaggcttgtaa

SEQ ID NO: 4545 - protein, 543 aa, Ostreococcus tauri
MHTALTIARRCARRAVTSGRHLGRPYAAVPQGASGVNSNADAYAAIRAVNANVTVRSRRGLTIVPRRSPRSQWPEMINKPLEEIDPEMCEIIEHEKARQWKGLELIPSENFVSRSVMDAVGSIMTNKYSEGYPGARYYGGNEFIDMAETLCQERALKAFGLDPAKWGVNVQSLSGSPANFQVYTALLQPHDKIMALDLPHGGHLSHGYQTDTKKISATSIFFTSVPYRLNEETGFIDYEMCEKTATLVRPKLIVAGASAYAQLYDYKKMRDICDKTNSILLADMAHISGLVAAGVVPSPFEYADVVTTTTHKSLRGPRGAMIFYRKGEKGKDKKGNAIMYDYEDKINFAVFPGLQGGPHNHTITGLAVALKQAASPEFKAYQLQVLSNMQACAKRLQEHGVKLVSGGTVNHLALLDLRPMGVDGSRVERVLELAHIACNKNTVPGDVSAMVPGGLRIGTPALTSRGFLEKDFETVADLIVRGIHITKTINDSAKGTKLKDFREALASKEWPELTQLTKDVENLATRFPTIGFEKAEGKYTQGL

SEQ ID NO: 4546 - DNA, 1479 bp, Ostreococcus tauri
  CDS (1)..(1479)
atgtcgtttccttcctcgcgatcgcgcgcgcggcacttcgcccacacgtcgtctctcgcgtctcaaaacacgcgggcgcgaaagatggaccgcgtcttccccgaggctttgtctccgctcaaggaggccgacagagaggtgtacgacttgattcaaaatgaaaagaagcgacagatcggcggcatcgagctcatcgcgagcgaaaactttaccagcgcgcccgtgatggaggcgctcggctcggcgctcacgaacaagtactcggaggggcttcccggtgcgcggtactacggtgggaacgagatcatcgataaggtggagacgttgtgccaagagagagcgttgcacgcgtatcgcctggacgcgaaggactggggcgtgaacgtgcagccgtacagcggatcgcccgcgaatctggcggtgtacaccgcgcttttacaaccgcacgaccgtatcatgggtttggatctgccgagtggaggacacctgacgcacggatattacacggcgcacgggaagaagatttcggcgacgagcatcttcttcgagtcgttgccgtacaaggtggatccgaagactggtttgatcgattacgaaaagctcgaggagaaggcgatggatttccgaccgaagatgatcatctgcggcgggtcggcgtacgcgagagattgggattacgcgcgattcagggaaatcgcggataagtgcggggcgatgctcatgatggacatggcgcacatctctggtttggtcgctgcggaggaacaggcgcaaccgttcgagtactgcgatatcgtcaccacaactacgcacaagtcccttcgcggtcctcggtcggggatgatcttcttccgtcgaggcgtgaatgcgaaaactggtaaggactacgactacgagtcgcgcataaacatggcggtgttcccgtcgctccagggcggtcctcacaaccaccaaatcggcgctctgtgcgtcgccctcaagtacgcggcgacgccggcattcaaggagtacatcaagcaagtcaaggctaacgccaaggctcttggtgaacgcctcgtcgagaagggatactccctcgtcaccggcggcacggataaccacttggtgctctgggatctgcgcccgctcggcctcaccgggagcaagatggagtacctgtgcgatctcctgcacatcaccctgaacaagaacgcagtgtttggcgacgcgagcgcgctgtccccgggcggtgtacgcattggcgctcccgcgatgacgtctcgcggcttggtggaaaaggatttcgtccaaatcgctgacttcctctcccgcgccgttgatttgtgcttggaggtgcaacagagccacgggaagatgttgaaggactggaaaaagggcttagacggcaatcccaaggtcgcgtcgatgcgcgccgaggttgaggcattctcgtcggcgttcgacatgcccgccttcacgaaggaaagcatcgacatttag

SEQ ID NO: 4547 - protein, 492 aa, Ostreococcus tauri
MSFPSSRSRARHFAHTSSLASQNTRARKMDRVFPEALSPLKEADREVYDLIQNEKKRQIGGIELIASENFTSAPVMEALGSALTNKYSEGLPGARYYGGNEIIDKVETLCQERALHAYRLDAKDWGVNVQPYSGSPANLAVYTALLQPHDRIMGLDLPSGGHLTHGYYTAHGKKISATSIFFESLPYKVDPKTGLIDYEKLEEKAMDFRPKMIICGGSAYARDWDYARFREIADKCGAMLMMDMAHISGLVAAEEQAQPFEYCDIVTTTTHKSLRGPRSGMIFFRRGVNAKTGKDYDYESRINMAVFPSLQGGPHNHQIGALCVALKYAATPAFKEYIKQVKANAKALGERLVEKGYSLVTGGTDNHLVLWDLRPLGLTGSKMEYLCDLLHITLNKNAVFGDASALSPGGVRIGAPAMTSRGLVEKDFVQIADFLSRAVDLCLEVQQSHGKMLKDWKKGLDGNPKVASMRAEVEAFSSAFDMPAFTKESIDI

SEQ ID NO: 4548 - DNA, 1524 bp, Medicago truncatula
  CDS (1)..(1524)
atggccatggcacttcgaagactcacttccaccatcaacaaacctacttctctctatcgcttgtcatcttctctctccgctcaacacactcacaaatctcaccccgattggattaaacaactcaacgatcctcttggtgtagtagatcctgagatcgaagatataatcgaactagaaaaagctcgtcaatggaaggggctagagcttataccatcagaaaattttacgtcgttgtcggtgatgcaagcggttggatcggttatgacgaataaatacagtgaaggttatcctggtgctagatactatggtggaaatgagtacattgacatggctgagactttgtgtcagaagcgtgcattggaaacttttggattggatccaacacaatggggagggttcagtacctcagtttctggtcaactgaaaccttctaacttccaagtttacactgctttattgaaacctcatgagagaattatggcacttgatctcccccatggtgggcatctatcacatggaactgacaccaagaagatatcagctgtatctatattctttgaaacaatgccatacaggttggatgagagcactggttatattgactatgaccagatggagaaaagtgctgcactttttaggccaaaattaatagttgccggtgctagtgcttatgcccgtctttatgattatgcgcgtattcgcaaggtctgtgataaacagaaggcagttatgttggctgatatggcacacatcagtggattagttgctgcaggtgttattccttctccttttgattatgcagatgttgtaacaaccacaacacataagtcacttcgtggaccacgtggggctatgatattcttcaggaagggtctgaaagagataaacaagaaagggcaggaagtgctgtatgactacgaagacaagataaatcaggctgttttccctggacttcaaggtggtccccacaatcacactattacaggcttagcagttgcattgaagcaggctatgacaccggaattcaagaattaccagaaacaagttcttagtaactcctcgacatttgcacagagcttgttagagaaaggctatgaccttgtatcgggtggaactgagaaccatttggtgttggtaaacttaagaaacaagggcattgatggttcaagggttgagaaggtgttagaatcagttcatatagctgccaataaaaacactgttccaggagatgtgtctgcaatggttcctggagggatcagaatgggaactcctgctcttacatctaggggttttgttgaggatgattttaaaaaagtagctgaatactttgacgcggctgtcaaaatagccttacagattaaggaaaattctaaaggcacaaagttgaaggattttgtggaagctatggagtccgattcacaagttcaatctcaaatcgctgatctccgccatgacgtagaaggttatgctaagcagtttcccacaattggttttgagatagagacaatgaagtataacaagtga

SEQ ID NO: 4549 - protein, 507 aa, Medicago truncatula
MAMALRRLTSTINKPTSLYRLSSSLSAQHTHKSHPDWIKQLNDPLGVVDPEIEDIIELEKARQWKGLELIPSENFTSLSVMQAVGSVMTNKYSEGYPGARYYGGNEYIDMAETLCQKRALETFGLDPTQWGGFSTSVSGQLKPSNFQVYTALLKPHERIMALDLPHGGHLSHGTDTKKISAVSIFFETMPYRLDESTGYIDYDQMEKSAALFRPKLIVAGASAYARLYDYARIRKVCDKQKAVMLADMAHISGLVAAGVIPSPFDYADVVTTTTHKSLRGPRGAMIFFRKGLKEINKKGQEVLYDYEDKINQAVFPGLQGGPHNHTITGLAVALKQAMTPEFKNYQKQVLSNSSTFAQSLLEKGYDLVSGGTENHLVLVNLRNKGIDGSRVEKVLESVHIAANKNTVPGDVSAMVPGGIRMGTPALTSRGFVEDDFKKVAEYFDAAVKIALQIKENSKGTKLKDFVEAMESDSQVQSQIADLRHDVEGYAKQFPTIGFEIETMKYNK

SEQ ID NO: 4550 - DNA, 1674 bp, Oryza sativa subsp. japonica
  CDS (1)..(1674)
atgctgatgcgtccggtgtggtgggtgctggggctgatcactgcagataaaaacgccacgcgaatccactacctcccaaaccccgagacccccccgcctccaccaccacccgccgctcgccgctcgcccaccatggccatggcgacggcgctccgcaagctctcctccgacgccctccgccgccagccgctctcccgcatcaccccgctctactacatggcgtccctgccggcgacggaggagagatccggagtcacctggccgaagcagctgaacgcgccgctggaggaggtggatcccgagatcgccgacatcatcgagcacgagaaggcccgccaatggaagggtctggagctcatcccgtcggagaacttcacctcggtgtcagtgatgcaggcggtgggatccgtcatgaccaacaagtacagcgaggggtaccccggcgcgagatactacggtggaaacgaatacattgatatggccgagtcattgtgccagaaacgtgctttggaggccttccgcttggacccagcgaaatggggagtgaatgtgcaacctctatcagggtcacctgccaacttccatgtttacactgccctattgaaaccacatgagagaatcatggctttggatcttcctcatggtggacatctttctcacggctaccagactgatactaagaagatttcagcagtttcgatattctttgagacaatgccctacagattggatgaaagcactggcttgattgattatgatcagatggagaaaagtgccgttctttttaggccaaagttgatcgttgcgggtgcaagtgcatatgcgcgtctttatgactatgaccgcatgcggaaggtttgtgacaagcagaaggcaatacttctagcagatatggcacatatcagtgggcttgtcgcagctggtgttgttccatctccttttgattatgcagatgtagtgactaccactactcacaagtcactccgtggaccacgtggagccatgatcttttacaggaagggggtgaaaggagtaaacaagcaaggcaaagaggttatgtatgactttgaggacaagatcaatgctgctgtcttcccaggtctgcaaggtggaccacataatcataccattactggcttagctgttgcgcttaagcaggcaactactccggagtacagagcttatcaagagcaagttatgagtaactgtgcaaaatttgcacagagcttgacagcaaaaggctacgaacttgtctctggtgggactgacaaccatttagtgttggtaaatctcaagagcaagggcatagatggttcaagagtggagaaggttttagaaaacgtgcacattgcagcaaacaagaacacagttcctggtgatgtttcagctatggtaccaggaggcatcaggatgggaaccccagcactgacctcaagaggatttgttgaggaggactttgctaaggttgctgatttcttcgatgcagcagtgaacttggctttgaaggttaaggctgcagcaggtggaacaaaactgaaggactttgttgccactttgcaatctgatagcaacattcaatccgagattgcaaaacttcgccatgatgtggaggaatatgcaaaacagttccccacaattgggtttgagaaagaaaccatgaagtacaagaactaa

SEQ ID NO: 4551 - protein, 557 aa, Oryza sativa subsp. japonica
MLMRPVWWVLGLITADKNATRIHYLPNPETPPPPPPPAARRSPTMAMATALRKLSSDALRRQPLSRITPLYYMASLPATEERSGVTWPKQLNAPLEEVDPEIADIIEHEKARQWKGLELIPSENFTSVSVMQAVGSVMTNKYSEGYPGARYYGGNEYIDMAESLCQKRALEAFRLDPAKWGVNVQPLSGSPANFHVYTALLKPHERIMALDLPHGGHLSHGYQTDTKKISAVSIFFETMPYRLDESTGLIDYDQMEKSAVLFRPKLIVAGASAYARLYDYDRMRKVCDKQKAILLADMAHISGLVAAGVVPSPFDYADVVTTTTHKSLRGPRGAMIFYRKGVKGVNKQGKEVMYDFEDKINAAVFPGLQGGPHNHTITGLAVALKQATTPEYRAYQEQVMSNCAKFAQSLTAKGYELVSGGTDNHLVLVNLKSKGIDGSRVEKVLENVHIAANKNTVPGDVSAMVPGGIRMGTPALTSRGFVEEDFAKVADFFDAAVNLALKVKAAAGGTKLKDFVATLQSDSNIQSEIAKLRHDVEEYAKQFPTIGFEKETMKYKN

SEQ ID NO: 4552 - DNA, 1281 bp, Bacteroides forsythus
  CDS (1)..(1281): transl_table=11
atgaaacgagacagtgtaatttttgaaattatcgaacgtgaccatcaacgccagttgaaaggtatcgagttgattgcttcggaaaacttcgtgagtgaacaggtgatgcaggccatgggcagttaccttaccaacaagtatgccgaaggatatcccgggaaacgttattacgggggctgcgaagtggtagacgaaagcgagaatctggccatcgaacggctgaaaaagctcttcggggccgaatgggctaacgtgcagccacattctggagcacaggcaaacgcggccgtctttctggcagtcctgaatccgggcgatacgttcttaggcttaaacctctcgcacggagggcatctttcgcacggttcgccggtaaacagctcaggtatcttgtatcgcgccgtcgaatataatgtaaaagaagatacgggacgcgtggattacgaacagatggaagaagtggcattgcgcgagaaaccgaaattaattgtcggaggagcttccgcttattctcgggactgggattatgccagaatgcgtgcgattgccgacaaagtcggcgcattgctgatgatcgatatggcacacccggccggcctgattgctgccggtttactgaacaacccgctgccacacgcccatatcgtcacttcaacgacgcataagaccctgcgcggcccgcgcggtggtgtgattttgctgggcaaggattttgaaaatccatggggcaagaaaacaccgcaaggcgaaatcaaaaccatgtctcagctgctcgattcggcggtattccccggtattcagggtggtccgctcgaacatgtgattgccgccaaagccgtgtcattcggcgaagcgcttgaacccgaatacaagacttatcaaacacaggtaaagaaaaatgcagccgtgatggcacaagcctttatcgataagggctacaaaatcatttcgggcggaacggacaaccacagcatgcttatcgacctgcgtaccaaattccccgagttgacaggtaaggtagctgaaaaagcgctagttgccgccgatattacggtgaacaagaatatggtaccgttcgacagccgttcgccgttccaaacatcgggcatccgtatcggtacgccggccatcaccacacgcggagtaaaagagccgctgatgggtgagattgtcgagatgatcgacaccgtactttccaatcccgaatcggaaacaacgatcgcttccgtgcgcagcaaagtgaatcagacgatgaaagactatccgttgtatgcatggtaa

SEQ ID NO: 4553 - protein, 426 aa, Bacteroides forsythus
MKRDSVIFEIIERDHQRQLKGIELIASENFVSEQVMQAMGSYLTNKYAEGYPGKRYYGGCEVVDESENLAIERLKKLFGAEWANVQPHSGAQANAAVFLAVLNPGDTFLGLNLSHGGHLSHGSPVNSSGILYRAVEYNVKEDTGRVDYEQMEEVALREKPKLIVGGASAYSRDWDYARMRAIADKVGALLMIDMAHPAGLIAAGLLNNPLPHAHIVTSTTHKTLRGPRGGVILLGKDFENPWGKKTPQGEIKTMSQLLDSAVFPGIQGGPLEHVIAAKAVSFGEALEPEYKTYQTQVKKNAAVMAQAFIDKGYKIISGGTDNHSMLIDLRTKFPELTGKVAEKALVAADITVNKNMVPFDSRSPFQTSGIRIGTPAITTRGVKEPLMGEIVEMIDTVLSNPESETTIASVRSKVNQTMKDYPLYAW

SEQ ID NO: 4554 - DNA, 1416 bp, Arabidopsis thaliana
  CDS (1)..(1416)
atggaaccagtctcttcatggggtaacacctctctcgtctccgtagatccagagatccacgacctaatcgagaaggagaaacgtcggcaatgtcgaggaatcgaacttatcgcttccgagaatttcacttccttcgccgtcatcgaagctctcggaagtgccttaaccaacaaatactccgaaggtattcctggtaatcgttattacggaggtaacgaattcatcgatgagatcgagaatctttgccgttcacgtgctctcgaagctttccattgtgatccagcagcgtggggcgttaatgttcagccgtattctggatctccggcgaatttcgctgcttacacggctttgcttcagcctcacgatcgtatcatggggcttgatttgccttcaggtggtcatttgactcatggttactatacatctggtggtaagaagacctctgcgacttcgatctactttgagagtcttccgtataaggtgaatttcaccactggttacattgattacgataagcttgaagagaaggcgttggatttcaggcctaagttgcttatctgtggtggtagtgcgtatcctagggattgggattacgctagatttagagctattgctgataaggttggagctcttttgctttgtgacatggctcacatcagtggtctcgttgctgctcaggaagctgcaaacccatttgagtactgtgacgttgtgacaaccacaacccacaagagtttgaggggtccaagggctggtatgattttctacaggaagggtccaaaaccaccaaagaagggtcaacccgagggtgcagtctatgattttgaggacaaaatcaactttgctgtattccctgcgcttcaaggtggtcctcacaatcaccagattggtgctttagctgttgcgttgaagcaggctaatactcctgggttcaaggtctacgcaaaacaagtgaaagccaatgctgttgcccttggaaactacctaatgagcaagggttaccagattgtgaccaatggaactgagaaccaccttgttctctgggatcttcgccctcttggattgaccggaaacaaggttgagaagctctgcgatctgtgcagcattacattgaacaagaacgcagtatttggagacagtagtgctcttgctcctggaggtgtaagaatcggtgcacccgcgatgacatcgagaggattggtggagaaggactttgagcagataggagaattcctgagccgtgcagtgacactgacgttggacatccaaaagacatacggtaagttgttgaaggacttcaacaagggtttggtgaacaacaaagatctcgaccagctcaaggctgacgtcgagaagttctctgcgtcttatgaaatgcctggattcctcatgtctgagatgaagtaccaggattag

SEQ ID NO: 4555 - protein, 471 aa, Arabidopsis thaliana
MEPVSSWGNTSLVSVDPEIHDLIEKEKRRQCRGIELIASENFTSFAVIEALGSALTNKYSEGIPGNRYYGGNEFIDEIENLCRSRALEAFHCDPAAWGVNVQPYSGSPANFAAYTALLQPHDRIMGLDLPSGGHLTHGYYTSGGKKTSATSIYFESLPYKVNFTTGYIDYDKLEEKALDFRPKLLICGGSAYPRDWDYARFRAIADKVGALLLCDMAHISGLVAAQEAANPFEYCDVVTTTTHKSLRGPRAGMIFYRKGPKPPKKGQPEGAVYDFEDKINFAVFPALQGGPHNHQIGALAVALKQANTPGFKVYAKQVKANAVALGNYLMSKGYQIVTNGTENHLVLWDLRPLGLTGNKVEKLCDLCSITLNKNAVFGDSSALAPGGVRIGAPAMTSRGLVEKDFEQIGEFLSRAVTLTLDIQKTYGKLLKDFNKGLVNNKDLDQLKADVEKFSASYEMPGFLMSEMKYQD

SEQ ID NO: 4556 - DNA, 1737 bp, Arabidopsis thaliana
  CDS (1)..(1737)
atgactccaacaccaacaccaagagctccaatcgcagacgattcgattaatctacaagtcgatcaaagtttccgatcattaccaacaactttctctccgattccgttacaattactcgaacaaaaagccgagaagaccaccaccgttgatgagccaaagaaagatggaggaggaggaggagatcaaaaggaagacgagcatttcagaatcttaggtcaccatatgtgtctcaaaaggcaaagagattgtccacttttgttaacgcaatcaaagcatccgaagagaagttccatcggtgattcagatctggaatcgcgacgtgctgctgtacgagcttggggtgatcaaccgattcatttggcggatcctgatattcatgagcttatggagaaagagaagcaacgacaagtaagaggaattgaattgattgcttctgagaatttcgtgtgtagagctgtaatggaagctttaggtagtcatttaacgaataaatactctgaaggtatgcctggagctagatactatactgggaatcaatatattgatcagattgagaatctctgtattgagcgtgctcttactgcgtttggtcttgaatctgataaatggggtgttaatgttcagccttattcttgtacttctgctaacttcgcggtgtataccggacttttattgcccggtgaacggattatggggcttgattcgccttctggtggtcatatgagtcatggttattgtactcctggtgggaagaagatttcggctgcttccatcttctttgagagttttccttataaagtgaatcctcaaactgggtatattgattatgataaggttgaagataaggcgcttgattaccgtcctaagattcttatttgtggtgggagttcttatcctagggattgggattttgcaagggttagacagattgcagataagtgtggagctgttttgatgtgtgatatggctcatattagcggtcttgttgcaactaaggaatgttcaaatccatttgatcactgtgacatagtaacctccactactcacaaaggtctacgtggtcctagaggaggtatcatcttctacaggagaggcccaaagataagaaagcagggccatcactctagccattgtgacacttccacgcattacgatctagaggaaaagatcaactttgctgtttttccatctctacaaggaggtccacacaacaaccatatcgctgctcttgccattgcattgaaacaagtggccactccagagtacaaagcttacatacaacagatgaagaaaaacgcccaagctttagcagcagctcttcttagaagaaaatgcagactggttactggtggtacagacaaccatttgttgctgtgggatctcactcctatgggcttaacagggaaagtctacgagaaagtgtgtgagatgtgccatatcactttaaacaagacggctatattcggggacaatggtacaatatctcctggaggtgtaagaatagggacacccgcaatgacaacccgaggctgtatagagtctgatttcgagacaatggcggattttctgataaaggcggctcagataacaagtgcgttgcagagagagcatggaaagtcacacaaggagtttgtgaaaagtttatgcaccaacaaagacatagctgagcttagaaaccgagtcgaagcatttgctttgcagtatgagatgcctgcttctcttattcgaattgaatga

SEQ ID NO: 4557 - protein, 578 aa, Arabidopsis thaliana
MTPTPTPRAPIADDSINLQVDQSFRSLPTTFSPIPLQLLEQKAEKTTTVDEPKKDGGGGGDQKEDEHFRILGHHMCLKRQRDCPLLLTQSKHPKRSSIGDSDLESRRAAVRAWGDQPIHLADPDIHELMEKEKQRQVRGIELIASENFVCRAVMEALGSHLTNKYSEGMPGARYYTGNQYIDQIENLCIERALTAFGLESDKWGVNVQPYSCTSANFAVYTGLLLPGERIMGLDSPSGGHMSHGYCTPGGKKISAASIFFESFPYKVNPQTGYIDYDKVEDKALDYRPKILICGGSSYPRDWDFARVRQIADKCGAVLMCDMAHISGLVATKECSNPFDHCDIVTSTTHKGLRGPRGGIIFYRRGPKIRKQGHHSSHCDTSTHYDLEEKINFAVFPSLQGGPHNNHIAALAIALKQVATPEYKAYIQQMKKNAQALAAALLRRKCRLVTGGTDNHLLLWDLTPMGLTGKVYEKVCEMCHITLNKTAIFGDNGTISPGGVRIGTPAMTTRGCIESDFETMADFLIKAAQITSALQREHGKSHKEFVKSLCTNKDIAELRNRVEAFALQYEMPASLIRIE

SEQ ID NO: 4558 - DNA, 1554 bp, Arabidopsis thaliana
  CDS (1)..(1554)
atggcgttggctcttcgtagactctcctcttccgttaagaaaccgatctcgcttctctcctctaatggcggttcactccgtttcatgtcgtctttatcaaccgcagctatggcggaatcggagaaatctcgttctagttggattaagcaattgaatgcatctctagatgaaatcgatcctgaagttgcggatattatcgaattagagaaggctagacaatggaagggatttgaacttataccgtcagagaatttcacttctctatctgtgatgcaagccgttggttctgttatgactaataagtatagtgaaggataccctggagctagatactatggaggaaatgagtacattgacatggctgagacattatgtcaaaaacgcgcattagaagcttttcagttagatccttctaaatggggagtcaatgtgcagtctttatcaggatcaccagctaatttccaagtttacactgcattgttgaagcctcatgaaagaatcatggcacttgatttacctcatggtggacatctttctcatggttatcagactgacacgaagaaaatatcggctgtatccatcttttttgagacaatgccatacagattggatgagaacactggttacattgattatgaccagctagaaaagagtgccgtgcttttcagaccgaaacttattgttgcgggtgcaagtgcttatgctcgtctatatgactatgcacgtattcgtaaggtctgtaacaagcaaaaggcagttatgttggctgatatggctcatattagtgggttggttgctgctggcgttattccttctccttttgagtatgcagatgttgttacgactacaactcacaaatcgcttcgcggtcctagaggggctatgatattctttaggaaggggttaaaagagattaacaaacaagggaaagaggtcatgtatgactatgaggacagaattaatcaagctgtttttcctggactgcaaggtggtccacataatcacactataacgggtctagcagttgctctgaagcaggcaagaactcctgagtacaaggcctaccaggatcaagttctccgtaattgctcaaagtttgctgagactttgcttgcgaaaggatatgatttagtgtctggaggcactgataatcatttagttttggtgaatctgaaaaacaagggaatagatggatcaagagtggaaaaagtattagaattagtacatattgcagcaaacaagaatactgttcctggtgatgtttctgccatggttcccggtggcatccatatgggaacaccagccctcacatcaagaggattcattgaggaagattttgcaaaagtggcggagtattttgatttagccgtcaagatagccttaaagatcaaagcagagtctcaaggaacaaagttgaaagactttgtagcaacaatgcaatcaaatgagaaattacagtcagagatgtcaaagctccgtgagatggtagaagaatatgctaagcaattcccaacgattgggttcgagaaagagacgatgagatacaaagagtag

SEQ ID NO: 4559 - protein, 517 aa, Arabidopsis thaliana
MALALRRLSSSVKKPISLLSSNGGSLRFMSSLSTAAMAESEKSRSSWIKQLNASLDEIDPEVADIIELEKARQWKGFELIPSENFTSLSVMQAVGSVMTNKYSEGYPGARYYGGNEYIDMAETLCQKRALEAFQLDPSKWGVNVQSLSGSPANFQVYTALLKPHERIMALDLPHGGHLSHGYQTDTKKISAVSIFFETMPYRLDENTGYIDYDQLEKSAVLFRPKLIVAGASAYARLYDYARIRKVCNKQKAVMLADMAHISGLVAAGVIPSPFEYADVVTTTTHKSLRGPRGAMIFFRKGLKEINKQGKEVMYDYEDRINQAVFPGLQGGPHNHTITGLAVALKQARTPEYKAYQDQVLRNCSKFAETLLAKGYDLVSGGTDNHLVLVNLKNKGIDGSRVEKVLELVHIAANKNTVPGDVSAMVPGGIHMGTPALTSRGFIEEDFAKVAEYFDLAVKIALKIKAESQGTKLKDFVATMQSNEKLQSEMSKLREMVEEYAKQFPTIGFEKETMRYKE

SEQ ID NO: 4560 - DNA, 1590 bp, Arabidopsis thaliana
  CDS (1)..(1590)
atgcaagcttgttgtggtggtaattcgatggcttctcttcagcaacctggacgggttcaaggatctgtctttcccccaattatgcctccagtgaccaaattttctcagcagttgaagttcaatatttcaaaacctttccgttcttcatttctgaaaagaaacctggtctctgaaatgagagcatcttcagtctcgctacctaatgtcgagataagcagcaaagaaatcccttttgaggactatggtcttggtgaagttgatccagaggtccgaaccatcatcacaaaggagaaagatagacaattcaggagcttggagcttattgcatctgagaatttcacgtctcgagcagttatggaggcggttggctcatgccttaccaacaagtattctgagggactgcctggtaaaagatattatggtggcaatgagtacattgatcagttggagacgctttgccagaaccgggctttggcagccttccgcttagattctacgaaatggggggttaatgttcagccgttatctggttcacctgcaaactttgctgtctacactgcgatacttagccctcatgatcggatcatgggtttggatttacctcacggtggtcatctgtcgcatgggttcatgaccgctaaaaggcgtgtatctggaacttcaatatactttgagtccatgccttatcgacttgatgaatcaacaggcattgttgactacgatatgctcgagaaaactgctacacttttcagaccaaagcttattatcgcaggagctagtgcatacagccgagattttgactatcctcgcatgaggaagatcgcagactcagttggtgcttttctgatgatggatatggctcatatcagtgggcttgtggctgcttctgtggtagctgacccttttgagtattgtgatattgttacaacaacaactcacaagtctttgagaggtccgagaggtggcatgatcttcttcaggaaggatccaattaatggggttgatcttgaatctgccgtgaacaatgctgtcttccctggtttgcagggtggccctcataaccacacaattggaggattagcagtctgcttgaaacacgcacaatcaccggaattcaaggcgtaccagaaaagagttgtgtctaactgtagagctctagctaaccgattggttgaactcgggtttaagctagtttctggtggcagcgataaccacttggttctcgtcgatcttagacccatgggtatggatggtgcgcgggttgagaaaatcttagacatggcatctattactctcaacaagaactctgtccctggggacaaaagtgcgttggtaccagggggaataaggataggatcccccgcgatgacgacaagaggactgtcagagaaagactttgtagtagtggctgacttcatcaaggaaggtgtggagataacaatggaagccaagaaagccgcgccgggttcaaagcttcaagatttcaacaagttcgtgacatctcctgagtttccattgaaagagagagtgaagagtctaacggagagagtggaaaccttcacatctcgttttcccattcctggcgtttaa

SEQ ID NO: 4561 - protein, 529 aa, Arabidopsis thaliana
MQACCGGNSMASLQQPGRVQGSVFPPIMPPVTKFSQQLKFNISKPFRSSFLKRNLVSEMRASSVSLPNVEISSKEIPFEDYGLGEVDPEVRTIITKEKDRQFRSLELIASENFTSRAVMEAVGSCLTNKYSEGLPGKRYYGGNEYIDQLETLCQNRALAAFRLDSTKWGVNVQPLSGSPANFAVYTAILSPHDRIMGLDLPHGGHLSHGFMTAKRRVSGTSIYFESMPYRLDESTGIVDYDMLEKTATLFRPKLIIAGASAYSRDFDYPRMRKIADSVGAFLMMDMAHISGLVAASVVADPFEYCDIVTTTTHKSLRGPRGGMIFFRKDPINGVDLESAVNNAVFPGLQGGPHNHTIGGLAVCLKHAQSPEFKAYQKRVVSNCRALANRLVELGFKLVSGGSDNHLVLVDLRPMGMDGARVEKILDMASITLNKNSVPGDKSALVPGGIRIGSPAMTTRGLSEKDFVVVADFIKEGVEITMEAKKAAPGSKLQDFNKFVTSPEFPLKERVKSLTERVETFTSRFPIPGV

SEQ ID NO: 4562 - DNA, 1737 bp, Arabidopsis thaliana
  CDS (1)..(1737)
atgactccaacaccaacaccaagagctccaatcgcagacgattcgattaatctacaagtcgatcaaagtttccgatcattaccaacaactttctctccgattccgttacaattactcgaacaaaaagccgagaagaccaccaccgttgatgagccaaagaaagatggaggaggaggaggagatcaaaaggaagacgagcatttcagaatcttaggtcaccatatgtgtctcaaaaggcaaagagattgtccacttttgttaacgcaatcaaagcatccgaagagaagttccatcggtgattcagatctggaatcgcgacgtgctgctgtacgagcttggggtgatcaaccgattcatttggcggatcctgatattcatgagcttatggagaaagagaagcaacgacaagtaagaggaattgaattgattgcttctgagaatttcgtgtgtagagctgtaatggaagctttaggtagtcatttaacgaataaatactctgaaggtatgcctggagctagatactatactgggaatcaatatattgatcagattgagaatctctgtattgagcgtgctcttactgcgtttggtcttgaatctgataaatggggtgttaatgttcagccttattcttgtacttctgctaacttcgcggtgtataccggacttttattgcccggtgaacggattatggggcttgattcgccttctggtggtcatatgagtcatggttattgtactcctggtgggaagaagatttcggctgcttccatcttctttgagagttttccttataaagtgaatcctcaaactgggtatattgattatgataagcttgaagataaggcgcttgattaccgtcctaagattcttatttgtggtgggagttcttatcctagggattgggattttgcaagggttagacagattgcagataagtgtggagctgttttgatgtgtgatatggctcatattagcggtcttgttgcaactaaggaatgttcaaatccatttgatcactgtgacatagtaacctccactactcacaaaggtctacgtggtcctagaggaggtatcatcttctacaggagaggcccaaagataagaaagcagggccatcactctagccattgtgacacttccacgcattacgatctagaggaaaagatcaactttgctgtttttccatctctacaaggaggtccacacaacaaccatatcgctgctcttgccattgcattgaaacaagtggccactccagagtacaaagcttacatacaacagatgaagaaaaacgcccaagctttagcagcagctcttcttagaagaaaatgcagactggttactggtggtacagacaaccatttgttgctgtgggatctcactcctatgggcttaacagggaaagtctacgagaaagtgtgtgagatgtgccatatcactttaaacaagacggctatattcggggacaatggtacaatatctcctggaggtgtaagaatagggacacccgcaatgacaacccgaggctgtatagagtctgatttcgagacaatggcggattttctgataaaggcggctcagataacaagtgcgttgcagagagagcatggaaagtcacacaaggagtttgtgaaaagtttatgcaccaacaaagacatagctgagcttagaaaccgagtcgaagcatttgctttgcagtatgagatgcctgcttctcttattcgaattgaatga

SEQ ID NO: 4563 - protein, 578 aa, Arabidopsis thaliana
MTPTPTPRAPIADDSINLQVDQSFRSLPTTFSPIPLQLLEQKAEKTTTVDEPKKDGGGGGDQKEDEHFRILGHHMCLKRQRDCPLLLTQSKHPKRSSIGDSDLESRRAAVRAWGDQPIHLADPDIHELMEKEKQRQVRGIELIASENFVCRAVMEALGSHLTNKYSEGMPGARYYTGNQYIDQIENLCIERALTAFGLESDKWGVNVQPYSCTSANFAVYTGLLLPGERIMGLDSPSGGHMSHGYCTPGGKKISAASIFFESFPYKVNPQTGYIDYDKLEDKALDYRPKILICGGSSYPRDWDFARVRQIADKCGAVLMCDMAHISGLVATKECSNPFDHCDIVTSTTHKGLRGPRGGIIFYRRGPKIRKQGHHSSHCDTSTHYDLEEKINFAVFPSLQGGPHNNHIAALAIALKQVATPEYKAYIQQMKKNAQALAAALLRRKCRLVTGGTDNHLLLWDLTPMGLTGKVYEKVCEMCHITLNKTAIFGDNGTISPGGVRIGTPAMTTRGCIESDFETMADFLIKAAQITSALQREHGKSHKEFVKSLCTNKDIAELRNRVEAFALQYEMPASLIRIE

SEQ ID NO: 4564 - DNA, 1416 bp, Arabidopsis thaliana
  CDS (1)..(1416)
atggaaccagtctcttcatggggtaacacctctctcgtctccgtagatccagagatccacgacctaatcgagaaggagaaacgtcggcaatgtcgaggaatcgaacttatcgcttccgagaatttcacttccttcgccgtcatcgaagctctcggaagggccttaaccaacaaatactccgaaggtattcctggtaatcgttattacggaggtaacgaattcatcgatgagatcgagaatctttgccgtccaagagctctcgaagctttccattgtgatccagcagcgtggggcgttaatgttcagccgtattctggatctccggcaaatttcgctgcttacacggctttgcttcagcctcacgatcgtatcatggggcttgatttgccttcaggtggtcatttgactcatggttactatacatctggtggtaagaagatctctgcgacttcgatctactttgagagtcttccgtataaggtgaatttcaccactggttacattgattacgataagcttgaagagaaggcgttggatttcaggcctaagttgcttatctgtggtggtagtgcgtatcctagggattgggattacgctagatttagagctattgctgataaggttggagctcttttgctttgtgacatggctcacatcagtggtctcgttgctgctcaggaagctgcaaacccatttgagtactgtgacgttgtgacaaccacaacccacaagagtttgaggggtccaagggctggtatgattttctacaggaagggtccaaaaccaccaaagaagggtcaacccgagggtgcagtctatgattttgaggacaaaatcaactttgctgtattccctgcgcttcaaggtggtcctcacaatcaccagattggtgctctagctgttgcgttgaagcaggctaatactcctgggttcaaggtctacgcaaaacaagtgaaagccaatgctgttgcccttggaaactacctaatgagcaagggttaccagattgtgaccaatggaactgagaaccaccttgttctctgggatcttcgccctcttggattgaccggaaacaaggttgagaagctctgcgatctgtgcagcattacattgaacaagaacgcagtatttggagacagtagtgctcttgctcctggaggtgtaagaatcggtgcacccgcgatgacatcgagaggattggtggagaaggactttgagcagataggagaattcctgagccgtgcagtgacactgacgttggacatccaaaagacatacggtaagttgttgaaggacttcaacaagggtttggtgaacaacaaagatctcgatcagctcaaggctgatgtcgagaagttctcggcgtcttatgagatgcctggattcctcatgtctgagatgaagtacaaggattag

SEQ ID NO: 4565 - protein, 471 aa, Arabidopsis thaliana
MEPVSSWGNTSLVSVDPEIHDLIEKEKRRQCRGIELIASENFTSFAVIEALGRALTNKYSEGIPGNRYYGGNEFIDEIENLCRPRALEAFHCDPAAWGVNVQPYSGSPANFAAYTALLQPHDRIMGLDLPSGGHLTHGYYTSGGKKISATSIYFESLPYKVNFTTGYIDYDKLEEKALDFRPKLLICGGSAYPRDWDYARFRAIADKVGALLLCDMAHISGLVAAQEAANPFEYCDVVTTTTHKSLRGPRAGMIFYRKGPKPPKKGQPEGAVYDFEDKINFAVFPALQGGPHNHQIGALAVALKQANTPGFKVYAKQVKANAVALGNYLMSKGYQIVTNGTENHLVLWDLRPLGLTGNKVEKLCDLCSITLNKNAVFGDSSALAPGGVRIGAPAMTSRGLVEKDFEQIGEFLSRAVTLTLDIQKTYGKLLKDFNKGLVNNKDLDQLKADVEKFSASYEMPGFLMSEMKYKD

SEQ ID NO: 4566 - DNA, 1389 bp, Arabidopsis thaliana
  CDS (1)..(1389)
atgactgaatatctaggcaaagaaatcccttttgaggactatggtcttggtgaagttgatccagaggtccgaaccatcatcacaaaggagaaagatagacaattcaggagcttggagcttattgcatctgagaatttcacgtctcgagcagttatggaggcggttggctcatgccttaccaacaagtattctgagggactgcctggtaaaagatattatggtggcaatgagtacattgatcagttggagacgctttgccagaaccgggctttggcagccttccgcttagattctacgaaatggggggttaatgttcagccgttatctggttcacctgcaaactttgctgtctacactgcgatacttagccctcatgatcggatcatgggtttggatttacctcacggtggtcatctgtcgcatgggttcatgaccgctaaaaggcgtgtatctggaacttcaatatactttgagtccatgccttatcgacttgatgaatcaacaggcattgttgactacgatatgctcgagaaaactgctacacttttcagaccaaagcttattatcgcaggagctagtgcatacagccgagattttgactatcctcgcatgaggaagatcgcagactcagttggtgcttttctgatgatggatatggctcatatcagtgggcttgtggctgcttctgtggtagctgacccttttgagtattgtgatattgttacaacaacaactcacaagtctttgagaggtccgagaggtggcatgatcttcttcaggaaggatccaattaatggggttgatcttgaatctgccgtgaacaatgctgtcttccctggtttgcagggtggccctcataaccacacaattggaggattagcagtctgcttgaaacacgcacaatcaccggaattcaaggcgtaccagaaaagagttgtgtctaactgtagagctctagctaaccgattggttgaactcgggtttaagctagtttctggtggcagcgataaccacttggttctcgtcgatcttagacccatgggtatggatggtgcgcgggttgagaaaatcttagacatggcatctattactctcaacaagaactctgtccctggggacaaaagtgcgttggtaccagggggaataaggataggatcccccgcgatgacgacaagaggactgtcagagaaagactttgtagtagtggctgacttcatcaaggaaggtgtggagataacaatggaagccaagaaagccgcgccgggttcaaagcttcaagatttcaacaagttcgtgacatctcctgagtttccattgaaagagagagtgaagagtctaaaggagagagtggaaaccttcacatctcgttttcccattcctggcgtttaa

SEQ ID NO: 4567 - protein, 462 aa, Arabidopsis thaliana
MTEYLGKEIPFEDYGLGEVDPEVRTIITKEKDRQFRSLELIASENFTSRAVMEAVGSCLTNKYSEGLPGKRYYGGNEYIDQLETLCQNRALAAFRLDSTKWGVNVQPLSGSPANFAVYTAILSPHDRIMGLDLPHGGHLSHGFMTAKRRVSGTSIYFESMPYRLDESTGIVDYDMLEKTATLFRPKLIIAGASAYSRDFDYPRMRKIADSVGAFLMMDMAHISGLVAASVVADPFEYCDIVTTTTHKSLRGPRGGMIFFRKDPINGVDLESAVNNAVFPGLQGGPHNHTIGGLAVCLKHAQSPEFKAYQKRVVSNCRALANRLVELGFKLVSGGSDNHLVLVDLRPMGMDGARVEKILDMASITLNKNSVPGDKSALVPGGIRIGSPAMTTRGLSEKDFVVVADFIKEGVEITMEAKKAAPGSKLQDFNKFVTSPEFPLKERVKSLKERVETFTSRFPIPGV

SEQ ID NO: 4568 - DNA, 1260 bp, Citrobacter koseri (strain ATCC BAA-895 / CDC 4225-83 / SGSC4696); identical to SEQ ID NO: 4196
  CDS (7)..(1260): transl_table=11

SEQ ID NO: 4569 - protein, 417 aa, Citrobacter koseri (strain ATCC BAA-895 / CDC 4225-83 / SGSC4696)
MLKREMNIADYDAELWQAMEQEKVRQEEHIELIASENYTSPRVMQAQGSQLTNKYAEGYPGKRYYGGCEYVDVVEQLAIDRAKELFGADYANVQPHSGSQANFAVYTALLQPGDTVLGMNLAQGGHLTHGSPVNFSGKLYNIVPYGIDESGKIDYEEMAKLAQTHKPKMIIGGFSAYSGVVDWAKMREIADSIGAYLFVDMAHVAGLIAADVYPNPVPHAHVVTTTTHKTLAGPRGGLILAKGGDEELYKKLNSAVFPSAQGGPLMHVIAGKAVALKEAMEPEFKVYQQQVAKNAKAMVEVFLNRGYKVVSGGTENHLFLLDLVDKNLTGKEADAALGRANITVNKNSVPNDPKSPFVTSGIRIGSPAITRRGFKEAEAKELAGWMCDVLDNINDEAVIERIKGKVLDICARFPVYA

SEQ ID NO: 4570 - DNA, 1554 bp, Flaveria pringlei
  CDS (1)..(1554)
atggcgatggcgttagctcttcgtaggctctcatcttctgcagacaaaccgttgcaacgcctcttcaatggcggtcatctctactctatgtcgtcgttgcctagtgaagctgtgtacgagaaggaacggcctggtgtcacttggccgaagcagttgaatgctccgcttgaggttgtggatcctgagatcgcggatattattgagcttgaaaaggctcggcaatggaagggtcttgaactcataccatcagagaactttacctctctatcagtgatgcaagcagttggatccgtgatgaccaacaaatacagtgaagggtatccaggagctagatactatggtggaaatgagtatattgacatggcggaaacgttgtgtcaaaagcgtgcattggaagcctttcggttggatcctgcaaaatggggagtgaatgtgcagcctctttcaggatcaccagctaatttccatgtctacactgcattattaaaggctcatgacagaatcatggcacttgatcttcctcatggtgggcatctgtcacatggttatcagaccgacacaaagaaaatatctgcggtatctatatttttcgagactatgccttacagattgaatgaaagcactggctatatcgattatgaccagttggagaaaagtgcaacactcttcaggccaaaattgattgttgctggtgcaagtgcttatgctcgattatatgactatgctcgaatccgcaaggtttgtgacaagcaaaaagctattatgttggcagatatggcacacattagtgggttggttgcagctggtgtcatcccatccccttttgactatgcagatgttgtgaccaccacaacccacaagtcactccgaggaccacgtggtgccatgattttctttaggaaaggactgaaagaagtcaacaaacaaggcaaagaggtcttctatgattatgaagacaaaatcaaccaggccgtctttcctggacttcaaggaggtccacacaatcacacaatcactggattggcagttgcattgaaacaggcaacaacagcagaatacaaggcgtaccaagaacaagttatgagtaatagtgccaagtttgcagagactctagttaagagtggatatgaacttgtttctggtggaacagagaaccacttagttttggttaatttgaaaaataagggaattgatggttcaaaggttgaaaaggtgttggaggctgttcacattgcagccaataaaaacactgttcctggtgatgtctctgccatggttcctggtggcatcagaatgggaacccctgctctcacctctaggggatttgttgaagaggactttgctaaagttgcctacttctttgaccttgctgtaaaattggctgtgaagatcaagggtgaagccaaagggacaaagttgaaggactttgtgactgcaatggagtccagtgccatccaatcagaaatctcaaagctacgccatgacgtggaggaatacgcgaaacaattcccgacaatcggatttgagaaagaaaccatgaaatacaaaaactaa

SEQ ID NO: 4571 - protein, 517 aa, Flaveria pringlei
MAMALALRRLSSSADKPLQRLFNGGHLYSMSSLPSEAVYEKERPGVTWPKQLNAPLEVVDPEIADIIELEKARQWKGLELIPSENFTSLSVMQAVGSVMTNKYSEGYPGARYYGGNEYIDMAETLCQKRALEAFRLDPAKWGVNVQPLSGSPANFHVYTALLKAHDRIMALDLPHGGHLSHGYQTDTKKISAVSIFFETMPYRLNESTGYIDYDQLEKSATLFRPKLIVAGASAYARLYDYARIRKVCDKQKAIMLADMAHISGLVAAGVIPSPFDYADVVTTTTHKSLRGPRGAMIFFRKGLKEVNKQGKEVFYDYEDKINQAVFPGLQGGPHNHTITGLAVALKQATTAEYKAYQEQVMSNSAKFAETLVKSGYELVSGGTENHLVLVNLKNKGIDGSKVEKVLEAVHIAANKNTVPGDVSAMVPGGIRMGTPALTSRGFVEEDFAKVAYFFDLAVKLAVKIKGEAKGTKLKDFVTAMESSAIQSEISKLRHDVEEYAKQFPTIGFEKETMKYKN

SEQ ID NO: 4572 - DNA, 1557 bp, Pisum sativum
  CDS (1)..(1557)
atggctatggcaatggcgcttcgtaagctttcatcttccgtcaacaaatcttcacgtcctctcttttctgcttcatctctttactacaagtcttctttgcctgatgaagctgtttacgacaaagagaatccacgtgttacgtggccaaagcaattgaattctccacttgaggttattgatcctgaaattgctgatataattgagcttgaaaaagctagacagtggaaggggctggaactgataccatcagagaattttacttctttatctgttatgcaagctgttggctctgtcatgacaaacaaatacagtgaaggttatcctggggcaagatattatggaggaaatgagtatattgacatggcagaaacactatgccagaagcgtgccttggaagcatttcggttggatcctgctaaatggggagtgaatgtgcagcctctgtctggttcgccttcaaactttcaagtttacactgcattgttgaaacctcatgatagaatcatggcacttgatctccctcatggagggcatctttctcatggataccagaccgacaccaaaaagatatctgcagtctctatattttttgagacaatgccatataggttggatgaaagcacaggatacattgactatgaccagctagagaaatcggctacactcttcaggccaaagttaatagttgccggtgctagtgcctatgcaaggctgtatgattatgcacgcatacgcaaggtttgcgataaacagaaagctgtgttgttagcagatatggcacatatcagtggattggttgcagctggtgttatcccttcaccttttgattatgcagatgtagtgacaaccacaactcacaagtcacttcgcggcccacgtggagctatgatatttttcaggaagggattaaaagaagtcaacaaacaaggaaaagaggtgttctatgactatgaggacaaaatcaatcaagctgtcttccccggactgcaaggtggtcctcacaaccataccattacaggtttagctgttgcattgaagcaggctacaactccagagtatagagcatatcaagagcaggttctcagcaatagctcaaagtttgcaaaggctctgagtgagaaaggctatgatcttgtttccggtgggactgagaatcatttagttttggtgaatctgaagaacaagggtattgatgggtccagagttgagaaagtgttggaattagtacatattgctgctaataaaaacacagttccaggagatgtgtctgctatggttcctggtggcatcaggatgggaactcctgcgcttacttcaaggggatttgttgaggaggatttcgttaaggtagcagagtattttgatgcagctgtgagtttggccttgaaggttaaggcagaaagcaaaggaacaaaattaaaggacttcgtggaagcattgcagacatcctcttacgtgcaatcagagatttccaagcttaagcatgatgttgaggagtttgcaaaacaatttccaaccattggttttgaaaaagcaaccatgaagtacaacaaataa

SEQ ID NO: 4573 - protein, 518 aa, Pisum sativum
MAMAMALRKLSSSVNKSSRPLFSASSLYYKSSLPDEAVYDKENPRVTWPKQLNSPLEVIDPEIADIIELEKARQWKGLELIPSENFTSLSVMQAVGSVMTNKYSEGYPGARYYGGNEYIDMAETLCQKRALEAFRLDPAKWGVNVQPLSGSPSNFQVYTALLKPHDRIMALDLPHGGHLSHGYQTDTKKISAVSIFFETMPYRLDESTGYIDYDQLEKSATLFRPKLIVAGASAYARLYDYARIRKVCDKQKAVLLADMAHISGLVAAGVIPSPFDYADVVTTTTHKSLRGPRGAMIFFRKGLKEVNKQGKEVFYDYEDKINQAVFPGLQGGPHNHTITGLAVALKQATTPEYRAYQEQVLSNSSKFAKALSEKGYDLVSGGTENHLVLVNLKNKGIDGSRVEKVLELVHIAANKNTVPGDVSAMVPGGIRMGTPALTSRGFVEEDFVKVAEYFDAAVSLALKVKAESKGTKLKDFVEALQTSSYVQSEISKLKHDVEEFAKQFPTIGFEKATMKYNK

SEQ ID NO: 4574 - DNA, 1557 bp, Solanum tuberosum
  CDS (1)..(1557)
atggctatggcaatagctcttcggaggctttccgctacagttgacaaaccggttaagagtctctacaatggtggctctctctattacatgtcatcactgcctaatgaagctgtatacgacaaagaaaaatctggggtagcttggccaaagcaactgaatgctccactagaggttgttgatcctgagattgctgacattattgagcatgagaaagcacgccaatggaaggggctcgaactcattccatcagaaaatttcacttctgtttcggtgatgcaagcagttggatcagtcatgactaacaagtacagtgaaggatatcctggtgccagatactatgggggaaatgagtacatagacatggcagaaaccttatgccagaaacgtgctttggaagcattcaggttggatcctgcaaaatggggagtgaatgtgcagcctctatcaggatcacccgctaattttcaagtttacactgcattattaaaacctcatgagagaatcatggctcttgatcttcctcatggtggacatctttctcatggatatcagactgatacaaagaagatatctgcagtctctatattctttgagacaatgccatacagactcgatgagagcactggctatattgactatgaccagctcgagaaaagtgccacactctttcggccaaaattgattgttgctggtgctagtgcctacgcacgtctttatgactatgacagaatccgaaaggtttgcaacaaacagaaagctattttgttagcagatatggcacacattagtggattggttgcagctggagttatcccatcaccatttgattatgctgatgttgtcactaccacaacccacaagtcccttcgtggccctcgtggtgctatgattttttacaggaagggtgttaaagaggttaacaagcaaggcaaggaggttttctacgactatgaagacaaaattaaccaggcagtctttcctggacttcaaggtggtccccacaatcacaccatcactggcttggcagttgccttgaaacaggccactactccagaatacagagcttaccaagagcaagttctcagcaactcctcaaaatttgcccaggctttaggggagaagggctatgaacttgtctctggaggaaccgataatcacttggttttggtgaacatgaaaaacaagggtattgatggttccagggttgaaaaagtcttggaagctgtacatattgcagccaacaagaacaccgttcctggagatgtatctgccatggtccctggtggcatcagaatgggaactcctgcactcacttctcggggatttcttgaggaagattttgttaaagttgctgatttctttgatgctgctgtgaagatagcagtgaaagtaaaggctgaaactcaagggacaaagttgaaagactttgtagcaacactagaatccagtgctccaatcaagtctgaaattgcaaaactccgtcatgatgtggaggagtatgctaagcagttccctacaattgggtttgagaaagaaaccatgaagtacaaaaactaa

SEQ ID NO: 4575 - protein, 518 aa, Solanum tuberosum
MAMAIALRRLSATVDKPVKSLYNGGSLYYMSSLPNEAVYDKEKSGVAWPKQLNAPLEVVDPEIADIIEHEKARQWKGLELIPSENFTSVSVMQAVGSVMTNKYSEGYPGARYYGGNEYIDMAETLCQKRALEAFRLDPAKWGVNVQPLSGSPANFQVYTALLKPHERIMALDLPHGGHLSHGYQTDTKKISAVSIFFETMPYRLDESTGYIDYDQLEKSATLFRPKLIVAGASAYARLYDYDRIRKVCNKQKAILLADMAHISGLVAAGVIPSPFDYADVVTTTTHKSLRGPRGAMIFYRKGVKEVNKQGKEVFYDYEDKINQAVFPGLQGGPHNHTITGLAVALKQATTPEYRAYQEQVLSNSSKFAQALGEKGYELVSGGTDNHLVLVNMKNKGIDGSRVEKVLEAVHIAANKNTVPGDVSAMVPGGIRMGTPALTSRGFLEEDFVKVADFFDAAVKIAVKVKAETQGTKLKDFVATLESSAPIKSEIAKLRHDVEEYAKQFPTIGFEKETMKYKN

SEQ ID NO: 4576 - DNA, 1554 bp, Flaveria pringlei
  CDS (1)..(1554)
atggcgatggcatcggctcttcgtaggctctcatcttcttcaaacaaaccgttgcagcgtctgttcaatggcggtcatctatattcaatgtcatcgttgcctagtgaagctgtgtatgagaaagaaaggcctggcgtcacttggccgaaacagttgaacgctccacttgaggttggggatcctgagattgctgatattattgagcttgaaaaggctcggcaatggaagggtcttgaactcatactctcagagaactttacctccctgtcagtgatgcaagcagttggatctgtgatgactaacaaatacagtgaagggtatccgggtgctagatactatggtggaaatgagtacattgacatggcggaaaccttgtgtcagaagcgtgccttggaagcctttcggttagatgctgcaaaatggggagtgaatgtgcaacctctttcagggtcaccagcaaatttccatgtctatactgcattattaaaggctcatgacagaatcatggcacttgatcttcctcatggtggccatctgtcacatggttatcagactgatacaaagaagatatctgcagtatccatatttttcgagactatgccttacagattgaacgagagcaccggctatattgattatgaccagttggagaaaagtgccacacttttcaggccaaaactgatagttgctggcgcaagtgcttatgctagattatatgactatgcacgtattcgtaaggtttgtgacaagcaaaaagccattttgttagcagatatggcacacattagtgggttggtagcagctggtgtcatcccatccccatttgactatgcagatgttgtgaccacaaccacccacaagtcacttcggggcccacgaggcgccatgattttcttcaggaaaggggtgaaagaagtcaacaaacaaggcaaagaggttctctatgattatgaagacaaaatcaaccaggctgtctttcctgggcttcaaggtggcccacacaatcacacaatcactggattggcagttgcattgaaacaggcaacaacagcagaatataaggcatatcaagagcaagtcatgagtaattgtgccaaatttgcagagactctagttaagagcggatatgaacttgtttccgggggaacagagaaccacttagtgttggtcaatttgaagaataagggaattgatggttcaagggttgaaaaggtgttggaagctgttcacattgcagccaataaaaacactgttcctggtgatgtgtctgccatggttcctggtggcatcagaatgggaacccctgctctcacttctaggggatttgttgaagaggattttgctaaagttgcctacctctttgaccttgctgtaaaattggctgtgaagatcaagggtgaagcccaagggacaaagttgaaggactttgtggctgcaatgcagtccagtgccttccaatcagaaatttcaaagctacgccacgacgtggaggagtatgccaaacaattcccaacaatcgggtttgagaaagaaaccatgaaatacaaaaactga

SEQ ID NO: 4577 - protein, 517 aa, Flaveria pringlei
MAMASALRRLSSSSNKPLQRLFNGGHLYSMSSLPSEAVYEKERPGVTWPKQLNAPLEVGDPEIADIIELEKARQWKGLELILSENFTSLSVMQAVGSVMTNKYSEGYPGARYYGGNEYIDMAETLCQKRALEAFRLDAAKWGVNVQPLSGSPANFHVYTALLKAHDRIMALDLPHGGHLSHGYQTDTKKISAVSIFFETMPYRLNESTGYIDYDQLEKSATLFRPKLIVAGASAYARLYDYARIRKVCDKQKAILLADMAHISGLVAAGVIPSPFDYADVVTTTTHKSLRGPRGAMIFFRKGVKEVNKQGKEVLYDYEDKINQAVFPGLQGGPHNHTITGLAVALKQATTAEYKAYQEQVMSNCAKFAETLVKSGYELVSGGTENHLVLVNLKNKGIDGSRVEKVLEAVHIAANKNTVPGDVSAMVPGGIRMGTPALTSRGFVEEDFAKVAYLFDLAVKLAVKIKGEAQGTKLKDFVAAMQSSAFQSEISKLRHDVEEYAKQFPTIGFEKETMKYKN

SEQ ID NO: 4578 - DNA, 1530 bp, Brassica napus
  CDS (1)..(1530)
atgtcgttggctcttcgcagactctcctcttccctcaagaagcccatcttctccaatggcggttccttccgttctatgtcgtctacgccaacctcggagagatctcgttccacttggataagccaactcaacgcacctctggaagaaatcgatcccgaaatcgcagatatcatcgagcttgagaaggctaggcaatggaagggatttgagcttataccctcagagaacttcacctctgcctcggttatggaagctgtgggctctgttatgactaacaagtatagtgaaggttaccctggtgctagatactatggaggcaatgagtacattgacatggctgagtcactctgtcaaaaacgcgcattagaagcttttcagttagatccttccaaatggggagtcaatgtgcagtctttatcaggatcaccagctaacttccaagtttacaccgcacttctgaaacctcacgaaagaatcatggcacttgacttgcctcacggtggccatctttctcatggttatcagactgacacgaagaaaatatctgctgtatccatcttttttgagacaatgccatacagattggatgagaacactggctacattgattatgatcagctagaaaagagtgccgtgcttttcagacccaaacttatcgttgcaggtgcaagtgcttatgctcgtctgtatgactatgcacgtatccgtacggtctgtgacaagcaaaaggcggttatgctggctgacatggctcatattagtgggttggttgctgctggtgtgattccttctccttttgagtatgcagatgttgttaccactacaactcacaaatcgcttcgtggtcctagaggggctatgatattctttaggaaggggttgaaagaggttaacaaacaaggaaaagaggtcatgtatgactatgaagacagaattaacgcagctgtttttcctggactgcaaggtggtccacataatcacactataacaggtctagcagttgctctgaagcaggtgaaaacaccagagtataaggcctaccaggatcaagttctccgtaattgttcaaagttcgcagagactttgctatcaaaaggatatgacttagtgtctggaggcactgagaatcacttagttttggtgaatttgaaaaataagggaatcgatggatcaagagtggaaaaagtattagaatcagtacatattgcagcaaacaagaacactgttcccggtgatgtttctgctatggttcctggcggcatccgtatgggaacaccagctctgacatcaagaggattcattgaggaagattttgcaaaagtggctgaatactttgatttagccgtcaagatagccttgaagatcaaggcagagtctcaaggaacaaagctgaaggactttgtagcaacaatgcaatcaaatgagaagttacagtcagagatggcaaagctgcgtgagatggttgaagaatatgctaaacagttcccaaccattgggttcgagaaagagacgatgagatacaaagaatag

SEQ ID NO: 4579 - protein, 509 aa, Brassica napus
MSLALRRLSSSLKKPIFSNGGSFRSMSSTPTSERSRSTWISQLNAPLEEIDPEIADIIELEKARQWKGFELIPSENFTSASVMEAVGSVMTNKYSEGYPGARYYGGNEYIDMAESLCQKRALEAFQLDPSKWGVNVQSLSGSPANFQVYTALLKPHERIMALDLPHGGHLSHGYQTDTKKISAVSIFFETMPYRLDENTGYIDYDQLEKSAVLFRPKLIVAGASAYARLYDYARIRTVCDKQKAVMLADMAHISGLVAAGVIPSPFEYADVVTTTTHKSLRGPRGAMIFFRKGLKEVNKQGKEVMYDYEDRINAAVFPGLQGGPHNHTITGLAVALKQVKTPEYKAYQDQVLRNCSKFAETLLSKGYDLVSGGTENHLVLVNLKNKGIDGSRVEKVLESVHIAANKNTVPGDVSAMVPGGIRMGTPALTSRGFIEEDFAKVAEYFDLAVKIALKIKAESQGTKLKDFVATMQSNEKLQSEMAKLREMVEEYAKQFPTIGFEKETMRYKE

SEQ ID NO: 4580 - DNA, 1416 bp, Triticum aestivum
  CDS (1)..(1416)
atggactccgtcgcgtcgtgggggctgaccccgctggcggacgcggacccggacgtcttcgacctcatcgagcgggagaagcggcgccagcggagcgggatcgagctcatcgcctcggagaacttcacctccttcgccgtcatcgaggcgctcggctcggccctcaccaacaagtactccgagggcatgccgggggcgcgctactacggcggcaacgacgtcatcgacgagatcgagaacctctgccgcgaccgcgccctcgccgccttccgcctcgacgccgcctcctggggcgtcaacgtgcagccctactccggctcgcccgccaacttcgccgcctacaccgcgctcctcaacccgcacgaccggatcatggggctcgacctcccctcgggcggccacctcacccacggctactacaccgccggggggaagaagatctccgccacctccatctacttcgagagcctgccctacaaggtcagcgccgccaacggctacatcgactacgacaagctcgaggagaaggccatggacttccgccccaagctcatcatctgcggaggcagcgcctaccccagggactgggactacgccaggctcagggccgtcgccgacaaggtcggggccatgctcctctgcgacatggcgcacatcagcggactggtcgccgcgcaggaagctgcaaatccttttgagttctgcgatgtggttaccactacaacacacaagtctctccggggaccgagggctggcatgatcttctacaggaaaggccctaagcctgcgaagaagggccagcctgagggtgctgtgtatgactatgaggacaagatcaactttgcggtgttcccatcgctccagggtggtccccacaatcaccagattgctgcccttgcagttgccctgaagcaaactttgactcctggattcaaggcctatgcaaagcaggtcaaggccaacgctgttgccgttggaaaatatctcatgagcaagggttacaagatggtaaccgatggaactgacaaccatcttgttctatgggatctccgccctcttggcttgactggaaacaaggtcgaaaagatgtgtgacctttgcagcattacattgaacaagaatgctgtcttcggtgacagcagtgcattgtccccgggtggtgtccgcattggtgctcccgcgatgacttccaggggtctggtcgagaaggacttcgagcagatcgccgagttcctccaccaggctgtgaccatctgcctgaacatccagaaggagcacggcaagctgctcaaggacttctccaagggcctggtgaacaacaaggacatcgagaacctcaaggttgaggtcgagaagtttgccctctccttcgacatgcctgggttctcgctcgagagcatgaagtacaaggagtag

SEQ ID NO: 4581 - protein, 471 aa, Triticum aestivum
MDSVASWGLTPLADADPDVFDLIEREKRRQRSGIELIASENFTSFAVIEALGSALTNKYSEGMPGARYYGGNDVIDEIENLCRDRALAAFRLDAASWGVNVQPYSGSPANFAAYTALLNPHDRIMGLDLPSGGHLTHGYYTAGGKKISATSIYFESLPYKVSAANGYIDYDKLEEKAMDFRPKLIICGGSAYPRDWDYARLRAVADKVGAMLLCDMAHISGLVAAQEAANPFEFCDVVTTTTHKSLRGPRAGMIFYRKGPKPAKKGQPEGAVYDYEDKINFAVFPSLQGGPHNHQIAALAVALKQTLTPGFKAYAKQVKANAVAVGKYLMSKGYKMVTDGTDNHLVLWDLRPLGLTGNKVEKMCDLCSITLNKNAVFGDSSALSPGGVRIGAPAMTSRGLVEKDFEQIAEFLHQAVTICLNIQKEHGKLLKDFSKGLVNNKDIENLKVEVEKFALSFDMPGFSLESMKYKE

SEQ ID NO: 4582 - DNA, 1416 bp, Linum usitatissimum
  CDS (1)..(1416)
atggatccagtcaaggtatggggaaacactcctttgcaaaccgtggaccctgagatccacgacctcatcgagaaggagaagcgccgtcaatgccgcgggatcgagctcatcgcctccgagaacttcacctccttcgccgtcatcgaagccctcggcagcgccctcaccaacaagtactccgagggcatgcccggaaatcgctactacggcggcaacgagtacatcgatcagatcgagaacctctgcgtatcccgcgccttgaccgctttccacttggacgacaccaagtggggcgtcaatgtccagccttactccggctcccctgccaatttcgccgcctacaccgccattctcaagccccatgatcgtatcatgggattggatctcccatctggtggtcatctgactcatggatactacacctccagcgggaagaagatctccgcaacttccatttacttcgagagcttgccttacaaggtgaattccagcactggctacatcgactacgataagctggaagagaaggctttggatttcaggccacggttgatcatctgtggtggcagtgcttaccctagggactgggattacgctagatttagggctattgctgataaatgcggtgctcttttgctctgcgatatggctcacattagcggcctagttgctgctcaggaagctgccaacccctttgagttctgtgacattgtcacaaccaccacccacaagagtttgaggggtcccagagctggtatgatcttctaccgcaagggacctaagccagccaacaagaagggtcagcctcaaggcaactatgaattcgaggacaacatcaacttctctgtcttccctgccctccagggaggcccccataatcaccagatcggtgcccttgctgttgcattgaagcaggccgcgacccctgcattcaaggcctatgccaagcaagtgaaggccaatgctgttgctgttgggaactatttgatgagcaaaggctacaccttggtcactggaggaactgagaaccaccttgttctgtgggatctgagacctcttgggttgactggtaacaaggtcgagaaggtttgcgatctctgtaacatcactgtgaacaagaatgcagtgttcggagacagcagtgcattgtccccaggaggcgtgagagttggggcacctgccatgacttcaagagggttgttggagaaagactttgagcaaatcggagagttcctccaccgtgctgtggccttaacactgagcatccagaaggaatatgggaagttactgaaggacttcaacaagggcctggagaacaacaaagagatcgaagcattgaaagctgatgttgagaaatttgcaggttcatttgatatgcctggtttcctcatgtctgagatgaagtaccaggagtaa

SEQ ID NO: 4583 - protein, 471 aa, Linum usitatissimum
MDPVKVWGNTPLQTVDPEIHDLIEKEKRRQCRGIELIASENFTSFAVIEALGSALTNKYSEGMPGNRYYGGNEYIDQIENLCVSRALTAFHLDDTKWGVNVQPYSGSPANFAAYTAILKPHDRIMGLDLPSGGHLTHGYYTSSGKKISATSIYFESLPYKVNSSTGYIDYDKLEEKALDFRPRLIICGGSAYPRDWDYARFRAIADKCGALLLCDMAHISGLVAAQEAANPFEFCDIVTTTTHKSLRGPRAGMIFYRKGPKPANKKGQPQGNYEFEDNINFSVFPALQGGPHNHQIGALAVALKQAATPAFKAYAKQVKANAVAVGNYLMSKGYTLVTGGTENHLVLWDLRPLGLTGNKVEKVCDLCNITVNKNAVFGDSSALSPGGVRVGAPAMTSRGLLEKDFEQIGEFLHRAVALTLSIQKEYGKLLKDFNKGLENNKEIEALKADVEKFAGSFDMPGFLMSEMKYQE

SEQ ID NO: 4584 - DNA, 1416 bp, Zea mays
  CDS (1)..(1416)
atggaccccgtcgccacatgggggctaaccccgcccgcgggcgccgacccggagatctacgacctcctggagcgcgagaagcggcgccagcgtcgcggcatcgagctcatcgcctccgagaacttcacctccttcgccgtcatggaggcgctcggctccgcgctcactaacaagtactccgagggcatgcccggcgcccgctactacggcggcaacgacgtcatcgacgagatcgagaacctctgccggtcacgcgcgctcgctgccttccaccttgacgccgcgtcctggggcgtcaacgtgcagccctactcgggctcccccgccaacttcgccgcctacaccgcgctgctcaacccgcacgaccggatcatggggctcgaccttccctccggcggacacctcactcacgggtactacacggccggcggtaagaagatctccgccacctcgatctactttgagagcctgccgtacaaggtgagcgccgcaacggggtacatcgactacgagaagctcgaggagaaggcacttgacttccgccccaagctcatcatctgcggtggcagtgcgtacccgagggactgggattacgccaagctcagggccgtcgccgacaaggtcggggccctgctgctctgcgacatggcgcacatcagcgggctcgtcgccgcgcaggaagctgcaaatccttttgaatattgtgatgtggttaccacaaccacgcacaagtccctcagagggccaagggctggcatgatcttctacaggaaaggccctaagccccccaagaagggccagcctgagggtgctgtttatgattacgaagacaagatcaactttgcagtgttcccatctctccaaggtggccctcacaaccaccagattgctgcacttgctgttgctctacagcaaactatgtcgcctggcttcaaggcctatgcaaagcaagtgaaggccaatgctgttgcaattggaaactatctcatgagcaagggctacaagatggtgactgatggaactgagaaccaccttgttctctgggatctccgcccccttggcttgactggaaacaaggtcgaaaagctatgtgatctttgccacatcacattgaacaagaatgctgtcttcggtgacagcagtgcattgtctccgggtggtgtccgcattggcgcgccagcaatgacctcgaggggtctactggagaaggatttcgagcagattggggagttcctccaccaggcagtgaccatctgcctgaacatccagaaggagtacggcaagctcctcaaggacttcaacaagggcctggtgaacaacaaggacatcgagaacctcaaggtccaggtggagaagtttgccgactccttcgacatgcctgggttcacgcttgagagcatgaaatacaaggagtag

SEQ ID NO: 4585 - protein, 471 aa, Zea mays
MDPVATWGLTPPAGADPEIYDLLEREKRRQRRGIELIASENFTSFAVMEALGSALTNKYSEGMPGARYYGGNDVIDEIENLCRSRALAAFHLDAASWGVNVQPYSGSPANFAAYTALLNPHDRIMGLDLPSGGHLTHGYYTAGGKKISATSIYFESLPYKVSAATGYIDYEKLEEKALDFRPKLIICGGSAYPRDWDYAKLRAVADKVGALLLCDMAHISGLVAAQEAANPFEYCDVVTTTTHKSLRGPRAGMIFYRKGPKPPKKGQPEGAVYDYEDKINFAVFPSLQGGPHNHQIAALAVALQQTMSPGFKAYAKQVKANAVAIGNYLMSKGYKMVTDGTENHLVLWDLRPLGLTGNKVEKLCDLCHITLNKNAVFGDSSALSPGGVRIGAPAMTSRGLLEKDFEQIGEFLHQAVTICLNIQKEYGKLLKDFNKGLVNNKDIENLKVQVEKFADSFDMPGFTLESMKYKE

SEQ ID NO: 4586 - DNA, 1554 bp, Brassica napus
  CDS (1)..(1554)
atggcgatggctatggctcttcggaggctttcttcttcagttgacaaacctattcgtcctcttatcagatcatcttcatgctacatgtcttctttaccaagtgaagctgttgatgacaaggagaggtctcgtgtcacttggccaaaacagcttaacgcatctttggaggaagttgatcctgagattgctgacattattgagcatgagaaagctagacaatggaagggacttgaactcattccatctgagaatttcacatctgtctcggtgatgcaagctgttggctctgtgatgactaacaagtacagtgaagggtaccctggtgctagatactatggaggaaatgagtacatagacatggcagagactttatgccaaaagcgcgctcttgaggctttcagattagatcctgaaaagtggggagtgaatgtgcaacccttgtctggatctcctgccaacttccatgtctacactgcattgctcaaacctcatgagagaatcatggcacttgatcttcctcatggtggtcatctttctcatggttatcagactgacaccaagaagatatctgctgtgtctatcttctttgagacaatgccttatcgcttggacgagagcactggctacattgactatgatcagatggagaaaagtgctactcttttcaggccaaaactgattgttgctggtgcgagtgcttatgctcgattgtatgactatgcccgcatccgaaaggtgtgtaacaagcaaaaagctgtgatgctagcagatatggcacacatcagtggtttggttgctgctggtgtaatcccttcaccgttcgactatgcagatgttgtgaccaccacaactcacaagtcacttcgtggaccccgtggagccatgattttctacagaaagggtgttaaggaaattaacaaacaagggaaagaggttttgtatgattttgaagacaagataaatcaagctgtcttccctggtcttcaaggtggtccacataaccacactattacaggactagctgttgctttaaaacaggcaactacttcagagtacaaagcataccaagagcaagtcctgagtaactctgcaaagttcgctcagactctgatggagaaaggttatgaacttgtttctggtggaaccgacaaccatctggttctagtgaacctgaagcccaagggaattgatggatctagagttgagaaagtgttggaagctgttcacattgcatcaaacaaaaacactgttcctggagatgtttctgccatggttcctggtggaatcagaatgggtacacctgctctcacttccagaggctttgttgaggaagactttgctaaagtagctgaatactttgacaaagctgtaacgttggctctcaaagtcaaatctgaagctcaagggaccaagctgaaagactttgtgtcagcaatggaagcttcttcaaccattcaatcagagattgctaagctgcgccatgaagttgaggaatttgctaaacagtttccaacaattgggtttgagaaagaaaccatgaagtacaagaactaa

SEQ ID NO: 4587 - protein, 517 aa, Brassica napus
MAMAMALRRLSSSVDKPIRPLIRSSSCYMSSLPSEAVDDKERSRVTWPKQLNASLEEVDPEIADIIEHEKARQWKGLELIPSENFTSVSVMQAVGSVMTNKYSEGYPGARYYGGNEYIDMAETLCQKRALEAFRLDPEKWGVNVQPLSGSPANFHVYTALLKPHERIMALDLPHGGHLSHGYQTDTKKISAVSIFFETMPYRLDESTGYIDYDQMEKSATLFRPKLIVAGASAYARLYDYARIRKVCNKQKAVMLADMAHISGLVAAGVIPSPFDYADVVTTTTHKSLRGPRGAMIFYRKGVKEINKQGKEVLYDFEDKINQAVFPGLQGGPHNHTITGLAVALKQATTSEYKAYQEQVLSNSAKFAQTLMEKGYELVSGGTDNHLVLVNLKPKGIDGSRVEKVLEAVHIASNKNTVPGDVSAMVPGGIRMGTPALTSRGFVEEDFAKVAEYFDKAVTLALKVKSEAQGTKLKDFVSAMEASSTIQSEIAKLRHEVEEFAKQFPTIGFEKETMKYKN

SEQ ID NO: 4588 - DNA, 1530 bp, Brassica napus
  CDS (1)..(1530)
atggcgttggctcttcgcagactctcctcttccctcaagaagcccatcttctccaatggcggttccttccgttctatgtcgtctacgccagcctcggagagatctcgttccacttggataagccaactcaacgcacctctggaagaaatcgatcccgaaatcgcagatatcatcgagctcgagaaggctaggcaatggaagggatttgagcttataccgtcagagaacttcacatctgcctcggtgatggaagctgtgggctctgttatgactaacaagtatagtgaaggttaccctggtgctagatactatggaggcaatgagtacattgacatggctgagtcattatgtcaaaaacgcgcacttgaagcttttcacttagatccttccaaatggggagtcaatgtgcagtctttatcaggatcaccagctaacttccaagtttacactgcattgctgaagcctcacgaaagaatcatggcacttgacttgcctcatggtggccatctttctcatggttatcagactgacacgaagaaaatatctgctgtatccatcttttttgagacaatgccatacagattggacgagaacactggttacattgattatgatcagctagagaaaagtgccgtgcttttcagacctaaactgattgttgcaggtgcaagtgcttatgctcgtctatatgactatgcacgtattcgtaaggtctgtgacaagcaaaaggcggatatgctggctgacatggctcatattagtgggttggttgctgctggtgtgataccttctcctttcgagtatgcagatgttgttaccactacaactcacaaatcgcttcgtggtccaagaggggctatgatattctttacgaaggggttgaaagaggttaacaaacaaggaaaagaggtcatgtatgactatgaagacagaattaacgcagctgtttttcctggactgcaaggtggtccacataatcacacaataacaggtctagcagttgctctgaagcaggtgaaaacaccagagtataaggcctaccaggatcaagttctccgcaactgctcaaagtttgcagagactttgctatcaaaaggatatgacttagtatctggaggcactgacaatcatttagtcttggtgaacttgaaaaacaagggaatagatggatcaagagtggaaaaagtattagaatcagtacatattgcagcaaacaaaaacactgttccgggtgacgtttccgctatggttccaggcggcatccgtatgggaacaccagctctcacatcaagaggattcattgaggaagattttgcaaaagtagctgaatacttcgatttagccgtcaagatagccttgaagatcaaggcagagtctcaaggaacaaagctgaaggactttgtagcaacgatgcaatcaaatgagaagttacagtcagagatggcaaagctgcgtgagatggttgaagaatatgctaaacagttcccaaccattgggttcgagaaagagacgatgagatacaaagagtag

SEQ ID NO: 4589 - protein, 509 aa, Brassica napus
MALALRRLSSSLKKPIFSNGGSFRSMSSTPASERSRSTWISQLNAPLEEIDPEIADIIELEKARQWKGFELIPSENFTSASVMEAVGSVMTNKYSEGYPGARYYGGNEYIDMAESLCQKRALEAFHLDPSKWGVNVQSLSGSPANFQVYTALLKPHERIMALDLPHGGHLSHGYQTDTKKISAVSIFFETMPYRLDENTGYIDYDQLEKSAVLFRPKLIVAGASAYARLYDYARIRKVCDKQKADMLADMAHISGLVAAGVIPSPFEYADVVTTTTHKSLRGPRGAMIFFTKGLKEVNKQGKEVMYDYEDRINAAVFPGLQGGPHNHTITGLAVALKQVKTPEYKAYQDQVLRNCSKFAETLLSKGYDLVSGGTDNHLVLVNLKNKGIDGSRVEKVLESVHIAANKNTVPGDVSAMVPGGIRMGTPALTSRGFIEEDFAKVAEYFDLAVKIALKIKAESQGTKLKDFVATMQSNEKLQSEMAKLREMVEEYAKQFPTIGFEKETMRYKE

SEQ ID NO: 4590 - DNA, 1416 bp, Brassica napus
  CDS (1)..(1416)
atggatccagtctcagcctggggaaacacccctcttgtcaccgtcgatccagagatccacgatctcatcgaaaaggagaagcgtcgtcaatgccgcggaatcgaactcatcgcctccgagaacttcacttccttcgccgtcatcgaagctctcggaagcgcactcaccaacaaatactccgaaggcatgcctggcaaccgttactacggaggtaacgagttcatcgaccagatcgagaatctctgccagtcacgcgctctcgaagccttccgtctcgattccgcatcatggggcgtcaatgttcagccctactccggatctccggccaatttcgccgcctacaccgccttgcttcagcctcacgatcgtatcatgggcctcgatctaccttcaggtggtcatctcacgcatggatactatacgtccggtgggaagaagatctctgctacttcgatctactttgagagccttccgtataaggtcaacttcaccactggttacattgattacgataagctcgaggagaaggccatggatttcaggcctaagttgctcatctgtggtggtagtgcctaccctagggattgggattacgctagattgagagctgttgctgataaggttggagctctcttgctctgtgacatggctcacatcagtggactcgttgctgctcaggaagctgcaaacccatttgagtactgtgacgttgtgacaaccacaacccacaagagtttgaggggtccaagggctggtatgatcttctacaggaagggcccaaaaccaccaaagaagggacaacccgagggtgcagtctatgactttgaggacaaaatcaactttgctgtgttccctgcgcttcaaggtggtcctcacaaccaccagatcggtgctctagctgttgcgttgaagcaggctaacactcctggtttcaaggtctatgcgaaacaggtgaaagccaatgctgttgcccttgcaaactacctgatgggtaagggatacagtatcgtaaccggtggaactgagaaccaccttgttctttgggatcttcgccctcttggattgaccggtaacaaggttgagaagctttgcgatctgtgcaacattactttgaacaagaatgctgtctttggagacagcagtgctcttgctcctggaggtgtaagaatcggtactcctgcgatgacatcaaggggattggtggagaaggactttgagatgataggagagttcttgagccgatcagtgacactgacattgaacatccagaaggagcatggtaaactgttgaaggacttcaacaagggtttggtgaacaacaaagagatcgaggagctcaaggctgatgtcgagaagttctcagcctcctatgagatgcctggattcctcatgtctgcgatgaagtaccaggattag

SEQ ID NO: 4591 - protein, 471 aa, Brassica napus
MDPVSAWGNTPLVTVDPEIHDLIEKEKRRQCRGIELIASENFTSFAVIEALGSALTNKYSEGMPGNRYYGGNEFIDQIENLCQSRALEAFRLDSASWGVNVQPYSGSPANFAAYTALLQPHDRIMGLDLPSGGHLTHGYYTSGGKKISATSIYFESLPYKVNFTTGYIDYDKLEEKAMDFRPKLLICGGSAYPRDWDYARLRAVADKVGALLLCDMAHISGLVAAQEAANPFEYCDVVTTTTHKSLRGPRAGMIFYRKGPKPPKKGQPEGAVYDFEDKINFAVFPALQGGPHNHQIGALAVALKQANTPGFKVYAKQVKANAVALANYLMGKGYSIVTGGTENHLVLWDLRPLGLTGNKVEKLCDLCNITLNKNAVFGDSSALAPGGVRIGTPAMTSRGLVEKDFEMIGEFLSRSVTLTLNIQKEHGKLLKDFNKGLVNNKEIEELKADVEKFSASYEMPGFLMSAMKYQD

SEQ ID NO: 4592 - DNA, 1590 bp, Brassica napus
  CDS (1)..(1590)
atgcaagcttgttgtggaggtacttcaatggggtctcttcagcaacctgtacgggttcaaagacctgtctttgctccaataacctccccagtgactaaattctcccagcaactgaagctcagtttcccgagaccttgcccttctttgtttctgagaaaaagctcggtctttgaaaggagagcgtcttcagtctcagcacctgatgtggagactaccagcaatgagatcccattcgaggactacggtcgtcgtgaagtggatccagaggtcgatgagataatcaccaaggagaaaaacagacagttcaggagcttggagcttattgcgtccgagaatttcacttctcgagctgttatggagactgttggatcatgccttaccaacaagtactccgagggtcttcctggtaaaaggtactatggtggcaatgagtttatagatcagttggagacactttgccagaaccgtgctttagcaaccttccggttagattctaccaaatggggtgcgaatgatcagccgttatctggttcacctgcaaactttgctgtctacaccgccatactcaagcctcatgatcgtatcatgggtttggatttacctcatggtggacatctatcacatgggttcatgactgccaaaagacgtgtgtctggaacttcgatatactttgagtccatgccttatcggcttgatgaatcaacaggcattgtggactatgatatgctcgagaaaactgctgtactgttccgaccaaagcttataattgcaggagctagtgcgtacagccgagactttgactatcctcgcatgaggaagatcgcagactcagttggtgcttttctgatgatggatatggctcacatcagtggacttgtggctgcttctgtggtagctgatccttttgagtattgtgatattgttacaacaaccactcacaagtctttgagaggtccaagaggtggaatgatcttcttcaagaaggatccagttaatggggttgaacttgaatctgcaattaacaacgctgtcttccctggtctgcagggtggacctcataaccacacaattggaggattagcagtctgcttgaaacacgcacagtcgccagaattcaaggcttaccagaaaagagttgtggctaactgtagagctctagctaaccgattggttgaactcgggtttaagctggtttctggtggcagcgacaaccacctggtcctcgtggatcttagaccattgggaatggatggtgcacgggtcgagaaaatcttagacatggcatctattacactcaacaagaactctgtccctggggacaagagtgcgttggttccagggggaataaggataggaacgcctgcaatgacgacaagaggactgtcagagaaagactttgtggtggttgctgacttgatcaaggaaggtgtggagataacaatggaagccaagaagctggtttcaggaacaaagcttggagagttcaccaagcttgtgacatctcctgagttcccattgagagagaaagtggagactctcaaggagagaggcgaatcattcacccatcgtttccccattcctggagtgtga

SEQ ID NO: 4593 - protein, 529 aa, Brassica napus
MQACCGGTSMGSLQQPVRVQRPVFAPITSPVTKFSQQLKLSFPRPCPSLFLRKSSVFERRASSVSAPDVETTSNEIPFEDYGRREVDPEVDEIITKEKNRQFRSLELIASENFTSRAVMETVGSCLTNKYSEGLPGKRYYGGNEFIDQLETLCQNRALATFRLDSTKWGANDQPLSGSPANFAVYTAILKPHDRIMGLDLPHGGHLSHGFMTAKRRVSGTSIYFESMPYRLDESTGIVDYDMLEKTAVLFRPKLIIAGASAYSRDFDYPRMRKIADSVGAFLMMDMAHISGLVAASVVADPFEYCDIVTTTTHKSLRGPRGGMIFFKKDPVNGVELESAINNAVFPGLQGGPHNHTIGGLAVCLKHAQSPEFKAYQKRVVANCRALANRLVELGFKLVSGGSDNHLVLVDLRPLGMDGARVEKILDMASITLNKNSVPGDKSALVPGGIRIGTPAMTTRGLSEKDFVVVADLIKEGVEITMEAKKLVSGTKLGEFTKLVTSPEFPLREKVETLKERGESFTHRFPIPGV

SEQ ID NO: 4594 - DNA, 1416 bp, Glycine max
  CDS (1)..(1416)
atggatccagtgagcgtgtggggtaacacgcccttggcgacggtggatcccgagatccatgacctcatcgagaaggagaagcaccgccaatgccgcggcatcgagctcatcgcctccgagaacttcacctccttcgcagtcatcgaggccctcggcagcgccctcaccaacaaatactccgagggcatgcccggcaaccgctactacggcggcaacgaattcatcgaccagatcgaaaacctctgccgctcacgcgccctccaggccttccacctcgacgcccaatcctggggcgtcaatgtgcagccctactccggctcccctgccaacttcgccgcctacaccgccgtcctcaacccccacgaccgcatcatggggctggatctcccctccggcggccacctcacccacggctactacacctccggcggcaagaagatctccgccacctccatttacttcgagagcctcccttacaaagtaaactccaccaccggctacatcgactacgaccgcttggaggaaaaagccctagacttcaggcccaaattgataatctgcggtggcagcgcttaccctcgcgattgggactacaaacgcttcagggaaattgcggataagtgcggggcattgcttctctgcgacatggcgcacactagcggccttgtggccgcgcaggaagtgaacagccccttcgagtattgcgacattgtgaccaccaccacgcataagagcttgcggggtccacgggcggggatgatcttttaccggaagggcccgaagccgccgaagaaggggcagccggagaacgcggtttatgatttcgaggacaagatcaactttgcggtgttcccttcgctgcagggtgggccccacaaccaccagatcggggctcttgccgtggcgctgaagcaggccgcgtcgcccgggtttaaggcctacgccaagcaggttaaggccaacgccgttgcgcttgggaattacttgatggggaaagggtacagtcttgtcactggaggcacggagaaccatcttgtcttgtgggatctcagacctcttggattgactgggaataaggtggagaaactctgtgatctctgcaacattactgttaataagaacgcagtttttggtgatagcagtgccttggcccccggtggagtgcgaattggggcccctgccatgacttctaggggtttggttgaaaaggactttgagcagattggtgagttccttcaccgtgctgtgactctcacactggagatccagaaggagcatggcaaacttctcaaggatttcaacaagggcctcgtcaacaacaaggccattgaagatctcaaagctgatgttgagaagttctctgccacatttgacatgcctggcttcctggtatctgaaatgaagtacaaggattag

SEQ ID NO: 4595 - protein, 471 aa, Glycine max
MDPVSVWGNTPLATVDPEIHDLIEKEKHRQCRGIELIASENFTSFAVIEALGSALTNKYSEGMPGNRYYGGNEFIDQIENLCRSRALQAFHLDAQSWGVNVQPYSGSPANFAAYTAVLNPHDRIMGLDLPSGGHLTHGYYTSGGKKISATSIYFESLPYKVNSTTGYIDYDRLEEKALDFRPKLIICGGSAYPRDWDYKRFREIADKCGALLLCDMAHTSGLVAAQEVNSPFEYCDIVTTTTHKSLRGPRAGMIFYRKGPKPPKKGQPENAVYDFEDKINFAVFPSLQGGPHNHQIGALAVALKQAASPGFKAYAKQVKANAVALGNYLMGKGYSLVTGGTENHLVLWDLRPLGLTGNKVEKLCDLCNITVNKNAVFGDSSALAPGGVRIGAPAMTSRGLVEKDFEQIGEFLHRAVTLTLEIQKEHGKLLKDFNKGLVNNKAIEDLKADVEKFSATFDMPGFLVSEMKYKD

SEQ ID NO: 4596 - DNA, 1416 bp, Glycine max
  CDS (1)..(1416)
atggatccagtaagcgtgtggggtaacacgcccttggcgacggtggatcccgagatccatgacctcatcgagaaggagaagcgccgtcaatgccgcggaatcgagctcatcgcctccgagaacttcacctccttcgccgtcatcgaggccctcggcagcgctctcacgaacaaatactccgagggcatgccgggcaaccgctactacggcggcaatgaatacatcgaccagatcgaaaacctctgccgctcacgcgccctccaagccttccacctcgacgcccaatcctggggcgtcaacgtccagccctactccggctcccctgccaacttcgccgcctacaccgccgtcctcaacccccacgaccgcatcatggggctggatctcccctccggcggccacctcacccacggctactacacctccggcggcaagaagatctccgccacctccatttacttcgagagcctcccttacaaagtaaactccaccaccggctacatcgactacgaccgcttggaggaaaaagccctagacttcaggcccaaattgataatctgcggtggcagcgcttaccctcgcgattgggactacaaacgcttcagggaaattgcggataagtgcggggcattgcttctctgcgacatggcgcacactagcggccttgtggccgcgcaggaagtgaacagccccttcgagtattgcgacattgtgaccaccaccacgcataagagcttgcggggtccacgggcggggatgatcttttaccggaagggcccgaagccgccgaagaaggggcagccggagaacgcggtttatgatttcgaggacaagatcaactttgcggtgttcccttcgctgcagggtgggccccacaaccaccagatcggggctcttgccgtggcgctgaagcaggccgcgtcgcccgggtttaaggcctacgccaagcaggttaaggccaacgccgttgcgcttgggaattacttgatggggaaagggtacagtcttgtcactggaggcacggagaaccatcttgtcttgtgggatctcagacctcttggattgactgggaataaggtggagaaactctgtgatctctgcaacattactgttaataagaacgcagtttttggtgatagcagtgccttggcccccggtggagtgcgaattggggcccctgccatgacttctaggggtttggttgaaaaggactttgagcagattggtgagttccttcaccgtgctgtgactctcacactggagatccagaaggagcatggcaaacttctcaaggatttcaacaagggcctcgtcaacaacaaggccattgaagatctcaaagctgatgttgagaagttctctgccacatttgacatgcctggcttcctggtatctgaaatgaagtacaaggattag

SEQ ID NO: 4597 - protein, 471 aa, Glycine max
MDPVSVWGNTPLATVDPEIHDLIEKEKRRQCRGIELIASENFTSFAVIEALGSALTNKYSEGMPGNRYYGGNEYIDQIENLCRSRALQAFHLDAQSWGVNVQPYSGSPANFAAYTAVLNPHDRIMGLDLPSGGHLTHGYYTSGGKKISATSIYFESLPYKVNSTTGYIDYDRLEEKALDFRPKLIICGGSAYPRDWDYKRFREIADKCGALLLCDMAHTSGLVAAQEVNSPFEYCDIVTTTTHKSLRGPRAGMIFYRKGPKPPKKGQPENAVYDFEDKINFAVFPSLQGGPHNHQIGALAVALKQAASPGFKAYAKQVKANAVALGNYLMGKGYSLVTGGTENHLVLWDLRPLGLTGNKVEKLCDLCNITVNKNAVFGDSSALAPGGVRIGAPAMTSRGLVEKDFEQIGEFLHRAVTLTLEIQKEHGKLLKDFNKGLVNNKAIEDLKADVEKFSATFDMPGFLVSEMKYKD

SEQ ID NO: 4598 - DNA, 1416 bp, Helianthus annuus
  CDS (1)..(1416)
atggatccggtgaacgtttggggcaacacccccttagacgccgccgacccagagatcttcgacctaattgaacacgaaaaacgacgacaatctcgcgggatcgaactgattgcatccgaaaacttcacctcatttgcagtcatccaagctttgggatcccccttgaccaacaaatactccgagggcatgcctggaaaccgttactacggtggcaacgagtacatcgaccagatcgaaaacctctgccgttctcgcgccttacaggcttaccgtctagatcccaccaaatggggtgttaatgtccagccctattctggatctcctgccaattttgctgcctatacagccctcttagagccccatgatcggatcatgggccttgatttgccatcaggtgggcatttgacgcatggatattatacttccggtgggaagaagatatcagctacctcgatttactttgagagtttgccgtataaagtgaattcgactacgggatatatcgattacgagaagatggaggagaaggccttggactttagacccaagttgattatttgtggggggagtgcgtacccgagagattgggattacaagaggatcaggggcattgctgataaatgtggggccctcatgttgtgtgatatggctcatatcagtggccttgttgctgcacaggaagctgcagatccgttcgaatactgtgacgtggtcactaccaccacccacaagagtctcaggggaccaagagctggtatgatcttctaccgcaaaggtccaaaaccaccgaagaagggtcagccagaagatgctgtttatgactttgaagacaagatcaattttgctgtgttcccggctctgcaaggtgggccgcacaaccaccagattggtgctctagcggttgcgttgaaacaggccatgtcacctggattcaaggcatatgctaagcaagttagagccaatgctgttgcacttggtaactacttgatgagcaaagactacaagcttgtgaccggtggaactgaaaaccatcttgtgttgtgggatcttcgtcctcttggcttgaccgggaacaaggtggagaagctttgcgatcttgcaaacatcactgttaacaagaatgctgtgtttggtgacagcagtgctttggccccaggaggtgttcgtattggtacacctgcaatgacctcaaggggtttagttgagaaggattttgagcaaattggggagtttcttcaccgtgcaattcaaatcactttaagcatccagaaggagttcgggaaattattgaaggatttcaacaagggtttggtgaacaacaaggagatcgaacaactcaaggctgatgtcgagaagttttctggttcgtttgacatgcctgggttctcgttggccgacatgaagtataaggattga

SEQ ID NO: 4599 - protein, 471 aa, Helianthus annuus
MDPVNVWGNTPLDAADPEIFDLIEHEKRRQSRGIELIASENFTSFAVIQALGSPLTNKYSEGMPGNRYYGGNEYIDQIENLCRSRALQAYRLDPTKWGVNVQPYSGSPANFAAYTALLEPHDRIMGLDLPSGGHLTHGYYTSGGKKISATSIYFESLPYKVNSTTGYIDYEKMEEKALDFRPKLIICGGSAYPRDWDYKRIRGIADKCGALMLCDMAHISGLVAAQEAADPFEYCDVVTTTTHKSLRGPRAGMIFYRKGPKPPKKGQPEDAVYDFEDKINFAVFPALQGGPHNHQIGALAVALKQAMSPGFKAYAKQVRANAVALGNYLMSKDYKLVTGGTENHLVLWDLRPLGLTGNKVEKLCDLANITVNKNAVFGDSSALAPGGVRIGTPAMTSRGLVEKDFEQIGEFLHRAIQITLSIQKEFGKLLKDFNKGLVNNKEIEQLKADVEKFSGSFDMPGFSLADMKYKD

SEQ ID NO: 4600 - DNA, 1416 bp, Hordeum vulgare
  CDS (1)..(1416)
atggacgccgtggccgactgggggctcaccccgctcgcggaggccgacccggaggtgtacgacctcatcgagcgcgagaagcggcgccagcgcacgggcatcgagctaatcgcgtccgagaacttcacctcgctcgccgtcatgcaggcgctcggctccccgctcaccaacaagtactccgagggcatgcctggggcgcgctactacggcgggaacgaggtcatcgacgaggtcgaggagctctgccgcgcccgcgccctcaaggcgttccacctcgaccccgcctcctggggcgtcaacgtgcagccctactccggctcccccgccaacttcgccgcctacactgggctgctccaaccccacgagcgaatcatggggctcgatttgccgtccggaggacacctcactcatgggtactacacggccgggggcaagaagatttctgccacctctatctacttttcgagcttgccctacaaggtgagctccgacaccgggtacgtcgactatgataggctggaggagaaggccatggatttccgccccaagctcattatctgtggcgggagcgcgtacccacgggactgggattatgccaggcttagggccatcgcggacaagtgtggggccatgttgctgtgtgacatggcccatatcagcggtctcgttgctgctcaggaggctacgaatccgtttgagtactctgatgtggttaccaccaccacccacaagagtctccgagggccaaggtctggtatgatattctacaggaagggcccgaagcctcccaaaaaaggccagcccgagggtgctctgtacgattatgaggacaagatcaactttgcagtgtttccatcacttcagggcggccctcacaaccaccagattgctgccctggcagttggcctgaagcaggccatgttacctggattcaaggcatatattcagcaggtcaaggtcaatgctgttgcccttggaaaccatctcatgagtaagggctacaagttggttactgatggaacagagaaccaccttgttctctgggatcttcgccctcttggcttgtctggtaacaaagtcgagaaagtatgtgatctgagcagcattacactcaacaaaaatgctgtctttggtgacagcagtgcattggcacctggtggtgtccgaattggtacacctgccatgacctcgagaggtttggtcgagaaggacttcgtgaagattgctgagtaccttcatcaggctgtggtcatctgcttgaatgtccagaagcagcgaggcaagcgttacaatgatttcattgttgacttggagaagaacgaggacatagcggagctcagggcagaggtcgagaagtttgccatttcatttgagatgcctggcttcctggtgtcagacatgaaatacaaggattag

SEQ ID NO: 4601 - protein, 471 aa, Hordeum vulgare
MDAVADWGLTPLAEADPEVYDLIEREKRRQRTGIELIASENFTSLAVMQALGSPLTNKYSEGMPGARYYGGNEVIDEVEELCRARALKAFHLDPASWGVNVQPYSGSPANFAAYTGLLQPHERIMGLDLPSGGHLTHGYYTAGGKKISATSIYFSSLPYKVSSDTGYVDYDRLEEKAMDFRPKLIICGGSAYPRDWDYARLRAIADKCGAMLLCDMAHISGLVAAQEATNPFEYSDVVTTTTHKSLRGPRSGMIFYRKGPKPPKKGQPEGALYDYEDKINFAVFPSLQGGPHNHQIAALAVGLKQAMLPGFKAYIQQVKVNAVALGNHLMSKGYKLVTDGTENHLVLWDLRPLGLSGNKVEKVCDLSSITLNKNAVFGDSSALAPGGVRIGTPAMTSRGLVEKDFVKIAEYLHQAVVICLNVQKQRGKRYNDFIVDLEKNEDIAELRAEVEKFAISFEMPGFLVSDMKYKD

SEQ ID NO: 4602 - DNA, 1416 bp, Hordeum vulgare
  CDS (1)..(1416)
atggactccgtcgcgtcgtgggggctgacgccgctggcggacgcggacccggacgtcttcgacctcatcgagcgggagaagcggcgccagcggagcgggatcgagctcatcgcgtcggagaacttcacctccttcgccgtcatcgaggcgctcggctcggccctcaccaacaagtactccgagggcatgccgggggcccgctactacggcggcaacgacgtcatcgacgagatcgagaacctctgccgcgaccgcgccctcgccgccttccgcctcgacgccgcctcctggggcgtcaacgtgcagccctactccggctcgcccgccaacttcgccgcctacaccgcgctcctcaacccgcacgaccggatcatggggctcgacctcccctccggcggacacctcacccacggctactacaccgccggggggaagaagatctccgccacctccatctacttcgagagcctgccctacaaggtcagcgccgccaacggctacatcgactacgacaagctcgaggagaaggccatggacttccgccccaagctcatcatctgcggtggcagcgcctaccccagggactgggactacgccaagctcagggccatcgccgacaagatcggggccatgctcctctgcgacatggcgcacatcagcgggctggtcgccgcgcaggaagctgcaaatccttttgagttctgtgatgtggttaccaccacaacacacaagtccctccgaggaccaagggctggcatgatcttctacaggaaaggccctaagcctgcgaagaagggccagcctgagggtgctgtgtatgactacgaggacaagatcaactttgcggtgttcccatcgctccagggtggtcctcacaaccaccaaattgctgcccttgcagttgccctgaagcaaactttgacacctggattcaaggcctacgcaaagcaggtcaaggccaacgctgttgccgttggaaagtatctcatgagcaagggctacaagatggtgaccgatggaactgacaaccaccttgttctatgggatctccgccctcttggcttgactggaaacaaggtcgaaaagatgtgtgacctttgtagcattacattgaacaagaatgctgtcttcggtgacagcagtgcattgtccccgggtggtgtccgcattggtgctcctgctatgacctccaggggtctggttgagaaggacttcgagcagatcgccgagttcctccaccaggcagtgaccatctgcctgaacatccagaaggagcacgggaagctgctcaaggacttctccaagggcctggtgaacaacaaggacattgagaacctcaaggtcgaggtcgagaagtttgccctctcctttgacatgcccggcttcacgctcgagagcatgaagtacaaggagtag

SEQ ID NO: 4603 - protein, 471 aa, Hordeum vulgare
MDSVASWGLTPLADADPDVFDLIEREKRRQRSGIELIASENFTSFAVIEALGSALTNKYSEGMPGARYYGGNDVIDEIENLCRDRALAAFRLDAASWGVNVQPYSGSPANFAAYTALLNPHDRIMGLDLPSGGHLTHGYYTAGGKKISATSIYFESLPYKVSAANGYIDYDKLEEKAMDFRPKLIICGGSAYPRDWDYAKLRAIADKIGAMLLCDMAHISGLVAAQEAANPFEFCDVVTTTTHKSLRGPRAGMIFYRKGPKPAKKGQPEGAVYDYEDKINFAVFPSLQGGPHNHQIAALAVALKQTLTPGFKAYAKQVKANAVAVGKYLMSKGYKMVTDGTDNHLVLWDLRPLGLTGNKVEKMCDLCSITLNKNAVFGDSSALSPGGVRIGAPAMTSRGLVEKDFEQIAEFLHQAVTICLNIQKEHGKLLKDFSKGLVNNKDIENLKVEVEKFALSFDMPGFTLESMKYKE

SEQ ID NO: 4604 - DNA, 1416 bp, Oryza sativa
  CDS (1)..(1416)
atggactccgtcgcgtcgtgggggctgaccccgctcgccgcggccgacccgctcgtccacgacctcctcgagcgggagaagcggcggcagcggagcggcatcgagctcatcgcctcggagaacttcacctccttcgccgtcatggaggccctcggctccgcgctcaccaacaagtactccgaggggatgcccggggcgcgctactacggcgggaacgatgtcatcgacgagatcgagaacctgtgccgcgaccgcgccctcgccgcgttccgcctcgacgccgcgtcgtggggcgtcaacgtgcagccctactccggctcgccggccaacttcgccgcctacacggcgctcctcaacccgcacgaccgcatcatggggctcgacctcccctccggtggccacctcacccatggctactacaccgcgggcgggaagaagatctccgcgacgtcgatctacttcgagagcctcccctacaaggtgagcgccgccacggggtacatcgactacgagaagctggaggagaaggcgctcgacttccgccccaagctcatcatctgcggcggcagcgcgtacccgagggactgggactacgccaagctcagggccgtcgccgacaaggtcggggcgctgctcctctgcgacatggcgcacatcagcggcctcgtcgccgcgcaggaagctgcaaatcctttcgagtactgtgatgtggttaccaccaccacgcacaagtccctccgaggaccaagagctggcatgatcttctacaggaagggccctaagcctcccaagaagggccagcctgagggtgctgtctatgactacgaggacaagatcaacttcgcagtgttcccgtcactgcaaggtggccctcacaaccaccagattgcagcccttgctgttgctctgcagcaaaccatgacacctggattcaaggcctacgcaaagcaggtcaaggccaacgctgtcgccattggcaagtatcttatgagcaagggctacaaaatggtgactgatggaactgagaaccaccttgttctctgggatcttcgccctcttggcttgactggcaacaaggttgagaagatgtgtgacctttgcagcattacacttaacaagaatgctgtctttggtgacagcagtgcattggctcctggcggtgtccgcattggtactcctgcgatgacatccaggggtcttgtcgagaaggactttgagcagatcggcgagttcctccaccaggccgtgaccatctgcctcaacatccagaaggagcacggcaagctcctcaaggacttctccaagggcctggtgaacaacaaggacatcgagaacctcaagctggaggtcgagaagttcgccacctccttcgacatgcccggcttcaccctcgacagcatgaagtacaaggagtag

SEQ ID NO: 4605 - protein, 471 aa, Oryza sativa
MDSVASWGLTPLAAADPLVHDLLEREKRRQRSGIELIASENFTSFAVMEALGSALTNKYSEGMPGARYYGGNDVIDEIENLCRDRALAAFRLDAASWGVNVQPYSGSPANFAAYTALLNPHDRIMGLDLPSGGHLTHGYYTAGGKKISATSIYFESLPYKVSAATGYIDYEKLEEKALDFRPKLIICGGSAYPRDWDYAKLRAVADKVGALLLCDMAHISGLVAAQEAANPFEYCDVVTTTTHKSLRGPRAGMIFYRKGPKPPKKGQPEGAVYDYEDKINFAVFPSLQGGPHNHQIAALAVALQQTMTPGFKAYAKQVKANAVAIGKYLMSKGYKMVTDGTENHLVLWDLRPLGLTGNKVEKMCDLCSITLNKNAVFGDSSALAPGGVRIGTPAMTSRGLVEKDFEQIGEFLHQAVTICLNIQKEHGKLLKDFSKGLVNNKDIENLKLEVEKFATSFDMPGFTLDSMKYKE

SEQ ID NO: 4606 - DNA, 1416 bp, Oryza sativa
  CDS (1)..(1416)
atggacgccgtggccgactgggggctgaccactctggaggaggctgacccggaggtgtacgacctcgtcgagcgcgagaagcggcggcagcgcgcgggcgtcgagctcatcgcgtcggagaacttcacctcgctcgccgtcatggaggcgctgggctcgccgctcaccaacaagtactccgagggcatgccgggggcccgctactacggaggcaacgaggtcatcgacgaggtggaggagctctgccgcgcccgcgcgctcgccgcgttccacctcgaccccgaggcctggggcgtcaacgtgcagccctactccggctcgccggcgaacttcgccgcctacaccgggctgctccaaccccacgagcggatcatggggctcgatttgccgtccggcggccacctcacgcacggctactacaccgccggcggcaaaaagatctccgccacgtccatctacttcgagagcctgccgtacaaggtgagctccgagacaggatacgtcgattatgataagctggaggagaaggccatggattttcggcccaagctcatcatctgcggcgggagcgcgtacccgcgggattgggattacgccaggttcagggccatcgcggataagtgcggcgccatgttgctctgcgacatggctcacatcagtggcctagttgccgcgcaggaggctgcaaatccttttcaatattctgatgtggttaccaccaccacccacaagagtctccgagggccaagatctggtatgatcttctacaggaagggcctgaagcctcccaagaaaggccagcctgagggcgctctgtatgactacgaggacaggatcaacttcgcagtgtttccgtcgctccaagggggccctcacaaccaccaaattgctgcgctagcggttggtttgaagcagactatgtcacctggattcaagtcttatattaagcaggtcaaggccaatgctgttgcccttggtaaccatttgatgagtaagggctacaaattggttactgacggaacagagaaccatcttgttctctgggatctgcgccctcttggcttgactggtaacaaagttgagaaggtctgtgatttgtgcagcattacactgaacaaaaatgctgtctttggggatagcagtgcaatgtcacctggtggtgtccgcattggtacacctgccatgacatcaaggggtttggtagaggaggactttgtacagatcgccgagttccttcaccaggcagtgaccatctgcttggatgttcagaaggagcgtggcaagcttctcaagtacttcaacgagggcctggagaacaacaaggacattgaggacctcagggcggaggtggagaagtttgccacttcattcgagatgcctggcttcagggtatccgacatgaagtacaaggattag

SEQ ID NO: 4607 - protein, 471 aa, Oryza sativa
MDAVADWGLTTLEEADPEVYDLVEREKRRQRAGVELIASENFTSLAVMEALGSPLTNKYSEGMPGARYYGGNEVIDEVEELCRARALAAFHLDPEAWGVNVQPYSGSPANFAAYTGLLQPHERIMGLDLPSGGHLTHGYYTAGGKKISATSIYFESLPYKVSSETGYVDYDKLEEKAMDFRPKLIICGGSAYPRDWDYARFRAIADKCGAMLLCDMAHISGLVAAQEAANPFQYSDVVTTTTHKSLRGPRSGMIFYRKGLKPPKKGQPEGALYDYEDRINFAVFPSLQGGPHNHQIAALAVGLKQTMSPGFKSYIKQVKANAVALGNHLMSKGYKLVTDGTENHLVLWDLRPLGLTGNKVEKVCDLCSITLNKNAVFGDSSAMSPGGVRIGTPAMTSRGLVEEDFVQIAEFLHQAVTICLDVQKERGKLLKYFNEGLENNKDIEDLRAEVEKFATSFEMPGFRVSDMKYKD

SEQ ID NO: 4608 - DNA, 1275 bp, Oryza sativa
  CDS (1)..(1275)
atggactccgtcgcgtcgtgggggctgaccccgctcgccgcggccgacccgctcgtccacgacctcctcgagcgggagaagcggcggcagcggagcggcatcgagctcatcgcctcggagaacttcacctccttcgccgtcatggaggccctcggctccgcgctcaccaacaagtactccgaggggatgcccggggcgcgctactacggcgggaacgacgtcatcgacgagatcgagaacctgtgccgcgaccgcgccctcgccgcgttccgcctcgacgccgcgtcgtggggcaagatctccgcgacgtcgatctacttcgagagcctcccctacaaggtgagcgccgccacggggtacatcgactacgagaagctggaggagaaggcgctcgacttccgccccaagctcatcatctgcggcggcagcgcgtacccgagggactgggactacgccaagctcagggccgtcgccgacaaggtcggggcgctgctcctctgcgacatggcgcacatcagcggcctcgtcgccgcgcaggaagctgcaaatccttttgagtactgtgatgtggttaccaccaccacgcacaagtccctccgaggaccaagagctggcatgatcttctacaggaagggccctaagcctcccaagaagggccagcctgagggtgctgtctatgactacgaggacaagatcaacttcgcagtgttcccgtcactgcaaggtggtcctcacaaccaccagattgcagcccttgctgttgctctgcagcaaaccatgacacctggattcaaggcctacgcaaagcaggtcaaggccaacgctgtcgccattggcaagtatcttatgagcaagggctacaaaatggtgactgatggaactgagaaccaccttgttctctgggatcttcgccctcttggcttgactggcaacaaggttgagaagatgtgtgacctttgcagcattacacttaacaagaatgctgtctttggtgacagcagtgcattggctcctggcggtgtccgcattggtactcctgcgatgacatccaggggtcttgtcgagaaggactttgagcagatcggcgagttcctccaccaggccgtgaccatctgcctcaacatccagaaggagcacggcaagctcctcaaggacttctccaagggcctggtgaacaacaaggacatcgagaacctcaagctggaggtcgagaagttcgccacctccttcgacatgcccggcttcaccctcgacagcatgaagtacaaggagtag

SEQ ID NO: 4609 - protein, 424 aa, Oryza sativa
MDSVASWGLTPLAAADPLVHDLLEREKRRQRSGIELIASENFTSFAVMEALGSALTNKYSEGMPGARYYGGNDVIDEIENLCRDRALAAFRLDAASWGKISATSIYFESLPYKVSAATGYIDYEKLEEKALDFRPKLIICGGSAYPRDWDYAKLRAVADKVGALLLCDMAHISGLVAAQEAANPFEYCDVVTTTTHKSLRGPRAGMIFYRKGPKPPKKGQPEGAVYDYEDKINFAVFPSLQGGPHNHQIAALAVALQQTMTPGFKAYAKQVKANAVAIGKYLMSKGYKMVTDGTENHLVLWDLRPLGLTGNKVEKMCDLCSITLNKNAVFGDSSALAPGGVRIGTPAMTSRGLVEKDFEQIGEFLHQAVTICLNIQKEHGKLLKDFSKGLVNNKDIENLKLEVEKFATSFDMPGFTLDSMKYKE

SEQ ID NO: 4610 - DNA, 1767 bp, Zea mays
  CDS (1)..(1767)
atggatctctcgcggcccacatcgtcggacctctcgctcgggctccactctcacggtcacgcccacgcccacgctcgcaggcacgcggtagccgcgccgctgcgcctgttcgacgacgcggaggagccgaagccggagcgcgtcgtggccggagaggccgacgcggagagggatgacgaggacgggggcgaccagcacttctccctcctcgggcactccctcttcgtcaagcgcccgcgccgcgccggcaacggcggcgggggcggagagacgtcatcctgctcgtccacgtccgcggcgcttcgccctgccaagcgacaggcgacgggggagggcagcggcgcagatctggagacccgccgcgccgcggtccgcgcctggggcaatcagtcgctggcggaggccgacccggacgtgcactcgctgatggagcaggagttggaccgccaggtgcgaggcatcgagctcatagcgtcggaaaacttcgtctgccgcgcggtgctcgatgcactcggcagccacctcactaacaagtactccgagggggccccgggtgctcgctactacggcgggaatcagcacatcgacgccatcgaacggctctgccatgagcgcgctctcaccgccttcggtctcgaccctgcctgctggggcgtcaacgtgcagccctactcgtgcacgtctgccaacttggctgtctacactgggctccttcaacccaaggaccgcatcatggggctggagccaccgtcgggcggccatgttagccatggttactacacgcccagtggcaagaaggtgtcaggtgcctctattttcttcgagagcatgtcgtacaaggtgaacccacagactgggtatattgattacgacaagcttgaagaaagagcaatggatttccaccctaaaattctcatctgtggtgggagctcttaccccagagagtgggactttgcacggatgagattgattgctgataagtgtggtgcggtgcttctttgcgacatggcacatatcagtgggcttgtcgcagcaaaggaatgccgtagccctttcgactactgtgatgttgttacgtcaactactcacaagaatcttaggggccctagaggtggtataatattcttcaggaaagggaaaaatttaaggaaacgagctggatctttttctcaaggagatgagaatgaatatgacttcgaggataggataaattttggtgttttcccttcaatgcaaggagggccccataataatcatattgctggcttggctataactctgaagcaggtagcaacttctgaatataaagcatacattcaacaagtcaagaaaaatgctcaggctttggcatcagctttgatcagaagaaaatgcagattggttacaggtggcacagataatcacttggtactttgggacctcagaactcttggcttgactggcaagatcttcgagaaggtttgtgaggcatgccacatatctgtcaacaagacaccaatttatggagataatggctcgatatcgccaggtggtgtgcggattggaacacctgcaatgactactagaggttgcttagaagaggacttcgaggtgattgcagacttcctcataagggctactcaaattgctaacaatgttctgaaagaacatggcaaagtgcaaaaggagtttctaagaggcctacagaacaataatgatgttatagaactccgaaatcaggttgaggcatttgcgtcacagtttgcgatgccaggttttgatgtatga

SEQ ID NO: 4611 - protein, 588 aa, Zea mays
MDLSRPTSSDLSLGLHSHGHAHAHARRHAVAAPLRLFDDAEEPKPERVVAGEADAERDDEDGGDQHFSLLGHSLFVKRPRRAGNGGGGGETSSCSSTSAALRPAKRQATGEGSGADLETRRAAVRAWGNQSLAEADPDVHSLMEQELDRQVRGIELIASENFVCRAVLDALGSHLTNKYSEGAPGARYYGGNQHIDAIERLCHERALTAFGLDPACWGVNVQPYSCTSANLAVYTGLLQPKDRIMGLEPPSGGHVSHGYYTPSGKKVSGASIFFESMSYKVNPQTGYIDYDKLEERAMDFHPKILICGGSSYPREWDFARMRLIADKCGAVLLCDMAHISGLVAAKECRSPFDYCDVVTSTTHKNLRGPRGGIIFFRKGKNLRKRAGSFSQGDENEYDFEDRINFGVFPSMQGGPHNNHIAGLAITLKQVATSEYKAYIQQVKKNAQALASALIRRKCRLVTGGTDNHLVLWDLRTLGLTGKIFEKVCEACHISVNKTPIYGDNGSISPGGVRIGTPAMTTRGCLEEDFEVIADFLIRATQIANNVLKEHGKVQKEFLRGLQNNNDVIELRNQVEAFASQFAMPGFDV

SEQ ID NO: 4612 - DNA, 1416 bp, Triticum aestivum
  CDS (1)..(1416)
atggacgccgtggccgactgggggctcaccccgctcgcggaggccgacccggaggtgtacgacctcatcgagcgcgagaagcggcgccagcgcacgggcatcgagctaatcgcgtccgagaacttcacctcgctcgccgtcatggaggcgctcggctccccgctcaccaacaagtactccgagggcatgcccggggcgcgctactacggcgggaacgaggtcatcgacgaggtcgaggagctctgccgcgcccgcgccctcaaggcgttccacctcgaccccgcctcctggggcgtcaacgtgcagccctactccggctcccccgccaacttcgccgcctacactgggctgctccaaccccacgagcgcatcatggggctcgatctgccgtccggaggacacctcactcatgggtactacacggccgggggcaagaagatttctgccacctccatttacttttcgagcttgccctacaaggtgagctccgacaccgggtacgtcgactatgataggctggaggagaaggccatggatttccgccccaagctcattatctgtggcgggagcgcgtacccacgggactgggattatgccaggcttagggccatcgcggacaagtgcggggccatgttgctgtgtgacatggctcatatcagcggtctcgttgccgctcaggaggctacgaatccgtttgagtattctgatgtggttaccaccaccacccacaagagtctccgagggccaaggtctggtatgatattctacaggaagggcccgaagcctcccaaaaaaggccagcccgagggtgctctttacgattacgaggacaagatcaactttgcagtgtttccatcactccagggtggccctcacaaccaccagattgctgccctggcagttggcctgaagcaggcaatgtcacctggattcaaggcatatattcagcaggtcaaggccaatgctgttgcccttggaaaccagctgatgaggaagggctacaagttggttacggatggaacagagaaccaccttgttctctgggatcttcgccctcttggcttgtctggcaacaaagttgagaaagtatgcgatctgagcagcattacactcaacaaaaatgccgtctttggtgacagcagtgcattggcacctggtggtgtccgaattggtacacctgccatgacctcgagaggtttggtcgagaaggactttgtgaagattgctgagtaccttcatcaggctgtggtcatctgcttgaatgtccagaagcagcgaggtaagcgttacaatgatttcatcgttgacttggagaagaacgaggacatcgcggagctcagggcagaggtcgagaagtttgccattgcatttgagatgcctggcttccgggtgtcagacatgaaatacaaggattag

SEQ ID NO: 4613 - protein, 471 aa, Triticum aestivum
MDAVADWGLTPLAEADPEVYDLIEREKRRQRTGIELIASENFTSLAVMEALGSPLTNKYSEGMPGARYYGGNEVIDEVEELCRARALKAFHLDPASWGVNVQPYSGSPANFAAYTGLLQPHERIMGLDLPSGGHLTHGYYTAGGKKISATSIYFSSLPYKVSSDTGYVDYDRLEEKAMDFRPKLIICGGSAYPRDWDYARLRAIADKCGAMLLCDMAHISGLVAAQEATNPFEYSDVVTTTTHKSLRGPRSGMIFYRKGPKPPKKGQPEGALYDYEDKINFAVFPSLQGGPHNHQIAALAVGLKQAMSPGFKAYIQQVKANAVALGNQLMRKGYKLVTDGTENHLVLWDLRPLGLSGNKVEKVCDLSSITLNKNAVFGDSSALAPGGVRIGTPAMTSRGLVEKDFVKIAEYLHQAVVICLNVQKQRGKRYNDFIVDLEKNEDIAELRAEVEKFAIAFEMPGFRVSDMKYKD

SEQ ID NO: 4614 - DNA, 1416 bp, Zea mays
  CDS (1)..(1416)
atggacaacgtggaggagtgggggctgaggccgctggccgaggtcgacccggaggtgtacgacctaatcgagcgcgagaagcggcggcagcgagcgggtatcgagctcatcgcatcggagaacttcacctcgctcgctgtcatggaggcgctgggctccccgctcaccaacaagtactcggagggcatgccgggggcgcgctactacggcggcaacgaggtcatcgacgaaatcgaggagctctgccggacccgcgcgctcgccgccttccacctcgaccccgcccgctggggcgtcaacgtgcagccctactcggggtcccccgccaatttcgcggcatacacggggctgctccagccgaacgacaggatcatggggctcgacctgccgtccgggggccacctcacccacgggtactacacggcgagtggaaagaagatttctgcaacctccatctacttccagagcctgcccgataaggggagctccgacaccgggtacgtcgactacgataagctggaggaaaaggccatggatttccgccccaagcttatcatctgtggcggtagtgcatgccctcgggagtgggattacgccaggttcagggccatcgcagacaagtgcggggccatgttgctctgcgacatggctcatatcagtggtctcgttgctgcgcaggaggctttgaatccttttgaattctctgatgtggttaccactacgacccacaaaagtcttcgagggccaaggtctggtatgattttctacaggaagggcccaaagcctccaaaaaaaggccagcctgagggtgctctgtatgactacgaggacaagatcaactttgctgtgttcccgtcactccagggggggcctcacaatcaccaaattgctgctctagctgtagccttgaaacaggccatgtcacctggattcaaggcctatatccagcaggtcaaggcaaacacagtttcccttggtaaccatttgatgagtaagggctacaagttggttactgatggaacagagaaccaccttgttctctgggatctgcgccctcttggcttgactggcaataaagttgagatgctatgtgacctatgcaacattacactgaacaaaaatgctgtctttggtgacagcagtgcattatcacctggcggtgtgcgcattggtacacctgctatgacctcaaggggtttggttgagaaggacttcgtgcagattgccgagtaccttcaccgagctgtgaccatctgcttgagcatccaggcggagcatggcaagattctcaaggacttcaagaagggcttggtgcaaaacaaggacatagagaacctgagggcggaggtcgagaagttcgccacttcatttgacatgcctggcttcagggtgtctgacatgaagtacacagactag

SEQ ID NO: 4615 - protein, 471 aa, Zea mays
MDNVEEWGLRPLAEVDPEVYDLIEREKRRQRAGIELIASENFTSLAVMEALGSPLTNKYSEGMPGARYYGGNEVIDEIEELCRTRALAAFHLDPARWGVNVQPYSGSPANFAAYTGLLQPNDRIMGLDLPSGGHLTHGYYTASGKKISATSIYFQSLPDKGSSDTGYVDYDKLEEKAMDFRPKLIICGGSACPREWDYARFRAIADKCGAMLLCDMAHISGLVAAQEALNPFEFSDVVTTTTHKSLRGPRSGMIFYRKGPKPPKKGQPEGALYDYEDKINFAVFPSLQGGPHNHQIAALAVALKQAMSPGFKAYIQQVKANTVSLGNHLMSKGYKLVTDGTENHLVLWDLRPLGLTGNKVEMLCDLCNITLNKNAVFGDSSALSPGGVRIGTPAMTSRGLVEKDFVQIAEYLHRAVTICLSIQAEHGKILKDFKKGLVQNKDIENLRAEVEKFATSFDMPGFRVSDMKYTD

SEQ ID NO: 4616 - DNA, 1773 bp, Zea mays
  CDS (1)..(1773)
atggatctctcgcggcccacatcgtcagacctctcgctcgggctccactcgcacggtcacgcccacgcccacgctcgcaggcacgcggcagccgcgccgctgcgcctgttcgacgacgcggaggagccgaagccggagcgcctcggggccggagaggccgacgcggagagggacgacgaggacgggggcgaccagcacttctccctcctcgggcactccctctgcgtcaagcgcccgcgccgcgccggcaacggcggcgggggtgggggcggagagacgtcatcctgctcgtccacgtccccggcgctgcgccccgccaagcgacaggcgacgggggaagacagcggcgcagatctggagacccgccgcgccgcggtccgcgcctggggcaaccagtcgctggcggaggccgacccggacgtgcactcgctgatggagcaggagctggaccgccaggtgcgaggcatcgagctcatagcgtcggaaaacttcgtctgccgcgcggtgctcgatgcactcggcagccacctcaccaacaagtactccgagggggccccgggtgctcgctactacggcgggaatcagcacatcgacgccatcgaacggctctgccatgagcgcgccctcaccgccttcggtctcgaccctgcctgctggggcgtcaacgtgcagccctactcgtgcacgtctgccaacttggctgtctacactgggctccttcaacccaaggaccgcatcatggggctggagccaccgtcgggcggccatgttagccatggttactacacgcccagtggcaagaaggtgtcaggtgcctctattttcttcgagagcatgtcgtacaaggtgaacccacagactgggtatattgattacgacaagcttgaagaaagagcaatggatttccaccctaaaattctcatctgtggtgggagctcttaccccagagagtgggactttgcacggatgagattgattgctgataagtgtggtgcggtgcttctttgcgacatggcacatatcagtgggcttgtcgcagcaaaggaatgccgtagccctttcgactactgtgatgttgttacgtcaactactcacaagaatcttaggggccctagaggtggtataatattcttcaggaaagggaaaaatttaaggaaacgagctggatctttttctcaaggagatgagaatgaatacgacttcgaggataggataaattttggtgttttcccttcaatgcaaggagggccccataataatcatattgctggcttggctataactctgaagcaggtagcaacttctgaatataaagcatacattcaacaagtcaagaaaaatgctcaggctttggcatcagctttgatcagaagaaaatgcagatgggtaacaggtggcacagataatcacttagtactttgggacctcagaactcttggcttgactggcaagatcttcgagaaggtttgcgaggcatgccacatatctgtcaacaagacaccaatttatggagataatggctcgatatcgccaggtggtgtgcggattggaacacctgcaatgactactagaggttgcttagaagaggacttcgaggtgattgcagacttcctcataagggctactcaaattgctaacaatgttctgaaagaacatggcaaagtgcaaaaggagtttctaagaggcctacagaacaataatgatgttatagaactccgaaatcaggttgaggcatttgcgtcacagtttgcgatgccaggttttgatgtatga

SEQ ID NO: 4617 - protein, 590 aa, Zea mays
MDLSRPTSSDLSLGLHSHGHAHAHARRHAAAAPLRLFDDAEEPKPERLGAGEADAERDDEDGGDQHFSLLGHSLCVKRPRRAGNGGGGGGGETSSCSSTSPALRPAKRQATGEDSGADLETRRAAVRAWGNQSLAEADPDVHSLMEQELDRQVRGIELIASENFVCRAVLDALGSHLTNKYSEGAPGARYYGGNQHIDAIERLCHERALTAFGLDPACWGVNVQPYSCTSANLAVYTGLLQPKDRIMGLEPPSGGHVSHGYYTPSGKKVSGASIFFESMSYKVNPQTGYIDYDKLEERAMDFHPKILICGGSSYPREWDFARMRLIADKCGAVLLCDMAHISGLVAAKECRSPFDYCDVVTSTTHKNLRGPRGGIIFFRKGKNLRKRAGSFSQGDENEYDFEDRINFGVFPSMQGGPHNNHIAGLAITLKQVATSEYKAYIQQVKKNAQALASALIRRKCRWVTGGTDNHLVLWDLRTLGLTGKIFEKVCEACHISVNKTPIYGDNGSISPGGVRIGTPAMTTRGCLEEDFEVIADFLIRATQIANNVLKEHGKVQKEFLRGLQNNNDVIELRNQVEAFASQFAMPGFDV

SEQ ID NO: 4618 - DNA, 21 bp, Artificial sequence
  primer
atggcaatggcaatagccatg

SEQ ID NO: 4619 - DNA, 20 bp, Artificial sequence
  primer
tcaattcttgtacttcatgg

SEQ ID NO: 4620 - protein, 520 aa, Artificial sequence
  consensus sequence
  Variant (3)..(4): Xaa in position 3 to 4 is any amino acid
  Variant (5)..(10): Xaa in position 5 to 10 is any or no amino acid
  Variant (12)..(13): Xaa in position 12 to 13 is any amino acid
  Variant (15)..(16): Xaa in position 15 to 16 is any amino acid
  Variant (18)..(21): Xaa in position 18 to 21 is any amino acid
  Variant (25)..(25): Xaa in position 25 is any amino acid
  Variant (29)..(30): Xaa in position 29 to 30 is any amino acid
  Variant (32)..(33): Xaa in position 32 to 33 is any amino acid
  Variant (34)..(42): Xaa in position 34 to 42 is any or no amino acid
  Variant (44)..(45): Xaa in position 44 to 45 is any amino acid
  Variant (47)..(47): Xaa in position 47 is any amino acid
  Variant (50)..(51): Xaa in position 50 to 51 is any amino acid
  Variant (52)..(52): Xaa in position 52 is any or no amino acid
  Variant (56)..(56): Xaa in position 56 is any amino acid
  Variant (59)..(59): Xaa in position 59 is any amino acid
  Variant (62)..(62): Xaa in position 62 is any amino acid
  Variant (68)..(71): Xaa in position 68 to 71 is any amino acid
  Variant (73)..(74): Xaa in position 73 to 74 is any amino acid
  Variant (76)..(76): Xaa in position 76 is any amino acid
  Variant (78)..(80): Xaa in position 78 to 80 is any amino acid
  Variant (83)..(85): Xaa in position 83 to 85 is any amino acid
  Variant (87)..(91): Xaa in position 87 to 91 is any amino acid
  Variant (92)..(95): Xaa in position 92 to 95 is any or no amino acid
  Variant (99)..(100): Xaa in position 99 to 100 is any amino acid
  Variant (103)..(104): Xaa in position 103 to 104 is any amino acid
  Variant (105)..(106): Xaa in position 105 to 106 is any or no amino acid
  Variant (109)..(117): Xaa in position 109 to 117 is any amino acid
  Variant (119)..(120): Xaa in position 119 to 120 is any amino acid
  Variant (121)..(124): Xaa in position 121 to 124 is any or no amino acid
  Variant (126)..(127): Xaa in position 126 to 127 is any amino acid
  Variant (129)..(130): Xaa in position 129 to 130 is any amino acid
  Variant (135)..(135): Xaa in position 135 is any amino acid
  Variant (138)..(145): Xaa in position 138 to 145 is any amino acid
  Variant (146)..(158): Xaa in position 146 to 158 is any or no amino acid
  Variant (160)..(162): Xaa in position 160 to 162 is any amino acid
  Variant (163)..(163): Xaa in position 163 is any or no amino acid
  Variant (165)..(168): Xaa in position 165 to 168 is any amino acid
  Variant (169)..(169): Xaa in position 169 is any or no amino acid
  Variant (172)..(172): Xaa in position 172 is any amino acid
  Variant (176)..(181): Xaa in position 176 to 181 is any amino acid
  Variant (183)..(186): Xaa in position 183 to 186 is any amino acid
  Variant (189)..(192): Xaa in position 189 to 192 is any amino acid
  Variant (194)..(194): Xaa in position 194 is any amino acid
  Variant (198)..(198): Xaa in position 198 is any amino acid
  Variant (200)..(201): Xaa in position 200 to 201 is any amino acid
  Variant (203)..(206): Xaa in position 203 to 206 is any amino acid
  Variant (208)..(210): Xaa in position 208 to 210 is any amino acid
  Variant (212)..(212): Xaa in position 212 is any amino acid
  Variant (213)..(214): Xaa in position 213 to 214 is any or no amino acid
  Variant (216)..(216): Xaa in position 216 is any amino acid
  Variant (218)..(219): Xaa in position 218 to 219 is any amino acid
  Variant (224)..(225): Xaa in position 224 to 225 is any amino acid
  Variant (231)..(235): Xaa in position 231 to 235 is any amino acid
  Variant (237)..(240): Xaa in position 237 to 240 is any amino acid
  Variant (241)..(241): Xaa in position 241 is any or no amino acid
  Variant (243)..(243): Xaa in position 243 is any amino acid
  Variant (251)..(251): Xaa in position 251 is any amino acid
  Variant (257)..(259): Xaa in position 257 to 259 is any amino acid
  Variant (261)..(270): Xaa in position 261 to 270 is any amino acid
  Variant (271)..(290): Xaa in position 271 to 290 is any or no amino acid
  Variant (292)..(293): Xaa in position 292 to 293 is any amino acid
  Variant (297)..(298): Xaa in position 297 to 298 is any amino acid
  Variant (303)..(304): Xaa in position 303 to 304 is any amino acid
  Variant (306)..(306): Xaa in position 306 is any amino acid
  Variant (308)..(310): Xaa in position 308 to 310 is any amino acid
  Variant (314)..(316): Xaa in position 314 to 316 is any amino acid
  Variant (318)..(324): Xaa in position 318 to 324 is any amino acid
  Variant (326)..(327): Xaa in position 326 to 327 is any amino acid
  Variant (330)..(331): Xaa in position 330 to 331 is any amino acid
  Variant (333)..(343): Xaa in position 333 to 343 is any amino acid
  Variant (344)..(359): Xaa in position 344 to 359 is any or no amino acid
  Variant (361)..(363): Xaa in position 361 to 363 is any amino acid
  Variant (365)..(366): Xaa in position 365 to 366 is any amino acid
  Variant (369)..(370): Xaa in position 369 to 370 is any amino acid
  Variant (373)..(373): Xaa in position 373 is any amino acid
  Variant (375)..(376): Xaa in position 375 to 376 is any amino acid
  Variant (378)..(381): Xaa in position 378 to 381 is any amino acid
  Variant (382)..(385): Xaa in position 382 to 385 is any or no amino acid
  Variant (387)..(387): Xaa in position 387 is any amino acid
  Variant (388)..(389): Xaa in position 388 to 389 is any or no amino acid
  Variant (391)..(397): Xaa in position 391 to 397 is any amino acid
  Variant (399)..(400): Xaa in position 399 to 400 is any amino acid
  Variant (404)..(405): Xaa in position 404 to 405 is any amino acid
  Variant (407)..(407): Xaa in position 407 is any amino acid
  Variant (409)..(415): Xaa in position 409 to 415 is any amino acid
  Variant (416)..(416): Xaa in position 416 is any or no amino acid
  Variant (418)..(418): Xaa in position 418 is any amino acid
  Variant (420)..(420): Xaa in position 420 is any amino acid
  Variant (422)..(422): Xaa in position 422 is any amino acid
  Variant (425)..(425): Xaa in position 425 is any amino acid
  Variant (427)..(427): Xaa in position 427 is any amino acid
  Variant (430)..(431): Xaa in position 430 to 431 is any amino acid
  Variant (433)..(457): Xaa in position 433 to 457 is any amino acid
  Variant (458)..(500): Xaa in position 458 to 500 is any or no amino acid
  Variant (502)..(507): Xaa in position 502 to 507 is any amino acid
  Variant (508)..(519): Xaa in position 508 to 519 is any or no amino acid
DPXXXXXXXXEXXRXXQXXXXELIXSENXXSXXXXXXXXXXXVXXAXGSXXXNKYXEGXPGXRYYGGXXXXDXXEXLXXXRAXXXFXXXXXXXXXNVQXXSGXXXXANXXXXXXXXXPXXXXXXGXXLXXGGHLXHGXXXXXXXXXXXXXXXXXXXXXFXXXXYXXXXXTGXIDYXXXXXXAXXXXPKXXXXGXSAYXRXXDXXXXRXXXDXXXAXLXXDMAHXXGLVAAXXXXXPXXXXXDXVTTTTHKXLRGPRXXXIXXXXXXXXXXXXXXXXXXXXXXXXXXXXXXNXXVFPXXQGGPXXHXIXXXAVAXXXAXXXXXXXYXXQVXXNXXXXXXXXXXXXXXXXXXXXXXXXXXXGXXXVXXGTXXHLXLXXLXXXXXXXXGXXXEXXXXXXXIXXNKNXXPXDXXXXXXXXGXRXGXPAXTXRGXXEXXXXXXXXXXXXXXXXXXXXXXXXXXXXXXXXXXXXXXXXXXXXXXXXXXXXXXXXXXXXXXXXXXXXVXXXXXXXXXXXXXXXXXXF

SEQ ID NO: 4621 - protein, 20 aa, Artificial sequence
  protein pattern
  Variant (3)..(3): Xaa in position 3 is Ser or Thr
  Variant (6)..(6): Xaa in position 6 is any or no amino acid
  Variant (9)..(9): Xaa in position 9 is Ser or Thr
  Variant (15)..(15): Xaa in position 15 is any or no amino acid
  Variant (17)..(17): Xaa in position 17 is any amino acid
  Variant (18)..(18): Xaa in position 18 is any or no amino acid
  Variant (20)..(20): Xaa in position 20 is Phe, Ile, Leu or Met
VTXTTXHKXLRGPRXGXXIX

SEQ ID NO: 4622 - protein, 20 aa, Artificial sequence
  protein pattern
  Variant (4)..(4): Xaa in position 4 is Ala or Ser
  Variant (7)..(7): Xaa in position 7 is any amino acid
  Variant (10)..(10): Xaa in position 10 is any amino acid
  Variant (16)..(16): Xaa in position 16 is Cys or Asn
  Variant (17)..(18): Xaa in position 17 to 18 is any amino acid
  Variant (19)..(19): Xaa in position 19 is Ile or Val
NKYXEGXPGXRYYGGXXXXD

SEQ ID NO: 4623 - protein, 22 aa, Artificial sequence
  protein pattern
  Variant (3)..(3): Xaa in position 3 is Gly or Ser
  Variant (4)..(4): Xaa in position 4 is any amino acid
  Variant (9)..(10): Xaa in position 9 to 10 is any or no amino acid
  Variant (12)..(12): Xaa in position 12 is any amino acid
  Variant (13)..(14): Xaa in position 13 to 14 is any or no amino acid
  Variant (16)..(16): Xaa in position 16 is Ala, Gly or Thr
  Variant (17)..(17): Xaa in position 17 is Ala or Gly
  Variant (18)..(18): Xaa in position 18 is any amino acid
  Variant (20)..(20): Xaa in position 20 is any amino acid
  Variant (21)..(21): Xaa in position 21 is Ala, Cys, Gly, Ser or Thr
  Variant (22)..(22): Xaa in position 22 is Phe, Leu or Met
FPXXQGGPXXHXXXIXXXAXXX

SEQ ID NO: 4624 - protein, 14 aa, Artificial sequence
  protein pattern
  Variant (2)..(2): Xaa in position 2 is any amino acid
  Variant (3)..(4): Xaa in position 3 to 4 is any or no amino acid
  Variant (6)..(6): Xaa in position 6 is Ala, Pro or Ser
  Variant (7)..(7): Xaa in position 7 is any amino acid
  Variant (12)..(12): Xaa in position 12 is Ser or Thr
MXXXLXXGGHLXHG

SEQ ID NO: 4625 - protein, 22 aa, Artificial sequence
  protein pattern
  Variant (2)..(2): Xaa in position 2 is Ala, Asp, Glu, Gly or Asn
  Variant (3)..(7): Xaa in position 3 to 7 is any amino acid
  Variant (9)..(12): Xaa in position 9 to 12 is any amino acid
  Variant (15)..(15): Xaa in position 15 is any amino acid
  Variant (16)..(16): Xaa in position 16 is Ile, Leu, Met or Val
  Variant (17)..(17): Xaa in position 17 is Ile, Leu or Val
  Variant (18)..(18): Xaa in position 18 is Ala, Cys, Gly or Ser
  Variant (20)..(20): Xaa in position 20 is any amino acid
  Variant (22)..(22): Xaa in position 22 is Ala, Cys or Ser
YXXXXXXAXXXXPKXXXXGXSX

SEQ ID NO: 4626 - protein, 15 aa, Artificial sequence
  protein pattern
  Variant (2)..(2): Xaa in position 2 is any amino acid
  Variant (3)..(3): Xaa in position 3 is Phe, Leu, Met or Val
  Variant (4)..(5): Xaa in position 4 to 5 is any amino acid
  Variant (10)..(10): Xaa in position 10 is any amino acid
  Variant (11)..(11): Xaa in position 11 is Ala or Ser
  Variant (14)..(14): Xaa in position 14 is Ala, Ile or Val
AXXXXDMAHXXGLXA

SEQ ID NO: 4627 - protein, 28 aa, Artificial sequence
  protein pattern
  Variant (2)..(14): Xaa in position 2 to 14 is any amino acid
  Variant (15)..(15): Xaa in position 15 is any or no amino acid
  Variant (17)..(17): Xaa in position 17 is Ile, Leu or Val
  Variant (19)..(19): Xaa in position 19 is Ile, Leu, Met or Val
  Variant (21)..(21): Xaa in position 21 is Ala, Ser or Thr
  Variant (24)..(24): Xaa in position 24 is any amino acid
  Variant (26)..(26): Xaa in position 26 is Ser or Thr
KXXXXXXXXXXXXXXGXRXGXPAXTXRG

SEQ ID NO: 4628 - protein, 15 aa, Artificial sequence
  protein pattern
  Variant (2)..(2): Xaa in position 2 is any amino acid
  Variant (3)..(3): Xaa in position 3 is any or no amino acid
  Variant (5)..(5): Xaa in position 5 is any or no amino acid
  Variant (7)..(7): Xaa in position 7 is Asp or Glu
  Variant (8)..(8): Xaa in position 8 is Asn, Ser, Thr or Val
  Variant (10)..(10): Xaa in position 10 is Leu, Met or Val
  Variant (11)..(11): Xaa in position 11 is Phe, Ile, Leu, Met or Val
  Variant (13)..(13): Xaa in position 13 is any amino acid
  Variant (14)..(14): Xaa in position 14 is Asp, Asn or Ser
  Variant (15)..(15): Xaa in position 15 is Phe, Leu, Met or Val
VXXGXTXXHXXLXXX

SEQ ID NO: 4629 - protein, 15 aa, Artificial sequence
  protein pattern
  Variant (2)..(3): Xaa in position 2 to 3 is any or no amino acid
  Variant (5)..(5): Xaa in position 5 is Ala or Pro
  Variant (9)..(9): Xaa in position 9 is any amino acid
  Variant (10)..(10): Xaa in position 10 is Ala, Thr or Val
  Variant (12)..(13): Xaa in position 12 to 13 is any amino acid
  Variant (15)..(15): Xaa in position 15 is Phe, Ile, Leu or Met
LXXIXSENXXSXXVX

SEQ ID NO: 4630 - DNA, 468 bp, Thermus thermophilus
  CDS (1)..(468): transl_table=11
atggccgaggtggagagcttcagcctggaccacaccaaggtcaaggccccctacgtgcgcctggcggggaggaaggccctcgcggggggcgtggtggagaagtacgacctgaggcttgcccagcccaaccgggaggccctgcccacgggggccttgcacaccctggagcacctcctcgcggggtatttgcgggaccacctcccgggggtcattgacctctcccccatgggctgccgcacggggttttacctggtggtggaaggccccgtgggggaggaaaaggtcctcgaggccttcgcccaggccttgaaggacgtcctcgcccacgagggggaggtccccggggcgagcttcagggagtgcggcaactaccgggaccatgaccttcctggcgccaaggcctgggcggagaaggtgctaaaggcggggcttagggtccaggccaccgttcccctggaggcgaggtaa

SEQ ID NO: 4631 - protein, 155 aa, Thermus thermophilus
MAEVESFSLDHTKVKAPYVRLAGRKALAGGVVEKYDLRLAQPNREALPTGALHTLEHLLAGYLRDHLPGVIDLSPMGCRTGFYLVVEGPVGEEKVLEAFAQALKDVLAHEGEVPGASFRECGNYRDHDLPGAKAWAEKVLKAGLRVQATVPLEAR

SEQ ID NO: 4632 - DNA, 453 bp, Helicobacter pylori 26695
  CDS (1)..(453): transl_table=11
atgaatgtagagagttttaatttggatcacaccaaagtcaaagccccttatgtgcgtgtcgctgatcgcaaaaagggcgttaatggggatttgattgtcaaatacgatgtgcgcttcaagcagcccaaccaagatcacatggacatgcctagcctacattctttagagcatttagtcgctgaaattatccgcaaccatgccagttatgtcgtggattggtcgcctatgggttgccaaacgggattttatctcacagtgttaaaccatgacaattacacagagattttagaggttttagaaaagaccatgcaagatgtgttaaaggctacagaagtgcctgccagcaatgaaaagcaatgcggttgggcggctaaccacactttagagggtgctaaggatttagcgcgcgcttttttagacaaacgcgctgagtggtctgaagtgggggtttga

SEQ ID NO: 4633 - protein, 150 aa, Helicobacter pylori 26695
MNVESFNLDHTKVKAPYVRVADRKKGVNGDLIVKYDVRFKQPNQDHMDMPSLHSLEHLVAEIIRNHASYVVDWSPMGCQTGFYLTVLNHDNYTEILEVLEKTMQDVLKATEVPASNEKQCGWAANHTLEGAKDLARAFLDKRAEWSEVGV

SEQ ID NO: 4634 - DNA, 459 bp, Helicobacter pylori J99
  CDS (1)..(459): transl_table=11
atgaaaatgaatgtagagagtttcaatttggatcacaccaaagtcaaagccccttatgtgcgtatcgctgatcgcaaaaagggcgttaatggggatttgattgtcaaatacgatgtgcgcttcaagcagcccaacagagatcacatggacatgccaagcctacactctttagagcatttagtcgctgaaatcatccgtaaccatgccaattatgtcgtggattggtcgcctatgggttgccaaacaggattttatctcacggtgttaaaccatgacaattacacagagattttagaggttttagaaaagacgatgcaagacgtgctaaaggctaaagaagtgcctgccagcaatgaaaagcaatgcggttgggcggctaaccacactttagagggcgcacagaatttagcacgcgcttttttagacaaacgcgctgagtggtctgaagtgggggtttga

SEQ ID NO: 4635 - protein, 152 aa, Helicobacter pylori J99
MKMNVESFNLDHTKVKAPYVRIADRKKGVNGDLIVKYDVRFKQPNRDHMDMPSLHSLEHLVAEIIRNHANYVVDWSPMGCQTGFYLTVLNHDNYTEILEVLEKTMQDVLKAKEVPASNEKQCGWAANHTLEGAQNLARAFLDKRAEWSEVGV

SEQ ID NO: 4636 - DNA, 519 bp, Vibrio cholerae O1 biovar El Tor str. N16961
  CDS (1)..(519): transl_table=11
atgccattattagacagttttaccgtcgatcatactcgtatgaatgcaccggcggtgcgtgttgccaaaaccatgcaaaccccaaaaggggatacgattaccgtatttgatttgcgttttactatgccaaacaaagatatcttgtctgagcgcggtatccatactctagagcatctctacgcgggctttatgcgcaatcaccttaacggcagccaagtggagatcatcgatatttcaccaatgggttgccgtacaggtttctacatgagcttgattggtgcgccgacagaacagcaagtggcacaagcatggctagccgcaatgcaagatgtgttgaaagttgaaagccaagagcaaattcctgagctgaatgagtaccagtgcggcactgcggcgatgcactcgctcgaagaagccaaagcgattgcgaaaaacgtgattgcggcaggcatctcggttaaccgtaacgatgagttggcgctgcccgaatctatgctcaatgagctgaaggttcactaa

SEQ ID NO: 4637 - protein, 172 aa, Vibrio cholerae O1 biovar El Tor str. N16961
MPLLDSFTVDHTRMNAPAVRVAKTMQTPKGDTITVFDLRFTMPNKDILSERGIHTLEHLYAGFMRNHLNGSQVEIIDISPMGCRTGFYMSLIGAPTEQQVAQAWLAAMQDVLKVESQEQIPELNEYQCGTAAMHSLEEAKAIAKNVIAAGISVNRNDELALPESMLNELKVH

SEQ ID NO: 4638 - DNA, 477 bp, Bacillus halodurans C-125
  CDS (1)..(477): transl_table=11
atgccaacagttgaaagctttgagcttgaccatacgattgtaaaagcgccattcgtccgtccgtgtggtacacataaagtcgggactaacggagaggtgaacaagtttgacattcgtttttttcaaccaaataaacaggcgatgaagcctgatgtgattcatacactagagcatttacttgccttgaatattcgcaaatttgctgaagcatatgatcactttgatgtcattgatctttccccgatgggatgccaaacaggcttttatttaattatgagcggtaagccaacggtggaggaaatcatcgatgttctcgaacaaacgatgaagtattctcttgagctagaggaagtaccggctgctaacgagaagcagtgtgggcaagcaaaactccacgatttagacggcgcaaaaaaactcatgacctactggttgtctcatgagaaagattcgttaacaaaagtatttgaatcgtaa

SEQ ID NO: 4639 - protein, 158 aa, Bacillus halodurans C-125
MPTVESFELDHTIVKAPFVRPCGTHKVGTNGEVNKFDIRFFQPNKQAMKPDVIHTLEHLLALNIRKFAEAYDHFDVIDLSPMGCQTGFYLIMSGKPTVEEIIDVLEQTMKYSLELEEVPAANEKQCGQAKLHDLDGAKKLMTYWLSHEKDSLTKVFES

SEQ ID NO: 4640 - DNA, 507 bp, Pasteurella multocida subsp. multocida str. Pm70
  CDS (1)..(507): transl_table=11
atgccattacttgatagctttaaagttgaccatacccgtatgaaagcgccagcagtacgcattgcgaaaaccatgactaccccaaagggcgataacattactgtatttgatttacgtttttgcataccaaataaagagattctttccccaaaagggattcatactttagaacatctttttgcgggttttatgcgcgatcatttaaatgggacagaagtagaaattattgatatttcccctatgggctgtcgtacagggttttacatgtcattaattggcacacccaatgagcaacaggtggcagacgcttggttagcctcaatgcgagatgtgttattggtaaaagatcaagcacagatcccggaattaaatgccttccagtgcgggacttacaccgagcactcattagccgaagcacaacaaatcgcacacaatgtacttgagcgtggtgtgagtgtgaataaaaatgaagatttattactcgacgaacaattattatctctttaa

SEQ ID NO: 4641 - protein, 168 aa, Pasteurella multocida subsp. multocida str. Pm70
MPLLDSFKVDHTRMKAPAVRIAKTMTTPKGDNITVFDLRFCIPNKEILSPKGIHTLEHLFAGFMRDHLNGTEVEIIDISPMGCRTGFYMSLIGTPNEQQVADAWLASMRDVLLVKDQAQIPELNAFQCGTYTEHSLAEAQQIAHNVLERGVSVNKNEDLLLDEQLLSL

SEQ ID NO: 4642 - DNA, 477 bp, Lactococcus lactis subsp. lactis Il1403
  CDS (1)..(477): transl_table=11
atggctgaagtagaatcttttcaattagaccacacaaaagtacttgccccttatgtccgcttaatcggtagcgaaactgggcctaaaggcgatgttatcactaattttgacgttcgttttgttcaacctaatgcgaatgccattggaatggccgctttacacactattgagcatagcatggctagtttaattcgcgatagaattgatggcatgattgacttttcaccttttggatgtcaaactggtttccacatgattatgtggggtgaacatagttcagaagaaattgctaaagtaattaaatcttctctagaagagcttgcaagtgacgaatttggttgggataatgtccctggtgttgctgaaaaagaatgcggaaattaccgtaatcactcacttttcggtgctaaagaatggtctaagaaaattctttctgaaggaatttctactgacccttacgaacgtaaagtaatttaa

SEQ ID NO: 4643 - protein, 158 aa, Lactococcus lactis subsp. lactis Il1403
MAEVESFQLDHTKVLAPYVRLIGSETGPKGDVITNFDVRFVQPNANAIGMAALHTIEHSMASLIRDRIDGMIDFSPFGCQTGFHMIMWGEHSSEEIAKVIKSSLEELASDEFGWDNVPGVAEKECGNYRNHSLFGAKEWSKKILSEGISTDPYERKVI

SEQ ID NO: 4644 - DNA, 507 bp, Neisseria meningitidis MC58
  CDS (1)..(507): transl_table=11
atgcccctactagacagtttcaaagtcgatcacacccgtatgcatgcccccgccgtacgcgtggcgaaaaccatgactacgcccaaaggcgacaccattaccgtgtttgacctgcgcttttgcgttcccaacaaagaaatcctgcctggaaaaggcatacacacgctggagcatttgttcgcaggttttatgcgcgaccacttgaacggcaacggcgtggaaatcatcgacatttccccgatgggctgccgcaccggtttttatatgagtcttatcggcacgccttccgaacagcaggtcgccgatgcgtggctggcttcgatgcaggatgttttgaatgtcaaagaccaaagcaaaatccccgagttgaacgaataccaatgcggcacttatcaaatgcactcgctcgccgaagcgcagcaaatcgcgcaaaacgtgttggcgcgcaaagtggcggtgaacaaaaatgaagagctgacgctggatgaagggctgctgaacgcctaa

SEQ ID NO: 4645 - protein, 168 aa, Neisseria meningitidis MC58
MPLLDSFKVDHTRMHAPAVRVAKTMTTPKGDTITVFDLRFCVPNKEILPGKGIHTLEHLFAGFMRDHLNGNGVEIIDISPMGCRTGFYMSLIGTPSEQQVADAWLASMQDVLNVKDQSKIPELNEYQCGTYQMHSLAEAQQIAQNVLARKVAVNKNEELTLDEGLLNA

SEQ ID NO: 4646 - DNA, 516 bp, Escherichia coli O157:H7 EDL933
  CDS (1)..(516): transl_table=11
atgccgttgttagatagcttcacagtcgatcatacccggatggaagcgcctgcagttcgggtggcgaaaacaatgaacaccccgcatggcgacgcaatcaccgtgttcgatctgcgcttctgcgtgccgaacaaagaagtgatgccagaaagagggatccataccctggagcacctgtttgctggttttatgcgtaaccatcttaacggtaatggtgtagagattatcgatatctcgccaatgggctgccgcaccggtttttatatgagtctgattggtacgccagatgagcagcgtgttgctgatgtctggaaagcggcaatggaagacgtgctgaaagtgcaggatcagaatcagattccggagctgaacgtctaccagtgtggcacttaccagatgcactcgttgcaggaagcgcaggatattgcgcgtagcattctggaacgtgacgtgcgcatcaacagcaacgaagaactggcgctgccgaaagagaagttgcaggaactgcacatttag

SEQ ID NO: 4647 - protein, 171 aa, Escherichia coli O157:H7 EDL933
MPLLDSFTVDHTRMEAPAVRVAKTMNTPHGDAITVFDLRFCVPNKEVMPERGIHTLEHLFAGFMRNHLNGNGVEIIDISPMGCRTGFYMSLIGTPDEQRVADVWKAAMEDVLKVQDQNQIPELNVYQCGTYQMHSLQEAQDIARSILERDVRINSNEELALPKEKLQELHI

SEQ ID NO: 4648 - DNA, 477 bp, Deinococcus radiodurans R1
  CDS (1)..(477): transl_table=11
atgcccgacatggcaaacgtcgaatcgttcgatctggaccacaccaaggtcaaggctccctatgtccgcctcgccggggtcaagaccaccccgaagggtgaccagatctccaagtacgacctgcgcttcttgcagcccaaccagggcgccatcgaccccgccgccattcacacgctcgagcacctgctggcgggctacatgcgcgaccacctcgagggcgtggtggacgtgtccccgatgggctgccgcaccggcatgtacatggccgtcatcggtgaacccgacgagcagggcgtgatgaaagccttcgaggcggccctcaaggacaccgccgggcacgaccaacccattcccggcgtgagcgaactcgaatgcggcaactaccgcgaccacgacctcgccgccgcccgccagcacgcccgcgacgtgctcgaccaggggctgaaagttcaggaaaccattctgctcgaacgctga

SEQ ID NO: 4649 - protein, 158 aa, Deinococcus radiodurans R1
MPDMANVESFDLDHTKVKAPYVRLAGVKTTPKGDQISKYDLRFLQPNQGAIDPAAIHTLEHLLAGYMRDHLEGVVDVSPMGCRTGMYMAVIGEPDEQGVMKAFEAALKDTAGHDQPIPGVSELECGNYRDHDLAAARQHARDVLDQGLKVQETILLER

SEQ ID NO: 4650 - DNA, 504 bp, Haemophilus influenzae Rd KW20
  CDS (1)..(504): transl_table=11
atgccattacttgatagttttaaagtggatcacacaaaaatgaacgcacctgcagtacgcattgcaaaaacgatgctcacgccaaaaggcgataatattactgtttttgatttacgtttttgtattccaaacaaagaaattctttccccaaaaggcattcatacacttgaacatttatttgctggatttatgcgcgatcatttaaatggcgatagcatagaaattattgatatttctccgatgggatgtcgcacgggattttatatgtctttgattggcacaccaaatgaacagaaagtgtctgaggcttggttagcttcaatgcaagatgttttaggtgtacaagatcaagcttctattcctgaattaaatatctatcaatgcggaagctatacggaacattccttagaagatgcacacgaaattgccaaaaatgttatcgcacgcggtataggtgtaaataaaaatgaagatttgtcactcgataattccttattaaaatag

SEQ ID NO: 4651 - protein, 167 aa, Haemophilus influenzae Rd KW20
MPLLDSFKVDHTKMNAPAVRIAKTMLTPKGDNITVFDLRFCIPNKEILSPKGIHTLEHLFAGFMRDHLNGDSIEIIDISPMGCRTGFYMSLIGTPNEQKVSEAWLASMQDVLGVQDQASIPELNIYQCGSYTEHSLEDAHEIAKNVIARGIGVNKNEDLSLDNSLLK

SEQ ID NO: 4652 - DNA, 516 bp, Salmonella enterica subsp. enterica serovar Typhi str. CT18
  CDS (1)..(516): transl_table=11
atgccattattagatagcttcgcagtcgatcatacccggatgcaagcgccggcggtccggggtgcaaaaacgatgaacaccccgcatggcgacgcaatcaccgtgtttgatctgcgtttttgcattccgaacaaagaagtgatgccggaaaaagggattcatacgcttgagcatctgtttgctggctttatgcgcgaccacctcaacggtaacggcgttgagattatcgatatctcgccgatgggctgccgcaccggcttttacatgagcctgattggcacgccggacgagcagcgtgttgccgacgcttggaaagcggcgatggcggatgtgctgaaagtgcaggatcaaaaccagatcccggagctgaacgtttaccagtgcggtacgtatcagatgcactcgctcagtgaagcgcaggacattgcccgtcatattctggagcgtgatgtgcgcgtgaacagcaataaagagctggcgctgccgaaagaaaaactgcaggaattgcatatttag

SEQ ID NO: 4653 - protein, 171 aa, Salmonella enterica subsp. enterica serovar Typhi str. CT18
MPLLDSFAVDHTRMQAPAVRGAKTMNTPHGDAITVFDLRFCIPNKEVMPEKGIHTLEHLFAGFMRDHLNGNGVEIIDISPMGCRTGFYMSLIGTPDEQRVADAWKAAMADVLKVQDQNQIPELNVYQCGTYQMHSLSEAQDIARHILERDVRVNSNKELALPKEKLQELHI

SEQ ID NO: 4654 - DNA, 468 bp, Listeria monocytogenes EGD-e
  CDS (1)..(468): transl_table=11
atggcagaaaaaatgaatgtagaaagttttaatttagaccatacgaaagtaaaagcaccttttgtgagactggcgggaacgaaagtgggcgtccatggagatgaaatatacaaatatgatgttcgctttaaacaacctaataaagaacatatggaaatgccagcgctacactctttagaacatttgatggcagaacttgcaagaaatcatactgataaattagtagacattagcccaatgggatgtcaaacaggcttttatgtttccttcattaatcatagcgactatgatgatgcactcgaaatcatcgctacaacactaacggatgttttagttgcgacagaagttcctgcatgcaatgaagtccaatgcggttgggcagcaagccatagtttagaaggtgcaaaagcacttgcagaagaatttctagctaaacgaagcgaatggaaaaatgtgtttggtgaataa

SEQ ID NO: 4655 - protein, 155 aa, Listeria monocytogenes EGD-e
MAEKMNVESFNLDHTKVKAPFVRLAGTKVGVHGDEIYKYDVRFKQPNKEHMEMPALHSLEHLMAELARNHTDKLVDISPMGCQTGFYVSFINHSDYDDALEIIATTLTDVLVATEVPACNEVQCGWAASHSLEGAKALAEEFLAKRSEWKNVFGE

SEQ ID NO: 4656 - DNA, 468 bp, Listeria innocua Clip11262
  CDS (1)..(468): transl_table=11
atggcagaaaaaatgaacgtagaaagttttaatttagatcacaccaaagtaaaagcgccttttgttagacttgctggaacaaaagttggtgtgcatggggatgagatttataaatatgatgttcgctttaagcaaccaaataaagaacatatggaaatgcctgcactgcactctctagaacacttgatggctgaacttgccagaaaccacaccgataaattagtcgacattagtcccatgggctgccagactggtttttatatgtcatttatcaaccataatgattatgatgatgctttagaaattttagctactactttaacggatgtattagccgcagattcggttccagcatgcaatgaagtacaatgcggttgggcagcgagtcatagtttagaaggtgccaaagagcttgcagaagaattcttagcgaaacgaagcgaatggaaaaatgtctttggtgaataa

SEQ ID NO: 4657 - protein, 155 aa, Listeria innocua Clip11262
MAEKMNVESFNLDHTKVKAPFVRLAGTKVGVHGDEIYKYDVRFKQPNKEHMEMPALHSLEHLMAELARNHTDKLVDISPMGCQTGFYMSFINHNDYDDALEILATTLTDVLAADSVPACNEVQCGWAASHSLEGAKELAEEFLAKRSEWKNVFGE

SEQ ID NO: 4658 - DNA, 456 bp, Clostridium perfringens str. 13
  CDS (1)..(456): transl_table=11
gtggttaaagttgaaagttttgaattagatcatacaaaggttaaggcaccatatgtaagaaaagcaggaataaagattggacctaaaggagatatagtttcaaagtttgatttgagatttgtacaacctaataaagaacttttaagtgataagggaatgcatacattagaacattttttagcaggctttatgagagaaaaattagatgatgtaatagacatatcaccaatgggatgcaaaacaggtttttatttaactagttttggagatattgatgttaaagatattatagaagctttagagtattcactatctaaggttttagagcaagaagagataccagcagcaaatgaattacaatgtggaagtgcaaagttacattcactagagttagctaagagtcatgcaaaacaggttttagaaaatggaataagtgataaattttatgtagagtaa

SEQ ID NO: 4659 - protein, 151 aa, Clostridium perfringens str. 13
MVKVESFELDHTKVKAPYVRKAGIKIGPKGDIVSKFDLRFVQPNKELLSDKGMHTLEHFLAGFMREKLDDVIDISPMGCKTGFYLTSFGDIDVKDIIEALEYSLSKVLEQEEIPAANELQCGSAKLHSLELAKSHAKQVLENGISDKFYVE

SEQ ID NO: 4660 - DNA, 495 bp, Bifidobacterium longum NCC2705
  CDS (1)..(495): transl_table=11
atggcagaagaaacggccgaaaagcccgtcgtcgaatcattccagcttgatcacaccaaggtcaaggcgccgtacgtgcgttacatcgacaccgaaacgggccctcacggcgacgtgatctccaactatgatctgcgcctgacccagccgaacgagcaggccatccccaccggcggcctgcacaccatcgaacacaccatcgccgtgctgctgcgtgaacgcattcccggctacatcgactgctcgccgttcggctgccgcaccggcttccacctgctgacctggggcacccactccaccgaggatgtggccaaggcgttgaaggaatcgttggagttcatcgcatacaaggccacatgggatgacgtgcccgccaccaccgagaagagctgcggcaactatcgcgaccacagcctgttcaccgccaaggaatgggccaagctgatccttgaggaaggcatcagctccgacccgttcgagcgcaaggtcgtctga

SEQ ID NO: 4661 - protein, 164 aa, Bifidobacterium longum NCC2705
MAEETAEKPVVESFQLDHTKVKAPYVRYIDTETGPHGDVISNYDLRLTQPNEQAIPTGGLHTIEHTIAVLLRERIPGYIDCSPFGCRTGFHLLTWGTHSTEDVAKALKESLEFIAYKATWDDVPATTEKSCGNYRDHSLFTAKEWAKLILEEGISSDPFERKVV

SEQ ID NO: 4662 - DNA, 483 bp, Streptococcus mutans UA159
  CDS (1)..(483): transl_table=11
atgacaaaagaagttactgttgaaagctttgaacttgatcacattgctgtaaaagccccttatgtccgtcttatttcagaagagtttggacctaaaggcgatcttattaccaattttgatattcgcttagtacagcctaatgaagactctattccgactgcaggccttcatactattgaacatttactggctaagctgattcgtcagcgtattgacgggatgattgactgttccccttttggctgtcgtactggttttcatctcatcatgtggggtaagcatacaacaacccaaatagccacagtcatcaaagcaagtttagaagaaattgctaatacaatctcatggaaagatgtccctggaacaactattgagtcctgtgggaattacaaagatcatagccttttttcagctaaagaatgggcaaagctgattttaaaacaaggcatttcagatgatccttttgagcgtcatctagtgtaa

SEQ ID NO: 4663 - protein, 160 aa, Streptococcus mutans UA159
MTKEVTVESFELDHIAVKAPYVRLISEEFGPKGDLITNFDIRLVQPNEDSIPTAGLHTIEHLLAKLIRQRIDGMIDCSPFGCRTGFHLIMWGKHTTTQIATVIKASLEEIANTISWKDVPGTTIESCGNYKDHSLFSAKEWAKLILKQGISDDPFERHLV

SEQ ID NO: 4664 - DNA, 516 bp, Escherichia coli CFT073
  CDS (1)..(516): transl_table=11
atgccgttgttagatagcttcacagtcgatcatacccggatggaagcgcctgcagttcgggtggcaaaaacaatgaacaccccgcatggcgacgcaatcaccgtgttcgatctgcgcttctgcgtgccgaacaaagaagtgatgccagaaagagggatccataccctggagcacctgtttgctggttttatgcgtaaccatcttaacggtaatggcgtagagattatcgatatctcgccaatgggctgccgcaccggtttttatatgagtctgattggtacgccagatgagcagcgtgtcgctgatgcctggaaagcggcaatggaagacgtgctgaaagtgcaggatcagaatcagatcccggaactgaacgtctaccagtgtggcacttaccagatgcactcgttgcaggaagcgcaggatattgcgcgtaacattctggaacgtgacgtgcgcatcaacagcaacgaagaactggcgctgccgaaagagaagttgcaggaactgcacatttag

SEQ ID NO: 4665 - protein, 171 aa, Escherichia coli CFT073
MPLLDSFTVDHTRMEAPAVRVAKTMNTPHGDAITVFDLRFCVPNKEVMPERGIHTLEHLFAGFMRNHLNGNGVEIIDISPMGCRTGFYMSLIGTPDEQRVADAWKAAMEDVLKVQDQNQIPELNVYQCGTYQMHSLQEAQDIARNILERDVRINSNEELALPKEKLQELHI

SEQ ID NO: 4666 - DNA, 471 bp, Staphylococcus epidermidis ATCC 12228
  CDS (1)..(471): transl_table=11
atgactaaaatgaatgtagaaagctttaatttagaccatactaaggttgttgcaccttttattcgtctagccgggactatggaaggtcttaatggtgatgtcatacacaaatatgacattcgtttcaaacagcccaataaggaacatatggatatgcctggtctacattccttagagcatttaatggcagaaaacattagaaatcatactgataaagtagtagatttaagtcctatgggttgtcaaactggattctatgtttcatttattaatcatgacgactacgatgacgtattaaatattatcgatcaaacattgcatgatgtgttaaatgctagcgaagtcccagcttgtaatgaggttcaatgtggttgggctgcaagtcattctttagaaggtgctaaaacaattgctcaagcatttttagataaaagagagcaatggaatgacatctacggagaaggtaaataa

SEQ ID NO: 4667 - protein, 156 aa, Staphylococcus epidermidis ATCC 12228
MTKMNVESFNLDHTKVVAPFIRLAGTMEGLNGDVIHKYDIRFKQPNKEHMDMPGLHSLEHLMAENIRNHTDKVVDLSPMGCQTGFYVSFINHDDYDDVLNIIDQTLHDVLNASEVPACNEVQCGWAASHSLEGAKTIAQAFLDKREQWNDIYGEGK

SEQ ID NO: 4668 - DNA, 477 bp, Lactobacillus plantarum WCFS1
  CDS (1)..(477): transl_table=11
atggctaaagtagaaagttttacattagatcataccaaggttttagcaccttacgttcgtaaaattacggtggaaaatgggcctaagggtgatgccatcactaattttgatttgcggttagttcaacctaacaagaccgctattgatacggcgggcttacacacgattgaacatatgttggctggattattacgtgatcggatggatggcgtgattgactgctcaccatttggttgtcggactggttttcatttgattacttggggtgaacatgacaccgttgaagttgctaaggcattgaagtcctcattagaattcattgctggcccagctaagtgggaagacgtacaagggacgaccatcgatagctgtgggaattacaaggatcattctttattctcagctaaggaatgggccaagttgattttatcgcaaggaatttcatcggatccatttgtacgcaaagtcgttgaatag

SEQ ID NO: 4669 - protein, 158 aa, Lactobacillus plantarum WCFS1
MAKVESFTLDHTKVLAPYVRKITVENGPKGDAITNFDLRLVQPNKTAIDTAGLHTIEHMLAGLLRDRMDGVIDCSPFGCRTGFHLITWGEHDTVEVAKALKSSLEFIAGPAKWEDVQGTTIDSCGNYKDHSLFSAKEWAKLILSQGISSDPFVRKVVE

SEQ ID NO: 4670 - DNA, 498 bp, Helicobacter hepaticus ATCC 51449
  CDS (1)..(498): transl_table=11
atgccattacttgatagttttaaggttgatcatacaaaaatgccagctcctgcagtgcgtcttgcaaagactatgcaaacaccaaaaggcgatacaattagtgtatttgatttgcgttttacgcgcccaaattgtgagctattaagtgaaaaaggtattcacacaatggaacatttgattgcaggttttatgcgagagcatttaaataacacgcgtgtggaaattattgacatttcgcctatgggctgtcgcacagggttttatatgagtgtggtaggtgcaccaaatgaatataatgtaaaagaagcgtgggaatcaagtatgcgagatgtattgcgtatttgtgatgaaaaagacatacccgagcttaatatttatcaatgtggcacggcaaaaatgcactctcttaaagaggcgcaagatattgctcaagtagtgcttgataaaggcgtaagtgtaatgaatacacaagagttgcttttaaaagattttgcataa

SEQ ID NO: 4671 - protein, 165 aa, Helicobacter hepaticus ATCC 51449
MPLLDSFKVDHTKMPAPAVRLAKTMQTPKGDTISVFDLRFTRPNCELLSEKGIHTMEHLIAGFMREHLNNTRVEIIDISPMGCRTGFYMSVVGAPNEYNVKEAWESSMRDVLRICDEKDIPELNIYQCGTAKMHSLKEAQDIAQVVLDKGVSVMNTQELLLKDFA

SEQ ID NO: 4672 - DNA, 480 bp, Porphyromonas gingivalis W83
  CDS (1)..(480): transl_table=11
atggaaaaaattcccagttttcagttagatcatattcgcctcaaacgaggcatatatgtctcccgcaaggactatatagggggagaggtggttacgactttcgatattcgaatgaaagagcccaatcgcgaaccggtgcttggggcacccgaactgcatacgatcgagcatttggctgcaacttatctgcgtaatcatccgctttataaggacaggatcgttttctgggggccgatgggctgccttacgggcaattactttctgatgcgaggcgattacgtatccaaagatatactgcccctcatgcaggagactttccgcttcatcagagacttcgaaggagaagtgccgggtacggagccgcgcgactgtggcaactgcctgctgcacaacctgccgatggccaaatatgaggccgagaaatacctgcgtgaggtactcgatgtagcgacggaggagaacctgaactatcccgactga

SEQ ID NO: 4673 - protein, 159 aa, Porphyromonas gingivalis W83
MEKIPSFQLDHIRLKRGIYVSRKDYIGGEVVTTFDIRMKEPNREPVLGAPELHTIEHLAATYLRNHPLYKDRIVFWGPMGCLTGNYFLMRGDYVSKDILPLMQETFRFIRDFEGEVPGTEPRDCGNCLLHNLPMAKYEAEKYLREVLDVATEENLNYPD

SEQ ID NO: 4674 - DNA, 492 bp, Wolinella succinogenes DSM 1740
  CDS (1)..(492): transl_table=11
atgccattactagatagctttaaagtggatcacaccaaaatgcccgcccctgcggttcggctagccaaaactatgaccacccccaaaggggatgagatcgcggtttttgaccttcgattttgtcgtcccaatcaggagattttgagcgaaaaaggaatccatacgcttgagcatcttttcgctggattcatgagagagcacctcaatggagaaggaattgagattatcgatatttcacccatgggttgccgaacgggcttctacatgagtcttattggggtgcccaagaacgctagagtcctggaggcatggaggagatcaatggaagatattctgacgctaaagagcgaggaggagattcctgagctcaacatctaccagtgcggcaccgcctgcatgcactcgctcaaagaggcgcaagagatcgcgcgaactgttcttgatcgaggaatctccatcatggataatgaggcgctcaagctccagctctaa

SEQ ID NO: 4675 - protein, 163 aa, Wolinella succinogenes DSM 1740
MPLLDSFKVDHTKMPAPAVRLAKTMTTPKGDEIAVFDLRFCRPNQEILSEKGIHTLEHLFAGFMREHLNGEGIEIIDISPMGCRTGFYMSLIGVPKNARVLEAWRRSMEDILTLKSEEEIPELNIYQCGTACMHSLKEAQEIARTVLDRGISIMDNEALKLQL

SEQ ID NO: 4676 - DNA, 516 bp, Photorhabdus luminescens subsp. laumondii TTO1
  CDS (1)..(516): transl_table=11
atgcctttactggatagttttactgttgaccatactcgaatgaatgcgccagccgtaagagttgctaagactatgaaaacgcctcatggcgacaccatcacagttttcgacttacgtttctgcatacccaataaacaggttatgcctgaaaagggtattcatacacttgaacatttgtttgctggttttatgcgcaatcacctcaatggtgagggcgttgaaattattgatatatcgccaatgggatgtcgaacaggtttttatatgagcttgattggcgaaccggcagaagtacgtgttgcagacgcatggaaagcggctatggctgatgtcttgaaagtgaaagatcagagccagatcccggaactaaatatttatcaatgcggtacttatcacatgcattcactgacagaggctcaggatattgcacatcatattcttgattcagacgtcctcgttaataagaatgatgagttagcattgccagaagaaaaactgaccgaattgaaagtgtag

SEQ ID NO: 4677 - protein, 171 aa, Photorhabdus luminescens subsp. laumondii TTO1
MPLLDSFTVDHTRMNAPAVRVAKTMKTPHGDTITVFDLRFCIPNKQVMPEKGIHTLEHLFAGFMRNHLNGEGVEIIDISPMGCRTGFYMSLIGEPAEVRVADAWKAAMADVLKVKDQSQIPELNIYQCGTYHMHSLTEAQDIAHHILDSDVLVNKNDELALPEEKLTELKV

SEQ ID NO: 4678 - DNA, 477 bp, Lactobacillus johnsonii NCC 533
  CDS (1)..(477): transl_table=11
atgggtaaagttgaaagttttgaattagatcatactaaagttaaggcaccttacgttcgtttaattactgttgaagaaggacaaaaaggcgataaaattagtaattttgatcttcgtttggttcagcctaatgaaaatgcaattcctactggaggcttgcataccattgaacacttattagctggattattacgtgaccgcattgatggttatattgattgttcaccatttggttgccgtaccggcttccacctcttagtttggggtactccatcaactaccgatgtagctaaggcacttaaagaatcacttgaggaaattcgcgataatattacctgggaagatgttccaggaactacgatcgaatcctgtggtaattaccgcgaccactctcttttctcagctaagcaatggtcaagagatattttagaaaaaggtatttccgacgatccatttgagagacatgttgtagaataa

SEQ ID NO: 4679 - protein, 158 aa, Lactobacillus johnsonii NCC 533
MGKVESFELDHTKVKAPYVRLITVEEGQKGDKISNFDLRLVQPNENAIPTGGLHTIEHLLAGLLRDRIDGYIDCSPFGCRTGFHLLVWGTPSTTDVAKALKESLEEIRDNITWEDVPGTTIESCGNYRDHSLFSAKQWSRDILEKGISDDPFERHVVE

SEQ ID NO: 4680 - DNA, 516 bp, Yersinia enterocolitica subsp. enterocolitica 8081
  CDS (1)..(516): transl_table=11
atgccattattggatagctttaccgtagaccataccattatgaaagctccggctgtacgcgttgctaagacgatgaaaacccctcatggcgacgagataacggtattcgatttacgtttctgtgtgccaaataaagaagtgatgccagaacgagggattcatacacttgagcacttgtttgctggttttatgcgtaaccacctcaatggtaatggcgtggagattatcgatatatccccaatgggatgccgtaccggtttctatatgagcctgattggtacgccagatgagcaacgcgttgctgatgcctggaaagcggcaatggctgatgtattgaaagtgaccgaccagcgaaaaattcctgaattgaacgaatatcagtgtggtacttatcatatgcattcgctggaagaggcgcaggagattgccaaagggattatcgaccgcggcgtgcgtatcaatcacaacgaagaactggcattgccgaaagaaaaactgactgaattacatatctag

SEQ ID NO: 4681 - protein, 171 aa, Yersinia enterocolitica subsp. enterocolitica 8081
MPLLDSFTVDHTIMKAPAVRVAKTMKTPHGDEITVFDLRFCVPNKEVMPERGIHTLEHLFAGFMRNHLNGNGVEIIDISPMGCRTGFYMSLIGTPDEQRVADAWKAAMADVLKVTDQRKIPELNEYQCGTYHMHSLEEAQEIAKGIIDRGVRINHNEELALPKEKLTELHI

SEQ ID NO: 4682 - DNA, 477 bp, Lactococcus lactis subsp. cremoris MG1363
  CDS (1)..(477): transl_table=11
atggctgaagtagaatcttttcaattagatcacacaaaagtacttgccccttacgtacgcttaattggtagcgaaactggaccgaaaggtgatgttattactaactttgacgttcgttttgtacaacctaatgccaatgccattggtatggctgctttacatactatcgagcatagtatggcaagtttgattcgcgatagaatcgatggtatgattgacttttcaccatttggttgtcaaactggtttccacatgattatgtggggtgaacatagttccgaagaaattgcgaaagtgattaaatcttctctagaagagctttcaagtgatgaatttggttgggacaatgttcctggtgttgcggaaaaagaatgcggaaactaccgtaatcactcacttttcggtgctaaagaatggtctaagaaaatcctcgctgaaggaatttcaactgacccttacgaacgtaaagtcatttaa

SEQ ID NO: 4683 - protein, 158 aa, Lactococcus lactis subsp. cremoris MG1363
MAEVESFQLDHTKVLAPYVRLIGSETGPKGDVITNFDVRFVQPNANAIGMAALHTIEHSMASLIRDRIDGMIDFSPFGCQTGFHMIMWGEHSSEEIAKVIKSSLEELSSDEFGWDNVPGVAEKECGNYRNHSLFGAKEWSKKILAEGISTDPYERKVI

SEQ ID NO: 4684 - DNA, 639 bp, Streptococcus sanguinis SK36
  CDS (1)..(639): transl_table=11
atgcaaactttattcccaaataaaaaatttttatgctataatcagagaagaaaagatgcatatgagacaggctttttcttcgctaacaagacaaacctatggcttgatatcactagaaaaaccttctcgcactcgctacattgtaaaggagaaaccatgtctaaagaagttgtcgttgaaagctttgagctggatcacaccatcgtcaaagcgccttacgttcgcctcatcggagaggaaactggccctaaaggcgatatcatttccaattttgatatccgtctggttcagcctaatgaagattcaatcccaactgctggcctgcataccattgagcatttgctggccatgctgattcgcaagcgcattgatggtatgattgactgctcaccttttggctgccgcactggttttcatatgattatgtgggggcaacacagctccagccagattgctcaagtcatcaaatcctgtctggaagaaatcgctgagtcaactagctgggaagatgtccctggaacaaccattgaatcctgcggaaactacaaggatcacagcctcttttcagccaaagaatgggctaaacttattctcagccaagggatctctgacgatgcctttgaacgccatgtgatttaa

SEQ ID NO: 4685 - protein, 212 aa, Streptococcus sanguinis SK36
MQTLFPNKKFLCYNQRRKDAYETGFFFANKTNLWLDITRKTFSHSLHCKGETMSKEVVVESFELDHTIVKAPYVRLIGEETGPKGDIISNFDIRLVQPNEDSIPTAGLHTIEHLLAMLIRKRIDGMIDCSPFGCRTGFHMIMWGQHSSSQIAQVIKSCLEEIAESTSWEDVPGTTIESCGNYKDHSLFSAKEWAKLILSQGISDDAFERHVI

SEQ ID NO: 4686 - DNA, 456 bp, Clostridium difficile 630
  CDS (1)..(456): transl_table=11
atggaaaaagtagaaagttttaagctagaccatacaaaagtaaaagctccttttgtaagaaagtgtagtgtacttgatggagtaaagggagataaagtaactaaatttgacttgagatttttacagccaaatgtagaaagttttggaactgctgctatgcacggtttagagcatcttttagctacttatttaagagatacattagatggtgtaatagacttatctccaatgggatgtagaacaggattttatttaatactatggggagatgtagatgccaaaacagttaagattggtttagaagaagcattaaaaaaagttcttgaatcagataaaatgccagcagctacagccatagaatgtggaaactacagagacttatctttatttggggcaaaggaatatgcaaaagatgttttagataaaggattttctttaaatatatatggagaataa

SEQ ID NO: 4687 - protein, 151 aa, Clostridium difficile 630
MEKVESFKLDHTKVKAPFVRKCSVLDGVKGDKVTKFDLRFLQPNVESFGTAAMHGLEHLLATYLRDTLDGVIDLSPMGCRTGFYLILWGDVDAKTVKIGLEEALKKVLESDKMPAATAIECGNYRDLSLFGAKEYAKDVLDKGFSLNIYGE

SEQ ID NO: 4688 - DNA, 540 bp, Geobacillus thermodenitrificans NG80-2
  CDS (1)..(540): transl_table=11
atgcgggacgcccctcgttttggttatgataaaaaagagaatatacgattagggggaattcatatgccttcaccagtcgaaagctttgaattggatcactgcgccgtgaaagcgccgtacgtgcggcattgcggcgttcacaaaatcggaagcgacggtgtcgtcaataagttcgatattcgtttttgccagccgaacaaagaagcgatggatccggcggccattcatacgttggagcacttgttggcgtatacgctgcgcaaacatgtgaccaagtatgatcactttgacattatcgacatttcgccaatgggttgccaaacgggattttaccttgtcgtgagcggttcgccgaccgttgacgaaatcatcgatttgcttgaggagacgatgaaagacgccttgaatgcgacggaagtgccggctgcgaccgagcggcaatgcggccaagcgaagctgcatgacttagaggcggcgaaagagctgatgcgcttttggctgtcgcaagagaaaagcgaactgaaaaaagtgtttggctga

SEQ ID NO: 4689 - protein, 179 aa, Geobacillus thermodenitrificans NG80-2
MRDAPRFGYDKKENIRLGGIHMPSPVESFELDHCAVKAPYVRHCGVHKIGSDGVVNKFDIRFCQPNKEAMDPAAIHTLEHLLAYTLRKHVTKYDHFDIIDISPMGCQTGFYLVVSGSPTVDEIIDLLEETMKDALNATEVPAATERQCGQAKLHDLEAAKELMRFWLSQEKSELKKVFG

SEQ ID NO: 4690 - DNA, 516 bp, Enterobacter sp. 638
  CDS (1)..(516): transl_table=11
atgccgttattagatagcttcacagtcgaccatacccgtatggaagcccctgctgtacgtgtggcaaaaaccatgcataccccgagcggcgacgcgatcaccgtgtttgacctgcgtttttgcgtgccaaataaagaagtgatgccagaaaaaggcattcacacgctggagcatctgttcgcaggcttcatgcgcgatcacctgaacggtaacggtgtagaaatcatcgacatctctccgatgggctgccgtaccggtttctacatgagcctgattggtacacctgaagaaacgcgcgtagcggatgcctggaaagcggcgatggccgacgtgctgaaagttaaagagcagaaccagatcccagagctgaacgtctaccagtgcggtacgtatcacatgcactctctggaagaagcgcaggagatcgctcgtcatattctcgatcgtgatgttcgcgtgaacagtaacgaagagctggcgctgccgaaagaaacgctgaaagagctgcacatttag

SEQ ID NO: 4691 - protein, 171 aa, Enterobacter sp. 638
MPLLDSFTVDHTRMEAPAVRVAKTMHTPSGDAITVFDLRFCVPNKEVMPEKGIHTLEHLFAGFMRDHLNGNGVEIIDISPMGCRTGFYMSLIGTPEETRVADAWKAAMADVLKVKEQNQIPELNVYQCGTYHMHSLEEAQEIARHILDRDVRVNSNEELALPKETLKELHI

SEQ ID NO: 4692 - DNA, 495 bp, Streptococcus suis 05ZYH33
  CDS (1)..(495): transl_table=11
ttggaggaaaccatgaaaaaagaagtcactgtcgaaagcttcgagctagaccacactattgtaaaagcaccttacatccgcttaatttctgaagaagtcggaccaaaaggagacattattacaaactttgatattcgccttatccaacccaacgaaaatgcaatggatacagctggtctacataccatcgagcatctattagctaaactaattcgccagcgcatcgatgggctaatcgactgctctcctttcgggtgtcggacaggtttccacatgattatgtggggaaaacaagactctgaaaagattgctcaagtcatcaagtcgagtttggaagaaattgcagaaggcatcacttgggaggatgttcctgggacaaccattgaatcatgtggtaactacaaagaccacagccttcattcagctaaagaatgggccaaactaatcctttctcagggaatctctacagatgcctttgaaagaaaaccaatctaa

SEQ ID NO: 4693 - protein, 164 aa, Streptococcus suis 05ZYH33
MEETMKKEVTVESFELDHTIVKAPYIRLISEEVGPKGDIITNFDIRLIQPNENAMDTAGLHTIEHLLAKLIRQRIDGLIDCSPFGCRTGFHMIMWGKQDSEKIAQVIKSSLEEIAEGITWEDVPGTTIESCGNYKDHSLHSAKEWAKLILSQGISTDAFERKPI

SEQ ID NO: 4694 - DNA, 453 bp, Clostridium botulinum A str. ATCC 3502
  CDS (1)..(453): transl_table=11
atggttaaagtagaaagtttttcattagatcatacaaaggttaaggctccttttgtaaggaaatgtggaactcaaaaaggtgaaatgggtgatacaattacgaaatttgatttaagattttcacaacctaatgaggaagaaatgccaactggcgcagttcataccctagaacatttactagcaggttatatgagagaaaagatggataacatcatagatatttctccaatgggttgcagaacaggattttatttgatagcttggggagaagttgaagttgatactattattgaagcactaaattactcattaaataaagttatagaaacagaagaagttcctgcaactaatgcagttcagtgcggaaactatagagatcattccctattttcagcgaaagaatatgcaaaacatgttttaaaccaaggtattagcaatgaagtatttagatag

SEQ ID NO: 4695 - protein, 150 aa, Clostridium botulinum A str. ATCC 3502
MVKVESFSLDHTKVKAPFVRKCGTQKGEMGDTITKFDLRFSQPNEEEMPTGAVHTLEHLLAGYMREKMDNIIDISPMGCRTGFYLIAWGEVEVDTIIEALNYSLNKVIETEEVPATNAVQCGNYRDHSLFSAKEYAKHVLNQGISNEVFR

SEQ ID NO: 4696 - DNA, 477 bp, Lactobacillus reuteri DSM 20016
  CDS (1)..(477): transl_table=11
atggctaaagttgaaagttttacattagatcacacaaaggttaaagcaccttacgttcgtttaattactgttgaagaagggccaaagggagataagattagtaactatgatttacggttagttcaaccaaatgaaaatgcaattccaactgctggtttgcatacgattgaacacttgcttgctggcttgcttcgtgaccgcttgggtggcgtaattgattgctctccatttggctgccggactggtttccacttaattacatggggtgaacactcaactactgaagttgccaaggcattgaagtcttcacttgaagaaattgcctacaagactaagtgggaagatgttcaaggaacaacgattgaatcttgcggtaactaccgtgatcattcattattctctgcgaaggaatggtcaaagaagattcttgatgaaggtatttcagataagccatttgaacgccacgtggttgactaa

SEQ ID NO: 4697 - protein, 158 aa, Lactobacillus reuteri DSM 20016
MAKVESFTLDHTKVKAPYVRLITVEEGPKGDKISNYDLRLVQPNENAIPTAGLHTIEHLLAGLLRDRLGGVIDCSPFGCRTGFHLITWGEHSTTEVAKALKSSLEEIAYKTKWEDVQGTTIESCGNYRDHSLFSAKEWSKKILDEGISDKPFERHVVD

SEQ ID NO: 4698 - DNA, 486 bp, Bacteroides vulgatus ATCC 8482
  CDS (1)..(486): transl_table=11
atgaagacaatacccagttttaccattgaccatatccgcttgcttcgcggtatctatgtatccagaaaagacgaagtgggcggtgaaacggtcaccacctttgacatccgcatgaaagaacccaaccgggaacctgctttgggacaaggagccttgcataccatagagcatctagccgctacctacctgcgtaaccaccctatatggtctgacaaaattgtctactggggaccgatgggatgcctcaccggtaactacctgttaatgaaaggcgatttaaaatcggaagatattgtagaactgatgcaggaaacgttccgctttgtagccgattttgaaggcgaagttccgggagccgcccctaaagattgcggtaactacttgcttcacgacctacctatggccaaatgggagtcggccaaatatctgcatgaagtattggagcacatgacaaaagataatctgtattatcctactaaagagtaa

SEQ ID NO: 4699 - protein, 161 aa, Bacteroides vulgatus ATCC 8482
MKTIPSFTIDHIRLLRGIYVSRKDEVGGETVTTFDIRMKEPNREPALGQGALHTIEHLAATYLRNHPIWSDKIVYWGPMGCLTGNYLLMKGDLKSEDIVELMQETFRFVADFEGEVPGAAPKDCGNYLLHDLPMAKWESAKYLHEVLEHMTKDNLYYPTKE

SEQ ID NO: 4700 - DNA, 513 bp, Marinomonas sp. MWYL1
  CDS (1)..(513): transl_table=11
atgccattattagacagttttcgtgtcgaccacacacgtatggatgcaccggcagtacgtgtagctaaatccatgtccacacctaaaggtgatgacatcacagtgtttgatctacgcttctgcgtgccaaatgaagagatcctttctgagaaaggaattcacacactagaacatttgtttgctggtttcatgcgtgaccatctaaacagtaacaacgtcgaaattatcgatatttcgccaatgggttgtcgtactggtttctacatgagtttgatcggcacaccttcagaagaaactgttgcggcttcttggaaagctgcaatggaagacgtattgaaagtaaaagccaaatctgacattccagagttgaacgaataccaatgtggcacttacgaaatgcattccctagaagaagcgcaagaaatcgcgaaaatgattctagaccgtgatgtgaaagtaaacagtaacgaagagttgtacctaagcgaagagttcttaaaagaacacagctaa

SEQ ID NO: 4701 - protein, 170 aa, Marinomonas sp. MWYL1
MPLLDSFRVDHTRMDAPAVRVAKSMSTPKGDDITVFDLRFCVPNEEILSEKGIHTLEHLFAGFMRDHLNSNNVEIIDISPMGCRTGFYMSLIGTPSEETVAASWKAAMEDVLKVKAKSDIPELNEYQCGTYEMHSLEEAQEIAKMILDRDVKVNSNEELYLSEEFLKEHS

SEQ ID NO: 4702 - DNA, 510 bp, Sulfurovum sp. NBC37-1
  CDS (1)..(510): transl_table=11
atgccactattagacagttttacagtagaccacactagaatgatcgctcccgcagtgagagttgcgaaaagaatgaagaccccatgcggagatgacattaccgtttttgacctgcgtttctgcaaaccaaatgaagagagaatgccttccaaagggatacatacgcttgaacacctttttgccggtttcatgagagagcatctcaactccaaaaaagtggagatcatcgatatctcacctatggggtgcagaacagggttctatatgtctcttctgggtacgccgaaacctaaaagagttgccaaagcctgggcagcatcgatgaaagatgtcttgaatgtgaagtcgcagaaggatatccctgaactcaatgtctatcagtgcggttcctacaagatgcattctcttaaagaggctaaggagatcgcacaaaacgtgttagacagaggtattggtattatgaataacaagaagttgaaactcagcaaaaaacttttaaaaggattgtaa

SEQ ID NO: 4703 - protein, 169 aa, Sulfurovum sp. NBC37-1
MPLLDSFTVDHTRMIAPAVRVAKRMKTPCGDDITVFDLRFCKPNEERMPSKGIHTLEHLFAGFMREHLNSKKVEIIDISPMGCRTGFYMSLLGTPKPKRVAKAWAASMKDVLNVKSQKDIPELNVYQCGSYKMHSLKEAKEIAQNVLDRGIGIMNNKKLKLSKKLLKGL

SEQ ID NO: 4704 - DNA, 474 bp, Bacillus cereus subsp. cytotoxis NVH 391-98
  CDS (1)..(474): transl_table=11
atgccatcagtagaaagctttgaattagatcatacaattgtaaaggctccttatgtaagacattgtggtgttcatcaagtaggtagcgacggtattgtaaataagtttgatatccgtttttgccaaccaaataaacaagcgatgaaaccagatgtgattcatacgttagaacatctattagcgtttaacttacgtaaatatatcgatcgttatccacattttgatattatcgacatttcaccaatgggttgccaaacaggatattatcttgttgtaagtggtacaccgacagttcgtgaaatcattgatttattagaactaacgttaaaagatgcagttcaaataacagaaatcccagctgccaatgaaacgcaatgtgggcaagcgaaacttcatgatttagaaggagcaaaacgcttgatgaatttctggttaagccaagataaagacgatcttgaaaaagtatttggttaa

SEQ ID NO: 4705 - protein, 157 aa, Bacillus cereus subsp. cytotoxis NVH 391-98
MPSVESFELDHTIVKAPYVRHCGVHQVGSDGIVNKFDIRFCQPNKQAMKPDVIHTLEHLLAFNLRKYIDRYPHFDIIDISPMGCQTGYYLVVSGTPTVREIIDLLELTLKDAVQITEIPAANETQCGQAKLHDLEGAKRLMNFWLSQDKDDLEKVFG

SEQ ID NO: 4706 - DNA, 495 bp, Campylobacter jejuni subsp. doylei 269.97
  CDS (1)..(495): transl_table=11
atgccattattagacagctttaaagttgaccatactaaaatgccagcgcctgccgtgcgtttagctaaagttatgaaaaccccaaagggtgatgatattagcgtgtttgatttgcgtttttgtgtaccaaataaagacattatgagtgaaaaaggcacgcataccctagagcatttatttgcaggttttatgagagagcatttaaattcaaatgcggttgaaatcatcgatatttcgcctatgggttgtcgcacgggtttttatatgagtctgattggaacacccgatgaaaaaagcgtggttaaggcttgggaaaattctatgcaagatgtgcttaaggtaaaatcccaagaagacatacccgagcttaatatttatcaatgcggctcttgtaaattacactcccttgatgaagcaaagcaaatcgctcaaaaagttttaaattcaggcataggcgtgatgaataacgctgaattaaaacttgaaaatctttag

SEQ ID NO: 4707 - protein, 164 aa, Campylobacter jejuni subsp. doylei 269.97
MPLLDSFKVDHTKMPAPAVRLAKVMKTPKGDDISVFDLRFCVPNKDIMSEKGTHTLEHLFAGFMREHLNSNAVEIIDISPMGCRTGFYMSLIGTPDEKSVVKAWENSMQDVLKVKSQEDIPELNIYQCGSCKLHSLDEAKQIAQKVLNSGIGVMNNAELKLENL

SEQ ID NO: 4708 - DNA, 495 bp, Campylobacter hominis ATCC BAA-381
  CDS (1)..(495): transl_table=11
atgcctcttttagatagttttaaagtagatcatacaaagatgaaagctccaggggttcgtcttgcaaaagttatgcaaactccaaaaggtgataatataagtgtttttgatttaagattttgccgcccaaatcacgaaattatgagcgaaaaaggcacacacacgttagaacatctttttgcaggttttatgcgcgaacatttaaacagcaaagatgtcgaaataatcgatatttcgcctatgggttgccgtacaggattttatatgagtttaatcggaagacctagcgaaacggaagttataaaagcatttgaaaattctatgaaagatgttttaaaagttacatcacaggacgatatacctgaacttaataaatttcaatgcggaagctataaaatgcacagtttaagcgaagcaaaagaaattgcgcaaaatgttttaaataaaggcatttgcataattaaaaacgatgaaataaagcttgaaaatttttaa

SEQ ID NO: 4709 - protein, 164 aa, Campylobacter hominis ATCC BAA-381
MPLLDSFKVDHTKMKAPGVRLAKVMQTPKGDNISVFDLRFCRPNHEIMSEKGTHTLEHLFAGFMREHLNSKDVEIIDISPMGCRTGFYMSLIGRPSETEVIKAFENSMKDVLKVTSQDDIPELNKFQCGSYKMHSLSEAKEIAQNVLNKGICIIKNDEIKLENF

SEQ ID NO: 4710 - DNA, 474 bp, Bacillus amyloliquefaciens FZB42
  CDS (1)..(474): transl_table=11
atgccttcagtagaaagttttgagcttgaccataatgcggttgtggctccgtatgtaagacattgcggagtgcataaagtcggaacagacggcgtcgtgaataagtttgacattcgcttctgccagccgaacaaacaggcgatgaagccggataccattcatacgcttgagcacttgcttgcgtttacgattcgcacacattctgagaaatacgatcacttcgacatcatagatatctcaccgatgggctgccagacaggctattatcttgttgtcagcggggagccgacagcggaagaaattgtagacctgcttgacgctacgctgaaagaagccatcgatattacggagattccggcggccaacgaaaaacagtgcggccaggcgaaacttcatgatttagaaggcgcgaaacgtctgatgcgtttctggctgtcacaggataaagaagatttgctgaaagtgttcggataa

SEQ ID NO: 4711 - protein, 157 aa, Bacillus amyloliquefaciens FZB42
MPSVESFELDHNAVVAPYVRHCGVHKVGTDGVVNKFDIRFCQPNKQAMKPDTIHTLEHLLAFTIRTHSEKYDHFDIIDISPMGCQTGYYLVVSGEPTAEEIVDLLDATLKEAIDITEIPAANEKQCGQAKLHDLEGAKRLMRFWLSQDKEDLLKVFG

SEQ ID NO: 4712 - DNA, 516 bp, Cronobacter sakazakii ATCC BAA-894
  CDS (1)..(516): transl_table=11
atgccattgcttgatagcttcactgttgaccatacccgtatggaagcgcctgcggtacgtgtggcgaagaccatgaacacgccgcacggcgataccatcaccgtgttcgacctgcgtttttgcgtgccgaacaaagaagtgatgccggaaaaaggcattcacacgctggagcacctgtttgccggtttcatgcgcgatcatctgaacggcaacggtgtagagatcatcgatatctccccgatgggctgccgcaccggtttctatatgagcctcatcggccagcctgacgagcagcgcgtggctgacgcctggaaagcggcaatgcaggacgtgttgaaagtaaaagcgcagaatcagatccctgagctgaacgtctaccagtgcggcacttatgagatgcactcgctggaagaggcccaggaaatcgcccgccatattatcgaacgtggcgtaggcgttaacagcaatgatgcgctggcgctgccgaaagaaaaattacaggaactgcacctgtaa

SEQ ID NO: 4713 - protein, 171 aa, Cronobacter sakazakii ATCC BAA-894
MPLLDSFTVDHTRMEAPAVRVAKTMNTPHGDTITVFDLRFCVPNKEVMPEKGIHTLEHLFAGFMRDHLNGNGVEIIDISPMGCRTGFYMSLIGQPDEQRVADAWKAAMQDVLKVKAQNQIPELNVYQCGTYEMHSLEEAQEIARHIIERGVGVNSNDALALPKEKLQELHL

SEQ ID NO: 4714 - DNA, 483 bp, Streptococcus gordonii str. Challis substr. CH1
  CDS (1)..(483): transl_table=11
atgtctaaagaagttattgttgaaagtttcgagcttgatcacaccatcgttaaggccccttatgtacgactcattggagaagaaagcggaccaaaaggagatgttatttctaattttgatatccgacttgtccagcccaatgaagattccattccaactgcaggactccataccattgaacacctgctagctatgcttatccgtaaacgcattgatggaatgattgattgctccccttttggctgccgaactggtttccatatgatcatgtggggacgtcataccccatctgaaattgctcaagtgatcaaatcatgcctcgaagagatcgccgaaaccaccacttgggaggacgtcccaggaactacaattgagtcttgcggaaactataaagatcacagcctcttttctgccaaggagtgggcaaagttaatcctcaaacaaggcatctcagataatgctttcgaacgccatgtcatttga

SEQ ID NO: 4715 - protein, 160 aa, Streptococcus gordonii str. Challis substr. CH1
MSKEVIVESFELDHTIVKAPYVRLIGEESGPKGDVISNFDIRLVQPNEDSIPTAGLHTIEHLLAMLIRKRIDGMIDCSPFGCRTGFHMIMWGRHTPSEIAQVIKSCLEEIAETTTWEDVPGTTIESCGNYKDHSLFSAKEWAKLILKQGISDNAFERHVI

SEQ ID NO: 4716 - DNA, 516 bp, Campylobacter concisus 13826
  CDS (1)..(516): transl_table=11
atgccactacttgatagtttttgcgtagatcatgtgaagatgaaagccccaggagtaagacttgcaaagagtatgaaaaccccaaaaggcgatgatatcagcgtttttgacttgagattttgcaagccaaatgaagaaattttgccagaaaaaggcactcacactttagagcacctatttgctggctttatgagaaaccatctaaacggcaacggcgtagagatcatagacatctcgccgatgggttgtaggactggcttttatatgagcgtgatcggcacacctagcgaagaagctgtaaaaaaggcatggcttgcttcgatgaaagatatcttagaagtcaaagatcaagataaaatcccagagctaaataaatttcaatgcggcacttacaagatgcactcacttgatgaagcgcacgccatagcaagcaaaattttagcacaaggcctagtcatcataaacaacgatgagatcaagcttgacgttgatgctatgggactaaaaaagcactga

SEQ ID NO: 4717 - protein, 171 aa, Campylobacter concisus 13826
MPLLDSFCVDHVKMKAPGVRLAKSMKTPKGDDISVFDLRFCKPNEEILPEKGTHTLEHLFAGFMRNHLNGNGVEIIDISPMGCRTGFYMSVIGTPSEEAVKKAWLASMKDILEVKDQDKIPELNKFQCGTYKMHSLDEAHAIASKILAQGLVIINNDEIKLDVDAMGLKKH

SEQ ID NO: 4718 - DNA, 510 bp, Shewanella sediminis HAW-EB3
  CDS (1)..(510): transl_table=11
atgcccttacttgatagttttactgttgaccatacccgcatgcaggccccggcggttcgaattgcgaaaaccatgaaaaccccaaagggtgacgtcattacggttttcgatctgcgtttttgtgtacctaataaagagatattaagtgaaagaggcattcatactctggaacacctttatgccgggtttatgcgtgatcatttaaatggtgattctgtcgaaattatcgatatctccccaatgggctgtcgtaccggcttttatatgagtctgattggtactccggcagaagctgatgtcgcccaagcctggcttgcttctatgaacgatgtattaaaagtcgcagaacaagctcagatccccgaattaaacgaatatcagtgcggaacatttgatatgcattcgttagatcaggctcagagtatcgctcgttcaattatcgctgcagggatcactgttaataagaatgatgagttgaaattgagtgacgagatactgaacggtttataa

SEQ ID NO: 4719 - protein, 169 aa, Shewanella sediminis HAW-EB3
MPLLDSFTVDHTRMQAPAVRIAKTMKTPKGDVITVFDLRFCVPNKEILSERGIHTLEHLYAGFMRDHLNGDSVEIIDISPMGCRTGFYMSLIGTPAEADVAQAWLASMNDVLKVAEQAQIPELNEYQCGTFDMHSLDQAQSIARSIIAAGITVNKNDELKLSDEILNGL

SEQ ID NO: 4720 - DNA, 495 bp, Campylobacter jejuni subsp. jejuni 81116
  CDS (1)..(495): transl_table=11
atgccattattagacagctttaaagttgaccatactaaaatgccagctcctgctgtgcgtttagctaaagttatgaaaacacctaagggtgatgatattagcgtgtttgatttgcgtttttgtataccaaataaagacattatgagcgaaaaaggtacacataccttagaacatttatttgcaggatttatgagagatcatcttaattcaaattcagttgaaattattgatatttcacctatgggttgtcgcacgggtttttatatgagtttaattggaacaccagatgaaaaaagtgttgcaaaagcttgggaagaagctatgaaagatgttttaagcgtaagcgatcaaagcaaaattcctgaacttaatatctatcaatgcggaacttgcgcaatgcattctttagatgaagccaaacaaattgcccaaaaggttttaaatctaggtattagcataatgaataacaaagaattaaaactcgagaatgcttaa

SEQ ID NO: 4721 - protein, 164 aa, Campylobacter jejuni subsp. jejuni 81116
MPLLDSFKVDHTKMPAPAVRLAKVMKTPKGDDISVFDLRFCIPNKDIMSEKGTHTLEHLFAGFMRDHLNSNSVEIIDISPMGCRTGFYMSLIGTPDEKSVAKAWEEAMKDVLSVSDQSKIPELNIYQCGTCAMHSLDEAKQIAQKVLNLGISIMNNKELKLENA

SEQ ID NO: 4722 - DNA, 474 bp, Bacillus pumilus SAFR-032
  CDS (1)..(474): transl_table=11
atgccttcagttgaaagctttgaacttgatcataatgctgtaaaagcgccatacgttcgtcattgtggcgttcataaagtgggatcagatggagaagtcaataaatttgatattcgtttttgtcagccaaacaaacaagcaatgaaacctgatacgattcatacattagagcatttacttgcgtttaacattagaacacactcagagaaatatgatcattttgatatcattgatatttctccaatgggctgtcagacaggctactatttagtggtcagtggtgcaccaactccagaagaaatcgttgaacttcttgatgcaacattcaaggatgcagttgaggtaacagagattcctgctgcaaacgaagagcaatgcggtcaagcgaaacttcatgaccttgaaggggcaaaacgtttgatgcgtttctggctttctcaagatcaagaagagcttctcaaagtatttggttaa

SEQ ID NO: 4723 - protein, 157 aa, Bacillus pumilus SAFR-032
MPSVESFELDHNAVKAPYVRHCGVHKVGSDGEVNKFDIRFCQPNKQAMKPDTIHTLEHLLAFNIRTHSEKYDHFDIIDISPMGCQTGYYLVVSGAPTPEEIVELLDATFKDAVEVTEIPAANEEQCGQAKLHDLEGAKRLMRFWLSQDQEELLKVFG

SEQ ID NO: 4724 - DNA, 516 bp, Arcobacter butzleri RM4018
  CDS (1)..(516): transl_table=11
atgccattattagatagttttagagttgaccatacgattatgccagcacctgctgttagagttgcaaaagttatgcaaactccaaaaggtgatgatattacagtttttgatttaagattttgtgtaccaaataaatcaatgatgagtgaaaaaggaactcatactttagaacacctttttgctggatttattagaaatcatttgaactctccaacagttgaaatcatcgatgtttcacctatgggttgtagaactggattttatatgagtttgattggaactccaagtgaacaagaagttgccgttgcttggaaaaaagctatggaagatgttttaaaagttgaaaaccaaagtgatattccagaactaaatctatatcaatgtggaacttgtgctatgcactcacttgatgaagcaaaagatattgcaagagatattttaaaatcacaaatcggtgttatgtcaaacaaagaactttatcttagcgaagagaaattaaaatctttaggaaactaa

SEQ ID NO: 4725 - protein, 171 aa, Arcobacter butzleri RM4018
MPLLDSFRVDHTIMPAPAVRVAKVMQTPKGDDITVFDLRFCVPNKSMMSEKGTHTLEHLFAGFIRNHLNSPTVEIIDVSPMGCRTGFYMSLIGTPSEQEVAVAWKKAMEDVLKVENQSDIPELNLYQCGTCAMHSLDEAKDIARDILKSQIGVMSNKELYLSEEKLKSLGN

SEQ ID NO: 4726 - DNA, 459 bp, Alkaliphilus oremlandii OhILAs
  CDS (1)..(459): transl_table=11
atggaaagaattgttgttgagagctttacaatggatcatacaaaggttcaagccccatttgttagaagatgtggtacagtaaatactcccaaaggcgatgtaataactaagtttgatctaagatttactcaacctaatggtgatactatgcctacaggtgcagttcatgctcttgagcacttactcgcaggatatattcgtgaagagcttaataatgttatagatatttctcctatgggctgcagaactgggttttatctaatactggcttgcgaaattactgaagaagaagtgacaaaagcacttattaacgctttatctaaagttattgaatcagatcaggttcctgctgctaatccaattcaatgcggtaattataaagatttatctttatttggtgctcaggaatatgctagacaggtattaacacagttaaatgaaaaatatccggttttgtaa

SEQ ID NO: 4727 - protein, 152 aa, Alkaliphilus oremlandii OhILAs
MERIVVESFTMDHTKVQAPFVRRCGTVNTPKGDVITKFDLRFTQPNGDTMPTGAVHALEHLLAGYIREELNNVIDISPMGCRTGFYLILACEITEEEVTKALINALSKVIESDQVPAANPIQCGNYKDLSLFGAQEYARQVLTQLNEKYPVL

SEQ ID NO: 4728 - DNA, 474 bp, Lactobacillus helveticus DPC 4571
  CDS (1)..(474): transl_table=11
atggcaaaagttgaaagttttacattagatcacacaaaggtaaaggcaccttacgttcgtctcatcactgaagaaactggaaaaaagggcgacgtcatttctaattacgacttacgacttgttcaaccaaacaccaatgccattcctactgcaggattgcatacgattgaacatctcttagccggattacttagagatcgtcttgacggggttatcgattgctcaccatttggctgccgaaccggttttcatttaattacttggggtaaacacagcaccactgaagtcgcaaaggctttgaaggggtcactcgaagcaattgccaacgacatcgaatggaaagacgttcaagggactgacaagtatagttgcggtaattaccgtgatcattcattgttctctgctaaagagtggagtaaagaaatcttgtcacaagggatctctgatcaacctttcgaacgccacgttatctag

SEQ ID NO: 4729 - protein, 157 aa, Lactobacillus helveticus DPC 4571
MAKVESFTLDHTKVKAPYVRLITEETGKKGDVISNYDLRLVQPNTNAIPTAGLHTIEHLLAGLLRDRLDGVIDCSPFGCRTGFHLITWGKHSTTEVAKALKGSLEAIANDIEWKDVQGTDKYSCGNYRDHSLFSAKEWSKEILSQGISDQPFERHVI

SEQ ID NO: 4730 - DNA, 471 bp, Lysinibacillus sphaericus C3-41
  CDS (1)..(471): transl_table=11
ttgcaaaaagaaaaaacaaatgtagaaagttttgatctagatcatacaaaagtaaaggcaccttatgttcgtttagcaggtgtgaaaacgggcaaaaatggcgatgaggtttataaatacgatattcgctttaaacagccaaataaggagcatatggaaatgcctgcattgcattctttggagcatttatctgctgacattatccgtaattactctgatcatattgttgatttcagtccaatgggttgtcaaacaggcttctatgtgtccttgatcaatcataatgattatgaggatttattagctattttagagaacacatttacagatgtgacaaaggcaaccgcagtgcctgcatgcaatgaagtgcaatgtggctgggctgctagccatagtttagaaggggccaaagcattagcgaaagagtttttagcgaaacgtgatgaatggcatattatttttgaagattaa

SEQ ID NO: 4731 - protein, 156 aa, Lysinibacillus sphaericus C3-41
MQKEKTNVESFDLDHTKVKAPYVRLAGVKTGKNGDEVYKYDIRFKQPNKEHMEMPALHSLEHLSADIIRNYSDHIVDFSPMGCQTGFYVSLINHNDYEDLLAILENTFTDVTKATAVPACNEVQCGWAASHSLEGAKALAKEFLAKRDEWHIIFED

SEQ ID NO: 4732 - DNA, 477 bp, Leuconostoc citreum KM20
  CDS (1)..(477): transl_table=11
atgtcagaaacagttgttgaaagtttcacactagaccatacaaaggttaaagcaccttatgttcgtgtcatcgagacacaaagtggcccaaatggtggaaccattactaattacgatttacgcttaacccagcctaatgaaacggctatcgaaactgggggattgcatacgctagaacatctttttgctggcttagtgcgtgatgaaattgatggcattattgatatgtcgccatttggctgccgtactgggtttcatgtcatttcttgggtaaattatgattcagaaactttggccaaggtctttaagaaagtcttggaaaaaatagccagtgatgatattactgaggtacctgctgcggaaattgagagttgtggtaactataaagatcatagcttacattctgctaaagaatgggccaaactaattttggctcaaggcatttcaagtgatgcgttcgaacgtcatgttgtataa

SEQ ID NO: 4733 - protein, 158 aa, Leuconostoc citreum KM20
MSETVVESFTLDHTKVKAPYVRVIETQSGPNGGTITNYDLRLTQPNETAIETGGLHTLEHLFAGLVRDEIDGIIDMSPFGCRTGFHVISWVNYDSETLAKVFKKVLEKIASDDITEVPAAEIESCGNYKDHSLHSAKEWAKLILAQGISSDAFERHVV

SEQ ID NO: 4734 - DNA, 453 bp, Clostridium botulinum B1 str. Okra
  CDS (1)..(453): transl_table=11
atggttaaagtagaaagtttttcattagatcatacaaaggttaaggccccttttgtaaggaaatgcggaactcaaatgggagaacttggtgataaaattacaaaatttgatttaagatttgcacaacctaatgaggaagaaatgccaactggagcagttcatactctagaacatttactagcaggttatatgagagaaaaaatggataatattatagatatttctccaatgggttgcagaacaggattttatatgatagcttggggagaagttgaagttgatactgttattgaagcactaaattactcattaaataaagttatagaaacaaaagaagttcctgcaactaatgcagttcaatgtggaaactatagagatcattccctattttcagcaaaagaatatgcaaaacatgttttaaaccaaggcattagcaatgaagtatttagatag

SEQ ID NO: 4735 - protein, 150 aa, Clostridium botulinum B1 str. Okra
MVKVESFSLDHTKVKAPFVRKCGTQMGELGDKITKFDLRFAQPNEEEMPTGAVHTLEHLLAGYMREKMDNIIDISPMGCRTGFYMIAWGEVEVDTVIEALNYSLNKVIETKEVPATNAVQCGNYRDHSLFSAKEYAKHVLNQGISNEVFR

SEQ ID NO: 4736 - DNA, 453 bp, Clostridium botulinum A3 str. Loch Maree
  CDS (1)..(453): transl_table=11
atggttaaagtagaaagtttttcattagatcatacaaaggttaaggccccttttgtaaggaaatgtggaactcaaaaaggtgaaatgggtgatacaattacgaaatttgatttaagattttcacaacctaatgaggaagaaatgccaactggcgcagttcataccctagaacatttactagcaggttatatgagagaaaagatggataacatcatagatatttctccaatgggttgtagaacaggattttatttgatagcttggggagaagttgaagttgatactgttattgaagcactaaattactcattaaataaagttatagaaacagaagaagttcctgcaactaatgccgttcagtgcggaaactatagagatcattccctattttcagcaaaagaatatgcaaaacatgttttaaaccaaggtattagcaatgaaatatttagatag

SEQ ID NO: 4737 - protein, 150 aa, Clostridium botulinum A3 str. Loch Maree
MVKVESFSLDHTKVKAPFVRKCGTQKGEMGDTITKFDLRFSQPNEEEMPTGAVHTLEHLLAGYMREKMDNIIDISPMGCRTGFYLIAWGEVEVDTVIEALNYSLNKVIETEEVPATNAVQCGNYRDHSLFSAKEYAKHVLNQGISNEIFR

SEQ ID NO: 4738 - DNA, 465 bp, Exiguobacterium sibiricum 255-15
  CDS (1)..(465): transl_table=11
atgacaatcaaaaaaatgaacgtagaaagctttaacctggaccatacgaaagtcaaagcaccttatatccgcgtcgccggttacaaagacggtaaagtcgatcaagtcgtcaaatacgacatccgcttcacacaaccgaacgtggaacaaatgccgatgcgtgcgatgcacacactcgagcacttactcgctgaaaatatccgcaattactcggatgacgtcatcgatgtgtcgccgatgggatgccaaacaggtttctacatggcgatgatgaacttcgattcggtcgaaaaaatgagcgaactcgttgagaaaacattaaaagacgtcttagcagcagaagaaattccagcgcaaaacgaagtccaatgcggattcgcaagcgcccacgaccttaaaggagcgaagcactatgccgagaaaatgcttgccggtcgtgatgaatgggacatcgtcttcggatga

SEQ ID NO: 4739 - protein, 154 aa, Exiguobacterium sibiricum 255-15
MTIKKMNVESFNLDHTKVKAPYIRVAGYKDGKVDQVVKYDIRFTQPNVEQMPMRAMHTLEHLLAENIRNYSDDVIDVSPMGCQTGFYMAMMNFDSVEKMSELVEKTLKDVLAAEEIPAQNEVQCGFASAHDLKGAKHYAEKMLAGRDEWDIVFG

SEQ ID NO: 4740 - DNA, 483 bp, Streptococcus pneumoniae CGSP14
  CDS (1)..(483): transl_table=11
atgtcaaaagaagttattgtcgaaagttttgaacttgaccacaccattgtcaaagcaccctatgttcgcttgattggggaagaaacaggaccaaaaggagacatcatctccaattatgatattcgcttggtgcaaccaaacgaagactctatccctactgccggccttcacactatcgagcacctcttagccaaactcatccgtacccgcattgacggcatgattgactgttcaccatttggttgtcgcacaggcttccacatgattatgtggggacgtcacaccagtgctaaaatcgcagctgttatcaaggattcgctcaaggaaatcgctgaaactactacttgggaagatgtcccagggacaaccatcgaatcttgcggaaactacaaggaccacagcctcttctctgctaaagaatgggcaagactcatcttggaacaagggatttcagatgatgcctttgaacgtcatgtgatttaa

SEQ ID NO: 4741 - protein, 160 aa, Streptococcus pneumoniae CGSP14
MSKEVIVESFELDHTIVKAPYVRLIGEETGPKGDIISNYDIRLVQPNEDSIPTAGLHTIEHLLAKLIRTRIDGMIDCSPFGCRTGFHMIMWGRHTSAKIAAVIKDSLKEIAETTTWEDVPGTTIESCGNYKDHSLFSAKEWARLILEQGISDDAFERHVI

SEQ ID NO: 4742 - DNA, 477 bp, Lactobacillus fermentum IFO 3956
  CDS (1)..(477): transl_table=11
atggcaaaggttgaaagtttcacgctcgatcacacgaaggtgaaggccccttacgtgcggctgatcacggttgaagaaggtcctaagggtgacaagattgccaactacgacctgcggctggtccaaccaaacgaaaacgccatcccaacggcgggcttgcacacgattgaacacctcctggctggcctcttgcgggaccgcctggacggggtgattgactgctcaccgtttggttgccggaccgggttccacttgatcacctggggcgaacactcgacgacggacgtcgccaaggccctcaagtcctcattagaagaaatcgcctaccacaccgaatgggaagacgtacaggggacgacgatcgaaagctgcgggaactaccgcgaccactccctcttctccgccaaggaatggtccaagacgatcctggaccaggggatttccgaccaaccgtttgaacggcatgtagtagagtag

SEQ ID NO: 4743 - protein, 158 aa, Lactobacillus fermentum IFO 3956
MAKVESFTLDHTKVKAPYVRLITVEEGPKGDKIANYDLRLVQPNENAIPTAGLHTIEHLLAGLLRDRLDGVIDCSPFGCRTGFHLITWGEHSTTDVAKALKSSLEEIAYHTEWEDVQGTTIESCGNYRDHSLFSAKEWSKTILDQGISDQPFERHVVE

SEQ ID NO: 4744 - DNA, 516 bp, Shigella boydii CDC 3083-94
  CDS (1)..(516): transl_table=11
atgccgttgttagatagcttcacagtcgatcatacccggatggaagcgcctgcagttcgggtggcgaaaacaatgaacaccccgcatggcgacgcaatcaccgtgttcgatctgcgcttctgcgtgccgaacaaagaagtgatgccagaaagagggagccatactctggagcacctgtttgctggttttatgcgtaaccatcttaacggtaatggtgtagagattatcgatatctcgccaatgggctgccgcaccggtttttatatgagtctgattggtacgccagatgagcagcgtgttgctgatgcctggaaagcggcaatggaagacgtgctgaaagtgcaggatcagaatcagatcccggagctgaacgtctaccagtgtggcacttaccagatgcactcgttgcaggaagcgcaggatattgcgcgtagcattctggaacgtgacgtacgcatcaacagcaacgaagaactggcactgccgaaagagaagttgcaggaactgcacatttag

SEQ ID NO: 4745 - protein, 171 aa, Shigella boydii CDC 3083-94
MPLLDSFTVDHTRMEAPAVRVAKTMNTPHGDAITVFDLRFCVPNKEVMPERGSHTLEHLFAGFMRNHLNGNGVEIIDISPMGCRTGFYMSLIGTPDEQRVADAWKAAMEDVLKVQDQNQIPELNVYQCGTYQMHSLQEAQDIARSILERDVRINSNEELALPKEKLQELHI

SEQ ID NO: 4746 - DNA, 456 bp, Clostridium botulinum B str. Eklund 17B
  CDS (1)..(456): transl_table=11
atggaaaaagtagaaagttttgaattagatcacagaaaggttaaagcaccatacataagaaaatgttgtttgcttgatggtaagcttggagataaggtaacaaagtttgatataagatttcttcaacctaacaaagaagaatttggtacagcagcaatgcatggacttgaacatttattagcacatgaacttagagcaaaattagaaggtataattgatttatcacctatgggatgtagaacaggtttctatttaagtatatggggtgatagagaagcatcagaaataaaagaagcattagaatactcattagaaaaagttttagaagcaaaagaaataccagcagctaatgatattcaatgtggaaattatagagatttatctttatttggtgcaaaagaatatgctaaggaagcattagaaagaggattttctcttaatatatacggagaataa

SEQ ID NO: 4747 - protein, 151 aa, Clostridium botulinum B str. Eklund 17B
MEKVESFELDHRKVKAPYIRKCCLLDGKLGDKVTKFDIRFLQPNKEEFGTAAMHGLEHLLAHELRAKLEGIIDLSPMGCRTGFYLSIWGDREASEIKEALEYSLEKVLEAKEIPAANDIQCGNYRDLSLFGAKEYAKEALERGFSLNIYGE

SEQ ID NO: 4748 - DNA, 453 bp, Clostridium botulinum B str. Eklund 17B
  CDS (1)..(453): transl_table=11
atggttaaagtagaaagttttgaattagatcacacaaaggtaaaagccccatatgtaagaaaatgtggttcagaaaagggtaataatggagatatagtttctaaatttgatttaagatttttacaaccaaatgaaaaagagatgccaacaggtgcaatgcatacattagaacatttattagctggatatatgagagaaaaattagatggaataatagatatatctcctatgggatgtagaactggattttatatggttgcatggggaactcctgaagtggagaaagtaatagaagcattaaattattcattaaataaaatattagaaacagaagaaataccagcaacaaataaatttcaatgtgggaattatagagatcattcattatttgcaggaaaagaatatattaaattaatattaaaagaggggattagtagtgaaatatatagatga

SEQ ID NO: 4749 - protein, 150 aa, Clostridium botulinum B str. Eklund 17B
MVKVESFELDHTKVKAPYVRKCGSEKGNNGDIVSKFDLRFLQPNEKEMPTGAMHTLEHLLAGYMREKLDGIIDISPMGCRTGFYMVAWGTPEVEKVIEALNYSLNKILETEEIPATNKFQCGNYRDHSLFAGKEYIKLILKEGISSEIYR

SEQ ID NO: 4750 - DNA, 468 bp, Helicobacter pylori Shi470
  CDS (1)..(468): transl_table=11
atgaaaacgccaaaaatgaatgtagagagttttaatttggatcacaccaaagtcaaagccccttatgtgcgtatcgctgatcgcaaaaagggcgttaatggggatttgatcgtcaaatacgatgtgcgcttcaagcagcccaacaaagatcacatggacatgccaagcttgcactctttagagcatttagtcgctgagatcatccgcaaccatgccagttatgttatagattggtcgcctatgggttgccaaacgggattttatctcacggtgttaaaccatgacaattacacagagattttagagattttagaaaagacgatgcaagatgtgttaaaggctacagaagtgcctgccagcaatgaaaagcaatgcggttgggcggctaaccacactttagagggcgcgcagaatttagcgcgcgcttttttagacaaacgcgctgagtggtctgaagtgggggtttga

SEQ ID NO: 4751 - protein, 155 aa, Helicobacter pylori Shi470
MKTPKMNVESFNLDHTKVKAPYVRIADRKKGVNGDLIVKYDVRFKQPNKDHMDMPSLHSLEHLVAEIIRNHASYVIDWSPMGCQTGFYLTVLNHDNYTEILEILEKTMQDVLKATEVPASNEKQCGWAANHTLEGAQNLARAFLDKRAEWSEVGV

SEQ ID NO: 4752 - DNA, 456 bp, Clostridium botulinum E3 str. Alaska E43
  CDS (1)..(456): transl_table=11
atggaaaaagtagaaagttttgaattagatcacagaaaggttaaagcgccttatataagaaaatgttgcttacttgatggaaaatgtggagataaggttacaaagtttgatataagatttcttcaacctaataaagaagaatttggtacagcagcaatgcatggacttgaacatttattagcacatgaacttagagcaaaattagaaggaataattgatttatcacctatgggatgtagaacaggattctatttaagtatatggggagatagggaagcatcagaaataaaagaagcattagaatattctttagaaaaagttttagaagcaaaggaaataccagcagctaatgatattcaatgcggaaattatagagatttatctttatttggtgctaaggaatatgctaaagaagctctagaaagaggattctctcttaatatttacggagaataa

SEQ ID NO: 4753 - protein, 151 aa, Clostridium botulinum E3 str. Alaska E43
MEKVESFELDHRKVKAPYIRKCCLLDGKCGDKVTKFDIRFLQPNKEEFGTAAMHGLEHLLAHELRAKLEGIIDLSPMGCRTGFYLSIWGDREASEIKEALEYSLEKVLEAKEIPAANDIQCGNYRDLSLFGAKEYAKEALERGFSLNIYGE

SEQ ID NO: 4754 - DNA, 510 bp, Actinobacillus pleuropneumoniae serovar 7 str. AP76
  CDS (1)..(510): transl_table=11
atgcctttattagatagctttaaagtggatcacactcgtatgaacgcaccggcagtgcgtgttgcaaaaacgatgacgacgccgaagggcgatacgattaccgtattcgatttacgtttttgccgtccgaatattgatattttaccggtgcgtggtatccacacgatggaacacttatttgccggctttatgcgtgatcatttaaatagtgaaagtgtagaaattattgatatttcgccgatgggttgccgtaccggtttctatatgtcgttaatcggtgcgccaagcgaagcggatgtggtttcggcgtggacaaaatcgatggaagatgctttaaataaagtaccggacgtgtcaaaaattccggaattaaacgaatatcaatgcggctcttataaagagcattcgcttgaagaagcgcatcaaatcgctcgtgatgtgttagccaagggtatcggcgtaaaccgtaacgaagatttagcgcttgatgagaaattattaaatccataa

SEQ ID NO: 4755 - protein, 169 aa, Actinobacillus pleuropneumoniae serovar 7 str. AP76
MPLLDSFKVDHTRMNAPAVRVAKTMTTPKGDTITVFDLRFCRPNIDILPVRGIHTMEHLFAGFMRDHLNSESVEIIDISPMGCRTGFYMSLIGAPSEADVVSAWTKSMEDALNKVPDVSKIPELNEYQCGSYKEHSLEEAHQIARDVLAKGIGVNRNEDLALDEKLLNP

SEQ ID NO: 4756 - DNA, 483 bp, Streptococcus pneumoniae G54
  CDS (1)..(483): transl_table=11
atgtcaaaagaagttattgtcgaaagttttgaacttgaccacaccattgtcaaagcaccctatgttcgcttgattggggaagaaacaggaccaaaaggagacatcatctccaattatgatattcgcttggtgcaaccaaacgaagactctatccctactgccggccttcacactatcgagcacctcttagccaaactcatccgtacccgcattgacggcatgattgactgttcaccatttggttgccgcacaggcttccacatgattatgtggggacgtcacaccagtgctaaaatcgcagctgttatcaaggattcgctcaaggaaatcgctgaaactactacttgggaagatgtcccagggacaaccatcgaatcttgcggaaactacaaggaccacagcctcttctctgctaaagaatgggcaaaactcatcttggaacaagggatttcagatgatgcctttgaacgtcatgtgatttaa

SEQ ID NO: 4757 - protein, 160 aa, Streptococcus pneumoniae G54
MSKEVIVESFELDHTIVKAPYVRLIGEETGPKGDIISNYDIRLVQPNEDSIPTAGLHTIEHLLAKLIRTRIDGMIDCSPFGCRTGFHMIMWGRHTSAKIAAVIKDSLKEIAETTTWEDVPGTTIESCGNYKDHSLFSAKEWAKLILEQGISDDAFERHVI

SEQ ID NO: 4758 - DNA, 531 bp, Streptococcus equi subsp. zooepidemicus MGCS10565
  CDS (1)..(531): transl_table=11
gtgattttatgttatgatattgataaaaataaaaaggagtttctaatgccaaaagaagttattgttgaaagctttgagcttgatcataccattgtcaaggcaccctatgtaagactaatctctgaggaatttggacccaagggagatgtgattacaaattttgatgttcggcttgttcagcctaatcaggctgccattgagacggccggtttacacaccatcgagcatttattagccaagctcattcgtcaacgcattgatggaatgattgattgctccccctttggctgccgcacaggctttcacctcatcatgtggggcaagcacagttcaacagacattgctaaggttatcacgtccagcctagaggaaatcgctacaggcatcacttgggaggacgttcccggaacaaccattgaatcctgcggcaattacaaggaccacagcctttttgctgctaaggaatgggcccagcttattctcaagcaagggatctctgatgatccatttaaccgccatgtcacctcataa

SEQ ID NO: 4759 - protein, 176 aa, Streptococcus equi subsp. zooepidemicus MGCS10565
MILCYDIDKNKKEFLMPKEVIVESFELDHTIVKAPYVRLISEEFGPKGDVITNFDVRLVQPNQAAIETAGLHTIEHLLAKLIRQRIDGMIDCSPFGCRTGFHLIMWGKHSSTDIAKVITSSLEEIATGITWEDVPGTTIESCGNYKDHSLFAAKEWAQLILKQGISDDPFNRHVTS

SEQ ID NO: 4760 - DNA, 510 bp, Mannheimia haemolytica PHL213
  CDS (1)..(510): transl_table=11
atgcctttattagatagttttaaagtagatcacaccaaaatgaacgcaccagccgtgcgtgttgcaaaaacaatgaccacaccgaaaggcgataccattaccgtgttcgatctccgtttctgtcgtccgaatattgatattctaccggtgcgtgggattcacacgatggaacatctttttgccggttttatgcgtgatcacctcaatagcgaacaagtggagatcattgatatttcaccaatgggttgtcgtaccggtttttatatgtcactgattggatcgccttcagcagaagaagttgtcaaagcttggacggcatcaatggaagatgcgttacataaaattcctgatgtatcggcaatccctgagctgaatgaatatcaatgtggctcttacaaagagcattctttaaaagaagcacatcaaattgcccgcaacgtattagctgccggcattggtataaatcgcaacgaagatttagccttagacgaaaaattacttaatccataa

SEQ ID NO: 4761 - protein, 169 aa, Mannheimia haemolytica PHL213
MPLLDSFKVDHTKMNAPAVRVAKTMTTPKGDTITVFDLRFCRPNIDILPVRGIHTMEHLFAGFMRDHLNSEQVEIIDISPMGCRTGFYMSLIGSPSAEEVVKAWTASMEDALHKIPDVSAIPELNEYQCGSYKEHSLKEAHQIARNVLAAGIGINRNEDLALDEKLLNP

SEQ ID NO: 4762 - DNA, 516 bp, Klebsiella pneumoniae 342
  CDS (1)..(516): transl_table=11
atgccgttgttagatagtttcacagtcgaccatacccgaatggaagccccagcggtgcgtgtcgcgaagaaaatgaacacgccgcatggcgatgaaatcaccgttttcgatctgcgcttctgcgtgccgaaccaggaagtgatgccggaacgcggtatccacaccctggagcacctgttcgcgggctttatgcgcgatcacctgaacgggaatggcgtggaaattatcgacatttcgccaatgggctgccgcaccgggttctatatgagcctgattggtacaccggacgagcagcgcgtcgctgacgcctggaaagcggcgatggccgatgtgctgaaggtgaaagatcagaaccagatcccggagctcaacgtctaccagtgcggaacctataccatgcactcgctggaagaggcccaggacatcgctcgtcatatcattgagcgcgatgtacgcatcaacagcaacgacgaactggcgctgccgaaagaaaaactgcaggaactgcacatctag

SEQ ID NO: 4763 - protein, 171 aa, Klebsiella pneumoniae 342
MPLLDSFTVDHTRMEAPAVRVAKKMNTPHGDEITVFDLRFCVPNQEVMPERGIHTLEHLFAGFMRDHLNGNGVEIIDISPMGCRTGFYMSLIGTPDEQRVADAWKAAMADVLKVKDQNQIPELNVYQCGTYTMHSLEEAQDIARHIIERDVRINSNDELALPKEKLQELHI

SEQ ID NO: 4764 - DNA, 519 bp, Aliivibrio salmonicida LFI1238
  CDS (1)..(519): transl_table=11
atgccattattagacagttttactgtagatcatacccgtatggaagcacccgcggtacgtgttgcaaagaaaatgcaaacgcctaaaggtgatactatcaccgtatttgatttacgctttactgcaccaaataaagatattttatctgaaaaaggtattcacacattagagcatctatatgcagggttcatgcgtaatcatttgaatggtacggatgtagaaattattgatatttcaccaatgggatgtcgtactggtttttacatgagcttaattggtacacctgtagaacaaacggttgctaacgcttggattgcatcaatggaagatgttcttaatgttgaagaccagaataaaatacctgaattaaatgaatatcaatgtggtacatataccatgcattctttagaagaagcgaaagcgattgctaccgctattttagccgcaggtattcaagtaaataaaaatgatgacttggctcttcctgagtcaatgcttaaagaactatctgtagattaa

SEQ ID NO: 4765 - protein, 172 aa, Aliivibrio salmonicida LFI1238
MPLLDSFTVDHTRMEAPAVRVAKKMQTPKGDTITVFDLRFTAPNKDILSEKGIHTLEHLYAGFMRNHLNGTDVEIIDISPMGCRTGFYMSLIGTPVEQTVANAWIASMEDVLNVEDQNKIPELNEYQCGTYTMHSLEEAKAIATAILAAGIQVNKNDDLALPESMLKELSVD

SEQ ID NO: 4766 - DNA, 468 bp, Helicobacter pylori G27
  CDS (1)..(468): transl_table=11
atgaaaacaccaaaaatgaatgtagagagttttaatttggatcacaccaaagtcaaagccccttatgtgcgtatcgccgatcgcaaaaagggcgttaatggggatttgattatcaaatacgatgtgcgcttcaaacagcccaaccaagatcacatggacatgccaagcctgcactctttagagcatttagtcgctgagatcatccgcaaccatgctaattatgtcgtggattggtcgcctatgggttgccaaacgggattttatctcacggtgttaaatcatgacaattacacagagattttagaggttttagaaaagacgatgcaagatgtgttaaaggctacagaagtgcctgccagcaatgaaaagcaatgcggttgggcggctaaccacactttagagggcgccaagaatttagcacgcgcttttttagacaaacgcgctgaatggtctgaagtgggggtttga

SEQ ID NO: 4767 - protein, 155 aa, Helicobacter pylori G27
MKTPKMNVESFNLDHTKVKAPYVRIADRKKGVNGDLIIKYDVRFKQPNQDHMDMPSLHSLEHLVAEIIRNHANYVVDWSPMGCQTGFYLTVLNHDNYTEILEVLEKTMQDVLKATEVPASNEKQCGWAANHTLEGAKNLARAFLDKRAEWSEVGV

SEQ ID NO: 4768 - DNA, 468 bp, Helicobacter pylori P12
  CDS (1)..(468): transl_table=11
atgaaaacaccaaaaatgaatgtagagagttttaatttggatcacaccaaagtcaaagccccttatgtgcgtgtcgctgatcgcaaaaagggcgttaatggggatgtgattgtcaaatacgatgtgcgcttcaagcagcccaaccaagatcacatggacatgcctagcctacactctttagagcatttagtcgctgagatcatccgcaaccatgctaattatgtcgtggattggtcgcctatgggttgccaaacgggattttatctcacggtgttaaaccatgacaattacacagaggttttagaggttttagaaaagacgatgcaagatgtgttaaaggctacagaagtgcctgcgagcaatgaaaagcaatgcggttgggcggctaaccacactttagagggtgccaagaatttagcgcgcgcttttttagacaaacgcgctgaatggtctgaagtgggggtttga

SEQ ID NO: 4769 - protein, 155 aa, Helicobacter pylori P12
MKTPKMNVESFNLDHTKVKAPYVRVADRKKGVNGDVIVKYDVRFKQPNQDHMDMPSLHSLEHLVAEIIRNHANYVVDWSPMGCQTGFYLTVLNHDNYTEVLEVLEKTMQDVLKATEVPASNEKQCGWAANHTLEGAKNLARAFLDKRAEWSEVGV

SEQ ID NO: 4770 - DNA, 510 bp, Shewanella piezotolerans WP3
  CDS (1)..(510): transl_table=11
atgccgttattagatagttttaccgtggatcatactcgaatgaacgcacctgctgttcgagttgccaaatccatgtctacccctaaaggcgacacaataaccgtgtttgatctgcgtttttgcgtacccaataaacagatattaagcgaaagaggtattcacacgcttgagcacctttttgctggattcatgcgtgaccaccttaatggtgacaatgtagagattattgatatttcgccaatgggctgccgtacaggcttttatatgagcttaattggtgcgccttcagagtctattgtggcggatgcttggttggcagcaatgcaagatgtgttagctgtggttgaacaatcagaaattccagagctgaacgaataccagtgcggtacttatgagatgcattcgcttgaacaagctaaagagattgcacgtagcatcatatctgcaggtataaatgtgaaccgtaacgatgagctgacattaagtgatgagatcttaaacggcctttag

SEQ ID NO: 4771 - protein, 169 aa, Shewanella piezotolerans WP3
MPLLDSFTVDHTRMNAPAVRVAKSMSTPKGDTITVFDLRFCVPNKQILSERGIHTLEHLFAGFMRDHLNGDNVEIIDISPMGCRTGFYMSLIGAPSESIVADAWLAAMQDVLAVVEQSEIPELNEYQCGTYEMHSLEQAKEIARSIISAGINVNRNDELTLSDEILNGL

SEQ ID NO: 4772 - DNA, 516 bp, Anoxybacillus flavithermus WK1
  CDS (1)..(516): transl_table=11
gtgtatgataaaaacgtaacaattgaaaaagaggtgacatatatgccttcagtagaaagctttgagctagaccattgtgcggtcaaagcaccgtacgttcgccattgcggtgttcatcaagtcggtagcgacggtgttgtgaataaatttgatattcgcttctgtcaaccaaataaagaagcgatgcaaccggcagcgattcatacgcttgaacatttactagcggtgcacattcgtaagcatgctgaaaaatacgatcattttgatattatcgatatttctccgatgggatgtcaaacggggtattatttagtcgttagcggcacgccaacagtcgaagaaattattgatttgcttgaggcgacgatgaatgaggcattgacggttacagaagtgccagctgcaacggaaaaagagtgcggtcaagcgaaattgcacgatttagaaggagctaagcgactcatgcgatattggctatcgcagccaaaagaacaattgaaaaaagtatttggttaa

SEQ ID NO: 4773 - protein, 171 aa, Anoxybacillus flavithermus WK1
MYDKNVTIEKEVTYMPSVESFELDHCAVKAPYVRHCGVHQVGSDGVVNKFDIRFCQPNKEAMQPAAIHTLEHLLAVHIRKHAEKYDHFDIIDISPMGCQTGYYLVVSGTPTVEEIIDLLEATMNEALTVTEVPAATEKECGQAKLHDLEGAKRLMRYWLSQPKEQLKKVFG

SEQ ID NO: 4774 - DNA, 495 bp, Bifidobacterium longum subsp. infantis ATCC 15697
  CDS (1)..(495): transl_table=11
atgacagaaggcaaggccgaaaagcccgtcgtcgaatcattccagcttgatcacaccaaggtcaaggcaccgtacgtgcgttacatcgacaccgaaacgggccctcacggcgacgtgatctccaattacgatctgcgcctgacccagccgaacaagcaggccatccccaccggcggcctgcacaccatcgaacacaccatcgccgtgctgctgcgcgaacgtatcccgggctacatcgactgctcgccgttcggctgccgcaccggtttccacctgctgacctggggcacccactccaccgaggatgtggccaaggcgttgaaggaatcgttggagttcatcgcatacaaggccacgtgggatgacgtgcccgccaccactgagaagagctgcggcaactatcgcgaccacagcctgttcgccgccaaggaatgggccaagcagatccttgaggaaggcatcagttccgacccgttcgaacgcaaggtcgtctga

SEQ ID NO: 4775 - protein, 164 aa, Bifidobacterium longum subsp. infantis ATCC 15697
MTEGKAEKPVVESFQLDHTKVKAPYVRYIDTETGPHGDVISNYDLRLTQPNKQAIPTGGLHTIEHTIAVLLRERIPGYIDCSPFGCRTGFHLLTWGTHSTEDVAKALKESLEFIAYKATWDDVPATTEKSCGNYRDHSLFAAKEWAKQILEEGISSDPFERKVV

SEQ ID NO: 4776 - DNA, 468 bp, Listeria monocytogenes HCC23
  CDS (1)..(468): transl_table=11
atggcagaaaaaatgaatgtggaaagttttaatttagatcatacgaaagtgaaagcaccatttgtcagactagcggggacaaaagttggtttacatggggatgaaatatataaatatgacgttcgctttaaacagcctaataaagaacatatggagatgccagcattacattctttagaacacttaatggcagaacttgcacgtaatcacacggataaagtagtggatatcagcccaatgggatgccaaactggtttttatatgtcctttatcaactttagtgattatgacgatgcactagatgttttagcgaagactttagccgatgttttagaagcgaaagaagtaccagcatgtaatgaagttcaatgtggttgggctgcgagtcatagtttagaaggcgcaaaagagcttgcggaagaattcctagcaaagcgcagtgaatggaaaaatgttttcggtgaatga

SEQ ID NO: 4777 - protein, 155 aa, Listeria monocytogenes HCC23
MAEKMNVESFNLDHTKVKAPFVRLAGTKVGLHGDEIYKYDVRFKQPNKEHMEMPALHSLEHLMAELARNHTDKVVDISPMGCQTGFYMSFINFSDYDDALDVLAKTLADVLEAKEVPACNEVQCGWAASHSLEGAKELAEEFLAKRSEWKNVFGE

SEQ ID NO: 4778 - DNA, 486 bp, Macrococcus caseolyticus JCSC5402
  CDS (1)..(486): transl_table=11
atgactaaaaaaatgaacgttgaaagtttcaacttagaccacacaatcgtagatgcaccatttgtacgattagctggtatcaaagaaggtatcaatggtgatgttattcataaatacgatatccgttttaaacaaccgaataaagaacatatggagatgcctgcacttcattctttagaacatctgatggctgaaaacatccgcaatcatacagataaagtggtagacatctctcctatgggatgtcagactggcttctacgtttcacttatcaaccatgataattacgaagacgtattagcgatattagaaaagactttaaatgacgtattagcagctgatgaagttcctgcttgtaatgaagttcaatgtggatgggcagcgagtcattctttagaaggtgcaaaagcaatcgcacaggaaatgttatctaaaaaagacagctggcatgtcatttatcagcctggaaaagaaccacaagcttaa

SEQ ID NO: 4779 - protein, 161 aa, Macrococcus caseolyticus JCSC5402
MTKKMNVESFNLDHTIVDAPFVRLAGIKEGINGDVIHKYDIRFKQPNKEHMEMPALHSLEHLMAENIRNHTDKVVDISPMGCQTGFYVSLINHDNYEDVLAILEKTLNDVLAADEVPACNEVQCGWAASHSLEGAKAIAQEMLSKKDSWHVIYQPGKEPQA

SEQ ID NO: 4780 - DNA, 483 bp, Streptococcus uberis 0140J
  CDS (1)..(483): transl_table=11
atgactaaagaagtaattgttgaaagttttgaattagaccataccattgttaaagccccttatgtacgattaatttcagaagagtttggtcctaagggagatgttatcactaattttgatgttcgcttggttcaaccaaaccaaaattccattgaaacagctggattacacaccatcgaacatctcttagcaaaactgattcgccaacgtattgatggcatgattgattgttctccctttggttgccgaacaggtttccatttaatcatgtggggagagcatagttcaacagaaattgcaaaggtcatcaaatcaagcttagaagaaattgctgacggcatttcctgggaagatgttccaggtactaccattgaatcttgtggtaattataaggaccatagcttatttgctgcaaaagaatgggcaaaactaatcttatctcaaggcatttcggatcaagcttttgaacgacatcttgtttaa

SEQ ID NO: 4781 - protein, 160 aa, Streptococcus uberis 0140J
MTKEVIVESFELDHTIVKAPYVRLISEEFGPKGDVITNFDVRLVQPNQNSIETAGLHTIEHLLAKLIRQRIDGMIDCSPFGCRTGFHLIMWGEHSSTEIAKVIKSSLEEIADGISWEDVPGTTIESCGNYKDHSLFAAKEWAKLILSQGISDQAFERHLV

SEQ ID NO: 4782 - DNA, 507 bp, Campylobacterales bacterium GD 1
  CDS (1)..(507): transl_table=11
atgccattattagactcatttacagttgaccacactattatgccagcaccggcagttcgtaaagctaagggaatgaaaactccaagcggagatgatattacagtttttgatttacgttttgtaaaaccaaacgaagaaattttatcttcagaaggaattcatacattagaacacctttttgctggatttatgagagatcatctaaactctacaacgactgagattatcgatatatcgccaatgggctgtagaacaggtttttatatgagcgtacttggaaaacctgaagaagaagtagtagctcaagcatgggaagcttcaatgagagatattttagaagttaaagagcaaaaagatattccagagcttaatatataccagtgtggaacatataaaatgcattcgctctctgatgcaaaagatatagcatctgctgtacttcgtaaagatattgacatcatggataatgacgctttagcattggatttatcaaaagtagaagagtag

SEQ ID NO: 4783 - protein, 168 aa, Campylobacterales bacterium GD 1
MPLLDSFTVDHTIMPAPAVRKAKGMKTPSGDDITVFDLRFVKPNEEILSSEGIHTLEHLFAGFMRDHLNSTTTEIIDISPMGCRTGFYMSVLGKPEEEVVAQAWEASMRDILEVKEQKDIPELNIYQCGTYKMHSLSDAKDIASAVLRKDIDIMDNDALALDLSKVEE

SEQ ID NO: 4784 - DNA, 534 bp, Nautilia profundicola AmH
  CDS (1)..(534): transl_table=11
atgccaatgttagacagttttttggttgaccacgttaaaatgccaagtcctggcctaagggtagccaaacacgtaaaaacgccaaacggagatatcattacggtatacgacgtaagatttgcaaaaccaaatgaagagattatcgacgaaagggcaatgcacacgcttgagcatctttttgccggatatatgagagataatctcagtaattacgaaataatcgatatttcacctatgggatgccgtacagggttttatatgagtgtaattggcgaacctgaagacgaagaagtaatcgaagcgtggaaaaaatctatgcaaaacgtacttgaaactgacacgatccctgaagcaaacgtatatcagtgtggaagctgctatatgcattcgctcgacggcgccaaaaaagtcgctgaacatatattaaacaacgaaattgttataatggataacgaagctctagcactaaaccctgaaaacattccgaatgaatgcaatgtagacacttcaaaggttaaaattttaggaaaatga

SEQ ID NO: 4785 - protein, 177 aa, Nautilia profundicola AmH
MPMLDSFLVDHVKMPSPGLRVAKHVKTPNGDIITVYDVRFAKPNEEIIDERAMHTLEHLFAGYMRDNLSNYEIIDISPMGCRTGFYMSVIGEPEDEEVIEAWKKSMQNVLETDTIPEANVYQCGSCYMHSLDGAKKVAEHILNNEIVIMDNEALALNPENIPNECNVDTSKVKILGK

SEQ ID NO: 4786 - DNA, 465 bp, Staphylococcus carnosus subsp. carnosus TM300
  CDS (1)..(465): transl_table=11
atgccaaaaatgaacgttgaaagtttcaatttagaccacactaaagttgttgcaccattcgtacgtttagcaggaacagtagaaggcgcaaacggcgatgtaattaaaaaatatgatattcgtttcaaacaacctaataaagagcacatgaaaatgccaggattgcattctttagaacatttaatggctgaaaatattagaaaccatactgataaagtggttgatttaagccctatgggttgccaaacaggattttatgtatctttaatcaatcatgatgattatgaagatgttttgaatattattgaagcaactttaaaagatgttcttgcagcagatgaagtaccagcatgcaacgaagttcaatgtggttgggcagcaagtcactcactagaaggtgcgaaagaaattgctcaagatttcttagacaaaagagatcaatgggataaaattttcagtgaataa

SEQ ID NO: 4787 - protein, 154 aa, Staphylococcus carnosus subsp. carnosus TM300
MPKMNVESFNLDHTKVVAPFVRLAGTVEGANGDVIKKYDIRFKQPNKEHMKMPGLHSLEHLMAENIRNHTDKVVDLSPMGCQTGFYVSLINHDDYEDVLNIIEATLKDVLAADEVPACNEVQCGWAASHSLEGAKEIAQDFLDKRDQWDKIFSE

SEQ ID NO: 4788 - DNA, 486 bp, Streptococcus equi subsp. zooepidemicus
  CDS (1)..(486): transl_table=11
atgccaaaagaagttattgttgaaagctttgagcttgatcataccattgtcaaggcaccctatgtaagactaatctctgaggaatttggacccaagggagatgtgattacaaattttgatgttcggcttgttcagcctaatcaggctgccattgagacggccggtttacacaccatcgagcatttattagccaagctcattcgtcaacgcattgatggaatgattgattgctccccctttggctgccgcacaggctttcacctcatcatgtggggcaagcacagttcaacagacattgctaaggttatcacgtccagcctagaggaaatcgctacaggcatcacttgggaggacgttcccggaacaaccattgaatcctgcggcaattacaaggaccacagcctttttgctgctaaggaatgggcccagcttattctcaagcaagggatctctgatgatccatttaaccgccatgtcacctcataa

SEQ ID NO: 4789 - protein, 161 aa, Streptococcus equi subsp. zooepidemicus
MPKEVIVESFELDHTIVKAPYVRLISEEFGPKGDVITNFDVRLVQPNQAAIETAGLHTIEHLLAKLIRQRIDGMIDCSPFGCRTGFHLIMWGKHSSTDIAKVITSSLEEIATGITWEDVPGTTIESCGNYKDHSLFAAKEWAQLILKQGISDDPFNRHVTS

SEQ ID NO: 4790 - DNA, 486 bp, Streptococcus equi subsp. equi 4047
  CDS (1)..(486): transl_table=11
atgccaaaagaagttattgttgaaagctttgagcttgatcatactattgttaaggcaccctatgtacggctaatctccgaggaatttgggccccagggagatgtgattacaaattttgatgttcgacttgttcagcctaatcaggctgccattgagactgccggtttacataccattgagcatttattagccaagctcattcgtcaacgcattgatggaatgattgattgctccccctttggctgccgcacaggctttcacctcatcatgtggggcaagcatagctcaacagatattgctaagatcatcacgtccagcctagaggaaattgctacaagcatcacttgggaggacgttcctggcacaaccattgaatcctgcggcaattataaggatcacagcctttttgctgctaaggaatgggcacagcttattctcaagcaagggatctctgatgatccatttaaccgccatgtcacctcataa

SEQ ID NO: 4791 - protein, 161 aa, Streptococcus equi subsp. equi 4047
MPKEVIVESFELDHTIVKAPYVRLISEEFGPQGDVITNFDVRLVQPNQAAIETAGLHTIEHLLAKLIRQRIDGMIDCSPFGCRTGFHLIMWGKHSSTDIAKIITSSLEEIATSITWEDVPGTTIESCGNYKDHSLFAAKEWAQLILKQGISDDPFNRHVTS

SEQ ID NO: 4792 - DNA, 474 bp, Bacillus cereus 03BB102
  CDS (1)..(474): transl_table=11
atgccatcagtagaaagctttgaattagatcatacgattgtaaaggcaccttatgtaagacattgcggagttcacaatgtaggtagtgacggtattgtaaataaattcgatattcgtttttgccaaccgaataaacaagcaatgaaaccagatgttattcatacgttagaacatttattagcatttaatttacgtaaatatattgatcgttatccgcattttgatattatcgatatttcaccaatgggttgccaaacaggatattaccttgtagtaagcggaacaccgacagttcgagaaatcattgatttattagaattaacattaaaagatgcggttcaaattacagaaattccagctgcaaatgaaacacaatgtggtcaagcgaagcttcacgatttagaaggagcaaaacgcttaatgaacttctggttaagccaagataaagatgaacttgagaaagtgtttgaataa

SEQ ID NO: 4793 - protein, 157 aa, Bacillus cereus 03BB102
MPSVESFELDHTIVKAPYVRHCGVHNVGSDGIVNKFDIRFCQPNKQAMKPDVIHTLEHLLAFNLRKYIDRYPHFDIIDISPMGCQTGYYLVVSGTPTVREIIDLLELTLKDAVQITEIPAANETQCGQAKLHDLEGAKRLMNFWLSQDKDELEKVFE

SEQ ID NO: 4794 - DNA, 468 bp, Deinococcus deserti VCD115
  CDS (1)..(468): transl_table=11
atggcgaatgttgaatccttcgatctggaccacaccaaggtgcgggccccctacgtgcgcctggcgggcgtcaagaccactccccggggagacagcatcagcaagtacgatctgcggctgctgcagcccaaccagggcgccattgatccggcagccatccataccctggaacatctgttggcgggttacctgcgcgatcacctgcaggatgtcgtggatgtctcacccatgggctgccgcactggcatgtatatggctgttattgggacacccgacgaagagggggtactgaaagccttcgaggcggcattgcaggacactgcagcacacgaccggcctatcccaggtgtgagtgaactcgaatgtggcaatttccgtgaccatgacctgcacgcagcgcggcagcatgcccgtgaggctttggcgcaggggctgaaggtacagcagacggttttgcttcagcgctag

SEQ ID NO: 4795 - protein, 155 aa, Deinococcus deserti VCD115
MANVESFDLDHTKVRAPYVRLAGVKTTPRGDSISKYDLRLLQPNQGAIDPAAIHTLEHLLAGYLRDHLQDVVDVSPMGCRTGMYMAVIGTPDEEGVLKAFEAALQDTAAHDRPIPGVSELECGNFRDHDLHAARQHAREALAQGLKVQQTVLLQR

SEQ ID NO: 4796 - DNA, 453 bp, Clostridium botulinum A2 str. Kyoto
  CDS (1)..(453): transl_table=11
atggttaaagtagaaagtttttcattagatcatacaaaggttaaggccccttttgtaaggaaatgtggaactcaaaaaggtgaaatgggtgatacaattacgaaatttgatttaagattttcacaacctaatgaggaagaaatgccaactggcgcagttcataccctagaacatttactagcaggttatatgagagaaaagatggataacatcatagatatttctccaatgggttgcagaacaggattttatttgatagcttggggagaagttgaagttgatactgttattgaagcactaaattactcattaaataaagttatagaaacagaagaagttcctgcaactaatgcagttcagtgcggaaactatagagatcattcactattttcagcgaaagaatatgcaaaacatgttttaaaccaaggtattagcaatgaagtatttagatag

SEQ ID NO: 4797 - protein, 150 aa, Clostridium botulinum A2 str. Kyoto
MVKVESFSLDHTKVKAPFVRKCGTQKGEMGDTITKFDLRFSQPNEEEMPTGAVHTLEHLLAGYMREKMDNIIDISPMGCRTGFYLIAWGEVEVDTVIEALNYSLNKVIETEEVPATNAVQCGNYRDHSLFSAKEYAKHVLNQGISNEVFR

SEQ ID NO: 4798 - DNA, 477 bp, Corynebacterium aurimucosum ATCC 700975
  CDS (1)..(477): transl_table=11
atgactgagaagaactccgagaacaagatcaacgtaaagtccttcgagctcgaccaccggcttgtcgccgccccctatatccgcgtcgccgaccgtaccgatctgggcggcggggtcgagattatcaagtatgacctgcgcttctgccagcccaacaaagagcacctcggtaccgaagcactgcactcggtcgagcacatgatggccaacttcatgcgtaactacaccgacaagctcatcggttttgccccgatgggctgccgcaccggcttctacgccatcaccaacggcatggagcaggacgagctgctccgcgccgtcgagggcgcactcaatgacatcctcaacgccaccgaggttcccgccgccaacgaggtacagtgcggctggggcgcccaccactcactcgagggcgcacaggaggccgcacgcgatttcctcgcggccaaggatgagtggctcaacgtcatggcctag

SEQ ID NO: 4799 - protein, 158 aa, Corynebacterium aurimucosum ATCC 700975
MTEKNSENKINVKSFELDHRLVAAPYIRVADRTDLGGGVEIIKYDLRFCQPNKEHLGTEALHSVEHMMANFMRNYTDKLIGFAPMGCRTGFYAITNGMEQDELLRAVEGALNDILNATEVPAANEVQCGWGAHHSLEGAQEAARDFLAAKDEWLNVMA

SEQ ID NO: 4800 - DNA, 510 bp, Tolumonas auensis DSM 9187
  CDS (1)..(510): transl_table=11
atgccgttattagatagttttactgtggatcatacccggatgcaggcgcctgctgtacgtgtggccaaacagatgcggacaccacatggtgatccgattaccgtgtttgatctgcgtttctgtgtgccgaatcaggagatcctgccggaacgtggcattcatacgctggagcatctgtttgccggctttatgcgtgatcatctgaatggcagcgatgtggaaatcattgatatttccccgatgggctgccgaaccggtttttacatgtgcctgattggtacgccggatgaggcccgcgttgcggctgcctggagtgctgccatggaagacgtactgaaagtcgtggatcaggcgaagatcccggagctgaatgaatatcagtgcggtacctatcagatgcattcgctggaagaggcgcatgagatcgcgcgcgcgattctggcgcatggtgttggtgttaataaaaatgcggaactggcattgccatccgataaactggctagtctgtaa

SEQ ID NO: 4801 - protein, 169 aa, Tolumonas auensis DSM 9187
MPLLDSFTVDHTRMQAPAVRVAKQMRTPHGDPITVFDLRFCVPNQEILPERGIHTLEHLFAGFMRDHLNGSDVEIIDISPMGCRTGFYMCLIGTPDEARVAAAWSAAMEDVLKVVDQAKIPELNEYQCGTYQMHSLEEAHEIARAILAHGVGVNKNAELALPSDKLASL

SEQ ID NO: 4802 - DNA, 468 bp, Corynebacterium kroppenstedtii DSM 44385
  CDS (1)..(468): transl_table=11
gtgccaaagaacgttgaaagctttgaactagaccacacgaaggtagccgcgccctatatccggcgcgcatccgattacgagatcgccgatggccacacgatcgtcaaatacgacctgcggttccgccagccgaacaagtctcatatcgagatgtcaacaatgcacgcgatcgagcacagcatggccgaggcactccgcgaccacttaaagggagtcatcgactttggcccgatggggtgccagaccggtttttacctgaccgtagacacaactgccgacggtcccacctgggatgaagttgccgacgctgtcaagaaggccattgcggatattgagaagtgggattccgtgcccggcgcgggaattaagtcgtgcggttgggcggaacatcacgatctcgacggcgccaagaaagagctggcggactttgatgcccacagcgatgagtggaatcaggttttcgcgtga

SEQ ID NO: 4803 - protein, 155 aa, Corynebacterium kroppenstedtii DSM 44385
MPKNVESFELDHTKVAAPYIRRASDYEIADGHTIVKYDLRFRQPNKSHIEMSTMHAIEHSMAEALRDHLKGVIDFGPMGCQTGFYLTVDTTADGPTWDEVADAVKKAIADIEKWDSVPGAGIKSCGWAEHHDLDGAKKELADFDAHSDEWNQVFA

SEQ ID NO: 4804 - DNA, 468 bp, Listeria monocytogenes str. 4b F2365
  CDS (1)..(468): transl_table=11
atggcagaaaaaatgaatgtagaaagttttaatttggaccatacgaaagtaaaagcaccttttgtgagactggcgggaacgaaagtgggcgtccatggagatgaaatatacaaatatgatgttcgcttcaaacaacccaataaagaacatatggaaatgccagcgctacactctttagaacatttgatggcagaacttgcaagaaatcatactgacaaattagtagacattagtccaatgggatgccaaactggcttttatgtttccttcattaatcatagcgactatgatgatgcactagaaatcatcgccacaacactaacggatgttttagctgcgacagaagttcctgcatgcaatgaagtccaatgcggttgggcagcaagccatagtttagaaggtgcaaaagcgcttgcagcagaatttttagacaaacgagacgaatggaaaaatgtatttggtgaataa

SEQ ID NO: 4805 - protein, 155 aa, Listeria monocytogenes str. 4b F2365
MAEKMNVESFNLDHTKVKAPFVRLAGTKVGVHGDEIYKYDVRFKQPNKEHMEMPALHSLEHLMAELARNHTDKLVDISPMGCQTGFYVSFINHSDYDDALEIIATTLTDVLAATEVPACNEVQCGWAASHSLEGAKALAAEFLDKRDEWKNVFGE

SEQ ID NO: 4806 - DNA, 474 bp, Bacillus licheniformis ATCC 14580
  CDS (1)..(474): transl_table=11
atgccttcagttgaaagttttgagcttgaccataatgcggtaaaagcgccttatgtcagacactgcggcgtccacaaagtgggaacggacggcgtcgtcaacaagtttgacatccgtttttgccagccgaataaacaggcaatgaaacctgatacgattcatactttggagcaccttcttgcatttacaatccgcacatatgcggaaaaatatgaccactttgatattatcgacatttcgccgatgggctgccaaacgggctattacctggtggtaagcggtgagccgaaagtggaagaaatcgttgatttgcttgaggatacgttcaaagaagccgttgaagtgactgaaattccggcggctaacgaaaaacagtgcggccaggcaaagcttcacgatcttgaaggcgcaaagcgcatgatgcgtttttggctttcgcaaaataaagaagacctgctcaaggtgtttgggtaa

SEQ ID NO: 4807 - protein, 157 aa, Bacillus licheniformis ATCC 14580
MPSVESFELDHNAVKAPYVRHCGVHKVGTDGVVNKFDIRFCQPNKQAMKPDTIHTLEHLLAFTIRTYAEKYDHFDIIDISPMGCQTGYYLVVSGEPKVEEIVDLLEDTFKEAVEVTEIPAANEKQCGQAKLHDLEGAKRMMRFWLSQNKEDLLKVFG

SEQ ID NO: 4808 - DNA, 483 bp, Streptococcus thermophilus CNRZ1066
  CDS (1)..(483): transl_table=11
atgccaaaagacgttactgttgaaagttttgaacttgatcacaccattgtaaaagcaccttatgtccgtcttatttcagaggaagttggacctaaaggagatatcatcacaaactttgatatccgtttgattcaacctaatgaaaatagtattgatacaggtggtcttcatactatcgaacacctactcgctaaactgattcgtcaacgtatcgatggccttattgattgctcaccatttggttgccgtacaggtttccatatgatcatgtggggaaaacaagatcctacggaaattgccaaagttatcaaatctagtcttgaagctattgcaaacgaaattacttgggaagatgttccaggaactactattgaatcttgtggtaactataaggatcacagccttcattcagctaaggaatgggctaaacttatccttgaacaaggcatctcagaccaagccttcgaacgtcataccgtctaa

SEQ ID NO: 4809 - protein, 160 aa, Streptococcus thermophilus CNRZ1066
MPKDVTVESFELDHTIVKAPYVRLISEEVGPKGDIITNFDIRLIQPNENSIDTGGLHTIEHLLAKLIRQRIDGLIDCSPFGCRTGFHMIMWGKQDPTEIAKVIKSSLEAIANEITWEDVPGTTIESCGNYKDHSLHSAKEWAKLILEQGISDQAFERHTV

SEQ ID NO: 4810 - DNA, 477 bp, Geobacillus kaustophilus HTA426
  CDS (1)..(477): transl_table=11
atgccttcaccggtggaaagctttgaattggaccattgcgcggtcaaagcgccgtacgttcggcattgtggcgttcacaaagtcggcagtgacggcgtcgtcaataagtttgacattcgcttttgccagccgaacaaagaagcgatggacccggccgcgattcatacgctcgaacatctgttggcgtatacgctgcgccgacatgcggccaaatatgatcatttcgatattatcgacatctcgcctatgggttgccaaaccgggttttatcttgtcgtgagcggctcgccgaccgtggacgagatcattgatttgttggaagaagccatgaaggacgcgctcgccgcgacggaagtgccagccgcgaccgagcggcaatgcggccaagcgaagctgcatgatctagaggcggccaaacagctgatgcgcttttggctttcgcaagagaaagaagagttgaaaaaggtgtttggttga

SEQ ID NO: 4811 - protein, 158 aa, Geobacillus kaustophilus HTA426
MPSPVESFELDHCAVKAPYVRHCGVHKVGSDGVVNKFDIRFCQPNKEAMDPAAIHTLEHLLAYTLRRHAAKYDHFDIIDISPMGCQTGFYLVVSGSPTVDEIIDLLEEAMKDALAATEVPAATERQCGQAKLHDLEAAKQLMRFWLSQEKEELKKVFG

SEQ ID NO: 4812 - DNA, 471 bp, Bacillus clausii KSM-K16
  CDS (1)..(471): transl_table=11
atgccttcagtagaaagttttgaacttgaccatacgattgtaaaggccccgtatgtccgccattgtgggaaacacaagattggcagtgacggcgaagtgaacaagtttgacattcggttttgccagcctaataaagaagcgctaaaacctggcgtgattcatacgttagaacatttgcttgctattaacattcgccgtttttcagaggaatatgaccattttgatgtcatcgatatttcgccaatggggtgccaaaccggctattacttaataatgagcggaaccccgtctgtcgaagaaatcatcgatgttcttgaaaagacaatgacgtattcgctgtcaattgaaaccgttcctgcggctacggaaaaagaatgtgggcaagcggcattgcatgatttggaaggaacgaaagaagtcatgcgcaaatggctatctgaagacaaaggttcattaaagcaagtattttaa

SEQ ID NO: 4813 - protein, 156 aa, Bacillus clausii KSM-K16
MPSVESFELDHTIVKAPYVRHCGKHKIGSDGEVNKFDIRFCQPNKEALKPGVIHTLEHLLAINIRRFSEEYDHFDVIDISPMGCQTGYYLIMSGTPSVEEIIDVLEKTMTYSLSIETVPAATEKECGQAALHDLEGTKEVMRKWLSEDKGSLKQVF

SEQ ID NO: 4814 - DNA, 471 bp, Staphylococcus haemolyticus JCSC1435
  CDS (1)..(471): transl_table=11
atgactaaaatgaacgttgaaagttttaatcttgatcacactaaagttgttgcacctttcgtccgtttagctggtacaatggaaggcttaaatggtgatgttattaaaaagtatgacattcgctttaaacaacctaacaaagagcacatggaaatgcctgggttacactcactagagcatttaatggctgaaaacattagaaatcatactgataaagttgttgatttaagtccaatgggttgtcaaactggtttttatgtttcatttattaatcatgacgactatgaagatgtgttaaatataattgaaaaaacactaaatgatgttttagaagctactgaggtacccgcttgcaatgaagtacaatgcggttgggcagcaagtcattcacttgaaggtgcaaaagaaattgcgcaagcatttttagataaacgcaatcaatggtcagatatttttggtgaaggtaaataa

SEQ ID NO: 4815 - protein, 156 aa, Staphylococcus haemolyticus JCSC1435
MTKMNVESFNLDHTKVVAPFVRLAGTMEGLNGDVIKKYDIRFKQPNKEHMEMPGLHSLEHLMAENIRNHTDKVVDLSPMGCQTGFYVSFINHDDYEDVLNIIEKTLNDVLEATEVPACNEVQCGWAASHSLEGAKEIAQAFLDKRNQWSDIFGEGK

SEQ ID NO: 4816 - DNA, 471 bp, Staphylococcus saprophyticus subsp. saprophyticus ATCC 15305
  CDS (1)..(471): transl_table=11
atgccaaaaatgaacgtagaaagttttaatttagatcatacaatcgttgtagcaccttttgtgagattagcagggaaaatggaaggcgctaacggtgatgtaattcataaatatgatatccgctttaaacaaccaaacaaagagcatatggatatgcctggattacattcattagaacatttaatggcagaaaatattagaaatcattcagataaagtcgttgatattagtccaatgggttgccaaacaggattttacgtttcatttatcaatcatgatgactatgaagatgtgttaaatattatcgaagcaacaattaaagatgtattaaatgctacagaagtgccagcatgtaatgaagttcaatgtggttgggctgctagccattcattagaaggcgccaaagaaatagcccaaacattcttagacaaaaaagctgaatggcatgatatctatggtgaagcacaataa

SEQ ID NO: 4817 - protein, 156 aa, Staphylococcus saprophyticus subsp. saprophyticus ATCC 15305
MPKMNVESFNLDHTIVVAPFVRLAGKMEGANGDVIHKYDIRFKQPNKEHMDMPGLHSLEHLMAENIRNHSDKVVDISPMGCQTGFYVSFINHDDYEDVLNIIEATIKDVLNATEVPACNEVQCGWAASHSLEGAKEIAQTFLDKKAEWHDIYGEAQ

SEQ ID NO: 4818 - DNA, 522 bp, Thiomicrospira crunogena XCL-2
  CDS (1)..(522): transl_table=11
atgccattactcgatagctttacggttgaccataaaatcatgaatgcgccggccgtccgagttgctaaaaccatgaaaacacccggtggcgacaccattacagtcttcgatttacggtttaacaagccgaatgtcgacatgatgggagaaaaaggcattcatacattagagcatttatttgccggctttattcgtgctcatcttaacgctgacgatgtggaaatcatcgatgtgtcaccaatgggatgtcgcacggggttttacatgagtctcatcggcacgccagatgagaaacgcgtggcggatgcatggatgaaagccatgcaagatgtgcttaacgttgaaaaaatggaagacattcctgaattgaatgaatatcagtgtggtacctacacaatgcattctttggaagaggcaaaatccattgctcaaaacattattgatcacggcattggcgtgaataaaaatgaaaacattgcgctggataaagaaacccttaaagcacttggcaacgacgtttaa

SEQ ID NO: 4819 - protein, 173 aa, Thiomicrospira crunogena XCL-2
MPLLDSFTVDHKIMNAPAVRVAKTMKTPGGDTITVFDLRFNKPNVDMMGEKGIHTLEHLFAGFIRAHLNADDVEIIDVSPMGCRTGFYMSLIGTPDEKRVADAWMKAMQDVLNVEKMEDIPELNEYQCGTYTMHSLEEAKSIAQNIIDHGIGVNKNENIALDKETLKALGNDV

SEQ ID NO: 4820 - DNA, 504 bp, Sulfurimonas denitrificans DSM 1251
  CDS (1)..(504): transl_table=11
atgccactattagatagttttaaagttgatcatacaattatgccagccccagcagttcgccgtgcaaaagggatgaagacaccaagcggtgatgatattacagtttttgatttacgttttgttgctccaaacaaagagattttatcctccgagggtattcatacgttagagcatctttttgctggatttatgcgagaccacctaaactctaaggatgttgagattatagacatctctcctatgggatgccgtacagggttttatatgagcttaattggctcaccagacgagcagagagtagcagatgcatggagcgcttcaatgcaggatattttaggggttaaagagcaaaaagatattccagaattaaatgtttatcagtgcggaacttataagatgcactcgcttgaggatgcaaaagagattgcttcaaaagtgttagagagacgcattggtgttatggataatgacgctctagctcttgatgaatcaaagataggataa

SEQ ID NO: 4821 - protein, 167 aa, Sulfurimonas denitrificans DSM 1251
MPLLDSFKVDHTIMPAPAVRRAKGMKTPSGDDITVFDLRFVAPNKEILSSEGIHTLEHLFAGFMRDHLNSKDVEIIDISPMGCRTGFYMSLIGSPDEQRVADAWSASMQDILGVKEQKDIPELNVYQCGTYKMHSLEDAKEIASKVLERRIGVMDNDALALDESKIG

SEQ ID NO: 4822 - DNA, 471 bp, Staphylococcus aureus RF122
  CDS (1)..(471): transl_table=11
atgacaaaaatgaatgttgaaagtttcaatttagatcatactaaagtggttgctccatttattagattagcgggaacgatggaaggattaaacggagatgtcatttacaaatatgacattcgtttcaaacaaccaaacaaagaacatatggatatgcctggattgcattcattagaacatttaatggctgaaaatattagaaatcatagtgacaaagtcgttgatttaagtcctatgggttgccaaactggtttctatgtatcatttattaatcatgataattatgatgatgtattaaatattgttgaagcaactttaaatgatgtgctaaatgctactgaagtgcctgcttgtaatgaagtacaatgtggctgggcagcaagtcattcattagaaggtgctaaaactatcgctcaagcatttctagacaaacgaaacgaatggcatgatgttttcggtacaggaaaataa

SEQ ID NO: 4823 - protein, 156 aa, Staphylococcus aureus RF122
MTKMNVESFNLDHTKVVAPFIRLAGTMEGLNGDVIYKYDIRFKQPNKEHMDMPGLHSLEHLMAENIRNHSDKVVDLSPMGCQTGFYVSFINHDNYDDVLNIVEATLNDVLNATEVPACNEVQCGWAASHSLEGAKTIAQAFLDKRNEWHDVFGTGK

SEQ ID NO: 4824 - DNA, 516 bp, Sodalis glossinidius str. 'morsitans'
  CDS (1)..(516): transl_table=11
atgccacttttggatagctttaccgtagaccatacccgtatggcagcgcctgcggttcgtgttgcgaaaaccatgaaaacacctcatggtgatactatcaccgtctttgacctgcgtttttgccggccgaatctggaagtcatgccggagcggggcatccacaccctagagcatttgtttgcgggctttatgcgtaaccatctgaacggtgaaggcgttgaaatcgtggatatttccccgatgggctgccgtaccggtttctatatgagccttatcggcgcgccggaggaacagcgcgtggccgatgcctggaaagcggcgatggcggatgtgttgaaagttaaagaccagaagcagatccctgagctgaatgagtaccagtgcggcacgtatcaaatgcattcgctcacggaagcgcaagatatcgcgcaacatattctggataacgctatccgcgtcaaccagaacgacgaactgactttgccgaaagaaaagctggcggaactacacatctag

SEQ ID NO: 4825 - protein, 171 aa, Sodalis glossinidius str. 'morsitans'
MPLLDSFTVDHTRMAAPAVRVAKTMKTPHGDTITVFDLRFCRPNLEVMPERGIHTLEHLFAGFMRNHLNGEGVEIVDISPMGCRTGFYMSLIGAPEEQRVADAWKAAMADVLKVKDQKQIPELNEYQCGTYQMHSLTEAQDIAQHILDNAIRVNQNDELTLPKEKLAELHI

SEQ ID NO: 4826 - DNA, 471 bp, Lactobacillus salivarius UCC118
  CDS (1)..(471): transl_table=11
atggctaaggtagaaagttttacattagatcatacagctgttaaggctccatatgtacgtttaattactgttgaaacaggtgcaaaaggagataagatttcaaattttgacttaagatttgttcaaccaaatgaaaatgcaattccaacagctggattgcatacaattgaacatatgttggcaggatatttgcgtgatcatatggatggagttattgattgctcaccttttggatgtcgtacaggtttccatttaattatgtggggtgaacatgatactactgaagttgcaacagctttaaaggcatctttaaacgatattattaatgctagttgggaagatgttcaaggaacagatattaagagttgtggtaattatagagaccattctctattttctgctcaagaatggtgtaagaagattttggctgatggcatttcaactgatccatttgaaagaaaagttatttaa

SEQ ID NO: 4827 - protein, 156 aa, Lactobacillus salivarius UCC118
MAKVESFTLDHTAVKAPYVRLITVETGAKGDKISNFDLRFVQPNENAIPTAGLHTIEHMLAGYLRDHMDGVIDCSPFGCRTGFHLIMWGEHDTTEVATALKASLNDIINASWEDVQGTDIKSCGNYRDHSLFSAQEWCKKILADGISTDPFERKVI

SEQ ID NO: 4828 - DNA, 510 bp, Shewanella denitrificans OS217
  CDS (1)..(510): transl_table=11
atgccattattggacagttttaccgtagatcatacccgtatgcaggcgccagccgtgcgtgttgccaaacagatgaacacccctaagggtgatgcgattaccgtgtttgatttacgtttttgtgtgcctaataaagccatactgtcggagcggggcatacataccttagagcatttatttgccggctttatgcgaaatcacctcaatagtgagtcagttgaagtcatagatatctcacctatgggatgtcgcacgggtttttacatgagtcttatcggcacgcccaaagagcaagaggtggccaatgcttggttgcatgccatggaagatgtgttgcaagtcactaaacaggaagatattccagaacttaatgagtttcaatgtggcacctttgaaatgcattctttacctcaagcgaaagccatagctcaagacatcatttcagcgggaattggggtgaatcagaacgccgagttaaccttagatgaatcattattatccaaaggataa

SEQ ID NO: 4829 - protein, 169 aa, Shewanella denitrificans OS217
MPLLDSFTVDHTRMQAPAVRVAKQMNTPKGDAITVFDLRFCVPNKAILSERGIHTLEHLFAGFMRNHLNSESVEVIDISPMGCRTGFYMSLIGTPKEQEVANAWLHAMEDVLQVTKQEDIPELNEFQCGTFEMHSLPQAKAIAQDIISAGIGVNQNAELTLDESLLSKG

SEQ ID NO: 4830 - DNA, 468 bp, Chromohalobacter salexigens DSM 3043
  CDS (1)..(468): transl_table=11
atgagcgacaaagaaatgaacgtcgagagcttcaacctcgaccataccaaggtcaaggcgccctatgtacgcctggccgggatcaagaccggcgatcacggcgatgcgattcacaagtacgatctgcgtatctgccagccgaacaaggcccacatggaaatgcccgccctgcattccctggaacacctgatggccgaattgtcgcgcaaccacaccgacaagatgctcgacatcagccccatgggctgccagaccggcttctacgtcacgctgatcaaccacgacgattacgacgacgtgctcgacctcatcgacaagaccctcaacgacgtgctcgtcgccaaggaagtgccggcctgcaacgaaatgcagtgcggctgggccgccagccacagtctcgaaggcgctcaagccctggcacgcgacctgctggccaagcgcaatgaatggaaccaggtgttcgcctga

SEQ ID NO: 4831 - protein, 155 aa, Chromohalobacter salexigens DSM 3043
MSDKEMNVESFNLDHTKVKAPYVRLAGIKTGDHGDAIHKYDLRICQPNKAHMEMPALHSLEHLMAELSRNHTDKMLDISPMGCQTGFYVTLINHDDYDDVLDLIDKTLNDVLVAKEVPACNEMQCGWAASHSLEGAQALARDLLAKRNEWNQVFA

SEQ ID NO: 4832 - DNA, 468 bp, Deinococcus geothermalis DSM 11300
  CDS (1)..(468): transl_table=11
atggcgaatgtagaatccttcgatctcgatcacaccaaggttcaggccccctacgtgcggctggcaggtgtgaagaccaccccgcgtggcgaccagatcagcaagtacgatctgcgactgcttcagcctaaccggggcgccattgaaccggcggccctgcacacgctggagcatctgctcgccgggtatctgcgtgatcacctacagaatgtggtggacgtttccccaatgggttgccgcaccggcctctatctggccgtgattggtgagccagacgaggaaggcgtgctgcaagcctttgaggcggcgcttcgtgacacggctacccacgaccgtccgattcccggcgtcagtgagctggaatgcggcaattaccgcgaccatgatctccaggccgctcggcagtatgcccgcgatgcgctcacccaaggtcttaaggtgcagaaaacaatcctcctgcaacgctga

SEQ ID NO: 4833 - protein, 155 aa, Deinococcus geothermalis DSM 11300
MANVESFDLDHTKVQAPYVRLAGVKTTPRGDQISKYDLRLLQPNRGAIEPAALHTLEHLLAGYLRDHLQNVVDVSPMGCRTGLYLAVIGEPDEEGVLQAFEAALRDTATHDRPIPGVSELECGNYRDHDLQAARQYARDALTQGLKVQKTILLQR

SEQ ID NO: 4834 - DNA, 468 bp, Helicobacter pylori HPAG1
  CDS (1)..(468): transl_table=11
atgaaaacgccaaaaatgaatgtagaaagttttaatttggatcacaccaaagtcaaagccccttatgtgcgtgtcgctgatcgcaaaaagggcgctaatggggatgtgattgtcaaatacgatgtgcgcttcaagcagcccaaccaagatcacatggacatgccaagcctacactctttagagcatttagtcgctgaaattatccgcaaccatgccagttatgtcgtggattggtcgcctatgggttgccaaacgggattttatctcacggtgttaaaccatgacaattacacagagattttagaggttttagaaaagacgatgcaagatgtgttaaaggctaaagaagtgcctgccagcaatgaaaagcaatgcggttgggcggctaaccacactttagagggcgcacagaatttagcacgcacttttttagacaaacgcgctgaatggtctgaagtgggggtttaa

SEQ ID NO: 4835 - protein, 155 aa, Helicobacter pylori HPAG1
MKTPKMNVESFNLDHTKVKAPYVRVADRKKGANGDVIVKYDVRFKQPNQDHMDMPSLHSLEHLVAEIIRNHASYVVDWSPMGCQTGFYLTVLNHDNYTEILEVLEKTMQDVLKAKEVPASNEKQCGWAANHTLEGAQNLARTFLDKRAEWSEVGV

SEQ ID NO: 4836 - DNA, 474 bp, Helicobacter acinonychis str. Sheeba
  CDS (1)..(474): transl_table=11
atgaaaacgccaaacacaaaaatgaatgtagaaagttttaatttggatcacaccaaagtcaaagccccctatgtgcgcatagccgatcgcaagaaaggcatcaatggggatttgattgtcaaatacgatgtgcgcttcaagcaacccaatcaagagcatatggacatgccaagcttgcattctttagagcatttagttgctgagattatccgtaaccatgctaattatgttgtggattggtcgcctatgggttgtcaaacgggattttatctcacggtattaaaccatgacaattacacagagattttagaggttttagaaaagacgatgcaagatgtgcttaaggctacagaagtgcctgccagcaatgaaaagcaatgcggttgggcggctaaccacactttagagggtgccaagaatttagcacacgcctttttatccaaacgagatgagtggtctgaaatagggatttaa

SEQ ID NO: 4837 - protein, 157 aa, Helicobacter acinonychis str. Sheeba
MKTPNTKMNVESFNLDHTKVKAPYVRIADRKKGINGDLIVKYDVRFKQPNQEHMDMPSLHSLEHLVAEIIRNHANYVVDWSPMGCQTGFYLTVLNHDNYTEILEVLEKTMQDVLKATEVPASNEKQCGWAANHTLEGAKNLAHAFLSKRDEWSEIGI

SEQ ID NO: 4838 - DNA, 456 bp, Clostridium perfringens ATCC 13124
  CDS (1)..(456): transl_table=11
gtggttaaagttgaaagttttgaattagatcatacaaaggttaaggcaccatatgtaagaaaagcaggaataaagattggacctaaaggagatatagtttcaaagtttgatttgagatttgtacaacctaataaagaacttttaagtgataagggaatgcatacattagaacattttttagcaggttttatgagagaaaaattagatgatgtaatagacatatcaccaatgggatgcaaaacaggtttttatttaactagttttggagatattaatgttaaagatattatagaggctttagagtattcactatctaaggttttagagcaagaagaaataccagcagcaaatgaattacaatgtggaagtgcaaagttacattcactagagttagctaagagtcatgcaaaacaggttttagaaaatggaataagtgataaattttatgtagagtaa

SEQ ID NO: 4839 - protein, 151 aa, Clostridium perfringens ATCC 13124
MVKVESFELDHTKVKAPYVRKAGIKIGPKGDIVSKFDLRFVQPNKELLSDKGMHTLEHFLAGFMREKLDDVIDISPMGCKTGFYLTSFGDINVKDIIEALEYSLSKVLEQEEIPAANELQCGSAKLHSLELAKSHAKQVLENGISDKFYVE

SEQ ID NO: 4840 - DNA, 507 bp, Haemophilus somnus 129PT
  CDS (1)..(507): transl_table=11
atgccactacttgacagttttaaagttgatcatacgagaatgaatgcccctgccgtacgtatagcaaaaacaatgcaaacaccgaaaggcgacaatatcaccgtttttgatcttcgtttttgtattccaaataaagagatcctctcatctaaaggaattcataccttagaacatctatttgcaggatttatgcgtgatcatttaaataatgaacaagttgaaattattgatatttcgcctatgggatgccgaaccggattttatatgtcattaattggcacaccaaatgaacaacaagttgctgaagcttggctgatttctatgcaagatattttaaacattaaaaatcaagacgaaattcctgaactaaacgaatatcaatgtggaacttatactgagcattcgttggaagaagcacaaaatattgcacaaaatatccttcatcgaggcgtaggtattaataaaaatgaagatctacttttagatgataatttactcaattcttaa

SEQ ID NO: 4841 - protein, 168 aa, Haemophilus somnus 129PT
MPLLDSFKVDHTRMNAPAVRIAKTMQTPKGDNITVFDLRFCIPNKEILSSKGIHTLEHLFAGFMRDHLNNEQVEIIDISPMGCRTGFYMSLIGTPNEQQVAEAWLISMQDILNIKNQDEIPELNEYQCGTYTEHSLEEAQNIAQNILHRGVGINKNEDLLLDDNLLNS

SEQ ID NO: 4842 - DNA, 474 bp, Lactobacillus brevis ATCC 367
  CDS (1)..(474): transl_table=11
atggcaaaagttgaaagttttacgttagaccacaccgccgttaaagcaccatatgttcggttaattacgcgagaaactgggacgaagggtgacgtgatctcgaattttgatttacgactcgtccaaccaaatgaaaacgcgattccgacggccggattacataccatcgagcatttattagcgggatatctccgtgatgaaatgagcggtgtcattgactgttcaccgtttgggtgtcggacgggcttccatttgattacttgggatgaacaatcgacagaagaagtggctaaagcattgaaggcttccttgcatcggattgcttacgatacggaatggaaggacgttcaaggcacagataagtacagttgtggtaattaccgcgaccacagcttattctccgctaaggaatggtgtaaagcgattttggatgaaggtatttccaaggacccatttacccgagaagttatttaa

SEQ ID NO: 4843 - protein, 157 aa, Lactobacillus brevis ATCC 367
MAKVESFTLDHTAVKAPYVRLITRETGTKGDVISNFDLRLVQPNENAIPTAGLHTIEHLLAGYLRDEMSGVIDCSPFGCRTGFHLITWDEQSTEEVAKALKASLHRIAYDTEWKDVQGTDKYSCGNYRDHSLFSAKEWCKAILDEGISKDPFTREVI

SEQ ID NO: 4844 - DNA, 474 bp, Pediococcus pentosaceus ATCC 25745
  CDS (1)..(474): transl_table=11
atggcaaaagtagaaagctttgaattggatcacacaaaggtaaaggctccgtacgtacgtttaattacagttgaaacgggaaataagggcgataagatttctaatttcgatttacgtttagttcaaccaaacgaaaatgcgattcccactgcaggactacatacgattgaacatttgctagctggattattgcgagatcgaatggatggaattatcgactgttctccattcggatgtcgaacaggtttccatttgattgcttggggagaacctacaaccacagaagttgctaaagcattgaagggtgcactagaagaaatcgcaaatgttactaagtgggaagatgtaccaggtacggacatctacagttgtggtaattaccgtgatcattcactattttcagctaaagaatgggcgaaaaagattttggatgacggtatcagtgaccaaccttttgaacgaaatgtaatttaa

SEQ ID NO: 4845 - protein, 157 aa, Pediococcus pentosaceus ATCC 25745
MAKVESFELDHTKVKAPYVRLITVETGNKGDKISNFDLRLVQPNENAIPTAGLHTIEHLLAGLLRDRMDGIIDCSPFGCRTGFHLIAWGEPTTTEVAKALKGALEEIANVTKWEDVPGTDIYSCGNYRDHSLFSAKEWAKKILDDGISDQPFERNVI

SEQ ID NO: 4846 - DNA, 474 bp, Lactobacillus casei ATCC 334
  CDS (1)..(474): transl_table=11
atggcaaaagttgaaagtttcaccttggatcacacagctgttaaagcaccttatgttcggttgattacgacagagcacggtgcaaagggtgatgtgatttcaaactatgatttgcggttggtacaaccaaacacagcagccattgatacggctggcttgcacacgattgaacacttgctggcatcgttattgcgcgatcggatggacggcgttattgattgttcaccattcggctgccgcaccggtttccacttgattacttggggtgagcacagcacaaccgaagtggccaaggctttgaagtcaagcttagaggccattgccaatgacattacttgggatgacgtccctggtgttgacatcaagagttgtggcaattacaaggatcacagcctgttttcagcaaaggagtgggcgaagttaattttgagccgcggcatttcaaatgacccgtacacgcgtcaggttgtctga

SEQ ID NO: 4847 - protein, 157 aa, Lactobacillus casei ATCC 334
MAKVESFTLDHTAVKAPYVRLITTEHGAKGDVISNYDLRLVQPNTAAIDTAGLHTIEHLLASLLRDRMDGVIDCSPFGCRTGFHLITWGEHSTTEVAKALKSSLEAIANDITWDDVPGVDIKSCGNYKDHSLFSAKEWAKLILSRGISNDPYTRQVV

SEQ ID NO: 4848 - DNA, 477 bp, Lactococcus lactis subsp. cremoris SK11
  CDS (1)..(477): transl_table=11
atggctgaagtagaatcttttcaattagatcacacaaaagtacttgccccttacgtacgcttaattggtagcgaaactggaccgaaaggtgatgttattactaactttgacgttcgttttgtacaacctaatgccaatgccattggtatggctgctttacatactgtcgagcatagtatggcaagtttgattcgcgatagaatcgatggtatgattgacttttcaccatttggttgtcaaactggtttccacatgattatgtggggtgaacatagttccgaagaaattgcgaaagtgattaaatcttctctagaagagctttcaagtgatgaatttggttgggacaatgttcctggtgttgcggaaaaagaatgcggaaactaccgtaatcactcacttttcggtgctaaagaatggtctaagaaaatcctcgctgaaggaatttcaactgacccttacgaacgtaaagtcatttaa

SEQ ID NO: 4849 - protein, 158 aa, Lactococcus lactis subsp. cremoris SK11
MAEVESFQLDHTKVLAPYVRLIGSETGPKGDVITNFDVRFVQPNANAIGMAALHTVEHSMASLIRDRIDGMIDFSPFGCQTGFHMIMWGEHSSEEIAKVIKSSLEELSSDEFGWDNVPGVAEKECGNYRNHSLFGAKEWSKKILAEGISTDPYERKVI

SEQ ID NO: 4850 - DNA, 474 bp, Oenococcus oeni PSU-1
  CDS (1)..(474): transl_table=11
atggcagaagtcgaaagttttacattggatcacacaaaagttaaagcaccatacgtgcgtttgattgaagaacagaaaggaccaaagggtggcacaatcgccaattatgatttacgtttggcccagccaaaccaaacttcgattgaaacaggcggtcttcataccctggaacatttatttgcttctttgatgcgggaccggcttgatggaattattgatatttcaccttttggttgccgaactggttttcatatgattagttggtatacctacgatactgaaacagttgcaaaagcattgaaagagaccttaacggaaattcgcgatagtattgaattttcggatattcctggtgtctctgaaaaaacttgtggtaatttcaaggaccattctttgtggagcgctaaaaactgggcaaaggttattttggatgaaggtatcagcagcgatccttttgaaagaaaagttgtttga

SEQ ID NO: 4851 - protein, 157 aa, Oenococcus oeni PSU-1
MAEVESFTLDHTKVKAPYVRLIEEQKGPKGGTIANYDLRLAQPNQTSIETGGLHTLEHLFASLMRDRLDGIIDISPFGCRTGFHMISWYTYDTETVAKALKETLTEIRDSIEFSDIPGVSEKTCGNFKDHSLWSAKNWAKVILDEGISSDPFERKVV

SEQ ID NO: 4852 - DNA, 480 bp, Lactobacillus delbrueckii subsp. bulgaricus ATCC BAA-365
  CDS (1)..(480): transl_table=11
atggctaaagtagaaagttttgaattggaccacactaaagttaaggcaccttacgtccgcctgatcaccgttgaagaaggccctaagggcgacaagatctccaacttcgacctacgcctggtgcagcctaacgaaaacgccatcccaactggcggcctgcacaccattgaacacctcctggccagcctcctgcgcgaccgcttagacggcgtcatcgactgctccccattcggctgccggaccggtttccacttgattacctggggtgaacacagcaccactgaagtagccaaggccctgcgcgactccctcaaggccatcagagacgacatcacttgggaagacgtgcctggtaccaccatcgaaagctgcggcaactaccgcgaccactccctcttcagcgcccaggaatggtgcaacgatatcttgaagaagggcatcagcgacgacccatttgaccgccacgtggttgaagactag

SEQ ID NO: 4853 - protein, 159 aa, Lactobacillus delbrueckii subsp. bulgaricus ATCC BAA-365
MAKVESFELDHTKVKAPYVRLITVEEGPKGDKISNFDLRLVQPNENAIPTGGLHTIEHLLASLLRDRLDGVIDCSPFGCRTGFHLITWGEHSTTEVAKALRDSLKAIRDDITWEDVPGTTIESCGNYRDHSLFSAQEWCNDILKKGISDDPFDRHVVED

SEQ ID NO: 4854 - DNA, 474 bp, Lactobacillus delbrueckii subsp. bulgaricus ATCC BAA-365
  CDS (1)..(474): transl_table=11
atggcaaaagttgaaagttttacattagatcacacaaaggtaaaggcaccttacgttcgtctcatcactgaagaaactggaaaaaagggcgacgtcatttctaattacgacttacgacttgttcaaccaaacaccaatgccattcctactgcagggttgcatacgattgaacatctcttagccggattacttagagatcgccttgacggggttatcgattgctcaccatttggctgccgaaccggttttcatttaattacttggggtgaacacagcaccactgaagtcgcaaaggctttgaaggggtcactcgacgcaattgccaacgacatcgaatggaaagacgttcaagggactgacaagtatagttgcggtaattaccgtgatcattcattgttctctgctaaagagtggagtaaagaaatcttgtcacaagggatctctgatcaacctttcgaacgccacgttatctag

SEQ ID NO: 4855 - protein, 157 aa, Lactobacillus delbrueckii subsp. bulgaricus ATCC BAA-365
MAKVESFTLDHTKVKAPYVRLITEETGKKGDVISNYDLRLVQPNTNAIPTAGLHTIEHLLAGLLRDRLDGVIDCSPFGCRTGFHLITWGEHSTTEVAKALKGSLDAIANDIEWKDVQGTDKYSCGNYRDHSLFSAKEWSKEILSQGISDQPFERHVI

SEQ ID NO: 4856 - DNA, 477 bp, Lactobacillus gasseri ATCC 33323
  CDS (1)..(477): transl_table=11
atgggtaaagttgaaagttttgaattagatcatactaaagttaaagcaccttacgttcgcttaatcacggttgaagaaggtaaaaaaggtgacaagattagtaattttgaccttcgtttagttcaaccaaatgaaaatgccatccctactggaggcttacatactatcgagcacttgctagctggattattgcgcgaccgtattgacggctacattgattgttcaccatttggttgccgaacgggctttcatctcttagtttggggtacgccatcaactacagatgtagctaaggcactaaaggaagcgcttgaagaaattcgcgataaaattcaatgggaagatgttcccggcactactattaaatcttgtgggaattaccgtgatcattctctattttctgccaaacaatggtcaagagatattttagaaaagggtatttctgacgatccatttgaaagaaacgttgtcgaataa

SEQ ID NO: 4857 - protein, 158 aa, Lactobacillus gasseri ATCC 33323
MGKVESFELDHTKVKAPYVRLITVEEGKKGDKISNFDLRLVQPNENAIPTGGLHTIEHLLAGLLRDRIDGYIDCSPFGCRTGFHLLVWGTPSTTDVAKALKEALEEIRDKIQWEDVPGTTIKSCGNYRDHSLFSAKQWSRDILEKGISDDPFERNVVE

SEQ ID NO: 4858 - DNA, 477 bp, Leuconostoc mesenteroides subsp. mesenteroides ATCC 8293
  CDS (1)..(477): transl_table=11
atgtcagaaacagttgttgaaagttttactttggatcatacaaaggttaaggcaccgtatgtgcgtgtgattgaaacacaagctggtcctaatggcggcagcattactaattatgatttgcggttaacacaacctaatgaaacatcgattgaaacgggtggattgcatacactagaacatttatttgcaggccttgttcgtgatgaaattgatggcattattgatatgtcaccatttggatgccgtactggatttcatgttatctcatgggtaaattacgattcggaaacattagctaaagttttcaaaaaagtattggaaaaaattgttagtgatgaagtaaccgaagtgcccgcagcagaaatcgaaagttgtggtaactataaagatcatagtctacattcagctaaggaatgggcaaaaatcatcttggcacaaggtatttccagtgatgcgtttgaacgtaaaattgtttaa

SEQ ID NO: 4859 - protein, 158 aa, Leuconostoc mesenteroides subsp. mesenteroides ATCC 8293
MSETVVESFTLDHTKVKAPYVRVIETQAGPNGGSITNYDLRLTQPNETSIETGGLHTLEHLFAGLVRDEIDGIIDMSPFGCRTGFHVISWVNYDSETLAKVFKKVLEKIVSDEVTEVPAAEIESCGNYKDHSLHSAKEWAKIILAQGISSDAFERKIV

SEQ ID NO: 4860 - DNA, 468 bp, Listeria welshimeri serovar 6b str. SLCC5334
  CDS (1)..(468): transl_table=11
atgacagaaaaaatgaatgtagaaagttttaatttagatcatacgaaagtaaaagcaccttttgttagactagcgggaacgaaggttggtttgcacggagatgaaatttataaatacgatgtccgttttaaacagcctaataaagaacatatggatatgccagcacttcattcactggagcatttaatggcggaacttgctagaaaccatactgataaattagttgatattagccctatgggatgtcaaacaggtttttatgtatctttcatcaaccataatgactatgatgatgcattagaaattttagctacaacgttaacagatgttttagctgcaacagaagtaccagcctgtaatgaggtgcaatgtggttgggcagcgagtcatagccttgaaggagctcaagcgcttgcggcagaatttttagctaaacgagacgaatggaaaaatgtgtttggtgaataa

SEQ ID NO: 4861 - protein, 155 aa, Listeria welshimeri serovar 6b str. SLCC5334
MTEKMNVESFNLDHTKVKAPFVRLAGTKVGLHGDEIYKYDVRFKQPNKEHMDMPALHSLEHLMAELARNHTDKLVDISPMGCQTGFYVSFINHNDYDDALEILATTLTDVLAATEVPACNEVQCGWAASHSLEGAQALAAEFLAKRDEWKNVFGE

SEQ ID NO: 4862 - DNA, 510 bp, Aeromonas hydrophila subsp. hydrophila ATCC 7966
  CDS (1)..(510): transl_table=11
atgccgttattggacagttttaccgttgaccacacccgcatggctgcgccggcggtgcgtgtggccaagaccatgcagaccccgaacaaggacaccattaccgtgttcgacctgcgtttctgcgtgccgaaccaggagatcctctccgagcgcggcatccacaccctcgagcacctgtttgccggtttcatgcgtgatcacctgaacggcaacggggtggagatcatcgacatctcccccatgggctgccggaccggcttctacatgagcctgatcggtgcgccggacgaggcccgggttggtgccgcctggcaggccgccatgagcgatgtgctgaccgtgcaggagcagggcaagatccccgagctgaacgaataccagtgcggtacctacagcatgcactcactggaagaggcccatgccatcgcccgccacgtgctggagcgcggcatcggcgtcaaccgcaatgacgagctggccctgccggaagagaagctgaaaagcctctga

SEQ ID NO: 4863 - protein, 169 aa, Aeromonas hydrophila subsp. hydrophila ATCC 7966
MPLLDSFTVDHTRMAAPAVRVAKTMQTPNKDTITVFDLRFCVPNQEILSERGIHTLEHLFAGFMRDHLNGNGVEIIDISPMGCRTGFYMSLIGAPDEARVGAAWQAAMSDVLTVQEQGKIPELNEYQCGTYSMHSLEEAHAIARHVLERGIGVNRNDELALPEEKLKSL

SEQ ID NO: 4864 - DNA, 486 bp, Bifidobacterium adolescentis ATCC 15703
  CDS (1)..(486): transl_table=11
atggcggaagacaagccggtggtggaaagcttccaattggaccacaccaaagtaaaggcgccgtatgtgcgctacatcgatacggaaaccggcctccacggcgacgtgatctcgaactacgacctgcgattggtgcagccgaacgagaacgccattccgaccggcgggctgcacaccatcgaacacaccatcgcggtgctgctgcgcgaacgcatccccggttacatcgactgctcgccgttcgggtgccgcacaggcttccacctgctgacgtggggcgagcattccaccgaggatgtggctcgcgcattgaaggaatcgttggaattcatcgcctacgaggccacatgggacgacgtgccggcaaccaccatcgaaagttgcggcaactaccgcgaccacagcctgttcaccgccaaggaatggtgcaaggacatcctcgccaagggcatcagctccgacccgttcgaacgccgccttgtgtga

SEQ ID NO: 4865 - protein, 161 aa, Bifidobacterium adolescentis ATCC 15703
MAEDKPVVESFQLDHTKVKAPYVRYIDTETGLHGDVISNYDLRLVQPNENAIPTGGLHTIEHTIAVLLRERIPGYIDCSPFGCRTGFHLLTWGEHSTEDVARALKESLEFIAYEATWDDVPATTIESCGNYRDHSLFTAKEWCKDILAKGISSDPFERRLV

SEQ ID NO: 4866 - DNA, 510 bp, Psychromonas ingrahamii 37
  CDS (1)..(510): transl_table=11
atgccattattagatagttttaccgttgatcatacgattatgaatgcccctgcggttcgcatagcgaagaccatgcaaaccccgagcaaagatacgatcaccgtctttgatttgcgttttacggtgcccaatgaagatctcttgtcggaaaaagggatccataccctagagcatctttatgcgggatttatgcgcaatcatttaaatagccctgatgttgaaattattgatatttcacccatgggttgtcgaactggattttatatgagtttgattgggagcccaagtgagactgaggttgccaatgcctggttggccgcgatgcgtgatgtgttagctgtagagcatcaggaagagattcctgagcttaataagtaccaatgcgggacttatgcgatgcactcgcttgctgaggcaaaaaccattgctcaagcggttattgatgccggcgtcggcactaataaaaatgcagatatcaccttatcggatgaacaattaaagcagctttaa

SEQ ID NO: 4867 - protein, 169 aa, Psychromonas ingrahamii 37
MPLLDSFTVDHTIMNAPAVRIAKTMQTPSKDTITVFDLRFTVPNEDLLSEKGIHTLEHLYAGFMRNHLNSPDVEIIDISPMGCRTGFYMSLIGSPSETEVANAWLAAMRDVLAVEHQEEIPELNKYQCGTYAMHSLAEAKTIAQAVIDAGVGTNKNADITLSDEQLKQL

SEQ ID NO: 4868 - DNA, 522 bp, Borrelia turicatae 91E135
  CDS (1)..(522): transl_table=11
atgggaaaaactagatttcgtagacacaataaaaaaggagttcaaaatatgaataaaataccaagctttacaattgatcacacaaaactaaaacctggcatatatgtttcaagaaaagatatatttgataatttaacattcactactgtagatattaggatgaaagctcctaatagagaacctgtaattaacaatgcagaaatgcatacaatcgaacacataggagcaacattgcttagaaacaataaagtctggggcgacaaagtattatactttggaccaatgggttgccggactggattttacctaatccttttgggtaattatgagagcaaagatctaattgatttaatatcttggctctttcatgaaattgcaaattttcaaggaaatattataggcgcaactgaaaaggaatgtggaaattaccaagatcataatctaaacatggcaaaatatgaatctaatcgatatttagcaatactagctaacataaaagaagaaaacttaacatatccttaa

SEQ ID NO: 4869 - protein, 173 aa, Borrelia turicatae 91E135
MGKTRFRRHNKKGVQNMNKIPSFTIDHTKLKPGIYVSRKDIFDNLTFTTVDIRMKAPNREPVINNAEMHTIEHIGATLLRNNKVWGDKVLYFGPMGCRTGFYLILLGNYESKDLIDLISWLFHEIANFQGNIIGATEKECGNYQDHNLNMAKYESNRYLAILANIKEENLTYP

SEQ ID NO: 4870 - DNA, 495 bp, Bifidobacterium longum DJO10A
  CDS (1)..(495): transl_table=11
atggcagaagaaacggccgaaaagcccgtcgtcgaatcattccagcttgatcacaccaaggtcaaggcgccgtacgtgcgttacatcgacaccgaaacgggccctcacggcgacgtgatctccaactatgatctgcgcctgacccagccgaacaagcaggccatccccaccggcggcctgcacaccatcgaacacaccatcgccgtgctgctgcgcgaacgtatcccgggctacatcgactgctcgccgttcggctgccgcaccggcttccacctgctgacctggggcacccaccccaccgaggaagtggccaaggccctgaaggaatcgttggagttcatcgcgtacaaggccacgtgggatgacgtgcccgccaccaccgagaagagctgcggcaactatcgcgaccacagcctgttcaccgccaaggaatgggccaagcagatccttgaggaaggcatcagctccgacccgttcgagcgcaaggtcgtctga

SEQ ID NO: 4871 - protein, 164 aa, Bifidobacterium longum DJO10A
MAEETAEKPVVESFQLDHTKVKAPYVRYIDTETGPHGDVISNYDLRLTQPNKQAIPTGGLHTIEHTIAVLLRERIPGYIDCSPFGCRTGFHLLTWGTHPTEEVAKALKESLEFIAYKATWDDVPATTEKSCGNYRDHSLFTAKEWAKQILEEGISSDPFERKVV

SEQ ID NO: 4872 - DNA, 495 bp, Campylobacter upsaliensis RM3195
  CDS (1)..(495): transl_table=11
atgcctctactagatagtttcaaggtcgaccatactaaaatgccagcacctgccgtgcgtcttgctaagatgatgaaaacgccaaagggtgatgatatttgtgtttttgatttgcgtttttgtgtgcctaataaggacttaatgagtgaaaaaggcacgcacactttagagcatttatttgcaggctttatgagggaccatttaaattcaaattcggtggaaatcatcgacatttcacctatgggctgtcgcacgggcttttatatgagcttaataggaacgcccgatgaaaaaagtgtagcaaaagcgtgggaagcaagtatgaaagatgttttaaatgtgcaagatgaaagcaaaatcccagagcttaatatctatcaatgcggaacttgcaaaatgcactctttagatgaagccaagcaaatcgctcaaaaagttttaaattcgagcataggcgtgatgagtaacgaagaattaaaacttgaaaatgtttaa

SEQ ID NO: 4873 - protein, 164 aa, Campylobacter upsaliensis RM3195
MPLLDSFKVDHTKMPAPAVRLAKMMKTPKGDDICVFDLRFCVPNKDLMSEKGTHTLEHLFAGFMRDHLNSNSVEIIDISPMGCRTGFYMSLIGTPDEKSVAKAWEASMKDVLNVQDESKIPELNIYQCGTCKMHSLDEAKQIAQKVLNSSIGVMSNEELKLENV

SEQ ID NO: 4874 - DNA, 474 bp, Bacillus anthracis str. A2012
  CDS (1)..(474): transl_table=11
atgccatcagtagaaagctttgaattagatcatacgattgtaaaggcaccttatgtaagacattgcggagttcacaatgtaggtagtgacggtattgtaaataaattcgatattcgtttttgccaaccgaataaacaagcaatgaaaccagatgttattcatacgttagaacatttattagcatttaatttacgtaaatatattgatcgttatccacattttgatattatcgatatttcaccaatgggctgccaaacaggatactaccttgtagtaagcggaacaccgacagttcgagaaatcattgatttattagaattaacattaaaagatgcggttcaaattacagaaattccagctgcaaatgaaacacaatgtggtcaagcgaagcttcacgatttagaaggagcaaaacgcttaatgaacttctggttaagccaagataaagatgaacttgagaaagtatttggataa

SEQ ID NO: 4875 - protein, 157 aa, Bacillus anthracis str. A2012
MPSVESFELDHTIVKAPYVRHCGVHNVGSDGIVNKFDIRFCQPNKQAMKPDVIHTLEHLLAFNLRKYIDRYPHFDIIDISPMGCQTGYYLVVSGTPTVREIIDLLELTLKDAVQITEIPAANETQCGQAKLHDLEGAKRLMNFWLSQDKDELEKVFG

SEQ ID NO: 4876 - DNA, 459 bp, Enterococcus faecium DO
  CDS (1)..(459): transl_table=11
atgagaatgaatgtcgaaagttttaatcttgaccatacaaaagtcaaagcaccttatgtacgtgtagctgatcgaaaaacgggtgcgcatggcgatgtcatcattaaatacgacgtccgctttaaacaaccaaataaagaacacatggacatgccaagtctacattcacttgagcacttgactgccgaactaatccgcaatcacgcagattacatcgtagactggtctccaatgggatgccaaacaggcttttacttgactgtattgaatcatgaaagctacgaagacattttagatgttcttgaagcaacaatgaaagatgttcttgaagctactgaagtacctgcaagcaatgaaacacaatgtggctgggctgccagccatacactagaaggtgcacaagctttggctcgtgaatttttagcaaaacgcgatgaatggtctgaagtagaagcatag

SEQ ID NO: 4877 - protein, 152 aa, Enterococcus faecium DO
MRMNVESFNLDHTKVKAPYVRVADRKTGAHGDVIIKYDVRFKQPNKEHMDMPSLHSLEHLTAELIRNHADYIVDWSPMGCQTGFYLTVLNHESYEDILDVLEATMKDVLEATEVPASNETQCGWAASHTLEGAQALAREFLAKRDEWSEVEA

SEQ ID NO: 4878 - DNA, 483 bp, Streptococcus agalactiae H36B
  CDS (1)..(483): transl_table=11
atgacaaaagaagttgtcgtagagagttttgaattagatcacaccatcgttaaagcaccctacgttcgtttaatttcagaagaagttggaccggtcggagacatcattactaactttgatatccgccttattcagcctaatgaaaatgctattgatactgctggtttacatactatcgagcaccttctggcgaagttaatccgccaacgaattaatggtttgattgattgttctccttttggttgtagaactggttttcacatgattatgtggggaaaacaggatgctactgaaattgctaaagtcatcaaatctagtctagaggctattgctggtggggtcacttgggaagacgttcctggaacaaccattgaatcttgtggaaattataaagaccacagtctccactctgctcaagaatgggcgaaattaattctttcccaagggatttctgacaatgcttttgagcgccacattgtctga

SEQ ID NO: 4879 - protein, 160 aa, Streptococcus agalactiae H36B
MTKEVVVESFELDHTIVKAPYVRLISEEVGPVGDIITNFDIRLIQPNENAIDTAGLHTIEHLLAKLIRQRINGLIDCSPFGCRTGFHMIMWGKQDATEIAKVIKSSLEAIAGGVTWEDVPGTTIESCGNYKDHSLHSAQEWAKLILSQGISDNAFERHIV

SEQ ID NO: 4880 - DNA, 483 bp, Streptococcus agalactiae COH1
  CDS (1)..(483): transl_table=11
atgacaaaagaagttgtcgtagagagttttgaattagatcacaccatcgttaaagcaccctacgttcgtttaatttcagaagaagttggaccggtcggagacatcattactaactttgatatccgccttattcagcctaatgaaaatgctattgatactgctggtttacatactatcgagcaccttctggcgaagttaatccgccaacaaattaatggtttgattgattgttctccttttggttgtagaactggttttcacatgattatgtggggaaaacaggatgctactgaaattgctaaagtcatcaaatctagtctagaggctattgctggtggggtcacttgggaagacgttcctggaacaaccattgaatcttgtggaaattataaagaccacagtctccactctgctcaagaatgggcgaaattaattctttcccaagggatttctgacaatgcttttgagcgccacattgtctga

SEQ ID NO: 4881 - protein, 160 aa, Streptococcus agalactiae COH1
MTKEVVVESFELDHTIVKAPYVRLISEEVGPVGDIITNFDIRLIQPNENAIDTAGLHTIEHLLAKLIRQQINGLIDCSPFGCRTGFHMIMWGKQDATEIAKVIKSSLEAIAGGVTWEDVPGTTIESCGNYKDHSLHSAQEWAKLILSQGISDNAFERHIV

SEQ ID NO: 4882 - DNA, 495 bp, Campylobacter jejuni subsp. jejuni CF93-6
  CDS (1)..(495): transl_table=11
atgccattattagacagctttaaagttgaccatactaaaatgccagctcctgctgtgcgtttagctaaagttataaaaacacctaagggtgatgatattagcgtgtttgatttgcgtttttgcataccaaataaagacattatgagcgaaaaaggtactcataccttagaacatttatttgcaggatttatgagagatcatttaaattcaaattcagttgaaattattgatatttcacctatgggttgtcgcacgggtttttatatgagtttaattggaacaccagatgaaaaaagtgttgctaaagcttggaaagcagctatgaaagatgttttaagcgtaagcgatcaaagcaaaattcctgaacttaatatctatcaatgcggaacttgcgcaatgcattctttagatgaagccaaacaaattgcccaaaaggttttaaatctaggtattagcataatgaataacaaagaattaaaactcgagaatgcttaa

SEQ ID NO: 4883 - protein, 164 aa, Campylobacter jejuni subsp. jejuni CF93-6
MPLLDSFKVDHTKMPAPAVRLAKVIKTPKGDDISVFDLRFCIPNKDIMSEKGTHTLEHLFAGFMRDHLNSNSVEIIDISPMGCRTGFYMSLIGTPDEKSVAKAWKAAMKDVLSVSDQSKIPELNIYQCGTCAMHSLDEAKQIAQKVLNLGISIMNNKELKLENA

SEQ ID NO: 4884 - DNA, 495 bp, Campylobacter jejuni subsp. jejuni HB93-13
  CDS (1)..(495): transl_table=11
atgccattattagatagttttaaagttgatcataccaaaatgccagcgcccgctgtgcgtttagctaaagttatgaaaacacctaagggtgatgatattagtgtatttgatttgcgtttttgcgtaccaaataaagacattatgagcgaaaaaggtacacataccttagaacatttatttgcaggatttatgagagatcatcttaattcagattcggttgaaatcattgatatttcacctatgggctgtcgtacgggtttttatatgagtttaattggaacaccagatgaaaaaagtgttgcaaaagcttgggaagaagctatgaaagatgttttaagcgtaagcgatcaaagcaaaattcctgaacttaatatctatcaatgcggaacttgcgcaatgcattctttagatgaagccaaacaaattgcccaaaaggttttaaatctaggtattagcataatgaataacaaagaattaaaactcgagaatgcttaa

SEQ ID NO: 4885 - protein, 164 aa, Campylobacter jejuni subsp. jejuni HB93-13
MPLLDSFKVDHTKMPAPAVRLAKVMKTPKGDDISVFDLRFCVPNKDIMSEKGTHTLEHLFAGFMRDHLNSDSVEIIDISPMGCRTGFYMSLIGTPDEKSVAKAWEEAMKDVLSVSDQSKIPELNIYQCGTCAMHSLDEAKQIAQKVLNLGISIMNNKELKLENA

SEQ ID NO: 4886 - DNA, 474 bp, Bacillus sp. NRRL B-14911
  CDS (1)..(474): transl_table=11
atgccttcagtagaaagctttgaattagatcataatgccgttaaagctccatatgtaagacattgcggtgtccacaaagtgggaagtgacggagttgttaataaattcgatatccgcttctgccagccaaacaagcaggcgatgaagccggacaccatccatacgcttgaacatctgcttgcttttaatatccgtacccatgcagagaaatacgatcatttcgatattattgatatttctccaatgggctgccagactggctactatcttgttgtcagcggggagccgacagtggaagaaatcattgatttgcttgaagatacattaaaggatgctcttgagatcactgaaattccggctgcaaacgaaaaacagtgcggccaggccaagctacatgaccttgaaggggcaaagcgtcttatgcgcttctggctggatcaaagcaaggaagatctgaagcaagtatttgcttaa

SEQ ID NO: 4887 - protein, 157 aa, Bacillus sp. NRRL B-14911
MPSVESFELDHNAVKAPYVRHCGVHKVGSDGVVNKFDIRFCQPNKQAMKPDTIHTLEHLLAFNIRTHAEKYDHFDIIDISPMGCQTGYYLVVSGEPTVEEIIDLLEDTLKDALEITEIPAANEKQCGQAKLHDLEGAKRLMRFWLDQSKEDLKQVFA

SEQ ID NO: 4888 - DNA, 471 bp, Bacillus sp. B14905
  CDS (1)..(471): transl_table=11
atggaacgcgaaaagacaaatgtagaaagctttgatctagatcatacaaaagtaaaagccccgtatgttcggttagcgggagttaaagcagggaaaaacggcgatgaagtgtacaaatatgatattcgcttgaagcaacctaataaagagcatatggaaatgccggctttgcattccttagagcatttatctgcggatatcattcgtaattattctgaccatatcgttgatttcagtccaatgggttgccagacaggcttctatgtatcccttattaatcatcaagattatgaggacctattaactattttagaaaagacatttactgacgtgacaaaggcgacagcagtgcctgcatgtaatgaggtacaatgtggctgggctgcgagtcatagcttagaaggagcacaagcattagcgaaggaatttttagcgaaacgagaagaatggcatatcgtttttgaagaataa

SEQ ID NO: 4889 - protein, 156 aa, Bacillus sp. B14905
MEREKTNVESFDLDHTKVKAPYVRLAGVKAGKNGDEVYKYDIRLKQPNKEHMEMPALHSLEHLSADIIRNYSDHIVDFSPMGCQTGFYVSLINHQDYEDLLTILEKTFTDVTKATAVPACNEVQCGWAASHSLEGAQALAKEFLAKREEWHIVFEE

SEQ ID NO: 4890 - DNA, 504 bp, Haemophilus influenzae 22.1-21
  CDS (1)..(504): transl_table=11
atgccattacttgatagttttaaagtggatcacacaaaaatgaacgcgcctgcagtacgcattgcaaaaacgatgcgcacgccaaaaggcgataatattactgtttttgatttacgtttttgtattccaaacaaagaaattctttccccaagaggtattcatacacttgaacatttatttgctggatttatgcgcgatcacttaaatggcgatagcatagaaattattgatatttctccgatgggatgtcgcacgggattttatatgtctttgattggcacaccaaatgaacaggaagtgtctgaggcttggttagcttcaatgcaagatgttttaggtgtacaagatcaagcttctattcccgaattaaatatctatcaatgcggaagctatacggaacattccttagaagatgcacacgaaattgccaaaaatgttatcgcacgcggtataggtgtaaataaaaatgaagatttgtcactcgataattccttattaaaatag

SEQ ID NO: 4891 - protein, 167 aa, Haemophilus influenzae 22.1-21
MPLLDSFKVDHTKMNAPAVRIAKTMRTPKGDNITVFDLRFCIPNKEILSPRGIHTLEHLFAGFMRDHLNGDSIEIIDISPMGCRTGFYMSLIGTPNEQEVSEAWLASMQDVLGVQDQASIPELNIYQCGSYTEHSLEDAHEIAKNVIARGIGVNKNEDLSLDNSLLK

SEQ ID NO: 4892 - DNA, 495 bp, Campylobacter jejuni subsp. jejuni CG8486
  CDS (1)..(495): transl_table=11
atgccattattagacagctttaaagttgaccatactaaaatgccagctcctgctgtgcgtttagctaaagttatgaaaacacctaagggtgatgatattagcgtgtttgatttgcgtttttgcataccaaataaagacattatgagcgaaaaaggtactcataccttagaacatttatttgcaggatttatgagagatcatttaaattcaaattcagttgaaattattgatatttcacctatgggttgtcgcacgggtttttatatgagtttaattggaacaccagatgaaaaaagtgttgctaaagcttggaaagcagctatgaaagatgttttaagcgtaagcgatcaaagcaaaattcctgaacttaatatctatcaatgcggaacttgcgcaatgcattctttagatgaagccaaacaaattgcccaaaaggttttaaatctaggtattagcataatgaataacaaagaattaaaactcgagaatgcttaa

SEQ ID NO: 4893 - protein, 164 aa, Campylobacter jejuni subsp. jejuni CG8486
MPLLDSFKVDHTKMPAPAVRLAKVMKTPKGDDISVFDLRFCIPNKDIMSEKGTHTLEHLFAGFMRDHLNSNSVEIIDISPMGCRTGFYMSLIGTPDEKSVAKAWKAAMKDVLSVSDQSKIPELNIYQCGTCAMHSLDEAKQIAQKVLNLGISIMNNKELKLENA

SEQ ID NO: 4894 - DNA, 519 bp, Vibrionales bacterium SWAT-3
  CDS (1)..(519): transl_table=11
atgcctttattagatagttttactgtagatcacactcgtatgaacgcaccagcagttcgtgttgcgaaaacaatgcaaactccaaaaggggataccattacggtatttgacctgcgttttacggcaccaaacaaagatatcctatctgagaaaggtatccacactctagagcacctatacgctggtttcatgcgtgctcaactgaacggttcagacgtagagatcatcgatatttctcctatgggctgtcgtactggtttctacatgagcctgatcggtacaccttcagagcagcaagtggctgatgcttggttagcggcaatgcaagacgtgttgaaagttgagagccagaataagatccctgagctgaacgaataccagtgtggtacagcggcaatgcactctttagacgaagcgaaagagatcgcgaatgcaatcatcgctgctggtatctcagtaaacaagaacgacgagctagcactgccagagtcgatgcttaaagagcttaaagtcgattaa

SEQ ID NO: 4895 - protein, 172 aa, Vibrionales bacterium SWAT-3
MPLLDSFTVDHTRMNAPAVRVAKTMQTPKGDTITVFDLRFTAPNKDILSEKGIHTLEHLYAGFMRAQLNGSDVEIIDISPMGCRTGFYMSLIGTPSEQQVADAWLAAMQDVLKVESQNKIPELNEYQCGTAAMHSLDEAKEIANAIIAAGISVNKNDELALPESMLKELKVD

SEQ ID NO: 4896 - DNA, 519 bp, Vibrio shilonii AK1
  CDS (1)..(519): transl_table=11
atgccactactggatagcttcacggtagaccacacaaagatgcacgcaccagccgtacgtgtagcgaaaacaatgcaaaccccaaaaggcgacaccatcactgtgtttgacctacgcttcacggcgccaaacaaagatatcctttctgagaaaggcatccacacgcttgagcacctatacgctggctttatgcgtgcacacctaaatggtgctgctgttgaaatcatcgatatttctccaatgggctgtcgtacaggtttctacatgagcttaatcggtacaccttcagagcaacaagtagcggacgcttggttaagcgcgatgcaagacgttctgaaagtagaaagccagaacaagattcctgagttgaatgagtatcagtgtggtacagcggctatgcactctttagaagaggcaaaagcgattgcggaagcgattattgcggcgggtattcaagtaaacaaaaacgacgaactggctctgccagagtcaatgcttcaagaattgaaagtcgattaa

SEQ ID NO: 4897 - protein, 172 aa, Vibrio shilonii AK1
MPLLDSFTVDHTKMHAPAVRVAKTMQTPKGDTITVFDLRFTAPNKDILSEKGIHTLEHLYAGFMRAHLNGAAVEIIDISPMGCRTGFYMSLIGTPSEQQVADAWLSAMQDVLKVESQNKIPELNEYQCGTAAMHSLEEAKAIAEAIIAAGIQVNKNDELALPESMLQELKVD

SEQ ID NO: 4898 - DNA, 534 bp, Caminibacter mediatlanticus TB-2
  CDS (1)..(534): transl_table=11
atgccaattcttgatagttttttagtagaccatgttaaaatgccagcacctgctataagaatagcaaaaaaaatgaaaacaccaaaaggtgatgtgattacagtttatgatttaagatttgcaaaaccaaataaagaaataatcgatgaaaaagcaatgcatacacttgaacatctatttgctggttttatgagagaaaatttgccaaattatgaaattatcgatatctctcctatgggatgtagaactggattttatatgagtgttattggagagcccaaaaatgaagaaataattgaagcttttaaaaaatctatgcaaaacattattgatacaaatacaattccggaagcaaatatttatcaatgtggaagttgctatatgcattcgttagatggagcaaaaaaagtagcaaaacatattttgaatagtgagattgttgtaatggataatgaaaagttaaatattaatttaaataaaattgataataattgtaatgtcgataaaaataaaatcaaaataataggtagataa

SEQ ID NO: 4899 - protein, 177 aa, Caminibacter mediatlanticus TB-2
MPILDSFLVDHVKMPAPAIRIAKKMKTPKGDVITVYDLRFAKPNKEIIDEKAMHTLEHLFAGFMRENLPNYEIIDISPMGCRTGFYMSVIGEPKNEEIIEAFKKSMQNIIDTNTIPEANIYQCGSCYMHSLDGAKKVAKHILNSEIVVMDNEKLNINLNKIDNNCNVDKNKIKIIGR

SEQ ID NO: 4900 - DNA, 510 bp, Moritella sp. PE36
  CDS (1)..(510): transl_table=11
atgccattactggatagttttacggttgaccataccatcatgaatgcacctgcagtacgtatcgctaagaccatggcgacgccaagcaaagataccatcactgtctttgatctgcgtttttgtgtaccaaataaagatattttaagtgaaaagggtattcataccttagaacatctttacgctggctttatgcgtgaccaccttaattcagcaacggtagaaattattgatctttcaccgatgggctgtcgtactggtttttacatgagtttgattggcgccccgactgagctacaagttgctgatgcttggttagcggcgatgcaagatgtgttgacggttaaagatcaaaacgcgatccctgagttaaacgaatatcagtgtggtacttaccacatgcattcgttagatgaagcaaaacaaattgcacaggcgattattactgctggtattggcgtgaataaaaatgatgatttactgctagcggatgaaattttaaataaactataa

SEQ ID NO: 4901 - protein, 169 aa, Moritella sp. PE36
MPLLDSFTVDHTIMNAPAVRIAKTMATPSKDTITVFDLRFCVPNKDILSEKGIHTLEHLYAGFMRDHLNSATVEIIDLSPMGCRTGFYMSLIGAPTELQVADAWLAAMQDVLTVKDQNAIPELNEYQCGTYHMHSLDEAKQIAQAIITAGIGVNKNDDLLLADEILNKL

SEQ ID NO: 4902 - DNA, 486 bp, Bifidobacterium adolescentis L2-32
  CDS (1)..(486): transl_table=11
atggcggaagacaagccggtggtggaaagcttccaattggaccacaccaaagtaaaggcgccgtatgtgcgctacatcgatacggaaaccggcccccacggcgacgtgatctcgaactacgacctgcgattggtgcagccgaacgagaacgccattccgaccggcggactgcacaccatcgaacacaccatcgcggtgctgctgcgcgaacgcatccccggttacatcgactgctcgccgtttggatgccgcacaggcttccacctgctgacgtggggcgagcattccaccgaggatgtggctcgcgcattgaaggaatcgttggaattcatcgcctacgaggccacatgggacgacgtgccggcaaccaccatcgaaagctgcggcaactaccgcgaccacagcctgttcaccgccaaggaatggtgcaaggacatcctcgccaagggcatcagctccgacccgttcgaacgccgccttgtgtga

SEQ ID NO: 4903 - protein, 161 aa, Bifidobacterium adolescentis L2-32
MAEDKPVVESFQLDHTKVKAPYVRYIDTETGPHGDVISNYDLRLVQPNENAIPTGGLHTIEHTIAVLLRERIPGYIDCSPFGCRTGFHLLTWGEHSTEDVARALKESLEFIAYEATWDDVPATTIESCGNYRDHSLFTAKEWCKDILAKGISSDPFERRLV

SEQ ID NO: 4904 - DNA, 480 bp, Actinomyces odontolyticus ATCC 17982
  CDS (1)..(480): transl_table=11
atggccgaagttgagagctttaccctggaccacaccgcagtgaaggcaccctacgtgcgtctcatcaacgtggaggccggcccgaagggcgaccagatttcgaactttgacgtgcgtctcctccagcccaacgccggggagatcccgacctcgggcctgcacacgatcgagcacctgctggcctccctgctgcgcgaccgcatcgacggcgttatcgactgctcgccgtttggctgccgcacgggcttccacctcatcatgtggggcaccccctcggtgcgtgaggtgacgcaggcgctggcctcctccctgcacgcgatcgccgaggacgtcacctgggaggacgtgcccggcaccgacgcctactcgtgcggcaattaccgcgatcattcgctgttcagcgcacgcgaatggagccgcacaatcctcgaacagggtttctctctcgaccccttcgagcgtattcatctcgttcactga

SEQ ID NO: 4905 - protein, 159 aa, Actinomyces odontolyticus ATCC 17982
MAEVESFTLDHTAVKAPYVRLINVEAGPKGDQISNFDVRLLQPNAGEIPTSGLHTIEHLLASLLRDRIDGVIDCSPFGCRTGFHLIMWGTPSVREVTQALASSLHAIAEDVTWEDVPGTDAYSCGNYRDHSLFSAREWSRTILEQGFSLDPFERIHLVH

SEQ ID NO: 4906 - DNA, 510 bp, Shewanella benthica KT99
  CDS (1)..(510): transl_table=11
atgccattattagatagctttaccgtcgatcatactcgcatgcatgcccctgcggttcgtgtagcgaaaaccatgaagacgcctagcggtgattccatcacagtattcgatctgcgtttttgtgtaccgaaccaagacatcttgagtgagcggggcatacataccttagagcatctttatgccgggtttatgcgtgatcacctcaatggcgatgctgttgaaatcatcgacatctctcccatgggctgtcgtaccggcttctatatgagcctgattggtacgcctggcgaggcggaagtggccgaggcttggttagcggcgatgaatgatgtactcaaagtcgccgaacaatctgagatccctgagcttaatgaataccaatgtggcacttatgacatgcactctctggatcaggccaagggtatcgctcggtcgataatagctgcggggataagcgttaacaagaatgacgagctaaagctcagtgatgatattttgaaaggtttatga

SEQ ID NO: 4907 - protein, 169 aa, Shewanella benthica KT99
MPLLDSFTVDHTRMHAPAVRVAKTMKTPSGDSITVFDLRFCVPNQDILSERGIHTLEHLYAGFMRDHLNGDAVEIIDISPMGCRTGFYMSLIGTPGEAEVAEAWLAAMNDVLKVAEQSEIPELNEYQCGTYDMHSLDQAKGIARSIIAAGISVNKNDELKLSDDILKGL

SEQ ID NO: 4908 - DNA, 465 bp, Bacillus selenitireducens MLS10
  CDS (1)..(465): transl_table=11
atgtcaaaaaaattaaatgttgaaagttttaaccttgatcacacaaaagttgcggctccttatgtccggctcgcaggaaaaacaacaggagccaacggagatacgatctacaaatacgatcttcgttttaaacagccgaacaaagctcatatggacatgcccgcgcttcattcactggagcatatgcttgcggaattttcccgtaatcatcacgaagggatcatcgatgtcggcccaatgggctgtcaaacgggcttttacatggcagtattaaacgatgaatcctacgaaaacattttgcaggtactcgagaaaacccttcaggatatccttgaggctgacgaagttcctgcatgtaatgaactgcagtgcggctgggctgcatctcattctcttgaaggcgcacagagccttgcaaaggaaatgcttaatatgaaaaaagaatggcctgtcatttttgcataa

SEQ ID NO: 4909 - protein, 154 aa, Bacillus selenitireducens MLS10
MSKKLNVESFNLDHTKVAAPYVRLAGKTTGANGDTIYKYDLRFKQPNKAHMDMPALHSLEHMLAEFSRNHHEGIIDVGPMGCQTGFYMAVLNDESYENILQVLEKTLQDILEADEVPACNELQCGWAASHSLEGAQSLAKEMLNMKKEWPVIFA

SEQ ID NO: 4910 - DNA, 456 bp, Clostridium bartlettii DSM 16795
  CDS (1)..(456): transl_table=11
atggaaaaagtagaaagttttaaattagatcacaacaaggtaaaagcaccttttgtaagaaaatgctgcgtattagatggaaatatgggggataaggtaagtaaattcgatttaagatttttacaacctaataaagaagcttttggaacagcggctatgcatggattagaacatttattagcaacatatttaagagaagaattagagggacttatagacttatccccaatgggatgcagaacaggattctatcttgtaatgtggggagatgttgaagcaaaaactgttaaagaaggtttagaaagagcattagaaaaagttttaaaagctgaagaaatgatagctgcaacttctgttgaatgtggaaattacagagatttatcattatttggtgcaaaagaatatgctaaatatgtattggataaaggattttcactaaacatatatggtgaataa

SEQ ID NO: 4911 - protein, 151 aa, Clostridium bartlettii DSM 16795
MEKVESFKLDHNKVKAPFVRKCCVLDGNMGDKVSKFDLRFLQPNKEAFGTAAMHGLEHLLATYLREELEGLIDLSPMGCRTGFYLVMWGDVEAKTVKEGLERALEKVLKAEEMIAATSVECGNYRDLSLFGAKEYAKYVLDKGFSLNIYGE

SEQ ID NO: 4912 - DNA, 516 bp, Salmonella enterica subsp. enterica serovar Saintpaul str. SARA29
  CDS (1)..(516): transl_table=11
atgccattattagatagcttcgcagtcgatcatacccggatgcaagcgccggcggtccgggttgcaaaaacgatgaacaccccgcatggcgacgcaatcaccgtgtttgatctgcgtttttgcattccgaacaaagaagtgatgccggaaaaagggattcatacgcttgagcatctgtttgctggctttatgcgtgaccacctcaacggtaacggcgttgagattatcgatatctcgccgatgggctgccgcaccggcttttacatgagcctgattggcacgccggacgagcagcgtgttgccgacgcctggaaagcggcgatggcggatgtgctgaaagtgcaggatcaaaaccagatcccggagctgaacgtttaccagtgcggtacgtatcagatgcactcgctcagtgaagcgcaggacattgcccgtcatattctggagtgtgatgtgcgcgtgaacagcaataaagagctggcgctgccgaaagaaaaactgcaggaactgcatatttag

SEQ ID NO: 4913 - protein, 171 aa, Salmonella enterica subsp. enterica serovar Saintpaul str. SARA29
MPLLDSFAVDHTRMQAPAVRVAKTMNTPHGDAITVFDLRFCIPNKEVMPEKGIHTLEHLFAGFMRDHLNGNGVEIIDISPMGCRTGFYMSLIGTPDEQRVADAWKAAMADVLKVQDQNQIPELNVYQCGTYQMHSLSEAQDIARHILECDVRVNSNKELALPKEKLQELHI

SEQ ID NO: 4914 - DNA, 453 bp, Clostridium botulinum Bf
  CDS (1)..(453): transl_table=11
atggttaaagtagaaagtttttcattagatcatacaaaggttaaggccccttttgtaaggaaatgtggaactcaaaaaggagaacttggtgacacaattacgaaatttgatttaagattttcacaacctaatgaggaagaaatgccaactggcgcagttcataccctagaacatttactagcaggttatatgagagaaaagatggataacatcatagatatttctccaatgggttgcagaacaggattttatttgatagcttggggagaagttgaagttgatactgttattgaagcactaaattactcattaaataaagttatagaaacagaagaagttcctgcaactaatgcagttcagtgcggaaactatagagatcattccctattttcagcgaaagaatatgcaaaacatgttttaaaccaaggtattagcaatgaagtatttagatag

SEQ ID NO: 4915 - protein, 150 aa, Clostridium botulinum Bf
MVKVESFSLDHTKVKAPFVRKCGTQKGELGDTITKFDLRFSQPNEEEMPTGAVHTLEHLLAGYMREKMDNIIDISPMGCRTGFYLIAWGEVEVDTVIEALNYSLNKVIETEEVPATNAVQCGNYRDHSLFSAKEYAKHVLNQGISNEVFR

SEQ ID NO: 4916 - DNA, 456 bp, Clostridium perfringens B str. ATCC 3626
  CDS (1)..(456): transl_table=11
gtggttaaagttgaaagttttgaattagatcatacaaaggttaaggcaccatatgtaagaaaagcaggaataaagattggacctaaaggagatatagtttcaaagtttgatttgagatttgtacaacctaataaagaatttttaagtgataaaggaatgcatacattagaacattttttagcaggctttatgagagaaaaattagatgatgtaatagacatatcaccaatgggatgcaaaacaggtttttatttaactagttttggagatattgatgttaaagatattatagaagctttagagtattcactatataaggttttagagcaagaagagataccagcagcaaatgaattacaatgtggaagtgcaaagttacattcactagagttagctaagagtcatgcaaaacaggttttagaaaatggaataagtgataaattttatgtagagtaa

SEQ ID NO: 4917 - protein, 151 aa, Clostridium perfringens B str. ATCC 3626
MVKVESFELDHTKVKAPYVRKAGIKIGPKGDIVSKFDLRFVQPNKEFLSDKGMHTLEHFLAGFMREKLDDVIDISPMGCKTGFYLTSFGDIDVKDIIEALEYSLYKVLEQEEIPAANELQCGSAKLHSLELAKSHAKQVLENGISDKFYVE

SEQ ID NO: 4918 - DNA, 456 bp, Clostridium perfringens NCTC 8239
  CDS (1)..(456): transl_table=11
gtggttaaagttgaaagttttgaattagatcatataaaggttaaggcaccatatgtaagaaaagcaggaataaagattggacctaaaggagatatagtttcaaagtttgatttgagatttgtacaacctaataaagaacttttaagtgataagggaatgcatacattagaacattttttagcaggctttatgagagaaaaattagatgatgtaatagacatatcaccaatgggatgcaaaaccggtttttatttaactagttttggagatattgatgttaaagatattatagaagctttagagtattcactatctaaggttttagagcaagaagagataccagcagcaaatgaattacaatgtggaagtgcaaagttacattcactagagttagctaagagtcatgcaaaacaggttttagaaaatggaataagtgataaattttatgtagagtaa

SEQ ID NO: 4919 - protein, 151 aa, Clostridium perfringens NCTC 8239
MVKVESFELDHIKVKAPYVRKAGIKIGPKGDIVSKFDLRFVQPNKELLSDKGMHTLEHFLAGFMREKLDDVIDISPMGCKTGFYLTSFGDIDVKDIIEALEYSLSKVLEQEEIPAANELQCGSAKLHSLELAKSHAKQVLENGISDKFYVE

SEQ ID NO: 4920 - DNA, 483 bp, Streptococcus pneumoniae SP195
  CDS (1)..(483): transl_table=11
atgtcaaaagaagttattgtcgaaagttttgaacttgaccacaccattgtcaaagcaccctatgttcgcttgattggggaagaaacaggaccaaaaggagacatcatctccaattatgatattcgcttggtgcaaccaaacgaatactctatccctactgccggccttcacactatcgagcacctcttagccaaactcatccgtacccgcattgacggcatgattgactgttcaccatttggttgccgcacaggcttccacatgattatgtggggacgtcacaccagtgctaaaatcgcagctgttatcaaggattcgctcaaggaaatcgctgaaactactacttgggaagatgtcccagggacaaccatcgaatcttgcggaaactacaaggaccacagcctcttctctgctaaagaatgggcaaaactcatcttggaacaagggatttcagatgatgcctttgaacgtcatgtgatttaa

SEQ ID NO: 4921 - protein, 160 aa, Streptococcus pneumoniae SP195
MSKEVIVESFELDHTIVKAPYVRLIGEETGPKGDIISNYDIRLVQPNEYSIPTAGLHTIEHLLAKLIRTRIDGMIDCSPFGCRTGFHMIMWGRHTSAKIAAVIKDSLKEIAETTTWEDVPGTTIESCGNYKDHSLFSAKEWAKLILEQGISDDAFERHVI

SEQ ID NO: 4922 - DNA, 516 bp, Escherichia albertii TW07627
  CDS (1)..(516): transl_table=11
atgccgttgttagatagcttcacagtcgatcatacccggatggaagcgcctgcagttcgggtggcgaaaacaatgaacaccccgcatggcgacgcaatcaccgtgttcgatctgcgcttctgcgtaccgaacaaagaagtgatgccagaaaaaggcatccatactctggaacatctgtttgctggttttatgcgtaaccatcttaacggcaatggcgtagagattatcgatatctcgccaatgggctgtcgcaccggtttttatatgagtctgattggtacgccagatgagcagcgtgtcgctgatgcctggaaagcggcaatggaagacgtgctgaaagtgcaggatcagaatcagatcccggagctgaacgtctaccagtgtggcacttatcagatgcattcgttgcaggaagcgcaggatatcgcccgtaatattttggagcgtggcgtgcgtatcaacagtaacgaagagctggcgctgccgaaagagaagttgcaggagctgcacatctag

SEQ ID NO: 4923 - protein, 171 aa, Escherichia albertii TW07627
MPLLDSFTVDHTRMEAPAVRVAKTMNTPHGDAITVFDLRFCVPNKEVMPEKGIHTLEHLFAGFMRNHLNGNGVEIIDISPMGCRTGFYMSLIGTPDEQRVADAWKAAMEDVLKVQDQNQIPELNVYQCGTYQMHSLQEAQDIARNILERGVRINSNEELALPKEKLQELHI

SEQ ID NO: 4924 - DNA, 486 bp, Bifidobacterium dentium ATCC 27678
  CDS (1)..(486): transl_table=11
atggcagacgacaagccggtcgtggaaagcttccaattggaccacaccaaggtgaaggcgccgtatgtgcgttacatcgataccgaaaaaggaccgaacggcgacgtggtgtccaactatgacctgcgtttggtgcagccgaacgagaacgccatccccaccggcggattgcacaccatcgaacacaccatcgcggtactgttgcgcgaacgcattccgggctacatcgactgctcgcccttcggatgccgtactggcttccatctgctgacctggggcgaacactccaccgaggatgtggccaaggctctgaaggaggcgctggaattcatcgctttcgaagccacttgggatgatgtgccggccaccaccatcgaaagttgtggcaattatcgcgatcacagcctgttcacggcgaaggaatggtgcagagacattctctccaagggcatcagctctgatccgtttgagcgcaagctggtatga

SEQ ID NO: 4925 - protein, 161 aa, Bifidobacterium dentium ATCC 27678
MADDKPVVESFQLDHTKVKAPYVRYIDTEKGPNGDVVSNYDLRLVQPNENAIPTGGLHTIEHTIAVLLRERIPGYIDCSPFGCRTGFHLLTWGEHSTEDVAKALKEALEFIAFEATWDDVPATTIESCGNYRDHSLFTAKEWCRDILSKGISSDPFERKLV

SEQ ID NO: 4926 - DNA, 519 bp, Streptococcus infantarius subsp. infantarius ATCC BAA-102
  CDS (1)..(519): transl_table=11
atgattattagaggaataaaaaaggagtctattatgtctaaaaaagaagtaactgtagaaagtttcgaacttgaccatacaattgttaaagcaccttatgtccgtcttatttctgaggaagttggtcctaaaggtgatgtgattacaaactttgatattcgtctcgttcaaccaaatgaaaatgctattccaactgctggattgcacacaatcgaacacttgctcgcaaaacttatccgtgaacgtatcgacggaatgattgactgttcaccatttggctgccgtactggtttccatttgattatgtggggtaaacacaacaccactgaaattgtcaaagtcatcaaatcaagtttagaagaaatcgctactggaacatcatgggatgacgttccaggtactactatcgagtcttgtggtaactacaaagaccacagtctatttacagcaaaagaatgggcaaaacttattcttaaagatggtatctcagacgatccatttgaacgtcacgtcatctaa

SEQ ID NO: 4927 - protein, 172 aa, Streptococcus infantarius subsp. infantarius ATCC BAA-102
MIIRGIKKESIMSKKEVTVESFELDHTIVKAPYVRLISEEVGPKGDVITNFDIRLVQPNENAIPTAGLHTIEHLLAKLIRERIDGMIDCSPFGCRTGFHLIMWGKHNTTEIVKVIKSSLEEIATGTSWDDVPGTTIESCGNYKDHSLFTAKEWAKLILKDGISDDPFERHVI

SEQ ID NO: 4928 - DNA, 456 bp, Clostridium perfringens D str. JGS1721
  CDS (1)..(456): transl_table=11
gtggttaaagttgaaagttttgaattagatcatacaaaggttaaggcaccatatgtaagaaaagcaggaataaagattggtcctaaaggagatatagtttcaaagtttgatttgagatttgtacaacctaataaagaacttttaagtgataaaggaatgcatacattagaacattttttagcaggatttatgagagaaaaattagatgatgtaatagacatatcaccaatgggatgcaaaacaggtttttatttaactagttttggagatattgatgttaaagatattatagaagctttagagtattcactatctaaggttttagagcaagaagaaataccagcagcaaatgaattacaatgtggaagtgcaaagttacattcactagagttagctaagagtcatgcaaaacaggttttagaaaatagaataagtgataaattttatgtagagtaa

SEQ ID NO: 4929 - protein, 151 aa, Clostridium perfringens D str. JGS1721
MVKVESFELDHTKVKAPYVRKAGIKIGPKGDIVSKFDLRFVQPNKELLSDKGMHTLEHFLAGFMREKLDDVIDISPMGCKTGFYLTSFGDIDVKDIIEALEYSLSKVLEQEEIPAANELQCGSAKLHSLELAKSHAKQVLENRISDKFYVE

SEQ ID NO: 4930 - DNA, 552 bp, Providencia stuartii ATCC 25827
  CDS (1)..(552): transl_table=11
ttgaaaataaaaataattttttcaggaggtcaagaaatgccgttattagacagttttactgtagatcatacgcgtatggctgcacctgccgtccgtgtggcgaaaaccatgcaaactccaagtggagatacgattacagttttcgacctgcgtttcacggttcctaacaaagaggcaatgtcagagaaaggtactcatacactagaacacctatttgcaggttttatgcgtgatcacctcaacggtgatggtgttgagatcattgatatctcgccaatgggatgccgtacaggcttttatatgagcttgattggagagcctgatgaacaacgcgtagcgaatgcatggaaaagtgcaatgcaggatgtactgaaagtccaagatcaagcgaagatccctgaactgaatatttaccagtgtggcacttataaaatgcattcactggaagaagctcaacaaattgcacgcaatgtcttagcgtcagaaatccgtgttaacaaaaatgatgagctagctttaccagctgagaagttgacagaactacacgtttag

SEQ ID NO: 4931 - protein, 183 aa, Providencia stuartii ATCC 25827
MKIKIIFSGGQEMPLLDSFTVDHTRMAAPAVRVAKTMQTPSGDTITVFDLRFTVPNKEAMSEKGTHTLEHLFAGFMRDHLNGDGVEIIDISPMGCRTGFYMSLIGEPDEQRVANAWKSAMQDVLKVQDQAKIPELNIYQCGTYKMHSLEEAQQIARNVLASEIRVNKNDELALPAEKLTELHV

SEQ ID NO: 4932 - DNA, 501 bp, Bifidobacterium animalis subsp. lactis HN019
  CDS (1)..(501): transl_table=11
atggcagacgaaccgaatacgcagagcaagccggtggtcgaaagcttccagctcgaccatacgaaggtgaaggcgccgtatgtgcgctacatcgatacggagaccggcccgaacggcgatgtgatctcgaactacgacctgcgcttggtgcagccgaacgagaacgcgattccgacgggtgggctgcatacgattgaacatacgattgcagtgctgctgcgcgagcgcattcccggctacatcgactgctccccattcggctgccgcaccggattccatctgctcacgtggggggagcattccaccgaggacgtcgccaaggcgctcaaggaatcgctcgagttcatcgcgaacgaagccacgtgggacgacgttcccgccacaaccatcgaaagctgcggcaactaccgcgaccacagcctgttcacggcgaaggaatgggcgaaggacattctggcccaaggcatcagctccgatccgttcgagcgcaaggtggtctga

SEQ ID NO: 4933 - protein, 166 aa, Bifidobacterium animalis subsp. lactis HN019
MADEPNTQSKPVVESFQLDHTKVKAPYVRYIDTETGPNGDVISNYDLRLVQPNENAIPTGGLHTIEHTIAVLLRERIPGYIDCSPFGCRTGFHLLTWGEHSTEDVAKALKESLEFIANEATWDDVPATTIESCGNYRDHSLFTAKEWAKDILAQGISSDPFERKVV

SEQ ID NO: 4934 - DNA, 477 bp, Clostridium sporogenes ATCC 15579
  CDS (1)..(477): transl_table=11
atgcatttaaggagagtagataaaatggttaaagtagaaagtttttcattagatcatacaaaggttaaggccccttttgtaaggaaatgtggaactcaaaaaggtgaaatgggtgatacaattacaaaatttgatttaagattttcacaacctaatgaggaagaaatgccaactggcgcagttcataccctagaacatttactagcaggttatatgagagaaaagatggataacatcatagatatttctccaatgggttgcagaacaggattctatttgatagcttggggagaagttgaagttgatactgttattgaagcactaaattactcattaaataaagttatagaaacagaagaagttcctgcaactaatgcagttcagtgcggaaactatagagatcattccctattttcagcgaaagaatatgcaaaacatgttttaaaccaaggtattagcaatgaagtatttagatag

SEQ ID NO: 4935 - protein, 158 aa, Clostridium sporogenes ATCC 15579
MHLRRVDKMVKVESFSLDHTKVKAPFVRKCGTQKGEMGDTITKFDLRFSQPNEEEMPTGAVHTLEHLLAGYMREKMDNIIDISPMGCRTGFYLIAWGEVEVDTVIEALNYSLNKVIETEEVPATNAVQCGNYRDHSLFSAKEYAKHVLNQGISNEVFR

SEQ ID NO: 4936 - DNA, 474 bp, Bacillus pumilus ATCC 7061
  CDS (1)..(474): transl_table=11
atgccttcagttgaaagctttgaacttgatcataatgctgtaaaagcgccatacgttcgtcattgtggcgttcataaagtgggatcagatggagaagtcaataaatttgatattcgtttttgtcagccaaacaaacaagcaatgaaacctgatacgattcatacattagagcatttacttgcgtttaacattagaacacactcagagaaatacgaccattttgatatcattgatatttctccaatgggctgccagacaggctactatttagtggtcagtggtgcaccaactccaaaagaaatcgttgaacttcttgatgcaacattcaaggatgcagttgaggtaacagagattcctgctgcaaacgaagagcaatgcggtcaagcgaagcttcatgaccttgaaggggcaaaacgtttgatgcgtttctggctttctcaagatcaagaagagcttctcaaagtatttggttaa

SEQ ID NO: 4937 - protein, 157 aa, Bacillus pumilus ATCC 7061
MPSVESFELDHNAVKAPYVRHCGVHKVGSDGEVNKFDIRFCQPNKQAMKPDTIHTLEHLLAFNIRTHSEKYDHFDIIDISPMGCQTGYYLVVSGAPTPKEIVELLDATFKDAVEVTEIPAANEEQCGQAKLHDLEGAKRLMRFWLSQDQEELLKVFG

SEQ ID NO: 4938 - DNA, 477 bp, Lactobacillus reuteri 100-23
  CDS (1)..(477): transl_table=11
atggctaaagttgaaagttttacattagatcacacaaaggttaaggcaccttacgttcgtttaattaccgttgaagaaggggcaaagggagataagattagcaactatgatttacggttagtccaaccaaatgaaaatgcaattccaactgctggtttgcatacgattgaacacttgcttgctggcctgcttcgtgaccgtttggatggcgtaattgattgctctccatttggctgccggactggtttccacttaattacatggggggaacactcaactactgaagttgccaaggccttgaagtcttcacttgaagaaattgcctacaagactaagtgggaagatgttcagggaacaacgattgaatcttgcggtaactaccgtgatcattcattattctctgctaaggaatggtcaaagaagattcttgatgaaggtatttcagataagccatttgaacgccacgtggttgactaa

SEQ ID NO: 4939 - protein, 158 aa, Lactobacillus reuteri 100-23
MAKVESFTLDHTKVKAPYVRLITVEEGAKGDKISNYDLRLVQPNENAIPTAGLHTIEHLLAGLLRDRLDGVIDCSPFGCRTGFHLITWGEHSTTEVAKALKSSLEEIAYKTKWEDVQGTTIESCGNYRDHSLFSAKEWSKKILDEGISDKPFERHVVD

SEQ ID NO: 4940 - DNA, 477 bp, Geobacillus sp. G11MC16
  CDS (1)..(477): transl_table=11
atgccttcaccagtcgaaagctttgaattggatcactgcgccgtgaaagcgccgtacgtgcggcattgcggcgttcacaaaatcggaagcgacggtgtcgtcaataagttcgatattcgtttttgccagccgaacaaagaagcgatggatccggcggccattcatacgttggagcacttgttggcgtatacgctgcgcaaacatgtgaccaagtatgatcactttgacattatcgacatttcgccaatgggttgccaaacgggattttaccttgtcgtgagcggttcgccgaccgttgacgaaatcatcgatttgcttgaggagacgatgaaagacgccttgaatgcgacggaagtgccggctgcgaccgagcggcaatgcggccaagcgaagctgcatgacttagaggcggcgaaagagctgatgcgcttttggctgtcgcaagagaaaagcgaactgaaaaaagtgtttggctga

SEQ ID NO: 4941 - protein, 158 aa, Geobacillus sp. G11MC16
MPSPVESFELDHCAVKAPYVRHCGVHKIGSDGVVNKFDIRFCQPNKEAMDPAAIHTLEHLLAYTLRKHVTKYDHFDIIDISPMGCQTGFYLVVSGSPTVDEIIDLLEETMKDALNATEVPAATERQCGQAKLHDLEAAKELMRFWLSQEKSELKKVFG

SEQ ID NO: 4942 - DNA, 516 bp, Salmonella enterica subsp. enterica serovar Saintpaul str. SARA23
  CDS (1)..(516): transl_table=11
atgccattattagatagcttcgcagtcgatcatacccggatgcaagcgccggcggtccgggttgcaaaaacgatgaacaccccgcatggcgacgcaatcaccgtgtttgatctgcgtttttgcattccgaacaaagaagtgatgccggaaaaagggattcatacgcttgagcatctgtttgctggctttatgcgcgaccacctcaacggtaacggcgttgagattatcgatatctcgccgatgggctgccgtaccggtttctacatgagcctgattggcacgccggacgagcagcgtgttgccgacgcgtggaaagcggcgatggcggatgtgctgaaagtgcaggatcaaaaccagatcccggagctgaacgtttaccagtgcggtacgtatcagatgcactcgctcagtgaagcgcaggacattgcccgtcatattctggagcgtgatgtgcgcgtgaacagcaataaagagctggcgctgccgaaagaaaaactgcaggaattgcatatttag

SEQ ID NO: 4943 - protein, 171 aa, Salmonella enterica subsp. enterica serovar Saintpaul str. SARA23
MPLLDSFAVDHTRMQAPAVRVAKTMNTPHGDAITVFDLRFCIPNKEVMPEKGIHTLEHLFAGFMRDHLNGNGVEIIDISPMGCRTGFYMSLIGTPDEQRVADAWKAAMADVLKVQDQNQIPELNVYQCGTYQMHSLSEAQDIARHILERDVRVNSNKELALPKEKLQELHI

SEQ ID NO: 4944 - DNA, 474 bp, Lactobacillus rhamnosus HN001
  CDS (1)..(474): transl_table=11
atggcaaaagttgaaagctttacgttagatcacactgcagttaaggcgccttatgtccggttaattaccaccgaaaaaggcccgaatggcgatgaaatttctaactatgatttacgcttggttcagccaaacaccgctgcgattgatactgccgggttgcatacaattgaacacttgttggcatcgttattgcgcgatcgcatggatggcgtgattgattgttcaccgtttggctgccgcaccggctttcacttgattacctggggaacacacagcaccacggaagtcgccaaagcgctgaagtccagccttgaagcgattgctaacgatattacctgggatgatgtacccggtgttgacatcaagagttgtggcaactacaaagatcacagcctgttttctgctaaagagtgggcaaagttgattttgagtcgcggcatttctaacgatccatttacccggcaggttgtctaa

SEQ ID NO: 4945 - protein, 157 aa, Lactobacillus rhamnosus HN001
MAKVESFTLDHTAVKAPYVRLITTEKGPNGDEISNYDLRLVQPNTAAIDTAGLHTIEHLLASLLRDRMDGVIDCSPFGCRTGFHLITWGTHSTTEVAKALKSSLEAIANDITWDDVPGVDIKSCGNYKDHSLFSAKEWAKLILSRGISNDPFTRQVV

SEQ ID NO: 4946 - DNA, 474 bp, Bacillus coahuilensis m4-4
  CDS (1)..(474): transl_table=11
atgccttcagtagaaagctttgaattagatcataatgcagtaaaagctccttatgttagacattgtggagttcacaaagtaggaacagatggaatcgtaaataaatatgatattcgtttttgtcaaccaaataaacaagcgatgaagccggatagcatccatacactggaacatttattggcgtttaacattcgtacacatgcagaaaagtatgatcactttgatattattgacatttcgccaatggggtgtcagacaggctactatctagtggttagtggtgaacctacggtcgacgaaattattgacctacttgatgccacaatgaaagatgcagtactgattgaagagattccagcggcaaatgaaaaacaatgcggtcaagcgaagcttcacgatttagaaggagctaagaaattaatgaatttctggttaactcagtcaaaagaagaccttcgtacagtatttggctaa

SEQ ID NO: 4947 - protein, 157 aa, Bacillus coahuilensis m4-4
MPSVESFELDHNAVKAPYVRHCGVHKVGTDGIVNKYDIRFCQPNKQAMKPDSIHTLEHLLAFNIRTHAEKYDHFDIIDISPMGCQTGYYLVVSGEPTVDEIIDLLDATMKDAVLIEEIPAANEKQCGQAKLHDLEGAKKLMNFWLTQSKEDLRTVFG

SEQ ID NO: 4948 - DNA, 468 bp, Helicobacter pylori HPKX_438_AG0C1
  CDS (1)..(468): transl_table=11
atgaaaacaccaaaaatgaatgtagagagtttcaatttggatcacaccaaagtcaaagccccttatgtgcgtatcgctgatcgcaaaaagggcgttaatggggatttgattgtcaaatacgatgtgcgcttcaagcagcccaaccaagatcacatggacatgcctagcctacactctttagagcatttagtcgctgaaatcatccgcaaccatgctaattatgtcgtggattggtcgcctatgggttgccaaacgggattttatctcacggtgttaaaccatgacaattacacagaggttttagaggttttagaaaagaccatgcaagatgtgctaaaggctacagaagtgcctgccagcaatgaaaagcaatgcggttgggcggctaaccacactttagagggtgctaaggatttagcgcgcgcttttttagacaaacgcgctgagtggtctgaagtgggggtttga

SEQ ID NO: 4949 - protein, 155 aa, Helicobacter pylori HPKX_438_AG0C1
MKTPKMNVESFNLDHTKVKAPYVRIADRKKGVNGDLIVKYDVRFKQPNQDHMDMPSLHSLEHLVAEIIRNHANYVVDWSPMGCQTGFYLTVLNHDNYTEVLEVLEKTMQDVLKATEVPASNEKQCGWAANHTLEGAKDLARAFLDKRAEWSEVGV

SEQ ID NO: 4950 - DNA, 456 bp, Clostridium hiranonis DSM 13275
  CDS (1)..(456): transl_table=11
atggaaaaagtagaaagcttcaaactagatcacacaaaagttaaagcaccttatgttagaaaatgttgcgtattagacggtaaaaacggagacaaagttacaaaatttgacttaagatttttacagcctaatgtggaagcatttggtacagctgcacttcatggattagaacatcttttagctacatatttaagagaaactatggacgatataatagacttatctccaatgggatgcagaactggttattatctaataatgtggggagatgttgaacctgcatacgttaaagaaggtttagaaaaagctcttgaaatggtactaactacagatgaaataccagctgcaacagcagtagaatgtggaaactacagagatttatctctatttggtgcaaaagaatatgctaaaaaagctttagatgaaggattctctttaaacatatacggagaatag

SEQ ID NO: 4951 - protein, 151 aa, Clostridium hiranonis DSM 13275
MEKVESFKLDHTKVKAPYVRKCCVLDGKNGDKVTKFDLRFLQPNVEAFGTAALHGLEHLLATYLRETMDDIIDLSPMGCRTGYYLIMWGDVEPAYVKEGLEKALEMVLTTDEIPAATAVECGNYRDLSLFGAKEYAKKALDEGFSLNIYGE

SEQ ID NO: 4952 - DNA, 480 bp, Fusobacterium sp. 2_1_31
  CDS (1)..(480): transl_table=11
atggaaagaattgccagctttcaagtcgaccataaaaaattgaatagaggaatttatgtgtcaagacttgatgaaataaatggaaactatctaacaacttttgatattagaatgaagttgcctaatagagaacctgtaataaatatagcagaattacatacaatagaacatttaggagctacatttttaagaaatcatcctactagaaaagatgatattatctattttggacctatgggatgtaggacaggcctttatcttattttgaaaggtaaattagaatcaaaagaagtagttgaacttataaaagaactttttgaatttatcagtaaatttgaaggagatattccaggtgcttctgcaatagaatgtggaaattacttggatcaaaatctgcctatggcaagatatgaagcagaaaaatttttaaaagaaacattaaacaaccttaaggaagaaaatttagtttatccagaataa

SEQ ID NO: 4953 - protein, 159 aa, Fusobacterium sp. 2_1_31
MERIASFQVDHKKLNRGIYVSRLDEINGNYLTTFDIRMKLPNREPVINIAELHTIEHLGATFLRNHPTRKDDIIYFGPMGCRTGLYLILKGKLESKEVVELIKELFEFISKFEGDIPGASAIECGNYLDQNLPMARYEAEKFLKETLNNLKEENLVYPE

SEQ ID NO: 4954 - DNA, 501 bp, Helicobacter bilis ATCC 43879
  CDS (1)..(501): transl_table=11
atgccattacttgatagttttaaagtcgatcacacaattatgcctgccccagctgtccgtcttgcaaaaagcatggaaacaccaaaaggcgataagatttctgtatatgatttgcgtttttgtaagccgaatatagagatattagatgaaaaaggtatacatacgctagagcatttatttgcaggttttatgcgagatcatctcaatggcaaaaatacagaaatcattgatatttctcctatgggttgtaggactggattctatatgagcgtgattggcacacctagcgaatatgaggtaaaagaggcgtgggaagcaagtatgcgtgatattttgcgtttaacaagtgaggagcagatcccagaattaaacatctatcaatgcggcacagcaaaaatgcactctcttcataacgcacaaaagatagcacaagatatgcttgataagggtattggcgtaatggatacgcaaaaacttttgttgaaagaattttgtcagtaa

SEQ ID NO: 4955 - protein, 166 aa, Helicobacter bilis ATCC 43879
MPLLDSFKVDHTIMPAPAVRLAKSMETPKGDKISVYDLRFCKPNIEILDEKGIHTLEHLFAGFMRDHLNGKNTEIIDISPMGCRTGFYMSVIGTPSEYEVKEAWEASMRDILRLTSEEQIPELNIYQCGTAKMHSLHNAQKIAQDMLDKGIGVMDTQKLLLKEFCQ

SEQ ID NO: 4956 - DNA, 459 bp, Sporosarcina halophila
  CDS (1)..(459): transl_table=11
atgacacagatgaacgtagaaagctttaacctggatcatacgaaagtgaaagctccttatatccgccttgtcggtgtaaccgaaggagataaaggtgacaagatctacaaatatgatatccgtgtgaaacagcctaaccaggagcatatggatatgccggctcttcattcccttgaacacctgatggctgaaaacagccgtaatcatcacgaccgtattatcgatatcggtccaatgggctgccagacaggattttatcttgctgtattaaatgatgacagttatgaaaatattcttcaggttgtagagaacacactgaaagacgtactaaatgctacagaagttccagcctgcaatgaagtacaatgcggattcgcagcgagccacagcttagaaggtgcacaggaacttgcgcgtgaactgcttaacaaacgtaatgaatggacggaagttttttaa

SEQ ID NO: 4957 - protein, 152 aa, Sporosarcina halophila
MTQMNVESFNLDHTKVKAPYIRLVGVTEGDKGDKIYKYDIRVKQPNQEHMDMPALHSLEHLMAENSRNHHDRIIDIGPMGCQTGFYLAVLNDDSYENILQVVENTLKDVLNATEVPACNEVQCGFAASHSLEGAQELARELLNKRNEWTEVF

SEQ ID NO: 4958 - DNA, 519 bp, Photobacterium phosphoreum
  CDS (1)..(519): transl_table=11
atgccattacttgatagctttactgtcgatcataccaaaatgcatgctcccgcagtacggatagcaaagaccatgcaaacccctaaaggcgataccattaccgtatttgatttacgtttttgtcgtcctaatgctgatattctcagtgaacgtggtattcatacgttagagcatttgtacgcagggtttatgcgtcagcatttaaactctagcacagttgaaattattgatatttcacctatggggtgtcgtaccggtttctatatgagcttaattggtacgccaactgagcagcaagtcgtaactgcttggctagctgcgatgagagatgtgttggcggtagaaacccaagagcaaatacctgagctcaatgaatatcaatgtggtacctataatatgcattcgctcgctgaagcaaaattgattgcagaagcgatcattagtgctggtattgaagttaataaaaatgatgcgcttgctctaccagatgcgatgctacaacagttacaagttaaataa

SEQ ID NO: 4959 - protein, 172 aa, Photobacterium phosphoreum
MPLLDSFTVDHTKMHAPAVRIAKTMQTPKGDTITVFDLRFCRPNADILSERGIHTLEHLYAGFMRQHLNSSTVEIIDISPMGCRTGFYMSLIGTPTEQQVVTAWLAAMRDVLAVETQEQIPELNEYQCGTYNMHSLAEAKLIAEAIISAGIEVNKNDALALPDAMLQQLQVK

SEQ ID NO: 4960 - DNA, 477 bp, Lactobacillus reuteri
  CDS (1)..(477): transl_table=11
atggctaaagttgaaagttttacattagatcacacaaaggttaaggcaccttacgttcgtttaattaccgttgaagaagggacaaagggagataagattagcaactatgatttacggttagtccaaccaaatgaaaatgcaattccaactgctggtttacatacgattgaacacttacttgctggcttgcttcgtgaccgtttggatggcgtgattgattgttccccatttggctgccggactggtttccacttaattacgtggggtgaacactcaactactgaagttgccaaggccttgaagtcctcacttgaagaaattgcctacaagactaagtgggaagatgttcagggaacaacgattgaatcttgcggtaactaccgtgatcattcattattctctgctaaggaatggtcaaagaagattcttgatgaagggatttcagataagccatttgaacgccacgtggttgactaa

SEQ ID NO: 4961 - protein, 158 aa, Lactobacillus reuteri
MAKVESFTLDHTKVKAPYVRLITVEEGTKGDKISNYDLRLVQPNENAIPTAGLHTIEHLLAGLLRDRLDGVIDCSPFGCRTGFHLITWGEHSTTEVAKALKSSLEEIAYKTKWEDVQGTTIESCGNYRDHSLFSAKEWSKKILDEGISDKPFERHVVD

SEQ ID NO: 4962 - DNA, 510 bp, Aeromonas hydrophila
  CDS (1)..(510): transl_table=11
atgccgttattggacagttttaccgttgaccacacccgcatggctgcgccggcggtacgtgtggccaagaccatgcagaccccgaacaaggacaccattaccgtgttcgacctgcgtttctgtgtgccgaaccaggagatcctctccgagcgtggcatccacaccctcgagcacctgtttgccggctttatgcgtgaccatctcaatggggatggggttgagatcatcgacatctctcccatgggctgccgcaccggcttctacatgagcctgatcggtgcgccggacgaagcccgggttggcgctgcctggcaggccgccatgagcgacgtgctgaccgtgcaggagcagggcaagatccccgagctgaacgaataccagtgcggtacctacagcatgcactcgctggaagaggcccatgccatcgcccgccacgtgctggagcgcggcatcggcgtcaaccgcaatgacgaactggccctgccggaagagaagctgaaaagcctctga

SEQ ID NO: 4963 - protein, 169 aa, Aeromonas hydrophila
MPLLDSFTVDHTRMAAPAVRVAKTMQTPNKDTITVFDLRFCVPNQEILSERGIHTLEHLFAGFMRDHLNGDGVEIIDISPMGCRTGFYMSLIGAPDEARVGAAWQAAMSDVLTVQEQGKIPELNEYQCGTYSMHSLEEAHAIARHVLERGIGVNRNDELALPEEKLKSL

SEQ ID NO: 4964 - DNA, 516 bp, Edwardsiella tarda
  CDS (1)..(516): transl_table=11
atgccgttactggatagcttcactgtcgaccatactcgcatggccgcacctgccgttcgcgtagcaaaaaatatgaccaccccgcacggcgatcagatcaccgtattcgatctgcgcttctgccgccccaaccatgccatcctgccggagcgcggtattcatacccttgagcacctattcgccggctttatgcgtgaccatctgaacggcgacggcgttgagattattgatatttcaccgatgggctgccgcacgggcttctatatgagcctgatcggaacgccggacgaagcgcgagttgccgcggcgtggaaggcggcgatggaggacgtgctgcgggtcagcgatcagcggagcatcccagagctgaatgagtttcagtgtggtacctacagcatgcactcgttggccgaggcgcaccagattgcccgccagatcctggcggccgggatcggtatcaaccataacgatgcgctggcgctctctgccgaccaactggcccgtctgcacccctag

SEQ ID NO: 4965 - protein, 171 aa, Edwardsiella tarda
MPLLDSFTVDHTRMAAPAVRVAKNMTTPHGDQITVFDLRFCRPNHAILPERGIHTLEHLFAGFMRDHLNGDGVEIIDISPMGCRTGFYMSLIGTPDEARVAAAWKAAMEDVLRVSDQRSIPELNEFQCGTYSMHSLAEAHQIARQILAAGIGINHNDALALSADQLARLHP

SEQ ID NO: 4966 - DNA, 516 bp, Providencia alcalifaciens DSM 30120
  CDS (1)..(516): transl_table=11
atgccgttattagacagttttactgtggatcacacgcgtatggctgctcctgctgttcgcgtagcaaaaacgatgaaaacgcctcatggggacgctatcactgtgtttgatttacgttttacagtcccaaataaagaagcaatgacagaaaaaggaacgcataccttagagcacctttttgctggatttatgcgtgaccaccttaatggaaatggcgtggaaattatcgacatttcaccaatgggatgccgtacaggtttctacatgagcttgattggtcagccagatgaactgcgtgtagcgaaagcatggaaggcggctatgcaagatgtgctcaatgttcaggatcaaaataagatccctgaacttaacgtatatcaatgtggaacgtatacgatgcactcacttgaagaagctcagcaaattgctcgaaatatcattgcgaaagatattcaagttaataaaaatgatgaactcgctcttcctgaagagaagttagctcagcttcacgtttag

SEQ ID NO: 4967 - protein, 171 aa, Providencia alcalifaciens DSM 30120
MPLLDSFTVDHTRMAAPAVRVAKTMKTPHGDAITVFDLRFTVPNKEAMTEKGTHTLEHLFAGFMRDHLNGNGVEIIDISPMGCRTGFYMSLIGQPDELRVAKAWKAAMQDVLNVQDQNKIPELNVYQCGTYTMHSLEEAQQIARNIIAKDIQVNKNDELALPEEKLAQLHV

SEQ ID NO: 4968 - DNA, 477 bp, Eubacterium biforme DSM 3989
  CDS (1)..(477): transl_table=11
atggaaaaagtagaaattgaaagttttactttagatcatactaaagtaaaagcaccatatgtgcgtttgattagtgaagaacaaggacctaatggagatattgtatcgaattttgatgttcgtttatgccaaccgaatcgacaagagattccaactggagttatgcatactttagaacatttattcgcattatatcttcgcccaagaatttctggctatttagattgctcaccatttggatgtcgtacaggatttcaccttttagcatggggaaaacattcaagtaaggatgttgcgattgctgtaaaagaagctttaaagctaatcataactacagaatgggaagatgttccgggtactgaagaaaaagaatgtggcaactataaagaccattctttatttggtgctaaagaatgggctaaggaaattctagaaaaaggaatgagttgtgatccgttcgaaagaaaaattgtgtaa

SEQ ID NO: 4969 - protein, 158 aa, Eubacterium biforme DSM 3989
MEKVEIESFTLDHTKVKAPYVRLISEEQGPNGDIVSNFDVRLCQPNRQEIPTGVMHTLEHLFALYLRPRISGYLDCSPFGCRTGFHLLAWGKHSSKDVAIAVKEALKLIITTEWEDVPGTEEKECGNYKDHSLFGAKEWAKEILEKGMSCDPFERKIV

SEQ ID NO: 4970 - DNA, 495 bp, Bifidobacterium breve DSM 20213
  CDS (1)..(495): transl_table=11
atggcaaaggaaaaggctgagaagcctgtcgttgaatcattccagctggatcacaccaaggtcaaggcgccgtacgtgcgttacattgacacggaaacgggtcctcacggcgacgtgatctccaactatgatcttcgtctgacccagccgaacaagcaggcgattcccaccggcggcctgcacaccatcgagcacactatcgccgtgttgctgcgtgagcgcatccccggctacatcgactgttcgccgttcggctgccgcaccggctttcacttgctgacctggggtacgcactccactgaggatgtggccaaggcgctcaaggaatcgctggaattcatcgcctacaaggccacgtgggatgatgttcccgctaccaccgagaagagctgcggcaactaccgcgaccacagcctgttcaccgccaaggaatgggccaagcagattctcgaggaaggcatcagctccgacccgtttgagcgcaaggtcgtctga

SEQ ID NO: 4971 - protein, 164 aa, Bifidobacterium breve DSM 20213
MAKEKAEKPVVESFQLDHTKVKAPYVRYIDTETGPHGDVISNYDLRLTQPNKQAIPTGGLHTIEHTIAVLLRERIPGYIDCSPFGCRTGFHLLTWGTHSTEDVAKALKESLEFIAYKATWDDVPATTEKSCGNYRDHSLFTAKEWAKQILEEGISSDPFERKVV

SEQ ID NO: 4972 - DNA, 495 bp, Atopobium rimae ATCC 49626
  CDS (1)..(495): transl_table=11
atggagcgcattgcaagcttttccgtcgatcatcgggtccttgaaccgggcgtctatgtttctcgtcgcgacgttgacgagaaaaccggcgcagtagtaactacctttgatttgcgccttacggcctcgaaccgcgagcctgttatggataccgccgcggtgcatgcccttgagcatctgggagcaacttttttacgcaatgaccccgcatggtcttctcgcattatttattttgggccaatgggctgtcgtacagggttttaccttgtggtatttggtgaggcggagccgatggatgtagcggatctgctcgtacgtctttttgaatttgtccgtgattatgaaggtgagattcccggtgcacgtcctgcagaatgcgggaattggcatgatgccgaccttgtgcaggcacagtggtgggcacgccggtatctggagaaaacgctgtattgtcttgatgatgcccatatacattatccggcgctgttaagttga

SEQ ID NO: 4973 - protein, 164 aa, Atopobium rimae ATCC 49626
MERIASFSVDHRVLEPGVYVSRRDVDEKTGAVVTTFDLRLTASNREPVMDTAAVHALEHLGATFLRNDPAWSSRIIYFGPMGCRTGFYLVVFGEAEPMDVADLLVRLFEFVRDYEGEIPGARPAECGNWHDADLVQAQWWARRYLEKTLYCLDDAHIHYPALLS

SEQ ID NO: 4974 - DNA, 471 bp, Staphylococcus capitis SK14
  CDS (1)..(471): transl_table=11
atgcctaaaatgaacgttgaaagttttaatttagatcatactaaagttgttgcaccatttatccgtttagcgggtacgatggaaggattgaatggagacattatccataaatatgacatccgtttcaaacaacctaataaagaacatatggaaatgcctggtttacattctttagaacacttaatggccgaaaacattagaaatcacactgataaagttgttgatttaagtcctatgggttgccaaactggtttctatgtatcatttattaatcatgacgattatgatgatgttttaaatattgttgaaaagacattgaacgatgtcttaaatgctacagaagtgccggcttgtaatgaagtgcaatgtggatgggcagcaagccattcattagaaggtgctaaagaaattgctcaagctttcttagataaacgcgaccaatggaatgatatttacggtacgggaaaataa

SEQ ID NO: 4975 - protein, 156 aa, Staphylococcus capitis SK14
MPKMNVESFNLDHTKVVAPFIRLAGTMEGLNGDIIHKYDIRFKQPNKEHMEMPGLHSLEHLMAENIRNHTDKVVDLSPMGCQTGFYVSFINHDDYDDVLNIVEKTLNDVLNATEVPACNEVQCGWAASHSLEGAKEIAQAFLDKRDQWNDIYGTGK

SEQ ID NO: 4976 - DNA, 510 bp, Actinobacillus minor 202
  CDS (1)..(510): transl_table=11
atgcctttattagatagttttaaagttgatcataccagaatgaatgctccggcagtacgtgtggcaaaaacgatgacaacgccaaaaggagataccatcaccgtgtttgatttacgtttttgccgcccaaacattgatattttacctgtacgtggtattcatacaatggagcatttatttgctggctttatgcgtaatcatcttaatagtgaaacggttgaaatcattgatatttcgccaatgggctgccgtaccggcttttatatgtcattaattggcacaccttctgaacaagaggtggtaaaagcgtggacagcttcaatggaagatgctttaaataaagtgccggatgtgtcaaaaattccggaattgaatgaataccaatgcggttcttataaagagcattctttagaagaagcacatcaaattgcccgtgatgtgcttgcaaaaggaattggtattaatcgtaacgaagatttagccttagacgaaaaattattaaatccataa

SEQ ID NO: 4977 - protein, 169 aa, Actinobacillus minor 202
MPLLDSFKVDHTRMNAPAVRVAKTMTTPKGDTITVFDLRFCRPNIDILPVRGIHTMEHLFAGFMRNHLNSETVEIIDISPMGCRTGFYMSLIGTPSEQEVVKAWTASMEDALNKVPDVSKIPELNEYQCGSYKEHSLEEAHQIARDVLAKGIGINRNEDLALDEKLLNP

SEQ ID NO: 4978 - DNA, 516 bp, Campylobacter rectus RM3267
  CDS (1)..(516): transl_table=11
atgccgctgcttgatagcttttgcgtcgatcacgtcaagatgaaagcgcccggcgtgcgtctggcaaagacgatgaaaacgcctaaaggtgacgatataagcgtgtttgatttgcgtttttgcaagccgaacgaggaaattatgcccgaaaaaggcacgcacacgctagagcacctatttgcgggctttatgcgcgagcatctaaacggcaacgaagtcgagatcatcgatatttcgccgatgggttgcagaacgggattttatatgagtgtgatcggcgtgccgagcgaggaaacggtcaaagaggcatggacggcgtcgatgaaagatattttgggcgtcaaaaatcaagaggatatccctgagctaaacatttaccagtgcggcacatacaagatgcactcgctggatgaagcgcacgagatcgcgagtaaaattttaaagtgcgggctcatcacgatagataacaaagagatcgcgctagacatcgctgcgatgaggctcaaaaagcgctaa

SEQ ID NO: 4979 - protein, 171 aa, Campylobacter rectus RM3267
MPLLDSFCVDHVKMKAPGVRLAKTMKTPKGDDISVFDLRFCKPNEEIMPEKGTHTLEHLFAGFMREHLNGNEVEIIDISPMGCRTGFYMSVIGVPSEETVKEAWTASMKDILGVKNQEDIPELNIYQCGTYKMHSLDEAHEIASKILKCGLITIDNKEIALDIAAMRLKKR

SEQ ID NO: 4980 - DNA, 468 bp, Helicobacter pylori 98-10
  CDS (1)..(468): transl_table=11
atgaaaacgccaaaaatgaatgtagagagttttaatttggatcacaccaaagtcaaagccccttatgtgcgtatcgctgatcgcaaaaagggcgttaatggggatttgatcgtcaaatacgatgtgcgattcaaacagcccaacaaagatcacatggacatgccaagcttgcactctttagagcatttagtcgctgagattatccgtaaccatgccaattatgttgtggattggtcgcctatgggttgccaaacgggattttatctcacggtgttaaaccatgacgattacacagagattttagaggttttagaaaagacgatgcaagatgtgttaaaggctacagaagtgcctgccagcaatgaaaagcaatgcggttgggcggctaaccacactttagagggtgcacagaatttagcacgcgcttttttagacaaacgcgctgagtggtctgaagtgggggtttga

SEQ ID NO: 4981 - protein, 155 aa, Helicobacter pylori 98-10
MKTPKMNVESFNLDHTKVKAPYVRIADRKKGVNGDLIVKYDVRFKQPNKDHMDMPSLHSLEHLVAEIIRNHANYVVDWSPMGCQTGFYLTVLNHDDYTEILEVLEKTMQDVLKATEVPASNEKQCGWAANHTLEGAQNLARAFLDKRAEWSEVGV

SEQ ID NO: 4982 - DNA, 468 bp, Helicobacter pylori B128
  CDS (1)..(468): transl_table=11
atgaaaacaccaaaaatgaatgtagagagtttcaatttggatcacaccaaagttaaagccccttatgtgcgtgtagctgatcgcaaaaagggcgttaatggggatttgattgtcaaatacgatgtgcgcttcaaacagcccaaccaagatcacatggacatgcctagcctacactctttagagcatttagtcgctgagatcatccgcaaccatgctaattatgttgtggattggtcgcctatgggttgccaaacgggattttatctcacggtgttaaaccatgacaattacacggaggttttagaggttttagaaaagaccatgcaagatgtgttaaaggctacagaagtgcctgccagcaatgaaaagcaatgcggttgggcggctaaccacactttagagggcgcacaggatttagcgcgtgcttttttagacaaacgcgatgagtggtctgaagtgggggtttga

SEQ ID NO: 4983 - protein, 155 aa, Helicobacter pylori B128
MKTPKMNVESFNLDHTKVKAPYVRVADRKKGVNGDLIVKYDVRFKQPNQDHMDMPSLHSLEHLVAEIIRNHANYVVDWSPMGCQTGFYLTVLNHDNYTEVLEVLEKTMQDVLKATEVPASNEKQCGWAANHTLEGAQDLARAFLDKRDEWSEVGV

SEQ ID NO: 4984 - DNA, 516 bp, Proteus penneri ATCC 35198
  CDS (1)..(516): transl_table=11
atgcctttattggatagctttactgttgaccatacgcgtatgtcagcacctgctgtacgcgttgctaagaccatgaaaacgccatcaggtgatactattacggtatttgatttacgttttacggtaccaaataaaaaagccatgcctgagaaaggaattcatactctagagcatctgtttgctggatttatgcgtaatcatcttaatggtaatggtgttgagataattgatatttccccaatgggatgtcgtacaggattctacatgagcttaattgggcaacctgaagagcaacgtgtagctaatgcatggaaagccgcaatggaagatgttttgaaagtaaaagatcaaaaccatatcccagaactaaatgtgtaccaatgtggtacctatgaaatgcattcgctgacagaagcacaagatatcgcacgtgatattttatctcatagcataggtattaatcataacgatgaattagcgttgcctgaagagactttaaaagagttacatatttaa

SEQ ID NO: 4985 - protein, 171 aa, Proteus penneri ATCC 35198
MPLLDSFTVDHTRMSAPAVRVAKTMKTPSGDTITVFDLRFTVPNKKAMPEKGIHTLEHLFAGFMRNHLNGNGVEIIDISPMGCRTGFYMSLIGQPEEQRVANAWKAAMEDVLKVKDQNHIPELNVYQCGTYEMHSLTEAQDIARDILSHSIGINHNDELALPEETLKELHI

SEQ ID NO: 4986 - DNA, 480 bp, Roseburia inulinivorans DSM 16841
  CDS (1)..(480): transl_table=11
atggaaaaaattgcaagctttacaatagaccatatcaaattagaacccggcgtttatgtatcccgcaaagataccgtcggtgcagaagtgatcaccacatttgatctgcgcatgacttccccaaacgatgagcctgtcatgaataccgccgagatgcatacgatcgaacaccttgcagcaacatttttaagaaaccatgctgtttacggttccaaaactatttattttggtccgatgggatgccgtaccggattttatctgcttctcgcaggtgattatgaatcaaaggacattgttggcctgatgatcgaaatgtttgagtttatccgcgattttaagggcgatgttcctggcgcaagtccaaaagactgtggcaattatctggatatgaaccttggtatggcaaattatcttgccaaccgctatcttgaaaacacgctctaccatattgatgaaaaacatctggtgtatccggaatag

SEQ ID NO: 4987 - protein, 159 aa, Roseburia inulinivorans DSM 16841
MEKIASFTIDHIKLEPGVYVSRKDTVGAEVITTFDLRMTSPNDEPVMNTAEMHTIEHLAATFLRNHAVYGSKTIYFGPMGCRTGFYLLLAGDYESKDIVGLMIEMFEFIRDFKGDVPGASPKDCGNYLDMNLGMANYLANRYLENTLYHIDEKHLVYPE

SEQ ID NO: 4988 - DNA, 477 bp, Acidaminococcus sp. D21
  CDS (1)..(477): transl_table=11
atggaaaaagttatcatcgaaagctttacccttgaccatacaaaggtcattgccccctatgtacgtctcattggggaagaacaaggggaacacggcgatattgtctccaattttgatgtccgcctggcccagccaaacaaagaagaaatccctacagggggcatgcataccttagagcatcttttggccctttatctacgccctcgcatcaaaggatatcttgactgctctccctttggctgccgcacaggtttccatctcctgtgctggggccaccatgatcccagggacgtggcaaaagccctcaaggaagcgttggaacttattgtaacgacaaaatgggaagacgtgccgggaacaaaggaaaaggaatgcggcaactataaggaccattccctcttttgcgcccaggaatgggccaaacaaatcctaaaaaagggaatcagcagtgatccctatgaacgtcgtttggtgtaa

SEQ ID NO: 4989 - protein, 158 aa, Acidaminococcus sp. D21
MEKVIIESFTLDHTKVIAPYVRLIGEEQGEHGDIVSNFDVRLAQPNKEEIPTGGMHTLEHLLALYLRPRIKGYLDCSPFGCRTGFHLLCWGHHDPRDVAKALKEALELIVTTKWEDVPGTKEKECGNYKDHSLFCAQEWAKQILKKGISSDPYERRLV

SEQ ID NO: 4990 - DNA, 534 bp, Corynebacterium accolens ATCC 49725
  CDS (1)..(534): transl_table=11
atgcggcctaagaatctattctgtgaagtgacactcgcagcgattaggctggggagtatgactgaacagaaccaagaaaagattaacgtcaagtccttcgagctcgaccaccgcctcgtcagcgcgccttatatccgcgtggctgaccgcaccgatttgggcggcggcgtggagattatcaagtatgacctgcgcttctgccagcccaataaggagcacttggacacggaggcactgcactccgtggagcacatgatggccaactttatgcgcaactacaccgataagctcatcggctttgctcccatgggctgccgcaccggcttctacgccatcaccaacggcatggagcagaatgaattgctgcgcgccgttgagggtgcgctgaacgatatcctttccgccaccgaggttcccgccgccaacgaagagcagtgcggttggggcgcgcaccacagcttgaagggcgcaaaggatgcggcccgcaagttcttggacgccaagccggagtggctcgaggtcatggctgcctaa

SEQ ID NO: 4991 - protein, 177 aa, Corynebacterium accolens ATCC 49725
MRPKNLFCEVTLAAIRLGSMTEQNQEKINVKSFELDHRLVSAPYIRVADRTDLGGGVEIIKYDLRFCQPNKEHLDTEALHSVEHMMANFMRNYTDKLIGFAPMGCRTGFYAITNGMEQNELLRAVEGALNDILSATEVPAANEEQCGWGAHHSLKGAKDAARKFLDAKPEWLEVMAA

SEQ ID NO: 4992 - DNA, 474 bp, Lactobacillus buchneri ATCC 11577
  CDS (1)..(474): transl_table=11
atggcaaaagttgaaagttttacattagatcacacaaaggttaaggcaccttacgttcgtctcatcactgaagaaactggaaaaaagggcgacgtcatttctaattatgacttgcgacttgttcaacctaacaccaacgccattcctactgcaggtttgcatacgattgaacatctcttggctggtttacttagagatcgtcttgacggtgtcattgattgttcaccattcggatgccgtaccggattccatttgattacttggggcgaacacagcacaactgaagttgctaaggccttaaaaggctcattagaagctatcgccaacgacatcgaatggaaggacgttcagggtactgacaagtatagttgcggaaattaccgtgaccactctttgttctccgctaaggaatggagcaaggaaatcttgtcacagggtatctcagacaagccttttgaacgtcatgttatctag

SEQ ID NO: 4993 - protein, 157 aa, Lactobacillus buchneri ATCC 11577
MAKVESFTLDHTKVKAPYVRLITEETGKKGDVISNYDLRLVQPNTNAIPTAGLHTIEHLLAGLLRDRLDGVIDCSPFGCRTGFHLITWGEHSTTEVAKALKGSLEAIANDIEWKDVQGTDKYSCGNYRDHSLFSAKEWSKEILSQGISDKPFERHVI

SEQ ID NO: 4994 - DNA, 516 bp, Lactobacillus gasseri JV-V03
  CDS (1)..(516): transl_table=11
ttggaaataaaagatatttttataaggaggaaatttattatgggtaaagttgaaagttttgaattagatcacactaaagttaaggcaccttatgttcgcctaattactgttgaagaaggtaaaaaaggtgacaagattagtaattttgatcttcgcttagttcagccaaatgaaaatgccatccctactggaggcttacatactatcgagcacttgttagctggattattgcgtgaccgtattgacggctacattgattgttcaccatttggttgccgaacgggctttcatcttttggtttggggtaccccatcaactacagatgttgctaaggctcttaaggaagcacttaaagaaattcgcgataatattcaatgggaggatgttcctggcactactattgaatcttgtgggaattatcgcgaccattctctattttctgctaaacaatggtcaagagatattttagaaaagggtatttctgatgatccatttgaaagaaacgttgtagaataa

SEQ ID NO: 4995 - protein, 171 aa, Lactobacillus gasseri JV-V03
MEIKDIFIRRKFIMGKVESFELDHTKVKAPYVRLITVEEGKKGDKISNFDLRLVQPNENAIPTGGLHTIEHLLAGLLRDRIDGYIDCSPFGCRTGFHLLVWGTPSTTDVAKALKEALKEIRDNIQWEDVPGTTIESCGNYRDHSLFSAKQWSRDILEKGISDDPFERNVVE

SEQ ID NO: 4996 - DNA, 483 bp, Streptococcus intermedius
  CDS (1)..(483): transl_table=11
atggtaaaagaagtaatagttgaaagttttgagttagaccacacgattgtcaaagccccttatgtgcgtttgattggcgaagaaattggtccaaaaggtgatgtcatctcgaattttgatattcgtcttgtccaacctaacgaggattctatcccaactgctggactacacacaattgaacatctcctagcaaagctcattcgcactcggattgatggcatgattgattgctccccttttggctgccgtactggctttcacatgatcatgtggggacgacatagtacaaccgaaattgccaaagtcataaaggcctctttagaggaaatagctggagaaaccacctggactgatgtccctggcacaaccattgaatcctgtggaaattataaagaccacagtctcttttctgccaaagaatggtgcaagctcattttagatcaaggaatctctgacgatccttttaaacgccatcttgtataa

SEQ ID NO: 4997 - protein, 160 aa, Streptococcus intermedius
MVKEVIVESFELDHTIVKAPYVRLIGEEIGPKGDVISNFDIRLVQPNEDSIPTAGLHTIEHLLAKLIRTRIDGMIDCSPFGCRTGFHMIMWGRHSTTEIAKVIKASLEEIAGETTWTDVPGTTIESCGNYKDHSLFSAKEWCKLILDQGISDDPFKRHLV

SEQ ID NO: 4998 - DNA, 468 bp, Helicobacter pylori
  CDS (1)..(468): transl_table=11
atgaaaacaccaaaaatgaatgtagagagttttaatttggatcacaccaaagtcaaagccccttatgtgcgtatcgccgatcgcaaaaagggcgttaatggggatttgattatcaaatacgatgtgcgcttcaaacagcccaacaaagatcacatggacatgcctagcctacactctttagaacatttagtcgctgagatcatccgcaaccatgctaattatgtcgtggattggtcgcctatgggttgccaaacgggattttatctcacggtgttaaaccatgacaattacacagaggttttagaggttttagaaaagacgatgcaagatgtgctaaaggctacagaagtgcctgccagtaatgaaaaacaatgcggttgggcggctaaccacactttagagggcgcacaggatttagcgcgcgcttttttagacaaacgcgctgagtggtctgaagtgggggtttga

SEQ ID NO: 4999 - protein, 155 aa, Helicobacter pylori
MKTPKMNVESFNLDHTKVKAPYVRIADRKKGVNGDLIIKYDVRFKQPNKDHMDMPSLHSLEHLVAEIIRNHANYVVDWSPMGCQTGFYLTVLNHDNYTEVLEVLEKTMQDVLKATEVPASNEKQCGWAANHTLEGAQDLARAFLDKRAEWSEVGV

SEQ ID NO: 5000 - DNA, 510 bp, Eikenella corrodens
  CDS (1)..(510): transl_table=11
atgcccctgctcgacagcttcaccgtagaccacacccgcatgcacgcccccgccgtgcgcgtggccaaaaacatgcgtaccccaaaaggcgacgacatcaccgtgttcgacctgcgcttctgcgtgcccaaccaagaaatcctgcccgaaaaaggcatccacacgctggaacacctgtttgccggcttcatgcgcgagcatctcaacggcgccaacgtagaaatcatcgacatctcccccatgggctgccgcaccggcttctacatgagcctcatcggcaccccaagcgaagaagccgtagccgccgcttggaaagctgccatgcaggatattttaaacgtgcaaaaccaaagccaaatccccgagctgaacgaataccaatgcggaacctaccgcatgcattccctcgaagaagcgaaagaagtcgcccgcaacatccttgcccgccaaatcggcatcaataaaaatgccgatctcgccctgagcgaagacattctcggcaaactataa

SEQ ID NO: 5001 - protein, 169 aa, Eikenella corrodens
MPLLDSFTVDHTRMHAPAVRVAKNMRTPKGDDITVFDLRFCVPNQEILPEKGIHTLEHLFAGFMREHLNGANVEIIDISPMGCRTGFYMSLIGTPSEEAVAAAWKAAMQDILNVQNQSQIPELNEYQCGTYRMHSLEEAKEVARNILARQIGINKNADLALSEDILGKL

SEQ ID NO: 5002 - DNA, 516 bp, Erwinia amylovora
  CDS (1)..(516): transl_table=11
atgccattgctggatagctttaccgtcgatcacaccatcatggctgctcctgccgtgcgcgtagccaagactatgcagactcctcatggcgacaccatcacggtttttgagttgcgtttctgtcgtcccaacaaagaagtgttgcctgagcgcggcattcacacgctggaacatctgtttgctggctttatgcgcgatcacctgaacggcaacggtgtggaaatcatcgatatttctcccatgggatgccgtaccggtttttacatgagtctgattggcgtgccggacgagcagcgtgtggcccaggcgtggaaggcggcgatgggtgatgtgttgaaagttgccgaccagcgtcagatccccgagctgaatgagtatcagtgtggtacttatgaaatgcactcgctggatgaagcgcaggatatcgcccgtcatatcatcgaaaaggatattcgcgttaaccgcaacgatgagctggcactgccaaaagagaagctgaaagaactgcatatttag

SEQ ID NO: 5003 - protein, 171 aa, Erwinia amylovora
MPLLDSFTVDHTIMAAPAVRVAKTMQTPHGDTITVFELRFCRPNKEVLPERGIHTLEHLFAGFMRDHLNGNGVEIIDISPMGCRTGFYMSLIGVPDEQRVAQAWKAAMGDVLKVADQRQIPELNEYQCGTYEMHSLDEAQDIARHIIEKDIRVNRNDELALPKEKLKELHI

SEQ ID NO: 5004 - DNA, 516 bp, Pectobacterium carotovorum subsp. carotovorum
  CDS (1)..(516): transl_table=11
atgccgttactagatagctttactgttgaccatactcgtatggccgcacccgccgttcgggtcgctaaaaccatgaaaacccctcatggcgacaatatcactgtatttgatctgcgcttctgtcgtccgaacatcgaggtcatgccagagcgtggaattcatacgctagagcacctatttgctggctttatgcgggatcatttaaacggtgatggcgttgaaattatcgatatttctccgatgggatgccgtactggtttctacatgagcctgattggcacgccgaatgagcaacgtgttgccgactcttggaaagcggcaatggcggacgttctgaaagtgaccgatcagcgtaaaatccctgagctgaatgaataccagtgcggcacctatgatatgcattcactggaagaagcgcaggaaatcgctcagcatattttggatcacgatattggcattaaccaaaatgacgatctggcgttgccgaaagacaagttagctgagctgcatatctag

SEQ ID NO: 5005 - protein, 171 aa, Pectobacterium carotovorum subsp. carotovorum
MPLLDSFTVDHTRMAAPAVRVAKTMKTPHGDNITVFDLRFCRPNIEVMPERGIHTLEHLFAGFMRDHLNGDGVEIIDISPMGCRTGFYMSLIGTPNEQRVADSWKAAMADVLKVTDQRKIPELNEYQCGTYDMHSLEEAQEIAQHILDHDIGINQNDDLALPKDKLAELHI

SEQ ID NO: 5006 - DNA, 483 bp, Streptococcus oralis
  CDS (1)..(483): transl_table=11
atgtcaaaagaagttattgttgaaagttttgaacttgaccacaccattgttaaagcaccctatgttcgcttgattggggaagaaacggggccaaagggagatgtcatctccaactttgatattcgcttggtgcaaccgaacgaagactcaatccctaccgctggccttcacactatcgagcacctcttggccaaactcatccgtactcgaatcgacgggatgattgattgttccccatttggttgccgtacaggcttccacatgattatgtggggacgccataccagtgctgaaattgctgctgttattaaggattcgctcaaggaaattgctgaaaccactacttgggaagatgttcctggaacaaccatcgaatcttgcggaaactacaaggaccacagcctcttttctgctaaagaatgggcaaaactcatcctggaacaaggaatctcagatgatgcctttgaacgccatgtcatctaa

SEQ ID NO: 5007 - protein, 160 aa, Streptococcus oralis
MSKEVIVESFELDHTIVKAPYVRLIGEETGPKGDVISNFDIRLVQPNEDSIPTAGLHTIEHLLAKLIRTRIDGMIDCSPFGCRTGFHMIMWGRHTSAEIAAVIKDSLKEIAETTTWEDVPGTTIESCGNYKDHSLFSAKEWAKLILEQGISDDAFERHVI

SEQ ID NO: 5008 - DNA, 519 bp, Vibrio mimicus
  CDS (1)..(519): transl_table=11
atgccattattagacagcttcaccgtcgatcatactcgtatgaatgcaccagcagtgcgtgttgcgaagaccatgcaaaccccaaaaggcgataccattacggtatttgatttgcgttttactctgccaaacaaagatattttgtctgagcgcggtattcacactctggagcatctgtacgcgggctttatgcgtgctcaccttaatggaagccaagttgagattatcgatatttctcctatgggctgccgtactggcttctatatgagtttgatcggtgcgccaactgagcagcaagtggcacaagcttggttagcggcaatgcaagatgtgttgaaagtggaaagccaagataagatcccagagctaaacgaataccagtgcggtacagcagcgatgcattctctggaagaagccaaagcgattgcgcagaaagtgattgcggcagggatttcggttaaccgtaatgatgacttggcgctgcctgagtcaatgctgaatgagctcaaggttcactaa

SEQ ID NO: 5009 - protein, 172 aa, Vibrio mimicus
MPLLDSFTVDHTRMNAPAVRVAKTMQTPKGDTITVFDLRFTLPNKDILSERGIHTLEHLYAGFMRAHLNGSQVEIIDISPMGCRTGFYMSLIGAPTEQQVAQAWLAAMQDVLKVESQDKIPELNEYQCGTAAMHSLEEAKAIAQKVIAAGISVNRNDDLALPESMLNELKVH

SEQ ID NO: 5010 - DNA, 483 bp, Streptococcus anginosus
  CDS (1)..(483): transl_table=11
atggtcaaagaagtcattgttgaaagttttgagttggatcacacgattgtcaaagccccctacgtacgcttgattggcgaagaggtgggacctaaaggggacatcatttccaactttgatgttcgtctggtacagcctaatgaagatgccattccgaccgctggacttcatacgattgaacatctgctagctaagctcattcgtactcacattgatggtatgattgattgctcaccttttggttgtcggacaggatttcacatgattatgtggggtcagcatagctcaactgaaattgccaaagtcatcaaggcagctttagaggaaattgctgaaatcactacttgggaagatgtccctggtacgactattgaatcttgtggcaattacaaagatcacagcctcttttccgctaaagaatggtgcaaactaatcctagaaaaaggcatttctgatgatgccttcgagcgtcatcttgtgtaa

SEQ ID NO: 5011 - protein, 160 aa, Streptococcus anginosus
MVKEVIVESFELDHTIVKAPYVRLIGEEVGPKGDIISNFDVRLVQPNEDAIPTAGLHTIEHLLAKLIRTHIDGMIDCSPFGCRTGFHMIMWGQHSSTEIAKVIKAALEEIAEITTWEDVPGTTIESCGNYKDHSLFSAKEWCKLILEKGISDDAFERHLV

SEQ ID NO: 5012 - DNA, 516 bp, Erwinia amylovora
  CDS (1)..(516): transl_table=11
atgccattgctggatagctttaccgtcgatcacaccatcatggctgctcctgccgtgcgcgtagccaagactatgcagactcctcatggcgacaccatcacggttttcgacttgcgtttctgtcgtcccaacaaagaagtgttgcctgagcgcggcattcacacgctggaacatctgtttgctggctttatgcgcgatcacctgaacggcaacggtgtggaaatcatcgatatttctcccatgggatgccgtaccggtttttacatgagtctgattggcgtgccggacgagcagcgtgtggcccaggcgtggaaggcggcgatgggtgatgtgttgaaagttgccgaccagcgtcagatccccgagctgaatgagtatcagtgtggtacttatgaaatgcactcgctggatgaagcgcaggatatcgcccgtcatatcatcgaaaaggatattcgcgttaaccgcaacgatgagctggcactgccaaaagagaagctgaaagaactgcatatttag

SEQ ID NO: 5013 - protein, 171 aa, Erwinia amylovora
MPLLDSFTVDHTIMAAPAVRVAKTMQTPHGDTITVFDLRFCRPNKEVLPERGIHTLEHLFAGFMRDHLNGNGVEIIDISPMGCRTGFYMSLIGVPDEQRVAQAWKAAMGDVLKVADQRQIPELNEYQCGTYEMHSLDEAQDIARHIIEKDIRVNRNDELALPKEKLKELHI

SEQ ID NO: 5014 - DNA, 516 bp, Pectobacterium carotovorum subsp. carotovorum
  CDS (1)..(516): transl_table=11
atgccgttactagacagctttaccgttgaccatactcgtatggccgcacctgcagttcgggtcgctaaaaccatgaaaacccctcatggcgacaatatcacagtatttgacctgcgcttctgtcgtccgaacattgaagtcatgccagagcgtggtatccacacgctagagcacctgtttgcgggctttatgcgcgatcatttaaacggtgatggcgttgaaattatcgacatttctccgatgggatgccgtacgggtttctacatgagccttattggtacgccggatgagcaacgtgttgctgactcctggaaagcggcgatggcggacgttctgaaagtgaccgatcagcgtaaaattcctgagctgaacgaattccagtgtggcacctatgagatgcactcactgaaagaagcgcaggaaattgctcaacatatcgtggatcacgatattggtatcaaccaaaatgacgatctggcgctgccgaaagataaactagccgagctacatatctag

SEQ ID NO: 5015 - protein, 171 aa, Pectobacterium carotovorum subsp. carotovorum
MPLLDSFTVDHTRMAAPAVRVAKTMKTPHGDNITVFDLRFCRPNIEVMPERGIHTLEHLFAGFMRDHLNGDGVEIIDISPMGCRTGFYMSLIGTPDEQRVADSWKAAMADVLKVTDQRKIPELNEFQCGTYEMHSLKEAQEIAQHIVDHDIGINQNDDLALPKDKLAELHI

SEQ ID NO: 5016 - DNA, 456 bp, Citrobacter freundii
  CDS (1)..(456): transl_table=11
atggaaaaagtagaaagttttaacctagaccatacaaaagtaaaagctccttttgtaagaaagtgtagtgtccttgatggagtaaagggagataaagtaactaaatttgacttgagatttttccagccaaatgtagaaagttttggacctgctgctatgcacggtttagagcatcttttagcttcctatttaagagatacattagatggtgtaatagacttatctccaatgggatgtagaacaggattttatttaatcctatggggagatgtagatgccaaaacagttaagattggtttagaagaagcattaaaaaaagttcttgaatcagataaaatcccagcagctacagctatagaatgtggaaactacagagacttatctttatttggggcaaaggaatatgcaagagatgttttagataaaggattttctttaaatatatatggggaataa

SEQ ID NO: 5017 - protein, 151 aa, Citrobacter freundii
MEKVESFNLDHTKVKAPFVRKCSVLDGVKGDKVTKFDLRFFQPNVESFGPAAMHGLEHLLASYLRDTLDGVIDLSPMGCRTGFYLILWGDVDAKTVKIGLEEALKKVLESDKIPAATAIECGNYRDLSLFGAKEYARDVLDKGFSLNIYGE

SEQ ID NO: 5018 - DNA, 477 bp, Lactococcus lactis
  CDS (1)..(477): transl_table=11
atggtgaaagtagaatcttttcaattagatcacacaaaagtacttgccccttacgtacgcttaattggtagcgaaactggaccgaaaggtgatgttattactaactttgacgttcgttttgtacaacctaatgccaatgccattggtatggctgctttacatactatcgagcatagtatggcaagtttgattcgcgatagaatcgatggtatgattgacttttcaccatttggttgtcaaactggtttccacatgattatgtggggtgaacatagttccgaagaaattgcgaaagtgattaaatcttctctagaagagctttcaagtgatgaatttggttgggacaatgttcctggtgttgcggaaaaagaatgcggaaactaccgtaatcactcacttttcggtgctaaagaatggtctaagaaaatcctcgctgaaggaatttcaactgacccttacgaacgtaaagttatttaa

SEQ ID NO: 5019 - protein, 158 aa, Lactococcus lactis
MVKVESFQLDHTKVLAPYVRLIGSETGPKGDVITNFDVRFVQPNANAIGMAALHTIEHSMASLIRDRIDGMIDFSPFGCQTGFHMIMWGEHSSEEIAKVIKSSLEELSSDEFGWDNVPGVAEKECGNYRNHSLFGAKEWSKKILAEGISTDPYERKVI

SEQ ID NO: 5020 - DNA, 474 bp, Bacillus thuringiensis subsp. finitimus
  CDS (1)..(474): transl_table=11
atgccatcagtagaaagctttgaattagatcatacgattgtaaaggcaccttatgtaagacattgcggagttcacaatgtaggtagtgacggtattgtaaataaatttgatattcgtttctgccaaccgaataaacaagcaatgaaaccagatgttattcatacgttagagcatttattagcatttaatttacgtaaatatattgatcgttatccgcattttgatattatcgatatttcaccgatgggctgccaaacaggatattatcttgtagtaagcggaacaccgacagtacgagaaatcattgatttattagaactaacattaaaagatgcggttcaaattacagaaattccagctgcaaatgaaacacaatgtggtcaagcgaagcttcacgacttagaaggagcacaacgcttaatgaacttctggttaagccaagataaagatgaacttgagaaagtgtttggataa

SEQ ID NO: 5021 - protein, 157 aa, Bacillus thuringiensis subsp. finitimus
MPSVESFELDHTIVKAPYVRHCGVHNVGSDGIVNKFDIRFCQPNKQAMKPDVIHTLEHLLAFNLRKYIDRYPHFDIIDISPMGCQTGYYLVVSGTPTVREIIDLLELTLKDAVQITEIPAANETQCGQAKLHDLEGAQRLMNFWLSQDKDELEKVFG

SEQ ID NO: 5022 - DNA, 486 bp, Streptococcus equinus
  CDS (1)..(486): transl_table=11
atgtctaaaaaagaagtaactgtagaaagtttcgaacttgaccatacaattgttaaagcaccttatgtccgtcttatttctgaggaagttggtcctaaaggtgatgtgattacaaactttgatattcgtcttgttcaaccaaatgaaaatgctattccaactgctggattgcacacaatcgaacacttgctcgctaaacttatccgtgaacgtatcgacggaatgattgactgttctccatttggctgccgtactggtttccatttgattatgtggggcaaacacaacaccactgaaattgccaaagtcatcaaatcaagtttagaagaaatcgctactgtaacatcatgggatgacgttccaggtactactatcgagtcttgtggtaactacaaagaccacagtctatttacagcaaaagaatgggcaaaacttattcttaaagatggtatctcagacgatccatttgaacgtcacgtcatctaa

SEQ ID NO: 5023 - protein, 161 aa, Streptococcus equinus
MSKKEVTVESFELDHTIVKAPYVRLISEEVGPKGDVITNFDIRLVQPNENAIPTAGLHTIEHLLAKLIRERIDGMIDCSPFGCRTGFHLIMWGKHNTTEIAKVIKSSLEEIATVTSWDDVPGTTIESCGNYKDHSLFTAKEWAKLILKDGISDDPFERHVI

SEQ ID NO: 5024 - DNA, 474 bp, Bacillus subtilis
  CDS (1)..(474): transl_table=11
atgccttcagtagaaagttttgagcttgatcataatgcggttgttgctccatatgtaagacattgcggcgtgcataaagtgggaacagacggcgttgtaaataaatttgacattcgtttttgccagccaaataaacaggcgatgaagcctgacaccattcacacactcgagcatttgctcgcgtttacgattcgttctcacgctgagaaatacgatcattttgatatcattgatatttctccaatgggctgccagacaggctattatctagttgtgagcggagagccgacatcagcggaaatcgttgatctgcttgaagacacaatgaaggaagcggtagagattacagaaatacctgctgcgaatgaaaagcagtgcggccaagcgaagcttcatgatctggaaggcgctaaacgtttaatgcgtttctggctttcacaggataaagaagaattgctaaaagtatttggctaa

SEQ ID NO: 5025 - protein, 157 aa, Bacillus subtilis
MPSVESFELDHNAVVAPYVRHCGVHKVGTDGVVNKFDIRFCQPNKQAMKPDTIHTLEHLLAFTIRSHAEKYDHFDIIDISPMGCQTGYYLVVSGEPTSAEIVDLLEDTMKEAVEITEIPAANEKQCGQAKLHDLEGAKRLMRFWLSQDKEELLKVFG

SEQ ID NO: 5026 - DNA, 516 bp, Escherichia coli (strain K12)
  CDS (1)..(516): transl_table=11
atgccgttgttagatagcttcacagtcgatcatacccggatggaagcgcctgcagttcgggtggcgaaaacaatgaacaccccgcatggcgacgcaatcaccgtgttcgatctgcgcttctgcgtgccgaacaaagaagtgatgccagaaagagggatccataccctggagcacctgtttgctggttttatgcgtaaccatcttaacggtaatggtgtagagattatcgatatctcgccaatgggctgccgcaccggtttttatatgagtctgattggtacgccagatgagcagcgtgttgctgatgcctggaaagcggcaatggaagacgtgctgaaagtgcaggatcagaatcagatcccggaactgaacgtctaccagtgtggcacttaccagatgcactcgttgcaggaagcgcaggatattgcgcgtagcattctggaacgtgacgtacgcatcaacagcaacgaagaactggcactgccgaaagagaagttgcaggaactgcacatctag

SEQ ID NO: 5027 - protein, 171 aa, Escherichia coli (strain K12)
MPLLDSFTVDHTRMEAPAVRVAKTMNTPHGDAITVFDLRFCVPNKEVMPERGIHTLEHLFAGFMRNHLNGNGVEIIDISPMGCRTGFYMSLIGTPDEQRVADAWKAAMEDVLKVQDQNQIPELNVYQCGTYQMHSLQEAQDIARSILERDVRINSNEELALPKEKLQELHI

SEQ ID NO: 5028 - DNA, 516 bp, Erwinia carotovora subsp. atroseptica
  CDS (1)..(516): transl_table=11
atgccgttactagatagctttaccgttgaccacactcgtatggctgcacccgccgttcgggttgctaaaaccatgaaaacccctcatggcgacaatatcacggtatttgacctgcgcttctgtcgcccgaacatcgaagtcatgccggagcgcggaatccatacgttagagcacctgtttgctggttttatgcgagatcatttaaacggtgatggtgttgagattatcgatatttctccgatgggatgccgtaccggtttctacatgagcctgatcggtacgccggatgagcagcgtgttgccgaatcctggaaagcagcgatgtctgacgtcctgaaagtgaccgaccagcgtaaaatccctgagctgaatgaataccagtgtggcacctatgatatgcattcactgaaagaagcgcaggaaatcgcccagcacattgtggatcatgatattgggatcaaccaaaatgacgatctggcgttgccgaaagataaactggctgagctacatatctag

SEQ ID NO: 5029 - protein, 171 aa, Erwinia carotovora subsp. atroseptica
MPLLDSFTVDHTRMAAPAVRVAKTMKTPHGDNITVFDLRFCRPNIEVMPERGIHTLEHLFAGFMRDHLNGDGVEIIDISPMGCRTGFYMSLIGTPDEQRVAESWKAAMSDVLKVTDQRKIPELNEYQCGTYDMHSLKEAQEIAQHIVDHDIGINQNDDLALPKDKLAELHI

SEQ ID NO: 5030 - DNA, 468 bp, Helicobacter pylori
  CDS (1)..(468): transl_table=11
atgaaaacaccaaaaatgaatgtagagagttttaatttggatcacaccaaagtcaaagccccttatgtgcgtgtcgctgatcgcaaaaagggcgttaatggggatttgattgtcaaatacgatgtgcgcttcaagcagcccaaccaagatcacatggacatgcctagcctacattctttagagcatttagtcgctgaaattatccgcaaccatgccagttatgtcgtggattggtcgcctatgggttgccaaacgggattttatctcacagtgttaaaccatgacaattacacagagattttagaggttttagaaaagaccatgcaagatgtgttaaaggctacagaagtgcctgccagcaatgaaaagcaatgcggttgggcggctaaccacactttagagggtgctaaggatttagcgcgcgcttttttagacaaacgcgctgagtggtctgaagtgggggtttga

SEQ ID NO: 5031 - protein, 155 aa, Helicobacter pylori
MKTPKMNVESFNLDHTKVKAPYVRVADRKKGVNGDLIVKYDVRFKQPNQDHMDMPSLHSLEHLVAEIIRNHASYVVDWSPMGCQTGFYLTVLNHDNYTEILEVLEKTMQDVLKATEVPASNEKQCGWAANHTLEGAKDLARAFLDKRAEWSEVGV

SEQ ID NO: 5032 - DNA, 516 bp, Serratia marcescens
  CDS (1)..(516): transl_table=11
atgccattgctggatagctttaccgtcgatcatacccgtatggcagccccggctgtccgcgttgcgaaaaccatgaaaacgcctcatggcgataccatcacggtatttgatctgcgcttttgccgcccgaacctggaagtgatgcccgaacgcggcattcacacgctggaacacctgttcgccggctttatgcgcgaccacctgaacggccagggcgtggagattatcgacatctccccaatgggctgccgcaccggtttctacatgagcctgatcggcgtgccggaagagcagcgcgttgccgatgcctggaaagcggcgatggccgacgtgctgaaagtgaccgaccagcgcaagatccctgagctgaacgagtaccagtgtggtacctaccacatgcactcgctggaagaagcgcaggaaatcgccaagcacattctggataacggcgtggtggtgaaccacaacgacgagctggcgctgccgaaagagaagctgcaggagctgcatatctga

SEQ ID NO: 5033 - protein, 171 aa, Serratia marcescens
MPLLDSFTVDHTRMAAPAVRVAKTMKTPHGDTITVFDLRFCRPNLEVMPERGIHTLEHLFAGFMRDHLNGQGVEIIDISPMGCRTGFYMSLIGVPEEQRVADAWKAAMADVLKVTDQRKIPELNEYQCGTYHMHSLEEAQEIAKHILDNGVVVNHNDELALPKEKLQELHI

SEQ ID NO: 5034 - DNA, 639 bp, Streptococcus sanguinis (strain SK36); identical to SEQ ID NO: 4684
  CDS (157)..(639): transl_table=11

SEQ ID NO: 5035 - protein, 160 aa, Streptococcus sanguinis (strain SK36)
MSKEVVVESFELDHTIVKAPYVRLIGEETGPKGDIISNFDIRLVQPNEDSIPTAGLHTIEHLLAMLIRKRIDGMIDCSPFGCRTGFHMIMWGQHSSSQIAQVIKSCLEEIAESTSWEDVPGTTIESCGNYKDHSLFSAKEWAKLILSQGISDDAFERHVI

SEQ ID NO: 5036 - DNA, 21 bp, Artificial sequence
  primer
atggccgaggtggagagcttc

SEQ ID NO: 5037 - DNA, 23 bp, Artificial sequence
  primer
ttacctcgcctccaggggaacgg

SEQ ID NO: 5038 - protein, 145 aa, Artificial sequence
  consensus sequence
  Variant (3)..(4): Xaa in position 3 to 4 is any amino acid
  Variant (8)..(10): Xaa in position 8 to 10 is any amino acid
  Variant (13)..(13): Xaa in position 13 is any amino acid
  Variant (16)..(22): Xaa in position 16 to 22 is any amino acid
  Variant (23)..(24): Xaa in position 23 to 24 is any or no amino acid
  Variant (27)..(31): Xaa in position 27 to 31 is any amino acid
  Variant (33)..(33): Xaa in position 33 is any amino acid
  Variant (35)..(37): Xaa in position 35 to 37 is any amino acid
  Variant (40)..(48): Xaa in position 40 to 48 is any amino acid
  Variant (49)..(49): Xaa in position 49 is any or no amino acid
  Variant (51)..(52): Xaa in position 51 to 52 is any amino acid
  Variant (56)..(56): Xaa in position 56 is any amino acid
  Variant (58)..(60): Xaa in position 58 to 60 is any amino acid
  Variant (62)..(67): Xaa in position 62 to 67 is any amino acid
  Variant (68)..(72): Xaa in position 68 to 72 is any or no amino acid
  Variant (75)..(75): Xaa in position 75 is any amino acid
  Variant (78)..(78): Xaa in position 78 is any amino acid
  Variant (81)..(81): Xaa in position 81 is any amino acid
  Variant (85)..(89): Xaa in position 85 to 89 is any amino acid
  Variant (91)..(114): Xaa in position 91 to 114 is any amino acid
  Variant (115)..(118): Xaa in position 115 to 118 is any or no amino acid
  Variant (120)..(125): Xaa in position 120 to 125 is any amino acid
  Variant (128)..(131): Xaa in position 128 to 131 is any amino acid
  Variant (133)..(133): Xaa in position 133 is any amino acid
  Variant (135)..(136): Xaa in position 135 to 136 is any amino acid
  Variant (138)..(144): Xaa in position 138 to 144 is any amino acid
SFXXDHTXXXAPXVRXXXXXXXXXGDXXXXXDXRXXXPNXXXXXXXXXXHXXEHLXAXXXRXXXXXXXXXXXIDXSPXGCXTGFXXXXXGXXXXXXXXXXXXXXXXXXXXXXXXXXXXPXXXXXXCGXXXXHXLXXAXXXXXXXL

SEQ ID NO: 5039 - protein, 17 aa, Artificial sequence
  protein pattern
  Variant (2)..(2): Xaa in position 2 is any amino acid
  Variant (5)..(5): Xaa in position 5 is Phe or Met
  Variant (8)..(8): Xaa in position 8 is Gln or Arg
  Variant (12)..(12): Xaa in position 12 is His or Tyr
  Variant (13)..(13): Xaa in position 13 is Leu, Met or Val
  Variant (14)..(16): Xaa in position 14 to 16 is any amino acid
  Variant (17)..(17): Xaa in position 17 is Gly or Asn
DXSPXGCXTGFXXXXXX

SEQ ID NO: 5040 - protein, 15 aa, Artificial sequence
  protein pattern
  Variant (3)..(3): Xaa in position 3 is any amino acid
  Variant (4)..(4): Xaa in position 4 is Leu or Val
  Variant (8)..(8): Xaa in position 8 is any amino acid
  Variant (9)..(9): Xaa in position 9 is Met or Val
  Variant (10)..(10): Xaa in position 10 is any amino acid
  Variant (13)..(13): Xaa in position 13 is any amino acid
SFXXDHTXXXAPXVR

SEQ ID NO: 5041 - protein, 12 aa, Artificial sequence
  protein pattern
  Variant (2)..(2): Xaa in position 2 is Ser or Thr
  Variant (3)..(3): Xaa in position 3 is Ile or Leu
  Variant (7)..(7): Xaa in position 7 is any amino acid
  Variant (9)..(11): Xaa in position 9 to 11 is any amino acid
HXXEHLXAXXXR

SEQ ID NO: 5042 - DNA, 1740 bp, Saccharomyces cerevisiae
  CDS (1)..(1740)
atgtatgtcacttttaatgaggctttggatagttcttttggtaatctagagagtccgaatcatgacttcaaagtaggtgaccctaacatggtaccaactccccctatggattcagattctgcagcaattagtttggctttcttaataagtctttctattacgtttgcaatattaatgctcatcttggtagtaatagcggcatatgtcaccttttgtggtgatgatgaatcagaatacgacgaagagaacgccttaggtacacgaacttcaggaactctgcactctttgtttggtaaaaaacatagtggcatcttgttggattcgagttttgcatcccctggcgggtttgatgatgagatcgttcttcaggaaagagaacttgaagaattaccaaagatgtcagcgtacgaggttgagttgtatataagagcgaaagagtttcaaatgatgagcccgccaatggtgaaggactttggcacgtatttggacagtgacgaccagcagtttattaaggatcgtggcattcaaagctattttttgctaccaagcattaatgataatatagacgaatatggaaactttctacccagttttattgtccaggataaactagatattcaattttcaaagttcaataagagctcatccactgtaatgaactatcccctacctcacaataggaaggacgcagtgtatttcgaagttaaaattttcagacatattcaaaagtccaatagtatattcagtataggtttgactactgtaccatatccttatttcagggtaccgggcatggccaaatactccattgcatacgaatccacaggtaaactgaggataaataaccccttcactgccagcacattattaccaaaattggaagaaggtgacacggtaggattcggttacagatataaaacaggtacaatcttcattacacataatgggaaaaaattaatggatgtaacacaaaatattggcattgatcttttcattggaattggcgcgtttaatgccgcatatacaagaacatatacgagggatggtctattggaagacccggataatgttagcttccgtgaagctctctctgaaggcaaagatattgaagtcgccaaagatcttcaaagagttcacgatccacatgatgaaagtgatgaaatgacgtcagatgaggttgaattacatgttaatttgggccaagttgggttcgtctttatagaagccaatgtgaaaaaatatgcgtttgggagtgtttatggccaaattggaattcctcctgcgtataatggaaccgagatcaagaaggatactattttacagaaaggagaagaattgccaccaagatatgctgacactgataatttctttggtagtatgaaggtaaaagaagggtcatcctctaggataacggcgcaaactagtaagcccctgtggtctgttgggacgtatgaaagaatctcttctaactttgacagagaaaataatgtttaccacgacagtcttgaaaccgacgataacaacaccgataacaatgttaataacaacgatgagaacgctggttgcaatgaaaattcgccattattggaagatgatggcaataaaagaccggaaaattcaaataccccccgtgaagtatcagatggagctatcaataagaaccctagaaataaatctactaaaaaacgtcaaagaaacagaggcaaatcttctaaaaagaagaacagatcgagaaaataa

SEQ ID NO: 5043 - protein, 579 aa, Saccharomyces cerevisiae
MYVTFNEALDSSFGNLESPNHDFKVGDPNMVPTPPMDSDSAAISLAFLISLSITFAILMLILVVIAAYVTFCGDDESEYDEENALGTRTSGTLHSLFGKKHSGILLDSSFASPGGFDDEIVLQERELEELPKMSAYEVELYIRAKEFQMMSPPMVKDFGTYLDSDDQQFIKDRGIQSYFLLPSINDNIDEYGNFLPSFIVQDKLDIQFSKFNKSSSTVMNYPLPHNRKDAVYFEVKIFRHIQKSNSIFSIGLTTVPYPYFRVPGMAKYSIAYESTGKLRINNPFTASTLLPKLEEGDTVGFGYRYKTGTIFITHNGKKLMDVTQNIGIDLFIGIGAFNAAYTRTYTRDGLLEDPDNVSFREALSEGKDIEVAKDLQRVHDPHDESDEMTSDEVELHVNLGQVGFVFIEANVKKYAFGSVYGQIGIPPAYNGTEIKKDTILQKGEELPPRYADTDNFFGSMKVKEGSSSRITAQTSKPLWSVGTYERISSNFDRENNVYHDSLETDDNNTDNNVNNNDENAGCNENSPLLEDDGNKRPENSNTPREVSDGAINKNPRNKSTKKRQRNRGKSSKKKNRSRK

SEQ ID NO: 5044 - DNA, 1443 bp, Ashbya gossypii ATCC 10895
  CDS (1)..(1443)
atggcgcggtacctgacgttctgccacatccaggacgagagggagtacatcgagaaggtcgggggcgcgcacggtctggcgcggagcaagcggcattcagatttgtaccggagcccgttcctcaacctcgggcaggcgaatgtgaaggaactagcggagctggagctgctggagcttccgcggatgtcgcgtttcgaggtcgagctttatctgagggcgaaggagttccaggcgatgaacccgccactcgtcaaggcgtttggaacttacatgtgcccggaggaccggcaatgcgtgagggaccggggcatccaggcttactacctattgccgtcaatcaacgacaacgtcgaccggcgggggaacttcctaccgagcttcttggtccaggacaagctcaacgtcacgttcaccaagtacaacaaatcctcctcgaccatcatgaactacccgctcccgcacaacaagcgcgacgccgtctacttcgaagtcaaggtgtataagttcaggaactacttggcgtccaactcgatctttagtattgggctagtgacatgtccgtacccctacttcgtcatgccgggcatgtgccagtactccattgcgtacgaatcgaccggcaagttacgtatcaataactccttttatgcttccacattgttgcccaagttgcaggaaggggacgttgtcggtttgggataccgctaccgcacgggaaccgtattcattacacacaacgggaagaagatgatggacttaacacacaatatcgggatcgacttgttcgtcggtatcggcgcgatgaacgccgcatacacccgcacctacaccaaggaggggttgcttgacgacatagacaatgtcgagcttcggaaacagattcaggacctggaggcggaccagaagcgggacatcacagaggtcatgaacgagcagttgcttcggccgcatgacccgcggaccagacacattaactctgatgaaatcgagttgcaggtcaacttggggggcgtcgggtttgtcttcgtggaggcaaacgtgaagaaatatgcatttggaagtctctacggcgaaatcggcattccgccagcatacaatggcgacgaaaccaagaccgacgttattctacagaagggcgacgacttgcccccgaagtaccccgaggacgagctcaacttcttcggcaacatcaaggtcaatctcggtaacggatcttccactgagtccaccagcatgtacaaccgccaggggtcttccggcagtgtcgcccctccccccgccactgagcgccctcgcagcctgcagaatgtgccctacgccctccagggcctgctcgacgacatcgaagaacgcagcgtctacgagccccttctccccaaggggccccgtcccgcaaagagcggccacaagcgcaagaaacggaagagaagagcacccgcctag

SEQ ID NO: 5045 - protein, 480 aa, Ashbya gossypii ATCC 10895
MARYLTFCHIQDEREYIEKVGGAHGLARSKRHSDLYRSPFLNLGQANVKELAELELLELPRMSRFEVELYLRAKEFQAMNPPLVKAFGTYMCPEDRQCVRDRGIQAYYLLPSINDNVDRRGNFLPSFLVQDKLNVTFTKYNKSSSTIMNYPLPHNKRDAVYFEVKVYKFRNYLASNSIFSIGLVTCPYPYFVMPGMCQYSIAYESTGKLRINNSFYASTLLPKLQEGDVVGLGYRYRTGTVFITHNGKKMMDLTHNIGIDLFVGIGAMNAAYTRTYTKEGLLDDIDNVELRKQIQDLEADQKRDITEVMNEQLLRPHDPRTRHINSDEIELQVNLGGVGFVFVEANVKKYAFGSLYGEIGIPPAYNGDETKTDVILQKGDDLPPKYPEDELNFFGNIKVNLGNGSSTESTSMYNRQGSSGSVAPPPATERPRSLQNVPYALQGLLDDIEERSVYEPLLPKGPRPAKSGHKRKKRKRRAPA

SEQ ID NO: 5046 - DNA, 1671 bp, Vanderwaltozyma polyspora DSM 70294
  CDS (1)..(1671)
atgatgattattgaaggagatattagtggccaagaggctgtaaaaaatgtgatatatgggacgtttctacctgttgatgatccatatcctgtaaccccaccgatagatcatgataatgagactgttagtttagcatttttgataagtctatcggttacatttgctcttttgatgattcttttagtggctactgcagcttatgttatgttctgtggtgctgatgaggccgaatatgatgaagagacaggtgaagggtcgagttcaagcgttactggtattcatacgttttttggtaagaaaggtggtggcatattgttagattctactttttgtagtcctggtcagtttgatgatgaagaagctttacgtgaacaagaagaacaagagcttcccaagatgtcgaaatttgaaattgaactatataaaaggtctagagaatttcagaatttgaacccaccattggttaaggagtttgggacgtatttgaacacctcagatcgtcagttcatcaaggatcgtggtattcaaagttattatttttatccaagtattaatgataatgttgataaatatggtaattttttacctagctttttagtacaggataagctagatgttacttttacggagtataacaagagctcatccactttattaaattatccacttccattcaataagaaagaggcagtttactttgaggttaaaatattcaaattccctacaaattctaatactatttttagtatcggcctagttacatgtccgtatccatatttcagaatacctggaatgtccagatactccatagcatacgaatccactggtaagttgcgtattaacaatccgtttggcgcctcaaccttgttacctcgacttcaagagggcgatgtagttgggtttgggtataggtataagatgggtacagtatttataacacataatggtaagaagatgatggacgtgacgcataatgttggtgttgatctgtttgttggtctgggggcgttgaacgcatcctacactaggacctacactaaggacggattgctggaagatccagataatgtcgatataagagaagcgctgtcgcaaggacgcgaagttgaactgccagatgcaattcaaaaggtctacgatccagaaaacttaaccccagttgcagccgatgaagttgaattacaagtgaacttgggacaagttgggttcgtattcattgaagccaacgttaagaagtatgggtttgggagtgttcttggagagataggtataccaccagcatataacggtgatgaaatcaaacgcaatgcgattatccaaaagggagaagagatgccacctaaatatgggtttgaagaaggagaccgtaattcgttttttggggacattcacatatatgaaggtcaccaccaattagaggcggaggagctaccagaaggcaacggtggagtaaccacgacacaagatgcgggtgccagggcagcaaccgattacgagagagtgtcgtcggcgtttgacagagagaacaacgacacaacgaaggatccggcagacgagatactgcacaaccagacggcagccaatacaacgaaaccaaacaagaccagcaataacaacaacaagaaccacaacaacaagaaacgtaacaagcgcaacaaaaggagaaagtag

SEQ ID NO: 5047 - protein, 556 aa, Vanderwaltozyma polyspora DSM 70294
MMIIEGDISGQEAVKNVIYGTFLPVDDPYPVTPPIDHDNETVSLAFLISLSVTFALLMILLVATAAYVMFCGADEAEYDEETGEGSSSSVTGIHTFFGKKGGGILLDSTFCSPGQFDDEEALREQEEQELPKMSKFEIELYKRSREFQNLNPPLVKEFGTYLNTSDRQFIKDRGIQSYYFYPSINDNVDKYGNFLPSFLVQDKLDVTFTEYNKSSSTLLNYPLPFNKKEAVYFEVKIFKFPTNSNTIFSIGLVTCPYPYFRIPGMSRYSIAYESTGKLRINNPFGASTLLPRLQEGDVVGFGYRYKMGTVFITHNGKKMMDVTHNVGVDLFVGLGALNASYTRTYTKDGLLEDPDNVDIREALSQGREVELPDAIQKVYDPENLTPVAADEVELQVNLGQVGFVFIEANVKKYGFGSVLGEIGIPPAYNGDEIKRNAIIQKGEEMPPKYGFEEGDRNSFFGDIHIYEGHHQLEAEELPEGNGGVTTTQDAGARAATDYERVSSAFDRENNDTTKDPADEILHNQTAANTTKPNKTSNNNNKNHNNKKRNKRNKRRK

SEQ ID NO: 5048 - DNA, 1764 bp, Candida glabrata CBS 138
  CDS (1)..(1764)
atgccgttaatacctgactctatacagtcgataggggtttttcatgtggatgaccctttcaaccctatgccagatccaggtgatgctgatcctgagactgtcgcttttgcattttttataggaattgcggttgtattttcactgttattgattacattagtatgtactgctgcttatctagtttgtaccagctcttacgaaggtgaatacgatgaagaattagctaataatggagatggtagtagacgtggtatcttgaatttccgaccattgtttggtaagaagaactcaaatggtttgctattagattctaattttactaatccaggcgaatttgatgacaacgaggagtttatcgagcgggaacgtgaagcgctaataaagatgtcaccatttgaagtagattcttatatgagagccaaagaatttcagatagtgtcgccacctgctgtccaagagtttggtacgtaccttgactcaaaagatttgcagatgattaaagatagaggcatacagagctactatttcattcctagtattaatgacaatgtcgataaaagtggccattttttgccaagctttttagtacaagataaattagaggtagaatttaccagatggaataaaagttcttcagcagtgctcaactatccattaccatacaacaaaaaggatgctgtttattttgaagtaaaagtttacaatcataaacccaactccaattctatattcagtattggtttggtgactgttccttacccatatttcaggattcccggaatgtgtaaattttctattgcttatgagtcaactggtaagctaaggattaatgacccattctttcctagcaccttgctacctaaattagttgaaggagatgtagttggttttgggtataggttcaagacaggtactatattcattacgcacaatggtaagaaattgatggatgttacacaaaatgtcagtgttgagcttttcatagcactaggcgcaatgaatgcttcatatacccgaacgtacacaaaagatggcttactcgaggatccagacaacattgaactaagaaatgctctagcagaagggagggaactcaaactcagcaaagatattcaaaatcctcataacccaatggatgagacaaaatgggacataattgactcagatgagatcgagcttcatgtaaatttaggacaaacaggatttgttttcatagaagcaaatgtcaagaagtatggttttgggagtgttttcggggaaataggaatacctccagcttataatcccaatgatatacaaaaagacaaactgatacaaaaaggggaagaactacctccccaatatcctgaggatacagagaattttgggttatttggtaatctaaaaattaagagtcacataaaaaacccattgaaagaagttagtagtaatccttctgctccagaattaatccaaaaaaagctcaagacacctatcgtgaagactccaaaagtcggaatatatgaatttaccaccccaattgacagaaagagggaaacgaatatgcagccatcaataaaccctcctgtttatgaaattaacgatactagacaatcttctccggaaattacgaatgaaacgatatcaaatgaagaaacagtatcaagctcctctaaggcagagccggctttgcaacatgggcaatcaaataaaacaccaaataaacggcaaaataagaagacgaagcaaagaaaaaacaaaaagaaaggaaagaaaaataaataa

SEQ ID NO: 5049 - protein, 587 aa, Candida glabrata CBS 138
MPLIPDSIQSIGVFHVDDPFNPMPDPGDADPETVAFAFFIGIAVVFSLLLITLVCTAAYLVCTSSYEGEYDEELANNGDGSRRGILNFRPLFGKKNSNGLLLDSNFTNPGEFDDNEEFIEREREALIKMSPFEVDSYMRAKEFQIVSPPAVQEFGTYLDSKDLQMIKDRGIQSYYFIPSINDNVDKSGHFLPSFLVQDKLEVEFTRWNKSSSAVLNYPLPYNKKDAVYFEVKVYNHKPNSNSIFSIGLVTVPYPYFRIPGMCKFSIAYESTGKLRINDPFFPSTLLPKLVEGDVVGFGYRFKTGTIFITHNGKKLMDVTQNVSVELFIALGAMNASYTRTYTKDGLLEDPDNIELRNALAEGRELKLSKDIQNPHNPMDETKWDIIDSDEIELHVNLGQTGFVFIEANVKKYGFGSVFGEIGIPPAYNPNDIQKDKLIQKGEELPPQYPEDTENFGLFGNLKIKSHIKNPLKEVSSNPSAPELIQKKLKTPIVKTPKVGIYEFTTPIDRKRETNMQPSINPPVYEINDTRQSSPEITNETISNEETVSSSSKAEPALQHGQSNKTPNKRQNKKTKQRKNKKKGKKNK

SEQ ID NO: 5050 - DNA, 1629 bp, Kluyveromyces lactis NRRL Y-1140
  CDS (1)..(1629)
atgggactaatagttttgcaggatgggtttccgaatgatcgaccaatacagggatttccttctgatcctgtggtcagagtacccgatgatactataccagctgatgatgcattcagtttgatgtttttgatatcccttagcataacttttgggttattgttactggttttaatattgatttcgatatatttgacgttttgtgggggcaatgacggtgatgatagcgacgatgaggatgaagacgggacttctgtttcattcaagttctttaggaagcgtaatagcttactgctagatagcagttttatgacgccgggaaagtttgatgacgatgagagtttgaaggtgcgtgaggcaaaagagttgccgaagatgtcttcatttgaagttgaactgtatgaacgtaccaaagagtttcagaagatgagccctccgatggttaaaccgttgggttcatttttgaattctcaagataaacaggtgattaaggataggggtattcagtcttactttttcctaccgtcaataaacgataatgtggatatcaatggtgcatttttgcccagcttctttgtagaggataagttgaacgtctcctttaccaagtttaatatttcttctagtgcaataatgaactacccacttccgatgaacaagaaagacgccgtatattttgaagtgaaggtttacaagtttaaaacttgttctaattctatctttagcattggattgatgacatgcccttacccatatttccggatcccaggtacagcagcatactctatagcgtacgagtccactggtaagctaagaatcaataatgcgttcggagctgatactttgttgcctaagttggaagaaggcgatgttgttgggttcggatacagatatagttcgggaaccatatttataacgcataacggaaaaaagatgatggatgtaacgcataaagtcggtatagacttgttcgttggccttggtgccatgaacgcggcctacacacgcacatacacgaaggatggcctatttgaggaccccgataatgtgagttttagacaaaaatggtctgaattacaagcattcaacaatggagaatcgagttcagattacattgacgccagaaatgttataagtaaagatctattacaagttcatgatcccaaggaagacacagtaagctctgataatattgagttgcatgtaaacctggggcaactgggatttgtcttcatcgaagccaacgtcaagaaatacgcgtttggtagcgtttacggagatattggtattccacccgcctacaacggagacgatatcaaacaagatatgctattacaaaagggtgatgagctcccgccagagtatccagacgatgccgtggatttctttggtgacattcacagtcccgcttcaacttctgaaccaccgtccgccactttttcagcaggcctaccaatggataatgcggcggacacacctgtttcaacagcagatgcagatgcagatgcagatgcagatgcagatgaagaagaaccattgatatctgtgaagaagcccgctgcgcaaacgcattcgaagaagaacaataagaagaaaaagaagaagaagagcaatagaaatcggaggggttga

SEQ ID NO: 5051 - protein, 542 aa, Kluyveromyces lactis NRRL Y-1140
MGLIVLQDGFPNDRPIQGFPSDPVVRVPDDTIPADDAFSLMFLISLSITFGLLLLVLILISIYLTFCGGNDGDDSDDEDEDGTSVSFKFFRKRNSLLLDSSFMTPGKFDDDESLKVREAKELPKMSSFEVELYERTKEFQKMSPPMVKPLGSFLNSQDKQVIKDRGIQSYFFLPSINDNVDINGAFLPSFFVEDKLNVSFTKFNISSSAIMNYPLPMNKKDAVYFEVKVYKFKTCSNSIFSIGLMTCPYPYFRIPGTAAYSIAYESTGKLRINNAFGADTLLPKLEEGDVVGFGYRYSSGTIFITHNGKKMMDVTHKVGIDLFVGLGAMNAAYTRTYTKDGLFEDPDNVSFRQKWSELQAFNNGESSSDYIDARNVISKDLLQVHDPKEDTVSSDNIELHVNLGQLGFVFIEANVKKYAFGSVYGDIGIPPAYNGDDIKQDMLLQKGDELPPEYPDDAVDFFGDIHSPASTSEPPSATFSAGLPMDNAADTPVSTADADADADADADEEEPLISVKKPAAQTHSKKNNKKKKKKKSNRNRRG

SEQ ID NO: 5052 - DNA, 1740 bp, Saccharomyces cerevisiae (strain RM11-1a)
  CDS (1)..(1740)
atgtatgtcacttttaatgaggctttggatagttcttttggtaatctagagagtccgaatcatgacttcaaagtaggtgaccctaacatggtaccaactccccctatggattcagattctgcagcaattagtttggctttcttaataagtctttctattacgtttgcaatattaatgctcatcttggtagtaatagcggcatatgttaccttttgtggtgatgatgaatcagaatacgacgaagagaacgccttaggtacacgaacttcaggaactctgcactctttgtttggtaaaaaacatagtggcatcttgttggattcgagttttgcatcccctggcgggtttgatgatgagatcgttcttcaggaaagagaacttgaagaattaccaaagatgtcagcgtacgaggttgagttgtatataagagcgaaagagtttcaaatgatgagcccgccaatggtgaaggactttggcacgtatttggatagtgacgaccagcagtttattaaggatcgtggcattcaaagctattttttgctaccaagcattaatgataatatagacgaatatggaaactttctacccagttttattgtccaggataaactagatattcaattttcaaagttcaataagagctcatccactgtaatgaactatcccctacctcacaataggaaggacgcagtgtatttcgaagttaaaattttcagacatattcaaaagtccaatagtatattcagtataggtttgactactgtaccatatccttatttcagggtaccgggcatggccaaatactccattgcatacgaatccacaggtaaactgaggataaataatcccttcactgccagcacattattaccaaaattagaagacggtgacacggtaggattcggttacagatataaaacaggtacaatcttcattacacataatgggaaaaaattaatggatgtaacacaaaatattggcattgatcttttcattggaattggcgcgtttaatgccgcatatacaagaacatatacgagggatggtctattggaagacccggataatgttagcttccgtgaagctctctctgaaggcaaagatattgaagtcgccaaagatcttcaaagagttcacgatccacatgatgaaagtgatgaaatgacgtcagatgaggttgaattacatgttaatttgggccaagttgggttcgtctttatagaagccaatgtgaaaaaatatgcgtttgggagtgtttatggccaaattggaattcctcctgcgtataatggaaccgagatcaagaaggatactattttacagaaaggagaagaattgccaccaagatatgctgacaccgataatttctttggtagtatgaaggtaaaagaagggtcatcctctagaataacggcgcaaactagtaagcccctgtggtctgttgggacgtatgaaagaatctcttctaactttgacagagaaaataatgtttaccacgacagtcttgaaaccgacgataacaacaccgataacaatgttaataacaacgatgagaacgctggttgcaatgaaaattcgccgttattggaagatgatagcaataaaagaccggaaaattcaaataccccccgtgaagtatcagatggagctatcaataagaaccctagaaataaatctactaaaaaacgtcaaagaaacagaggcaaatcttctaaaaagaagaacagatcgagaaaataa

SEQ ID NO: 5053 - protein, 579 aa, Saccharomyces cerevisiae (strain RM11-1a)
MYVTFNEALDSSFGNLESPNHDFKVGDPNMVPTPPMDSDSAAISLAFLISLSITFAILMLILVVIAAYVTFCGDDESEYDEENALGTRTSGTLHSLFGKKHSGILLDSSFASPGGFDDEIVLQERELEELPKMSAYEVELYIRAKEFQMMSPPMVKDFGTYLDSDDQQFIKDRGIQSYFLLPSINDNIDEYGNFLPSFIVQDKLDIQFSKFNKSSSTVMNYPLPHNRKDAVYFEVKIFRHIQKSNSIFSIGLTTVPYPYFRVPGMAKYSIAYESTGKLRINNPFTASTLLPKLEDGDTVGFGYRYKTGTIFITHNGKKLMDVTQNIGIDLFIGIGAFNAAYTRTYTRDGLLEDPDNVSFREALSEGKDIEVAKDLQRVHDPHDESDEMTSDEVELHVNLGQVGFVFIEANVKKYAFGSVYGQIGIPPAYNGTEIKKDTILQKGEELPPRYADTDNFFGSMKVKEGSSSRITAQTSKPLWSVGTYERISSNFDRENNVYHDSLETDDNNTDNNVNNNDENAGCNENSPLLEDDSNKRPENSNTPREVSDGAINKNPRNKSTKKRQRNRGKSSKKKNRSRK

SEQ ID NO: 5054 - DNA, 1740 bp, Saccharomyces cerevisiae (strain AWRI1631)
  CDS (1)..(1740)
atgtatgtcacttttaatgaggctttggatagttcttttggtaatctagagagtccgaatcatgacttcaaagtaggtgaccctaacatggtaccaactccccctatggattcagattctgcagcaattagtttggctttcttaataagtctttctattacgtttgcaatattaatgctcatcttggtagtaatagcggcatatgttaccttttgtggtgatgatgaatcagaatacgacgaagagaacgccttaggtacacgaacttcaggaactctgcactctttgtttggtaaaaaacatagtggcatcttgttggattcgagttttgcatcccctggcgggtttgatgatgagatcgttcttcaggaaagagaacttgaagaattaccaaagatgtcagcgtacgaggttgagttgtatataagagcgaaagagtttcaaatgatgagcccgccaatggtgaaggactttggcacgtatttggatagtgacgaccagcagtttattaaggatcgtggcattcaaagctattttttgctaccaagcattaatgataatatagacgaatatggaaactttctacccagttttattgtccaggataaactagatattcaattttcaaagttcaataagagctcatccactgtaatgaactatcccctacctcacaataggaaggacgcagtgtatttcgaagttaaaattttcagacatattcaaaagtccaatagtatattcagtataggtttgactactgtaccatatccttatttcagggtaccgggcatggccaaatactccattgcatacgaatccacaggtaaactgaggataaataatcccttcactgccagcacattattaccaaaattagaagaaggtgacacggtaggattcggttacagatataaaacaggtacaatcttcattacacataatgggaaaaaattaatggatgtaacacaaaatattggcattgatcttttcattggaattggcgcgtttaatgccgcatatacaagaacatatacgagggatggtctattggaagacccggataatgttagcttccgtgaagctctctctgaaggcaaagatattgaagtcgccaaagatcttcaaagagttcacgatccacatgatgaaagtgatgaaatgacgtcagatgaggttgaattacatgttaatttgggccaagttgggttcgtctttatagaagccaatgtgaaaaaatatgcgtttgggagtgtttatggccaaattggaattcctcctgcgtataatggaaccgagatcaagaaggatactattttacagaaaggagaagaattgccaccaagatatgctgacaccgataatttctttggtagtatgaaggtaaaagaagggtcatcctctagaataacggcgcaaactagtaagcccctgtggtctgttgggacgtatgaaagaatctcttctaactttgacagagaaaataatgtttaccacgacagtcttgaaaccgacgataacaacaccgataacaatgttaataacaacgatgagaacgctggttgcaatgaaaattcgccgttattggaagatgatagcaataaaagaccggaaaattcaaataccccccgtgaagtatcagatggagctatcaataagaaccctagaaataaatctactaaaaaacgtcaaagaaacagaggcaaatcttctaaaaagaagaacagatcgagaaaataa

SEQ ID NO: 5055 - protein, 579 aa, Saccharomyces cerevisiae (strain AWRI1631)
MYVTFNEALDSSFGNLESPNHDFKVGDPNMVPTPPMDSDSAAISLAFLISLSITFAILMLILVVIAAYVTFCGDDESEYDEENALGTRTSGTLHSLFGKKHSGILLDSSFASPGGFDDEIVLQERELEELPKMSAYEVELYIRAKEFQMMSPPMVKDFGTYLDSDDQQFIKDRGIQSYFLLPSINDNIDEYGNFLPSFIVQDKLDIQFSKFNKSSSTVMNYPLPHNRKDAVYFEVKIFRHIQKSNSIFSIGLTTVPYPYFRVPGMAKYSIAYESTGKLRINNPFTASTLLPKLEEGDTVGFGYRYKTGTIFITHNGKKLMDVTQNIGIDLFIGIGAFNAAYTRTYTRDGLLEDPDNVSFREALSEGKDIEVAKDLQRVHDPHDESDEMTSDEVELHVNLGQVGFVFIEANVKKYAFGSVYGQIGIPPAYNGTEIKKDTILQKGEELPPRYADTDNFFGSMKVKEGSSSRITAQTSKPLWSVGTYERISSNFDRENNVYHDSLETDDNNTDNNVNNNDENAGCNENSPLLEDDSNKRPENSNTPREVSDGAINKNPRNKSTKKRQRNRGKSSKKKNRSRK

SEQ ID NO: 5056 - DNA, 1740 bp, Saccharomyces cerevisiae (strain YJM789)
  CDS (1)..(1740)
atgtatgtcacttttaatgaggctttggatagttcttttggtaatctagagagtccgaatcatgacttcaaagtaggtgaccctaacatggtaccaactccccctatggattcagattctgcagcaattagtttggctttcttaataagtctttctattacgtttgcaatattaatgctcatcttggtagtaatagcggcatatgttaccttttgtggtgatgatgaatcagaatacgacgaagagaacgccttaggtacacgaacttcaggaactctgcactctttgtttggtaaaaaacatagtggcatcttgttggattcgagttttgcatcccctggcgggtttgatgatgagatcgttcttcaggaaagagaacttgaagaattaccaaagatgtcagcgtatgaggttgagttgtatataagagcgaaagagtttcaaatgatgagcccgccaatggtgaaggactttggcacgtatttggacagtgacgaccagcagtttattaaggatcgtggcattcaaagctattttttgctaccaagcattaatgataatatagacgaatatggaaactttctacccagttttattgtccaggataaactagatattcaattttcaaagttcaataagagctcatccactgtaatgaactatcccctacctcacaataggaaggacgcagtgtatttcgaagttaaaattttcagacatattcaaaagtccaatagtatattcagtataggtttgactactgtaccatatccttatttcagggtaccgggcatggccaaatactccattgcatatgaatccacaggtaaactgaggataaataaccccttcactgccagcacattattaccaaaattggaagaaggtgacacggtaggattcggttacagatataaaacaggtacaatcttcattacacataatgggaaaaaattaatggatgtaacacaaaatattggcattgatcttttcattggaattggcgcgtttaatgccgcatatacaagaacatatacgagggatggtctattggaagacccggataatgttagcttccgtgaagctctctctgaaggcaaagatattgaagtcgccaaagatcttcaaagagttcacgatccacatgatgacagtgatgaaatgacgtcagatgaggttgaattacatgttaatttgggccaagttgggttcgtctttatagaagccaatgtgaaaaaatatgcgtttggcagtgtttatggccaaattggaattcctcctgcgtataatggaaccgagatcaagaaggatactattttacagaaaggggaagaattgccaccaagatatgctgacactgataatttctttggtagtatgaaggtaaaagaagggtcatcctctagaataacggcgcaaactagtaagcccctgtggtctgttgggacgtatgaaagaatctcttctaactttgacagagaaaataatgtttaccacgacagtcttgaaaccgacgataacaacaccgataacaatgttaataacaacgatgagaacgctggttgcaatgaaaattcgccattattggaagatgatggcaataaaagaccggaaaattcaaataccccccgtgaagtatcagatggagctatcaataagaaccctagaaataaatctactaaaaaacgtcaaagaaacagaggcaaatcttctaaaaagaagaacagatcgagaaaataa

SEQ ID NO: 5057 - protein, 579 aa, Saccharomyces cerevisiae (strain YJM789)
MYVTFNEALDSSFGNLESPNHDFKVGDPNMVPTPPMDSDSAAISLAFLISLSITFAILMLILVVIAAYVTFCGDDESEYDEENALGTRTSGTLHSLFGKKHSGILLDSSFASPGGFDDEIVLQERELEELPKMSAYEVELYIRAKEFQMMSPPMVKDFGTYLDSDDQQFIKDRGIQSYFLLPSINDNIDEYGNFLPSFIVQDKLDIQFSKFNKSSSTVMNYPLPHNRKDAVYFEVKIFRHIQKSNSIFSIGLTTVPYPYFRVPGMAKYSIAYESTGKLRINNPFTASTLLPKLEEGDTVGFGYRYKTGTIFITHNGKKLMDVTQNIGIDLFIGIGAFNAAYTRTYTRDGLLEDPDNVSFREALSEGKDIEVAKDLQRVHDPHDDSDEMTSDEVELHVNLGQVGFVFIEANVKKYAFGSVYGQIGIPPAYNGTEIKKDTILQKGEELPPRYADTDNFFGSMKVKEGSSSRITAQTSKPLWSVGTYERISSNFDRENNVYHDSLETDDNNTDNNVNNNDENAGCNENSPLLEDDGNKRPENSNTPREVSDGAINKNPRNKSTKKRQRNRGKSSKKKNRSRK

SEQ ID NO: 5058 - DNA, 26 bp, Artificial sequence
  primer
atgtatgtcacttttaatgaggcttt

SEQ ID NO: 5059 - DNA, 27 bp, Artificial sequence
  primer
ttattttctcgatctgttcttcttttt

SEQ ID NO: 5060 - protein, 449 aa, Artificial sequence
  consensus sequence
  Variant (2)..(7): Xaa in position 2 to 7 is any amino acid
  Variant (8)..(8): Xaa in position 8 is any or no amino acid
  Variant (10)..(10): Xaa in position 10 is any amino acid
  Variant (12)..(16): Xaa in position 12 to 16 is any amino acid
  Variant (18)..(19): Xaa in position 18 to 19 is any amino acid
  Variant (21)..(23): Xaa in position 21 to 23 is any amino acid
  Variant (25)..(25): Xaa in position 25 is any amino acid
  Variant (26)..(27): Xaa in position 26 to 27 is any or no amino acid
  Variant (29)..(29): Xaa in position 29 is any amino acid
  Variant (31)..(32): Xaa in position 31 to 32 is any amino acid
  Variant (35)..(38): Xaa in position 35 to 38 is any amino acid
  Variant (39)..(42): Xaa in position 39 to 42 is any or no amino acid
  Variant (44)..(56): Xaa in position 44 to 56 is any amino acid
  Variant (57)..(62): Xaa in position 57 to 62 is any or no amino acid
  Variant (64)..(64): Xaa in position 64 is any amino acid
  Variant (65)..(65): Xaa in position 65 is any or no amino acid
  Variant (67)..(70): Xaa in position 67 to 70 is any amino acid
  Variant (71)..(71): Xaa in position 71 is any or no amino acid
  Variant (76)..(76): Xaa in position 76 is any amino acid
  Variant (78)..(79): Xaa in position 78 to 79 is any amino acid
  Variant (82)..(82): Xaa in position 82 is any amino acid
  Variant (86)..(88): Xaa in position 86 to 88 is any amino acid
  Variant (90)..(90): Xaa in position 90 is any amino acid
  Variant (92)..(92): Xaa in position 92 is any amino acid
  Variant (94)..(95): Xaa in position 94 to 95 is any amino acid
  Variant (102)..(103): Xaa in position 102 to 103 is any amino acid
  Variant (109)..(109): Xaa in position 109 is any amino acid
  Variant (111)..(111): Xaa in position 111 is any amino acid
  Variant (116)..(118): Xaa in position 116 to 118 is any amino acid
  Variant (121)..(121): Xaa in position 121 is any amino acid
  Variant (124)..(124): Xaa in position 124 is any amino acid
  Variant (130)..(132): Xaa in position 130 to 132 is any amino acid
  Variant (134)..(134): Xaa in position 134 is any amino acid
  Variant (136)..(136): Xaa in position 136 is any amino acid
  Variant (146)..(148): Xaa in position 146 to 148 is any amino acid
  Variant (155)..(155): Xaa in position 155 is any amino acid
  Variant (157)..(158): Xaa in position 157 to 158 is any amino acid
  Variant (160)..(160): Xaa in position 160 is any amino acid
  Variant (166)..(166): Xaa in position 166 is any amino acid
  Variant (172)..(174): Xaa in position 172 to 174 is any amino acid
  Variant (176)..(178): Xaa in position 176 to 178 is any amino acid
  Variant (184)..(186): Xaa in position 184 to 186 is any amino acid
  Variant (192)..(192): Xaa in position 192 is any amino acid
  Variant (194)..(194): Xaa in position 194 is any amino acid
  Variant (204)..(210): Xaa in position 204 to 210 is any amino acid
  Variant (211)..(212): Xaa in position 211 to 212 is any or no amino acid
  Variant (222)..(222): Xaa in position 222 is any amino acid
  Variant (224)..(224): Xaa in position 224 is any amino acid
  Variant (231)..(231): Xaa in position 231 is any amino acid
  Variant (235)..(236): Xaa in position 235 to 236 is any amino acid
  Variant (252)..(252): Xaa in position 252 is any amino acid
  Variant (254)..(254): Xaa in position 254 is any amino acid
  Variant (263)..(263): Xaa in position 263 is any amino acid
  Variant (267)..(267): Xaa in position 267 is any amino acid
  Variant (275)..(276): Xaa in position 275 to 276 is any amino acid
  Variant (279)..(279): Xaa in position 279 is any amino acid
  Variant (288)..(288): Xaa in position 288 is any amino acid
  Variant (293)..(293): Xaa in position 293 is any amino acid
  Variant (295)..(295): Xaa in position 295 is any amino acid
  Variant (297)..(297): Xaa in position 297 is any amino acid
  Variant (301)..(301): Xaa in position 301 is any amino acid
  Variant (303)..(303): Xaa in position 303 is any amino acid
  Variant (306)..(306): Xaa in position 306 is any amino acid
  Variant (309)..(309): Xaa in position 309 is any amino acid
  Variant (316)..(316): Xaa in position 316 is any amino acid
  Variant (327)..(328): Xaa in position 327 to 328 is any amino acid
  Variant (330)..(347): Xaa in position 330 to 347 is any amino acid
  Variant (348)..(361): Xaa in position 348 to 361 is any or no amino acid
  Variant (365)..(370): Xaa in position 365 to 370 is any amino acid
  Variant (371)..(374): Xaa in position 371 to 374 is any or no amino acid
  Variant (378)..(378): Xaa in position 378 is any amino acid
  Variant (381)..(381): Xaa in position 381 is any amino acid
  Variant (387)..(387): Xaa in position 387 is any amino acid
  Variant (400)..(400): Xaa in position 400 is any amino acid
  Variant (405)..(405): Xaa in position 405 is any amino acid
  Variant (407)..(407): Xaa in position 407 is any amino acid
  Variant (417)..(418): Xaa in position 417 to 418 is any amino acid
  Variant (421)..(421): Xaa in position 421 is any amino acid
  Variant (423)..(425): Xaa in position 423 to 425 is any amino acid
  Variant (429)..(429): Xaa in position 429 is any amino acid
  Variant (434)..(434): Xaa in position 434 is any amino acid
  Variant (436)..(436): Xaa in position 436 is any amino acid
  Variant (437)..(440): Xaa in position 437 to 440 is any or no amino acid
  Variant (442)..(444): Xaa in position 442 to 444 is any amino acid
  Variant (446)..(447): Xaa in position 446 to 447 is any amino acid
DXXXXXXXFXIXXXXXFXXLXXXLXXXAXYXXFCXXXXXXXXEXXXXXXXXXXXXXXXXXXXFXXKXXXXXLLDSXFXXPGXFDDXXXLXEXEXXELPKMSXXEVELYXRXKEFQXXXPPXVKXFGTYLXXXDXQXIKDRGIQSYXXXPSINDNXDXXGXFLPSFXVQDKLXXXFXXXNKSSSXXXNYPLPXNXKDAVYFEVKXXXXXXXXXSNSIFSIGLXTXPYPYFRXPGMXXYSIAYESTGKLRINNXFXASTLLPKLXEGDXVGFGYRYXXGTXFITHNGKKXMDVTXNXGXDLFXGXGAXNAXYTRTYTXDGLLEDPDNVXXRXXXXXXXXXXXXXXXXXXXXXXXXXXXXXXXXHDPXXXXXXXXXXSDEXELXVNLGQXGFVFIEANVKKYXFGSVXGXIGIPPAYNGXXIKXDXXXQKGXELPPXYXXXXXDXXXFXXFG

SEQ ID NO: 5061 - protein, 51 aa, Artificial sequence
  protein pattern
  Variant (3)..(3): Xaa in position 3 is Ala, Cys or Ser
  Variant (4)..(4): Xaa in position 4 is any amino acid
  Variant (5)..(5): Xaa in position 5 is Phe or Tyr
  Variant (19)..(19): Xaa in position 19 is Asp or Asn
  Variant (20)..(20): Xaa in position 20 is Pro or Ser
  Variant (22)..(22): Xaa in position 22 is any amino acid
  Variant (23)..(23): Xaa in position 23 is Ala or Pro
  Variant (29)..(29): Xaa in position 29 is Lys or Arg
  Variant (31)..(31): Xaa in position 31 is any amino acid
  Variant (32)..(32): Xaa in position 32 is Asp or Glu
  Variant (35)..(35): Xaa in position 35 is Thr or Val
  Variant (38)..(38): Xaa in position 38 is Phe or Leu
  Variant (42)..(42): Xaa in position 42 is Phe or Tyr
  Variant (43)..(43): Xaa in position 43 is Lys or Arg
  Variant (44)..(44): Xaa in position 44 is any amino acid
  Variant (47)..(47): Xaa in position 47 is Ile or Val
GMXXXSIAYESTGKLRINXXFXXSTLLPXLXXGDXVGXGYRXXXGTXFITH

SEQ ID NO: 5062 - protein, 59 aa, Artificial sequence
  protein pattern
  Variant (2)..(2): Xaa in position 2 is any amino acid
  Variant (5)..(5): Xaa in position 5 is any amino acid
  Variant (10)..(10): Xaa in position 10 is Gly or Gln
  Variant (11)..(11): Xaa in position 11 is Thr or Val
  Variant (16)..(16): Xaa in position 16 is Ile or Val
  Variant (24)..(24): Xaa in position 24 is Ala or Gly
  Variant (28)..(28): Xaa in position 28 is Leu or Val
  Variant (29)..(29): Xaa in position 29 is any amino acid
  Variant (31)..(31): Xaa in position 31 is Glu or Gln
  Variant (40)..(40): Xaa in position 40 is Gly or Pro
  Variant (41)..(41): Xaa in position 41 is Asp, Asn or Thr
  Variant (42)..(42): Xaa in position 42 is Asp or Glu
  Variant (43)..(45): Xaa in position 43 to 45 is any amino acid
  Variant (46)..(46): Xaa in position 46 is Asp or Asn
  Variant (47)..(47): Xaa in position 47 is any amino acid
  Variant (48)..(49): Xaa in position 48 to 49 is Ile or Leu
  Variant (53)..(54): Xaa in position 53 to 54 is Asp or Glu
  Variant (55)..(55): Xaa in position 55 is Leu or Met
  Variant (58)..(58): Xaa in position 58 is any amino acid
EXELXVNLGXXGFVFXEANVKKYXFGSXXGXIGIPPAYNXXXXXXXXXXQKGXXXPPXY

SEQ ID NO: 5063 - protein, 61 aa, Artificial sequence
  protein pattern
  Variant (7)..(7): Xaa in position 7 is any or no amino acid
  Variant (9)..(9): Xaa in position 9 is any amino acid
  Variant (10)..(10): Xaa in position 10 is any or no amino acid
  Variant (17)..(17): Xaa in position 17 is Ile or Val
  Variant (19)..(20): Xaa in position 19 to 20 is any amino acid
  Variant (22)..(22): Xaa in position 22 is any amino acid
  Variant (28)..(28): Xaa in position 28 is Phe, Ile or Leu
  Variant (30)..(30): Xaa in position 30 is Glu or Gln
  Variant (34)..(34): Xaa in position 34 is Asp, Glu or Asn
  Variant (35)..(35): Xaa in position 35 is Ile or Val
  Variant (36)..(36): Xaa in position 36 is Glu, Gln, Ser or Thr
  Variant (38)..(38): Xaa in position 38 is Ser or Thr
  Variant (39)..(39): Xaa in position 39 is Glu, Lys or Arg
  Variant (40)..(40): Xaa in position 40 is Phe, Trp or Tyr
  Variant (42)..(42): Xaa in position 42 is any amino acid
  Variant (46)..(46): Xaa in position 46 is Ala or Thr
  Variant (47)..(47): Xaa in position 47 is Ile, Leu or Val
  Variant (48)..(48): Xaa in position 48 is Leu or Met
  Variant (54)..(54): Xaa in position 54 is any amino acid
  Variant (56)..(56): Xaa in position 56 is Lys or Arg
  Variant (58)..(58): Xaa in position 58 is Asp or Glu
RGIQSYXFXXPSINDNXDXXGXFLPSFXVXDKLXXXFXXXNXSSSXXXNYPLPXNXKXAVY

SEQ ID NO: 5064 - protein, 59 aa, Artificial sequence
  protein pattern
  Variant (4)..(4): Xaa in position 4 is Leu or Met
  Variant (9)..(10): Xaa in position 9 to 10 is any amino acid
  Variant (11)..(11): Xaa in position 11 is Ile or Val
  Variant (12)..(12): Xaa in position 12 is Gly or Ser
  Variant (13)..(13): Xaa in position 13 is Ile or Val
  Variant (14)..(14): Xaa in position 14 is Asp or Glu
  Variant (17)..(17): Xaa in position 17 is Ile or Val
  Variant (18)..(18): Xaa in position 18 is Ala or Gly
  Variant (19)..(19): Xaa in position 19 is Ile or Leu
  Variant (22)..(22): Xaa in position 22 is Phe, Leu or Met
  Variant (25)..(25): Xaa in position 25 is Ala or Ser
  Variant (32)..(32): Xaa in position 32 is Lys or Arg
  Variant (36)..(36): Xaa in position 36 is Phe or Leu
  Variant (42)..(42): Xaa in position 42 is Ile or Val
  Variant (43)..(43): Xaa in position 43 is Asp, Glu or Ser
  Variant (44)..(44): Xaa in position 44 is Phe, Ile or Leu
  Variant (46)..(46): Xaa in position 46 is Glu, Asn or Gln
  Variant (47)..(48): Xaa in position 47 to 48 is any amino acid
  Variant (49)..(49): Xaa in position 49 is Ala or Ser
  Variant (50)..(50): Xaa in position 50 is Glu or Gln
  Variant (51)..(51): Xaa in position 51 is Gly or Leu
  Variant (52)..(52): Xaa in position 52 is any amino acid
  Variant (53)..(53): Xaa in position 53 is Ala, Asp or Glu
  Variant (54)..(54): Xaa in position 54 is Phe, Ile, Leu or Val
  Variant (55)..(56): Xaa in position 55 to 56 is any amino acid
  Variant (57)..(57): Xaa in position 57 is Ala, Gly, Pro or Ser
  Variant (58)..(58): Xaa in position 58 is Asp, Glu or Lys
  Variant (59)..(59): Xaa in position 59 is Ala, Asp or Ser
GKKXMDVTXXXXXXLFXXXGAXNAXYTRTYTXDGLXEDPDNXXXRXXXXXXXXXXXXXX

SEQ ID NO: 5065 - protein, 60 aa, Artificial sequence
  protein pattern
  Variant (3)..(3): Xaa in position 3 is any amino acid
  Variant (7)..(7): Xaa in position 7 is Asp, Glu or Asn
  Variant (8)..(9): Xaa in position 8 to 9 is any amino acid
  Variant (10)..(10): Xaa in position 10 is Phe or Leu
  Variant (11)..(12): Xaa in position 11 to 12 is any amino acid
  Variant (13)..(13): Xaa in position 13 is Gln or Arg
  Variant (15)..(16): Xaa in position 15 to 16 is any amino acid
  Variant (17)..(17): Xaa in position 17 is Ala or Glu
  Variant (19)..(19): Xaa in position 19 is Ile or Pro
  Variant (23)..(23): Xaa in position 23 is any amino acid
  Variant (24)..(24): Xaa in position 24 is Phe or Tyr
  Variant (26)..(26): Xaa in position 26 is Ile or Val
  Variant (27)..(27): Xaa in position 27 is Asp or Glu
  Variant (28)..(28): Xaa in position 28 is any amino acid
  Variant (30)..(30): Xaa in position 30 is any amino acid
  Variant (32)..(32): Xaa in position 32 is Ala, Ser or Thr
  Variant (33)..(33): Xaa in position 33 is Lys or Arg
  Variant (37)..(37): Xaa in position 37 is any amino acid
  Variant (38)..(38): Xaa in position 38 is Leu, Met or Val
  Variant (39)..(39): Xaa in position 39 is Asn or Ser
  Variant (42)..(42): Xaa in position 42 is any amino acid
  Variant (44)..(44): Xaa in position 44 is any amino acid
  Variant (45)..(45): Xaa in position 45 is Asp, Glu or Pro
  Variant (46)..(46): Xaa in position 46 is Phe or Leu
  Variant (48)..(48): Xaa in position 48 is Ser or Thr
  Variant (49)..(49): Xaa in position 49 is Phe or Tyr
  Variant (51)..(51): Xaa in position 51 is Asp or Asn
  Variant (52)..(52): Xaa in position 52 is Ser or Thr
  Variant (53)..(53): Xaa in position 53 is any amino acid
  Variant (55)..(55): Xaa in position 55 is any amino acid
  Variant (57)..(57): Xaa in position 57 is Phe, Met or Val
PGXFDDXXXXXXXEXXXLXKMSXXEXXXYXRXXEFQXXXPPXVXXXGXXLXXXDXQXIKD

SEQ ID NO: 5066 - protein, 36 aa, Artificial sequence
  protein pattern
  Variant (2)..(2): Xaa in position 2 is Gly or Ser
  Variant (3)..(3): Xaa in position 3 is Ile or Leu
  Variant (4)..(4): Xaa in position 4 is Ala or Ser
  Variant (5)..(5): Xaa in position 5 is Ile or Val
  Variant (6)..(6): Xaa in position 6 is Thr or Val
  Variant (8)..(8): Xaa in position 8 is Ala, Gly or Ser
  Variant (9)..(9): Xaa in position 9 is Ile or Leu
  Variant (11)..(11): Xaa in position 11 is Leu or Met
  Variant (12)..(12): Xaa in position 12 is Ile or Leu
  Variant (13)..(13): Xaa in position 13 is any amino acid
  Variant (15)..(15): Xaa in position 15 is Ile or Val
  Variant (16)..(17): Xaa in position 16 to 17 is any amino acid
  Variant (18)..(18): Xaa in position 18 is Ala or Ser
  Variant (19)..(19): Xaa in position 19 is Ala or Ile
  Variant (21)..(22): Xaa in position 21 to 22 is any amino acid
  Variant (23)..(23): Xaa in position 23 is any or no amino acid
  Variant (25)..(31): Xaa in position 25 to 31 is any amino acid
  Variant (32)..(32): Xaa in position 32 is any or no amino acid
  Variant (34)..(34): Xaa in position 34 is any or no amino acid
  Variant (36)..(36): Xaa in position 36 is Asp, Glu, Asn or Thr
IXXXXXFXXLXXXLXXXXXYXXXCXXXXXXXXDXEX

SEQ ID NO: 5067 - protein, 19 aa, Artificial sequence
  protein pattern
  Variant (2)..(2): Xaa in position 2 is Ile or Val
  Variant (3)..(3): Xaa in position 3 is Phe or Tyr
  Variant (4)..(4): Xaa in position 4 is any amino acid
  Variant (5)..(5): Xaa in position 5 is Phe or His
  Variant (6)..(6): Xaa in position 6 is any amino acid
  Variant (7)..(7): Xaa in position 7 is Pro, Gln or Thr
  Variant (8)..(8): Xaa in position 8 is any amino acid
  Variant (11)..(11): Xaa in position 11 is Ser or Thr
  Variant (18)..(18): Xaa in position 18 is any or no amino acid
KXXXXXXXSNXIFSIGLXT

SEQ ID NO: 5068 - protein, 12 aa, Artificial sequence
  protein pattern
  Variant (2)..(2): Xaa in position 2 is any amino acid
  Variant (3)..(4): Xaa in position 3 to 4 is Gly, Asn or Ser
  Variant (5)..(5): Xaa in position 5 is Gly, Ile or Leu
  Variant (8)..(8): Xaa in position 8 is any or no amino acid
  Variant (11)..(11): Xaa in position 11 is Asn, Ser or Thr
KXXXXLLXDSXF

SEQ ID NO: 5069 - DNA, 663 bp, Saccharomyces cerevisiae
  CDS (1)..(663)
atggataaacatacagcagctattccaacattaactatcaaagtagtcttactcggagaatctgctgtcgggaagtcctcaatagtcctcaggtttgtatctgacgattttaaagagagcaaagaacctactattggtgccgcatttttaacaaagagaattacaagggatggcaaggtcattaaatttgaaatatgggatacggcaggccaggagagatttgctcctttagcgcctatgtactacagaaatgctcaagctgctttggtagtttttgatgttactaatgaagggtctttttataaggctcaaaactgggtcgaagaactacacgagaaggtaggacatgatatcgttattgccttggtggggaacaaaatggatttgctgaataatgatgacgagaatgaaaatagggctatgaaagcaccagctgtacaaaatctctgtgaaagagagaacctcttatatttcgaagcaagcgctaagactggtgagaatatttaccagatatttcaaacattaggcgaaaaagtaccatgtcctgaacaaaatacacgacaaagctctactcatgatcgcacaattaccgataatcaacgaatcgatctcgaatcaacgactgtagaaagtactagggagactgggggttgtaactgctaa

SEQ ID NO: 5070 - protein, 220 aa, Saccharomyces cerevisiae
MDKHTAAIPTLTIKVVLLGESAVGKSSIVLRFVSDDFKESKEPTIGAAFLTKRITRDGKVIKFEIWDTAGQERFAPLAPMYYRNAQAALVVFDVTNEGSFYKAQNWVEELHEKVGHDIVIALVGNKMDLLNNDDENENRAMKAPAVQNLCERENLLYFEASAKTGENIYQIFQTLGEKVPCPEQNTRQSSTHDRTITDNQRIDLESTTVESTRETGGCNC

SEQ ID NO: 5071 - DNA, 909 bp, Glycine max
  CDS (176)..(775)
acgacgacacacagagccttggaccggaccaacaaacgaactgtacccgcgactgcgagcgagcgagcgagcgaaccgaggaggacagcgcaaccgccggatcgatccgtcccctccccgccgatcgccaccgttacccggagacttcgctcgaacccggccgaaggcgtcggccatgggctgctcctcctccgtgccagctagaagcaccggagggctgaacaatatcaacggtagctcttctgctgctgattcaaatgacttgcgtgccaagttggtattgctcggagattctggtgttggaaaaagctgcatcgttcttcggtttgtccgcggtcagttcgatccaacttccaaggtaactgttggtgcatcatttttatcacaaacattggcgttggaggattcgacaatagtgaagtttgaaatctgggatactgctggacaagagagatatgctgccttggcacctctttactacagaggagctgctgctgcggttgttgtctatgacataactagtccagaatcattcaagaaagcacaatattgggtgaaggaacttcaaaaacatggtagtcctggtattgtcatggtattggttggtaataaagctgatctacatgaaagtcgaagtgtaccttctcaggaggcacaagagtatgcagagaagaacagcatgttattcatggagacgtcagcaaaaacatctgataatataaatcaagtatttgaggaaatcgcgaagaggttgcccaagccaacggcgtcctgataaataaatagctctcgtgtactatattgagatggagtgacacgcttacaagtctgtaccatgtaatgcatgtaaatgcccgaggttaaactgggcatttgattggaaattgaggataatgtaaagctagctta

SEQ ID NO: 5072 - protein, 199 aa, Glycine max
MGCSSSVPARSTGGLNNINGSSSAADSNDLRAKLVLLGDSGVGKSCIVLRFVRGQFDPTSKVTVGASFLSQTLALEDSTIVKFEIWDTAGQERYAALAPLYYRGAAAAVVVYDITSPESFKKAQYWVKELQKHGSPGIVMVLVGNKADLHESRSVPSQEAQEYAEKNSMLFMETSAKTSDNINQVFEEIAKRLPKPTAS

SEQ ID NO: 5073 - DNA, 1053 bp, Gossypium hirsutum
  CDS (224)..(826)
gtcgtttcttaagagagtttgctggggggttgaggaggatctttccctttgcttctaccctttggcttttacatccctcttctcactacttcccctttctttgtcaacgcaccaataaacctcaattctccatcttgtctttctttctttttttactccttagtttttattttcatttgtttactttttgaacataaatctgatcgtagaggatctcattctcatggccaccactggaaacaagaacatcaatgctaaattagttctacttggggatgttggagctggaaagtctagtcttgttttgcgcttcgttaaagggcaatttgttgaatttcaggaatcaaccataggtgcagctttcttctcccaaacattggctgtgaatgatgcaactgtgaagtttgagatttgggatacagctggtcaagagaggtaccatagcttggcaccaatgtattacagaggagctgcagctgctatcattgtgtatgatattacaaatcaagcatcatttgagagagccaaaaaatgggtccaagaacttcaagcacaaggcaatcctggtatggtaatggcacttgccgggaacaaagctgatttactggatgcaaggaaggtggcagcagaggaagcacaaacttatgctcaggagaatggtcttttcttcaaggaaacatctgcaaagaccgcatccaatgtcaatgagattttctacgaaatagccaaaagattacctcgagtgcagccagcacaaaatcctgctggaatggttctcatggatagacctgcagaacggagtgctagtgccacttgttgctcttaggcattggacggtttccttcctgtatcttctaagtagcttacgcaatacttctgcggtcgaagttttatcttccatactttgccatgtttatgtgctattcattatgggttgtacatggatgcttgttatctagacctgatgatatctaccagtcaattgtgttaatgattgattattcttgtatattaaagttcgataatggtattatgtttcacttccatggttac

SEQ ID NO: 5074 - protein, 200 aa, Gossypium hirsutum
MATTGNKNINAKLVLLGDVGAGKSSLVLRFVKGQFVEFQESTIGAAFFSQTLAVNDATVKFEIWDTAGQERYHSLAPMYYRGAAAAIIVYDITNQASFERAKKWVQELQAQGNPGMVMALAGNKADLLDARKVAAEEAQTYAQENGLFFKETSAKTASNVNEIFYEIAKRLPRVQPAQNPAGMVLMDRPAERSASATCCS

SEQ ID NO: 5075 - DNA, 890 bp, Gossypium hirsutum
  CDS (200)..(805)
aaaaggagtacggtgagtgcaaatcctaccagcctgccattaacgccttttagcaattaggaattgcccattgcccattcctgcactaaaatcaatcaaaaaaaaggaatcaaaattcaaaaccttgttcttttatccactgctttaaagctctaaatcaaattattacgtaggaacttatagcaatttatccctcttcatgggttgctcttcttctctcccagatcggagttccgggcggtccactggacttaacaacgcggacaatcctgaaggtcccgatgccaaaaatctacgcgtaaagctggtcttgttaggtgattctggagttggaaaaagttgtattgttcttcgctttgttcgtggccagtttgaccctacatctaaggtaactgtaggagcttcattcttgtcacagacaatagctttgcaagattcaactactgttaagtttgaaatatgggacactgctggacaagagaggtatgctgcattggcacctctctactacagaggagctggagttgcagttattgtgtatgatataactagtccagagtccttcaccaaagcacaatattgggttaaggagctacaaaagcatgggagcccaggtatattgatggccttggttggtaataaagccgaccttcaggaaaagcgcgaagtaccagtccaagatggcattgactatgcagagaagaatgggatgttctttattgagacatctgccaagactgcggacaatataaatcagttgtttgaggaaattgccaagcggctgccacgtccatcaccttcatgatcagaggatggtgataccgaatcaactactaggtatttttaatgttatgcattgggatttcaagtttgtgaatatcttattaatc

SEQ ID NO: 5076 - protein, 201 aa, Gossypium hirsutum
MGCSSSLPDRSSGRSTGLNNADNPEGPDAKNLRVKLVLLGDSGVGKSCIVLRFVRGQFDPTSKVTVGASFLSQTIALQDSTTVKFEIWDTAGQERYAALAPLYYRGAGVAVIVYDITSPESFTKAQYWVKELQKHGSPGILMALVGNKADLQEKREVPVQDGIDYAEKNGMFFIETSAKTADNINQLFEEIAKRLPRPSPS

SEQ ID NO: 5077 - DNA, 1105 bp, Glycine max
  CDS (232)..(834)
tacggctgcgagaagacgacagaaggggaaggaaacccaccgtaagcgataagcaatagaattcagagagagagagaaagagagtctcttgctctgtatctttgatttgatcattccaatcttcaatttttctatatatccatcaatccgctgagtgcaaagttctaatctttcgcctattgggttctactcctttctctcttcgtttccgatcgatccaattttcttcccatggctacgatcggacacaacaatctcaatgccaaattggttcttctcggggacatgggtgctgggaaatccagcctcgttttgcgctttgtcaagggtcaatttctcgaatttcaggaatcaacaataggggcagcgttcttttcacagacgctggcagtaaatgacgcgacggtaaagtttgagatatgggacacagcaggacaagagaggtaccatagcttggctcccatgtattacagaggtgctgctgctgctatcattgtctatgacatcactagctcggactcctttacccgagctaagaagtgggtccaagagcttcaaaagcaagggaatcctaatatggtcatggctcttgctggtaacaaagctgatttggaagataagaggaaagtgacagctgaagaagcacgtgtatatgctgaagaaaatggtttgtttttcatggagacctctgccaaaactgcatccaacgttaatgatatattctatgaaatagccaagaggttaccaagggctcagccagctcagaacccagctgggatggtacttgttgatagacccgccgaaggaactagggctgcatcatgttgttcataagtatttgaactgtatttgcactccccaaccctttttaattaatcatgttttctgtggtttgtatgtactacacactttgatatcactgttatgtggagctccaactgcaatttacaaaacacaacttgatctggtgcaaaatatatatcctttggacgtgtagtttgtgtcccatgatttgtttcattgtttgggtatacgaggtgaaaaagcattaatgttcagcttcattcgtatgcttctaaacaagattagtgattctttgcaaaaa

SEQ ID NO: 5078 - protein, 200 aa, Glycine max
MATIGHNNLNAKLVLLGDMGAGKSSLVLRFVKGQFLEFQESTIGAAFFSQTLAVNDATVKFEIWDTAGQERYHSLAPMYYRGAAAAIIVYDITSSDSFTRAKKWVQELQKQGNPNMVMALAGNKADLEDKRKVTAEEARVYAEENGLFFMETSAKTASNVNDIFYEIAKRLPRAQPAQNPAGMVLVDRPAEGTRAASCCS

SEQ ID NO: 5079 - DNA, 603 bp, Glycine max
  CDS (1)..(603)
atgggttgtggctcctcccttccagatagggattcaaggcagttgggtcgacccaattcagagaatggtggagggcaggacgccaagaatctaagggtcaagcttgttctcttaggtgattctggtgttggcaaaagctgtattgttctacgatttgttcgtggtcagtttgatccaacatctaaggtaactgttggagcttcttttttgtcacaaacaatagctctgcaagactctacaacagtcaagtttgaaatatgggatactgctggtcaagagaggtacgctgcgttagcaccactctattaccgtggtgcagcagttgcagttattgtttatgatataacaagcccagaatctttcagcaaagcacagtactgggttaaggagctacaaaaacatggaagccctgatatagtgatggcactggtcggtaataaagctgatcttctcgagaagcgggaagttgctgtccaggatggcactgactatgcagagaagaatgatatgtttttcatagagacatctgcaaagacagcagataatataaatgaactgtttgaggaaattgccaaaagattgcctcgcccatcagttagttga

SEQ ID NO: 5080 - protein, 200 aa, Glycine max
MGCGSSLPDRDSRQLGRPNSENGGGQDAKNLRVKLVLLGDSGVGKSCIVLRFVRGQFDPTSKVTVGASFLSQTIALQDSTTVKFEIWDTAGQERYAALAPLYYRGAAVAVIVYDITSPESFSKAQYWVKELQKHGSPDIVMALVGNKADLLEKREVAVQDGTDYAEKNDMFFIETSAKTADNINELFEEIAKRLPRPSVS

SEQ ID NO: 5081 - DNA, 603 bp, Glycine max
  CDS (1)..(603)
atgggttgcggctcctcccttccagataggggctcaaggcagttgggtcgacccaattcagagaatggtggagggcaggacgccaagaatctgagggtcaagcttgttctcttaggtgattctggtgttggtaaaagctgtattgttctacgatttgttcgtggtcagtttgatccaacatctaaggtaactgttggagcttcttttttgtcgcaaacaatagctctgcaagactctacaacagtcaagtttgaaatatgggatactgctggtcaagagaggtatgctgcgttagcaccgctatattaccgtggtgcagcagttgcagttattgtttatgatataacaagcccagaatctttcagcaaagcacagtactgggttaaggagctacaaaaacatggaagccctgatatagtgatggcactggtcggtaataaagctgatcttcttgagaagcgggaagttgctgtccaggatggcactgactatgcagagaagaatggtatgtttttcatagagacatctgcaaagacagcagataatataaatgaactgtttgaggaaattgccaaaagactgcctcgcccatcagttagttga

SEQ ID NO: 5082 - protein, 200 aa, Glycine max
MGCGSSLPDRGSRQLGRPNSENGGGQDAKNLRVKLVLLGDSGVGKSCIVLRFVRGQFDPTSKVTVGASFLSQTIALQDSTTVKFEIWDTAGQERYAALAPLYYRGAAVAVIVYDITSPESFSKAQYWVKELQKHGSPDIVMALVGNKADLLEKREVAVQDGTDYAEKNGMFFIETSAKTADNINELFEEIAKRLPRPSVS

SEQ ID NO: 5083 - DNA, 636 bp, Glycine max
  CDS (1)..(636)
atgagttcttcttctggtcagagcagtggctatgatctttccttcaagatcttgttgatcggtgactctgctgtgggaaaaagtagcctccttgttagcttcatctccaactctgctgaagatattgctcccacaattggtgttgattttaagatcaagatgctcacagtaggtgggaagagattgaaactaactatttgggacactgctgggcaggaaaggttcagaacgctaactagttcttactatagaggagcacagggaattattcttgtttatgatgtaacgagaagagacaccttcacaaacttatctttagtgtggtctaaagaagtggaactctattcaactaatcagaattgcgtgaagatgctagttggaaataaagttgatagagattctgaaagggttgtgagcaaagaagagggtttagcacttgccgaggagttgggatgtctgttttttgaatgtagtgccaaaactcgagaaaatgtggagcggtgcttcgaggaacttgcactaaagataatggaagttcctagtcttttggaagaaggatctacagcagttaaaaggaatattctaaagcaacaacaacaaccccaagcatccgaatttggtggttgttgctcttaa

SEQ ID NO: 5084 - protein, 211 aa, Glycine max
MSSSSGQSSGYDLSFKILLIGDSAVGKSSLLVSFISNSAEDIAPTIGVDFKIKMLTVGGKRLKLTIWDTAGQERFRTLTSSYYRGAQGIILVYDVTRRDTFTNLSLVWSKEVELYSTNQNCVKMLVGNKVDRDSERVVSKEEGLALAEELGCLFFECSAKTRENVERCFEELALKIMEVPSLLEEGSTAVKRNILKQQQQPQASEFGGCCS

SEQ ID NO: 5085 - DNA, 639 bp, Glycine max
  CDS (1)..(639)
atgaattcttcttctggtcagagcagtggctatgatctctccttcaagatcttgctgatcggtgactctgctgtgggaaaaagtagcctccttgttagcttcatctccaattctgctgaagatattgcccccacaattggtgttgattttaagatcaagatgctcactgtaggagggaagagattgaaactaactatttgggacactgctggacaggaaaggttcagaacgctaactagttcttactatagaggagcgcaaggaatcattcttgtttatgatgtaacgagaagagacaccttcacaaacttatcagaagtgtggtctaaagaagtggaactctattcaactaatcagaattgcgtgaagatgctagttggaaataaagttgatagagattctgaaagggttgtgagcaaagaagagggtttagcacttgccgaggagttgggatgtttgttttttgaatgtagtgccaaaactcgagaaaatgtggagcggtgcttcgaggaacttgcactgaagataatggaagttcctagtcttttggaagaaggatctacagcagtaaaaaggaatattctaaagcaacaacaggaacaaccccaagcatccgaatttggtggttgttgctcttaa

SEQ ID NO: 5086 - protein, 212 aa, Glycine max
MNSSSGQSSGYDLSFKILLIGDSAVGKSSLLVSFISNSAEDIAPTIGVDFKIKMLTVGGKRLKLTIWDTAGQERFRTLTSSYYRGAQGIILVYDVTRRDTFTNLSEVWSKEVELYSTNQNCVKMLVGNKVDRDSERVVSKEEGLALAEELGCLFFECSAKTRENVERCFEELALKIMEVPSLLEEGSTAVKRNILKQQQEQPQASEFGGCCS

SEQ ID NO: 5087 - DNA, 660 bp, Drosophila ananassae
  CDS (1)..(660)
atggcaacctcaccacgcaccggcggtgccagtggcgccggcacagcgcagcgaccaaatggcacctcccagaataaaagttgccaattcaagctggtgctgttgggcgagtcggctgttgggaaatcctcccttgtcctgcgatttgtcaagggacagtttcacgagtaccaggagagcacgataggtgctgccttcctcacacagaccatttgcatagaagacaccgttgtcaagttcgagatctgggatacggccggacaggagcgataccatagcttagctcctatgtactaccgaggagcgcaggccgccatcgtcgtctatgatattcagaatcaggacagttttcaaagggcgaagacttgggtcaaggaactgcataaacaagcctcaccaaatattgttattgcgttggctggcaacaaggcggatctgtcaaacattcgcgtcgtggagttcgatgaagcgaagcaatacgccgaggagaacggcttgctgttcatggaaacgtctgcgaagacgggcatgaacgttaacgatatcttcttggccattgccaagaaactacctaagaacgatggcgccaacaatcagggaaccagcataaggccgaacgggaacgaaacaaatcgaccgacaaacaactgctgcaagtga

SEQ ID NO: 5088 - protein, 219 aa, Drosophila ananassae
MATSPRTGGASGAGTAQRPNGTSQNKSCQFKLVLLGESAVGKSSLVLRFVKGQFHEYQESTIGAAFLTQTICIEDTVVKFEIWDTAGQERYHSLAPMYYRGAQAAIVVYDIQNQDSFQRAKTWVKELHKQASPNIVIALAGNKADLSNIRVVEFDEAKQYAEENGLLFMETSAKTGMNVNDIFLAIAKKLPKNDGANNQGTSIRPNGNETNRPTNNCCK

SEQ ID NO: 5089 - DNA, 651 bp, Drosophila grimshawi
  CDS (1)..(651)
atggcaacaacaccacgcagcgggggttccaattctggagccgcacaacgacccaatggcacatcgcagaataaaagttgccagtttaagttggtgctccttggcgaatcggctgtaggtaaatcgtcgctggtgctgcgctttgtcaagggccagttccatgagtaccaggagagcacgataggtgcggcctttctaacacagaccatttgcatagaggacactgttgtcaagttcgagatctgggatacagctggccaggagcggtatcacagcttagctcctatgtactataggggagcacaggccgccattgttgtctatgacatacagaatcaggacagttttcagcgtgcaaagacctgggtcaaggaactgcataaacaagcctcaccgaacattgtcattgcgttggctggcaataaggcggatttgtcgaacattcgcgtcgtggagttcgacgaggcgaagcaatatgccgaggagaatggcttgttgtttatggaaacgtcggcgaagacgggcatgaatgtcaatgatatcttcttggcaattgccaagaaactacccaagaacgacaacaatcaaggatctgttataaagccaaatggaaacgaaccaactcaaacgacgaacaactgctgcaagtga

SEQ ID NO: 5090 - protein, 216 aa, Drosophila grimshawi
MATTPRSGGSNSGAAQRPNGTSQNKSCQFKLVLLGESAVGKSSLVLRFVKGQFHEYQESTIGAAFLTQTICIEDTVVKFEIWDTAGQERYHSLAPMYYRGAQAAIVVYDIQNQDSFQRAKTWVKELHKQASPNIVIALAGNKADLSNIRVVEFDEAKQYAEENGLLFMETSAKTGMNVNDIFLAIAKKLPKNDNNQGSVIKPNGNEPTQTTNNCCK

SEQ ID NO: 5091 - DNA, 651 bp, Drosophila mojavensis
  CDS (1)..(651)
atggcaacaacaccacgcagcgggggctccagctctggagccgcacaacgtcccaatggcacctcgcagaataaaagttgccaattcaaattggtgctacttggcgaatcggccgttggcaaatcgtccctggtgctgcgctttgttaagggccagttccatgaatatcaggagagcacgataggtgcggcctttctaacacaaactatttgcatagaggatacagtggtgaagttcgagatctgggatacagccggtcaggaacggtatcacagcttagctcccatgtattatagaggtgcgcaggccgccatcgttgtctatgacatacaaaatcaggacagttttcagcgtgcaaaaacctgggtcaaggaactgcataaacaagcctcaccgaacattgtcattgcgctggctggcaataaggcggacttatcgaacattcgcgtggtggagttcgatgaagcgaagcaatatgcagaagagaatggtttgttgtttatggaaacgtcagcgaagacgggcatgaatgtcaatgatatcttcttggcaattgccaagaaattacccaagaatgacaacaatccaggaactgttataaagccaaatggaaacgaatcaactcaaacgacgaacaactgttgcaagtga

SEQ ID NO: 5092 - protein, 216 aa, Drosophila mojavensis
MATTPRSGGSSSGAAQRPNGTSQNKSCQFKLVLLGESAVGKSSLVLRFVKGQFHEYQESTIGAAFLTQTICIEDTVVKFEIWDTAGQERYHSLAPMYYRGAQAAIVVYDIQNQDSFQRAKTWVKELHKQASPNIVIALAGNKADLSNIRVVEFDEAKQYAEENGLLFMETSAKTGMNVNDIFLAIAKKLPKNDNNPGTVIKPNGNESTQTTNNCCK

SEQ ID NO: 5093 - DNA, 657 bp, Drosophila persimilis
  CDS (1)..(657)
atggccacaacaccacgcagcggcggtgccggctctggaacggcacagcgaccgaatggaacctctcagaacaaaagttgccaattcaagctggtgctcctgggcgaatcggctgtcggcaaatcgtcgcttgtgctgcgcttcgtcaagggacaattccatgaatatcaggagagcacgataggtgcggcctttctaacacaaaccatttgcatagaggatactgtggtgaagtttgaaatttgggatacagccggccaggagcgataccacagcttagctcccatgtattatagaggtgcgcaggccgccattgttgtctatgatatacagaatcaggatagttttcagcgtgcaaagacctgggtcaaggaactgcataaacaagcctcaccaaacattgtcattgcgctggccggcaataaggcggatctgtcaaacattcgcgtcgtggagtttgatgaagcgaagcaatatgccgaggagaatggtttgctgttcatggagacgtctgcgaagacgggcatgaatgtcaacgatatctttttggccattgccaagaaactacctaagaacgatggcgccaacaatcagggaggcagcataaggccgaatgggaatgaaacaaatcgaccgacgaacaactgctgcaagtga

SEQ ID NO: 5094 - protein, 218 aa, Drosophila persimilis
MATTPRSGGAGSGTAQRPNGTSQNKSCQFKLVLLGESAVGKSSLVLRFVKGQFHEYQESTIGAAFLTQTICIEDTVVKFEIWDTAGQERYHSLAPMYYRGAQAAIVVYDIQNQDSFQRAKTWVKELHKQASPNIVIALAGNKADLSNIRVVEFDEAKQYAEENGLLFMETSAKTGMNVNDIFLAIAKKLPKNDGANNQGGSIRPNGNETNRPTNNCCK

SEQ ID NO: 5095 - DNA, 651 bp, Drosophila virilis
  CDS (1)..(651)
atggcaacaacaccacgcagcggggggtccggctccggagccgcacaacgtcccaatggaacctcgcagaataaaagctgccaattcaaattggtgctactcggcgaatcggcagtgggcaaatcgtcattggtgctgcgctttgtcaagggccagttccatgaatatcaagagagcacgataggtgcggcttttctcacacaaaccatatgcatagaggatactgtggtgaagtttgagatctgggatacagccggccaggagcggtatcacagcttagctcctatgtattatagaggtgcgcaggccgccatcgttgtctatgacatacagaatcaggacagttttcagcgtgcaaaaacctgggtcaaggaactgcataaacaagcctcaccgaacattgtcattgcgttggctggcaataaggcggatttgtcgaacattcgcgttgtggagttcgatgaggcgaagcaatatgcagaggagaatggcttgttgttcatggaaacctctgcgaagacgggcatgaatgtcaatgatattttcttggcaattgccaagaaactaccgaagaacgacaacaatcaaggatctgttataaagccaaatggaaacgaaccaactcaaacgacgaacaactgctgcaagtga

SEQ ID NO: 5096 - protein, 216 aa, Drosophila virilis
MATTPRSGGSGSGAAQRPNGTSQNKSCQFKLVLLGESAVGKSSLVLRFVKGQFHEYQESTIGAAFLTQTICIEDTVVKFEIWDTAGQERYHSLAPMYYRGAQAAIVVYDIQNQDSFQRAKTWVKELHKQASPNIVIALAGNKADLSNIRVVEFDEAKQYAEENGLLFMETSAKTGMNVNDIFLAIAKKLPKNDNNQGSVIKPNGNEPTQTTNNCCK

SEQ ID NO: 5097 - DNA, 663 bp, Drosophila willistoni
  CDS (1)..(663)
atggcaacaacaccacgcagtggaggtgccgccggttctggtgcggcacaacgcccaaatggtacatctcaaaataaaagttgccaattcaaattggtgctcctgggcgaatcggccgtgggtaaatcatcattagtgctacgttttgtcaaggggcaattccatgaatatcaagagagcacgataggtgcggcctttttaacacaaaccatttgcatagaggatacggtggtcaagtttgagatctgggatacagccggtcaagagcggtaccacagcttagctcccatgtattatcgaggagcccaggcggccatcgttgtctatgatatacagaatcaggacagttttcaacgtgcaaaaacctgggtcaaggaactgcataaacaagcctcaccaaacattgttattgctttggctggcaataaagcagatttatctaacattcgtgtggttgagtttgatgaagcgaagcaatatgctgaggagaatggtttacttttcatggaaacctctgcgaagacgggcatgaacgtcaatgatatctttttggccatagccaagaaactacctaaaaacgatggcgccaacaatcagggaaccagcataaggccgaatggaaatgaaacaaatcgaccgacaaacaactgctgcaaaaaatga

SEQ ID NO: 5098 - protein, 220 aa, Drosophila willistoni
MATTPRSGGAAGSGAAQRPNGTSQNKSCQFKLVLLGESAVGKSSLVLRFVKGQFHEYQESTIGAAFLTQTICIEDTVVKFEIWDTAGQERYHSLAPMYYRGAQAAIVVYDIQNQDSFQRAKTWVKELHKQASPNIVIALAGNKADLSNIRVVEFDEAKQYAEENGLLFMETSAKTGMNVNDIFLAIAKKLPKNDGANNQGTSIRPNGNETNRPTNNCCKK

SEQ ID NO: 5099 - DNA, 660 bp, Drosophila simulans
  CDS (1)..(660)
atggcaaccactccacgcagcggcggtgccagcggcactggaacggcgcagcggcccaatggcacctcgcagaacaaaagctgccaattcaagttggttctcctcggcgagtccgctgtgggcaagtcctccctggtgctgcgcttcgttaagggacagttccacgagtaccaggagagcacgataggtgcggcctttctgacacagaccatttgcatagaggacaccgtcgtcaagttcgagatctgggacacggctggccaggagcggtaccacagcttagctcccatgtattatcgaggagcgcaggccgctattgtcgtgtatgatatacagaatcaggacagttttcagcgtgcgaagacctgggtcaaggaactgcataaacaagcctcaccaaacattgtcattgcgctggccggcaacaaggcagatttgtcaaacattcgcgtcgtggagttcgatgaggcgaagcaatatgccgaggagaatgggctgctgttcatggaaacctccgccaagacgggcatgaatgtgaacgacatcttcttggccattgccaagaaactacctaagaacgatggcgccaacaatcagggaaccagcataaggccgactggaaccgaaacaaatcgaccgacgaacaactgctgcaagtga

SEQ ID NO: 5100 - protein, 219 aa, Drosophila simulans
MATTPRSGGASGTGTAQRPNGTSQNKSCQFKLVLLGESAVGKSSLVLRFVKGQFHEYQESTIGAAFLTQTICIEDTVVKFEIWDTAGQERYHSLAPMYYRGAQAAIVVYDIQNQDSFQRAKTWVKELHKQASPNIVIALAGNKADLSNIRVVEFDEAKQYAEENGLLFMETSAKTGMNVNDIFLAIAKKLPKNDGANNQGTSIRPTGTETNRPTNNCCK

SEQ ID NO: 5101 - DNA, 642 bp, Bombyx mori
  CDS (1)..(642)
atggcgacaaacaggaccggagccgcacagaggcccaatggcgctccacagacaaaagtctgccagttcaagctggtgttgttgggcgagtctgcggtaggcaagtcctcgctggtgctccgattcgtcaagggacagttccacgagtaccaggagagcaccatcggggctgcgttcctcacccaggccattcgattcgacgacaccaccgttaaattcgagatctgggatacagctggacaggagaggtatcacagcttagcgccgatgtactacagaggagcccaatccgctattgtagtatatgacataactaatcaggacacattcggtcgcgccaagaattgggtgaaggaactccaacggcaggcttctccgtcgatagtgatcgctctggcgggcaacaagagcgacctcgcagccaagcgcatggtcgagttcgaggaggcgcaggcctacgcagacgagaacgggctgctcttcatggagaccagcgccaagacggccatgaacgtcaacgatatattcctcgctatagcgaacaagttaccaaagagcgaggcgggggcggcgggcgcggcggggggcgggcggcgcctggcggacggcgagcagccgcgaccctcgcagtgctgcaagtga

SEQ ID NO: 5102 - protein, 213 aa, Bombyx mori
MATNRTGAAQRPNGAPQTKVCQFKLVLLGESAVGKSSLVLRFVKGQFHEYQESTIGAAFLTQAIRFDDTTVKFEIWDTAGQERYHSLAPMYYRGAQSAIVVYDITNQDTFGRAKNWVKELQRQASPSIVIALAGNKSDLAAKRMVEFEEAQAYADENGLLFMETSAKTAMNVNDIFLAIANKLPKSEAGAAGAAGGGRRLADGEQPRPSQCCK

SEQ ID NO: 5103 - DNA, 582 bp, Arabidopsis thaliana
  CDS (1)..(582)
atgggatgtgcttcttctcttccagataggaactctggaactttaagtggtcttagcaattcagagaatgctgttccagctgatgccaaaaatctacgtgtgaagttagttctattaggagactctggtgttggtaaaagttgtattgtccttcgatttgtacgtggtcagtttgacgctacatctaaggtaactgttggagcctcgttcttgtcccaaactatagcattgcaagactctaccacagtgaagtttgaaatatgggatacagcaggacaggagaggtattctgctcttgcaccactatactaccgtggagctggagttgctgttattgtgtatgatataacaagccctgaatcgttcaagaaagcacagtattgggttaaggaactgcaaaagcatggaagcccagatattgttatggctctggttggtaacaaagctgatctacatgaaaaaagagaagtacctactgaggatggaatggagcttgcagagaagaacggcatgttcttcattgagacgtcagccaagacagccgataacataaatcaactgtttgagtgtacacatgtctga

SEQ ID NO: 5104 - protein, 193 aa, Arabidopsis thaliana
MGCASSLPDRNSGTLSGLSNSENAVPADAKNLRVKLVLLGDSGVGKSCIVLRFVRGQFDATSKVTVGASFLSQTIALQDSTTVKFEIWDTAGQERYSALAPLYYRGAGVAVIVYDITSPESFKKAQYWVKELQKHGSPDIVMALVGNKADLHEKREVPTEDGMELAEKNGMFFIETSAKTADNINQLFECTHV

SEQ ID NO: 5105 - DNA, 714 bp, Arabidopsis thaliana
  CDS (1)..(714)
atgaacgaagagatgagcggtgagtcgccggagaataacaaacacgtaaagaaaccgacgatgccggaaaagatcgattacgtgttcaaggtggtggtcattggagattctgctgtcgggaaaacgcagctcctctcacgttttacacacaacgagttctgttatgattcaaaatcaaccattggtgtcgagtttcagacacggaccatcactcttcggggcaaactcgtcaaagctcagatctgggacaccgccggtcaagagagatacagagcggtgactagcgcctactacagaggtgcgttaggtgcgatggtggtttacgacattaccaaacgcctctcattcgaccacgttgcacgttgggtcgaggaattacgtgctcacgccgatgattccgccgtgatcatgctcgtcggaaacaaagccgatctctccgttggtaaacgtgccgttcctacggaggatgcagtcgaattcgccgagactcaacggctttttttctcggaagtctcggctctaagcggcggaaacgtcgacgaagcttttttccgtttactcgaggagattttcagccgcgttgttgtttcgagaaaagctatggaatccgacggtggagccaccgtgaaacttgacggttcgagaattgatgtcatctctggttcggatcttgagactagtaatatcaaggaacaagcttcgtgctcgtgttga

SEQ ID NO: 5106 - protein, 237 aa, Arabidopsis thaliana
MNEEMSGESPENNKHVKKPTMPEKIDYVFKVVVIGDSAVGKTQLLSRFTHNEFCYDSKSTIGVEFQTRTITLRGKLVKAQIWDTAGQERYRAVTSAYYRGALGAMVVYDITKRLSFDHVARWVEELRAHADDSAVIMLVGNKADLSVGKRAVPTEDAVEFAETQRLFFSEVSALSGGNVDEAFFRLLEEIFSRVVVSRKAMESDGGATVKLDGSRIDVISGSDLETSNIKEQASCSC

SEQ ID NO: 5107 - DNA, 603 bp, Arabidopsis thaliana
  CDS (1)..(603)
atggctgcagctggaaacaagagcattaacgccaaattggtgttgcttggagatgttggtgctggaaaatcaagtcttgtgttacggtttgtcaaagatcagtttgttgaattccaggaatcaaccattggtgctgcttttttctcacaaacgttagctgtgaacgatgccactgtgaagtttgagatttgggatacagcgggtcaggaacggtaccatagtttggctccaatgtactacagaggtgctgctgctgcaatcattgtttttgatgttacgaatcaggcttcgtttgagagggcaaagaaatgggttcaggaactgcaggcacaaggtaaccctaatatggtcatggcccttgctggaaacaaatctgatttattagatgcaaggaaggtgacagcagaggatgcacaaacatatgctcaggaaaacggtcttttcttcatggaaacttcagcaaaaaccgctactaatgtcaaagagatattctatgaaatcgcaagaaggctaccgcgagtacagccaacagaaaacccaacaggaatggttctgccagacagggccatggatagggcagtgagctcatcttgttgtgcttag

SEQ ID NO: 5108 - protein, 200 aa, Arabidopsis thaliana
MAAAGNKSINAKLVLLGDVGAGKSSLVLRFVKDQFVEFQESTIGAAFFSQTLAVNDATVKFEIWDTAGQERYHSLAPMYYRGAAAAIIVFDVTNQASFERAKKWVQELQAQGNPNMVMALAGNKSDLLDARKVTAEDAQTYAQENGLFFMETSAKTATNVKEIFYEIARRLPRVQPTENPTGMVLPDRAMDRAVSSSCCA

SEQ ID NO: 5109 - DNA, 609 bp, Arabidopsis thaliana
  CDS (1)..(609)
atgggatgtgcttcttctcttccagataggaactctggaactttaagtggtcttagcaattcagagaatgctgttccagctgatgccaaaaatctacgtgtgaagttagttctattaggagactctggtgttggtaaaagttgtattgtccttcgatttgtacgtggtcagtttgacgctacatctaaggtaactgttggagcctcgttcttgtcccaaactatagcattgcaagactctaccacagtgaagtttgaaatatgggatacagcaggacaggagaggtattctgctcttgcaccactatactaccgtggagctggagttgctgttattgtgtatgatataacaagccctgaatcgttcaagaaagcacagtattgggttaaggaactgcaaaagcatggaagcccagatattgttatggctctggttggtaacaaagctgatctacatgaaaaaagagaagtacctactgaggatggaatggagcttgcagagaagaacggcatgttcttcattgagacgtcagccaagacagccgataacataaatcaactgtttgaggaaattggcaagaggctacctcgtcctgctccttcgtcatga

SEQ ID NO: 5110 - protein, 202 aa, Arabidopsis thaliana
MGCASSLPDRNSGTLSGLSNSENAVPADAKNLRVKLVLLGDSGVGKSCIVLRFVRGQFDATSKVTVGASFLSQTIALQDSTTVKFEIWDTAGQERYSALAPLYYRGAGVAVIVYDITSPESFKKAQYWVKELQKHGSPDIVMALVGNKADLHEKREVPTEDGMELAEKNGMFFIETSAKTADNINQLFEEIGKRLPRPAPSS

SEQ ID NO: 5111 - DNA, 1126 bp, Strongylocentrotus purpuratus
  CDS (275)..(925)
ttcctgttgtaaaaaaatagtgtatgaaaggcataaaaccgtactgaaaatacgtcatttgaatttgtgaattacgctgaaatcggaagacatagaggtgaaactcttgttaccagtggccattggagaagcatatcttctggtggaagtagcgtagcagatgctccaaaggctacctccagtccagtcctgacgacatcattttggtggagtctgcacacacacacgaacaccctatttttctggactatttgtcaccggtatatgttgaacaatggctaacaggggaggagcacaaagaccgaatggcacccagggcaagatatgtcagttcaaactggtgcttttgggagagtctgcagtaggaaagtccagtttagtgttacggtttgtcaaaggccaattccacgagttccaagaaagcacaataggagctgcattcctgacacagacagtttgtcttgatgacacaacagtaaagtttgaaatctgggacacagccggacaagagcgttaccacagcttggcacctatgtactaccgaggagcacaagcagcaattgtagtttatgatatcacaaatcaagagacctttggaagggccaaaacgtgggtgaaagaactgcaaagacaagccagtcccaacattgtcatagcgctagcaggaaacaaggcagatcttgccaacaagagaatggttgaatttgaggaggcccaagcatacgcagaagagaacagcttattgtttatggagacatcagccaagactgccatgaacgtcaatgatatattcctggcaatagccaagaagcttccaaagaatgaccaagttggaggacctaccagtggacagaggggcacgaacaggggcgtggacctaacggagagtaaccaacaatcgtcagggggatgttgcaaaaactaacaaaggctgccggtctgaaaaatgttgcattttattttgaaagacagaaagagataaagaagggggcagccaaaggtcttgccctagcgccgaagctcgagtcatacctttaaaaaaaatatctagacattcatttaatcagaacacagtcggcacagatgctttggctgttcccactgttttgctgtaaagttccttcct

SEQ ID NO: 5112 - protein, 216 aa, Strongylocentrotus purpuratus
MANRGGAQRPNGTQGKICQFKLVLLGESAVGKSSLVLRFVKGQFHEFQESTIGAAFLTQTVCLDDTTVKFEIWDTAGQERYHSLAPMYYRGAQAAIVVYDITNQETFGRAKTWVKELQRQASPNIVIALAGNKADLANKRMVEFEEAQAYAEENSLLFMETSAKTAMNVNDIFLAIAKKLPKNDQVGGPTSGQRGTNRGVDLTESNQQSSGGCCKN

SEQ ID NO: 5113 - DNA, 642 bp, Nasonia vitripennis
  CDS (1)..(642)
atggctaacaggggtacggcccagaggccaaatggcacgcagggcaaaatatgtcagttcaaactggtattacttggcgaatctgctgttggaaaatccagtcttgtactgaggtttgttaaaggtcaattccatgagtaccaagaaagtactattggagctgcatttttgacacaaactgtttgtttggatgagacgactgtgaagtttgagatttgggataccgcaggacaggaacgttatcatagtcttgcacccatgtactatcgtggagcacaggcagctattgtggtgtacgacataacaaatcaggacacatttatgcgcgcgacaacgtgggtgaaagaactacaacggcaagccagtccgagcatagtgatagcgctagcaggaaacaaagcagacctcggaaataagcgagtcgtggaatttgaagaagcccaggcatacgccgacgagaacggcctcctctttatggaaacatctgccaagacagcgatgaacgtcaacgatatattccttgctattgctaagaaacttccaaagaacgaacaagcaggaaacgcgagtacaagtgggcaagggcgccgactagtcgaatcagaagggcaaaagccagctaccggcaactgctgcaagtga

SEQ ID NO: 5114 - protein, 213 aa, Nasonia vitripennis
MANRGTAQRPNGTQGKICQFKLVLLGESAVGKSSLVLRFVKGQFHEYQESTIGAAFLTQTVCLDETTVKFEIWDTAGQERYHSLAPMYYRGAQAAIVVYDITNQDTFMRATTWVKELQRQASPSIVIALAGNKADLGNKRVVEFEEAQAYADENGLLFMETSAKTAMNVNDIFLAIAKKLPKNEQAGNASTSGQGRRLVESEGQKPATGNCCK

SEQ ID NO: 5115 - DNA, 645 bp, Aedes aegypti
  CDS (1)..(645)
atggccaacagtccgcgggccggtggcggtgcacagcgaccaaatggcgccacacagaacaaaatctgccagttcaagctggtcctgctgggtgagtcggccgtcggaaagtcgtcgctagtgttacggttcgtcaaaggacagttccacgagtaccaggagagtacgatcggtgccgctttcctcacgcaaacagtctgcatcgacgatacgacggtgaagttcgagatctgggacactgctggacaggaaaggtaccacagtctcgcccctatgtactaccgaggtgctcaggcagctattgttgtctacgatattcagaatcaagatagttttgcacgtgctaaaacgtgggtcaaagagcttcagcgacaggcatcgccgaatattgtgattgcgctggccggtaacaaagccgatctcgtcaacaaacgcatggttgattacgaggaggctaagcaatacgcggacgagaacggactgctgttcatggagacgtcggccaaaaccgctgtgaatgtgaatgacatctttcttgcaataggtaaaaaattgcctaaaaacgagggtgctggacagcagcaaaacataagacctactcagaacgaacaaagtcgacagaatagcggttgctgcagcaagtga

SEQ ID NO: 5116 - protein, 214 aa, Aedes aegypti
MANSPRAGGGAQRPNGATQNKICQFKLVLLGESAVGKSSLVLRFVKGQFHEYQESTIGAAFLTQTVCIDDTTVKFEIWDTAGQERYHSLAPMYYRGAQAAIVVYDIQNQDSFARAKTWVKELQRQASPNIVIALAGNKADLVNKRMVDYEEAKQYADENGLLFMETSAKTAVNVNDIFLAIGKKLPKNEGAGQQQNIRPTQNEQSRQNSGCCSK

SEQ ID NO: 5117 - DNA, 609 bp, Chlamydomonas reinhardtii
  CDS (1)..(609)
atggctgcgcctctcgcagagctggcgcagcagcaaactgcgaagctcgtcttgctcggcgagatgggctcggggaagtcttccttggtgcttcgatacgtcaagggccagttcttcgactatcaagcctcgaccgtgggtgctgcgtttctcacaaagacgctgccggagctcaacgtgaagtttgaaatatgggacacggccggtcaggagcgctaccacagcctcgcgccaatgtactacaggggtgccgcggcagccatcatcgtgtacgacatcacgagcccagactcgttcacccgcgcgaagtcgtgggtgcgtgagctgcagcggcagggcaaccccaacatgattatggcgctggcaggcaacaaggcagacctggagggccagcgcgcggtgacggtggaggaggcgcaggcgtacgcggcggagaacgggttgttctacgtggagacgtcggccaagacgtccgccaacgtcaacgagctgttcgaggagattgcccggaaactacccaagccggaggcggcgccccggccgccgcaaggcgggatcgtcctgtcagagaaccagcagcagcagcccaagaagagcacttgctgctaa

SEQ ID NO: 5118 - protein, 202 aa, Chlamydomonas reinhardtii
MAAPLAELAQQQTAKLVLLGEMGSGKSSLVLRYVKGQFFDYQASTVGAAFLTKTLPELNVKFEIWDTAGQERYHSLAPMYYRGAAAAIIVYDITSPDSFTRAKSWVRELQRQGNPNMIMALAGNKADLEGQRAVTVEEAQAYAAENGLFYVETSAKTSANVNELFEEIARKLPKPEAAPRPPQGGIVLSENQQQQPKKSTCC

SEQ ID NO: 5119 - DNA, 627 bp, Physcomitrella patens subsp. patens
  CDS (1)..(627)
atgggctgtacatcctcttcacatgctgcagtgcacggctccagaaacttgcagacccactcccagactgaggttttggattctaagaatctgcgcatcaagctagttctgttgggtgactcgggagtgggaaagagttgcattgtcttacggtttgtgcgtgggcaattcgacccctcgtccaaggtgacggttggcgcgtcgtttctttctcagacaattacattgaaagattctaccagcgtaaaatttgagatatgggacactgcaggtcaagaacggtatgcctcattagcgccgctatattatagaggtgcagcagcggcggttgtagtttatgacatcaccaatccagagacattcttgaaagctcaattctgggttaaggagctgcagaagcatggaaatcctgacattgtaatggctttggttggcaataaagctgacctcgaatatcaacgtgaagttactcgcgaggaagcacagacatatgccgatagtaatggcatgttctacatcgaaacgtcggctaaaacttctgacaatgtgaaccaacttttcgagcaacttcatggcaaactgaagcaaacaactttagtagttcgaagaagcaagtactgcacttga

SEQ ID NO: 5120 - protein, 208 aa, Physcomitrella patens subsp. patens
MGCTSSSHAAVHGSRNLQTHSQTEVLDSKNLRIKLVLLGDSGVGKSCIVLRFVRGQFDPSSKVTVGASFLSQTITLKDSTSVKFEIWDTAGQERYASLAPLYYRGAAAAVVVYDITNPETFLKAQFWVKELQKHGNPDIVMALVGNKADLEYQREVTREEAQTYADSNGMFYIETSAKTSDNVNQLFEQLHGKLKQTTLVVRRSKYCT

SEQ ID NO: 5121 - DNA, 525 bp, Physcomitrella patens subsp. patens
  CDS (1)..(525)
atggacacaacattagttctgttgggtgactcaggagtcgggaagagctgcattctcttgcggttcgttcgtggacaattcgatccgtcgtctaaggtgacggttggtgcatcttttctctcccagacgattagcttacaagactcaaccaacgttaaattcgagatatgggacactgctggtcaagaacgatatgcttcgttagcgcccttatattacaggggtgcagcagcggcagtcgtagtgtatgatatcacaaacccggagacattcctgaaagctcaattctgggtcaaagagctgcagaagcatgggaatcctgatattgtaatggctctggtcgggaataaagccgatctcgagaatgagcgagaggtttctcatgcagaagcccaggcctatgccaaaagtaatggcatgttctttattgaaacgtcagcgaagacttctgagaacgtgaaccaattatttgaggagattgccaagaggttacctcggggacaatcgagcttgtcgagggactga

SEQ ID NO: 5122 - protein, 174 aa, Physcomitrella patens subsp. patens
MDTTLVLLGDSGVGKSCILLRFVRGQFDPSSKVTVGASFLSQTISLQDSTNVKFEIWDTAGQERYASLAPLYYRGAAAAVVVYDITNPETFLKAQFWVKELQKHGNPDIVMALVGNKADLENEREVSHAEAQAYAKSNGMFFIETSAKTSENVNQLFEEIAKRLPRGQSSLSRD

SEQ ID NO: 5123 - DNA, 606 bp, Physcomitrella patens subsp. patens
  CDS (1)..(606)
atggccaccacaggcgctaatcacacgcaagcgaaacttgttttgcttggagacatgggagctgggaaatcgagcctttctctacggtttgtgaggggccagttctttgattatcaggagtctacaattggagcagctttcctcacacagacattggcagtcaatgagactacggttaagtttgagatatgggacacagctgggcaagaaagataccacagtcttgcacctatgtattacaggggtgctgctgcagctatcatcgtatatgacatcacaaactctgattctttcgggagagcgaagaaatgggtccaagagcttcaaagacaaggcaatcccaatttggtgatggcgttggcgggaaacaaggctgatctatctgcgaagagaaaagtcgaagcagaggagggtcaatcgtacgccgaggagaatgggctgttcttcatggaaacttcagctaaaactgctcagaatgtgaacgagttattctacgaaattgcaaggaagctacccaaagcgcaacccgcccaggcaactggagtttcactcacagataagtcgtcaagccgccttacccctgctaaaaccacatgttgcgcttga

SEQ ID NO: 5124 - protein, 201 aa, Physcomitrella patens subsp. patens
MATTGANHTQAKLVLLGDMGAGKSSLSLRFVRGQFFDYQESTIGAAFLTQTLAVNETTVKFEIWDTAGQERYHSLAPMYYRGAAAAIIVYDITNSDSFGRAKKWVQELQRQGNPNLVMALAGNKADLSAKRKVEAEEGQSYAEENGLFFMETSAKTAQNVNELFYEIARKLPKAQPAQATGVSLTDKSSSRLTPAKTTCCA

SEQ ID NO: 5125 - DNA, 606 bp, Physcomitrella patens subsp. patens
  CDS (1)..(606)
atggccacaaccggcgccaatcacatgcaagctaagcttgttttgcttggagacatgggagccggtaaatcgagtcttgctctacgttttgtgaagggccagttcttcgattatcaggaatccactataggtgcagcttttcttacgcagacattggcagtcaatgagacaaccgtgaaatttgagatatgggacacagctggacaagaaagataccacagccttgcgcctatgtattacaggggtgctgctgcggctattatcgtatacgacatcacaaattctgattctttcgggagagcgaaaaaatgggtccaggagcttcaaagacaaggcaaccccaatttggtgatggcactggcgggaaacaaggctgatttatcttcgaaaagaaaaattgaggcagaggagggtcaatcctatgccgaggagaatggactgttcttcatggagacatcagccaaaacatctcaaaatgtgaacgagttattttacgaaatcgcaaggaagctacctaaagcgcaacctgcacaggcatctggaatgtcgcttacagatgggtccacaagccgccttggtcctgccaaaagcacatgttgcgcctaa

SEQ ID NO: 5126 - protein, 201 aa, Physcomitrella patens subsp. patens
MATTGANHMQAKLVLLGDMGAGKSSLALRFVKGQFFDYQESTIGAAFLTQTLAVNETTVKFEIWDTAGQERYHSLAPMYYRGAAAAIIVYDITNSDSFGRAKKWVQELQRQGNPNLVMALAGNKADLSSKRKIEAEEGQSYAEENGLFFMETSAKTSQNVNELFYEIARKLPKAQPAQASGMSLTDGSTSRLGPAKSTCCA

SEQ ID NO: 5127 - DNA, 633 bp, Physcomitrella patens subsp. patens
  CDS (1)..(633)
atgggatcgatgagcatttccccgctttcgaagtacaagttggtctttcttggtgatcagagcgtcggcaagactagcatcattactcgattcatgtatgacaagtttgaccagacgtaccagccaactattggaattgacttcctttccaaaacgatgtatttggaggaccgcacagttaggctacagctttgggatacagcaggacaggagcgattccgaagcctcattcccagttatatccgcgactcatccgtggcagttattgtatatgatgtttccaataggcagtcttttgttaacaccgctcgctgggtagaggaggttcgtgccgagcgaggaaaggatgtggttttagtgcttgttggcaacaagaccgatctcgtggataagaggcaagtctcagttgaagaaggtgaaaccaaagcccgggagcttagcgcactcatgattgagaccagtgctaaagcgggatttaatatcaagagccttttccggaaaatcgctggagcgttacctggaatggagtctgtgaatccgtcaaagcaggatgattacgtggatatcaacttgaaaacaacgtcgaataacacacaatcagaaggtcaaactgctggtggttgtgcgtgttga

SEQ ID NO: 5128 - protein, 210 aa, Physcomitrella patens subsp. patens
MGSMSISPLSKYKLVFLGDQSVGKTSIITRFMYDKFDQTYQPTIGIDFLSKTMYLEDRTVRLQLWDTAGQERFRSLIPSYIRDSSVAVIVYDVSNRQSFVNTARWVEEVRAERGKDVVLVLVGNKTDLVDKRQVSVEEGETKARELSALMIETSAKAGFNIKSLFRKIAGALPGMESVNPSKQDDYVDINLKTTSNNTQSEGQTAGGCAC

SEQ ID NO: 5129 - DNA, 612 bp, Physcomitrella patens subsp. patens
  CDS (1)..(612)
atgggctgttcatcatcttctcctgctgctgtgaaaggctctggacgtttacaaaccacctcccagcccgatgtgttggattctaaaaatctgcgcattaagctggttctattgggtgactcaggagtcggcaaaagttgcatcctcttacgatttgttcgcggtcaattcgacccatcgtccaaggtgacggttggtgcgtcttttctctctcagacaattaatttgcaagactcaaccatcaagttcgaaatatgggacacggctggacaagaacggtattcctcattagcgcctctatattacaggggagcatcagcggcggttgtagtttacgatattaccaatccggaaacattcctgaaagcgcagttctgggtcaaggagctccaaaagcatggtaaccctgacatcgtaatggcgttggttggaaacaaagctgacctcgaaagtgaacgtgaagtatctcgcgaagaagcccttgcctatgctgaaagtaacggcatgttcttcatcgaaacgtcagcaaagactgctgataatgtgaatcaattatttgaggagattgccaagaggttacctcggggacaatcaagcttgtcaaggaattga

SEQ ID NO: 5130 - protein, 203 aa, Physcomitrella patens subsp. patens
MGCSSSSPAAVKGSGRLQTTSQPDVLDSKNLRIKLVLLGDSGVGKSCILLRFVRGQFDPSSKVTVGASFLSQTINLQDSTIKFEIWDTAGQERYSSLAPLYYRGASAAVVVYDITNPETFLKAQFWVKELQKHGNPDIVMALVGNKADLESEREVSREEALAYAESNGMFFIETSAKTADNVNQLFEEIAKRLPRGQSSLSRN

SEQ ID NO: 5131 - DNA, 648 bp, Tribolium castaneum
  CDS (1)..(648)
atggcaaacaggaccggaacagcccagcgccccaacggttcaacccagggcaaaatctgccagttcaaattggtgctccttggcgaatcggccgtcggtaaatccagtctcgtcttgcgtttcgtcaaaggccaattccacgagtaccaagagagcaccatcggcgccgccttcctcacacagaccgtatgtctggacgacaccaccgtcaaattcgaaatctgggacactgcaggccaggaaaggtatcacagtttggccccgatgtactaccgaggggcgcaggcagctatcgtcgtctacgacatcaccaaccaggatacgttcggacgggcaaagacgtgggtgaaggaactccagcgacaggcgagtcccaacatcgtcatcgccttggctggaaacaagcaagatttagccaataagaggatggtggagtttgaagaggcacagacgtatgccgatgaaaacgggctgctcttcatggaaacgtcggccaagacggctatgaatgtcaacgatatcttcttggcgatagccaagaagctccccaaaaacgagcaggcgacggctcagggtgcgagtggccaaggaaggaggctggcagagggcgacacgggggctaaagccgcaggcaactgttgcaagtga

SEQ ID NO: 5132 - protein, 215 aa, Tribolium castaneum
MANRTGTAQRPNGSTQGKICQFKLVLLGESAVGKSSLVLRFVKGQFHEYQESTIGAAFLTQTVCLDDTTVKFEIWDTAGQERYHSLAPMYYRGAQAAIVVYDITNQDTFGRAKTWVKELQRQASPNIVIALAGNKQDLANKRMVEFEEAQTYADENGLLFMETSAKTAMNVNDIFLAIAKKLPKNEQATAQGASGQGRRLAEGDTGAKAAGNCCK

SEQ ID NO: 5133 - DNA, 648 bp, Culex quinquefasciatus
  CDS (1)..(648)
atggcgtccagtccgcgagccggtggcggtggtgcacagcgaccgaacggcgccacacagaacaaaatctgccagttcaagctggtcctgctgggcgagtcggcggtcggcaagtcctcgctggtgttacggttcgtcaagggtcagttccacgagtaccaggagagtacgatcggggccgcgtttctcacgcagacagtctgcatcgacgacacgacggtcaagttcgagatctgggacacggccgggcaggaacggtaccacagtctcgccccaatgtattaccgaggtgctcaggcagctatcgttgtctacgatattcagaaccaggacagctttgcacgtgctaaaacgtgggtcaaagagcttcagcgacaggcatcgccgaacattgtgattgcgctggccggcaacaaggccgatctcgccaacagtcgcgtcgtcgactacgaggaggctaagcaatacgcggacgacaacgggctgctgtttatggagacgtcggccaagaccgccgtgaacgtgaacgacatctttcttgcaatagctaaaaaattgcctaagaacgagggcactggaccacagcaaaacataagacctactcagaacgaacagagccgacagaacagcggatgctgcagcaagtga

SEQ ID NO: 5134 - protein, 215 aa, Culex quinquefasciatus
MASSPRAGGGGAQRPNGATQNKICQFKLVLLGESAVGKSSLVLRFVKGQFHEYQESTIGAAFLTQTVCIDDTTVKFEIWDTAGQERYHSLAPMYYRGAQAAIVVYDIQNQDSFARAKTWVKELQRQASPNIVIALAGNKADLANSRVVDYEEAKQYADDNGLLFMETSAKTAVNVNDIFLAIAKKLPKNEGTGPQQNIRPTQNEQSRQNSGCCSK

SEQ ID NO: 5135 - DNA, 636 bp, Acyrthosiphon pisum
  CDS (1)..(636)
atggccaacagagctgtaccgcagagacctaatggccaaacaccaggaaaaatatgtcagttcaagttggttcttttaggtgaatcatcagttggaaaatctagtttagtacttagatttgtaaagggccagtttcatgaataccaagagagtaccattggtgctgctttccttacccaaacgattcatttaaatgatgtagccgtaaaatttgaaatttgggatacagctggtcaagagcgttaccatagtttagcaccaatgtattatagaggtgctcaagcagctattgtagtctatgatataactaatcaagatacctttgaaagagctaaaaattgggtgaaggaacttcaaagacaagcaacacccggtattgtcatagctttagctggaaacaagttagatttaaatactatgagaagtgttcagactgatgaatcacaaacatatgcctatgaaaatggactgctgtttatggaaacatcagcaaaaacaagtgctaatgtgaccgaaatttttaaggcaattgctgaaaaacttcctaagaatgaaacaactaatacagcagggcaaggtcgacgtctagttgaatctgaaggagctaataagagccttagcagctgttgtaagtga

SEQ ID NO: 5136 - protein, 211 aa, Acyrthosiphon pisum
MANRAVPQRPNGQTPGKICQFKLVLLGESSVGKSSLVLRFVKGQFHEYQESTIGAAFLTQTIHLNDVAVKFEIWDTAGQERYHSLAPMYYRGAQAAIVVYDITNQDTFERAKNWVKELQRQATPGIVIALAGNKLDLNTMRSVQTDESQTYAYENGLLFMETSAKTSANVTEIFKAIAEKLPKNETTNTAGQGRRLVESEGANKSLSSCCK

SEQ ID NO: 5137 - DNA, 666 bp, Magnaporthe grisea 70-15
  CDS (1)..(666)
atggccacacgaggacctcccggcgcccgcggcatgggcaacaaccgctttgcgcagtttaagttggtgttgttgggcgagtcggctgttggcaagagttctatagtattgcggttcgtcaaggaccagtttgactcgtaccgagaatccaccatcggtgccgccttcttaacacagaccatctcgcttgatgagaacaccacggtcaagttcgagatctgggacacagctggccaggaaagatacaagtctctggctcccatgtactaccggaacgcaaactgtgcggtagtggtatacgacattacacaatctgcttctttggataaggcgaaagcttgggtgaaggagcttcagaggcaggccaacgagaacatcatcattgcgctcgcaggcaacaagctcgatttggttacggagcagccggacaagagggcagtgccgacgtccgaggctgaggcatatgcaagggaagcaggcctgctcttctttgagacatcagcaaagactgcagagaatgtgcgcgatctcttcactgccatcgccaaaaagctccccctggaccaagccgggcccaggcatgccaggccaggtcggggtgcgggcgtcagcctaaatccacccgagggtgccaacacgcaaaccaacggttcttgtgcgtgctaa

SEQ ID NO: 5138 - protein, 221 aa, Magnaporthe grisea 70-15
MATRGPPGARGMGNNRFAQFKLVLLGESAVGKSSIVLRFVKDQFDSYRESTIGAAFLTQTISLDENTTVKFEIWDTAGQERYKSLAPMYYRNANCAVVVYDITQSASLDKAKAWVKELQRQANENIIIALAGNKLDLVTEQPDKRAVPTSEAEAYAREAGLLFFETSAKTAENVRDLFTAIAKKLPLDQAGPRHARPGRGAGVSLNPPEGANTQTNGSCAC

SEQ ID NO: 5139 - DNA, 717 bp, Magnaporthe grisea 70-15
  CDS (1)..(717)
atggccgacggagccgccaaacccagcagcagcgtcaagctggtgctgctcggtgaagctgcagtgggaaagtcatcacttgtgctgaggtttgtcaacaacgactttcaagagaacaaggagccgacgataggggctgcctttctgacccaaaaatgcaacctgccggcccggaccatcaagtttgaaatatgggacacggcgggacaagaacgtttcgcctcgctggcgcccatgtactaccgtaacgcacaggccgctctcgttgtttacgacctaacgaagccgacatcactgatcaaagccaagcactgggtcgccgagctgcagcgccaagcatcgccgggcatcgtgattgcgctcgtcggcaacaagctcgacttgacgagcgacggtggcgatgcatccggtggtggagatgacgatggtgatgccgaaggtgcgggcgacgactcgggcgacgcccgcaagataccgacggaggaggccaaggcgtacgccgaggaggaagggctgttgttcttcgagaccagtgctaagacgggattcaacgtcaccgaggtctttacggcgattgccaacgcaatcccggagacgtcgctcaagagcgcgaggggcgctggtgccggtgccggtgcaggtcgcagtggcgagcagcagagcgtcagcctaaatggcccacgggatgtggagggcaaggatggatgcgcgtgttga

SEQ ID NO: 5140 - protein, 238 aa, Magnaporthe grisea 70-15
MADGAAKPSSSVKLVLLGEAAVGKSSLVLRFVNNDFQENKEPTIGAAFLTQKCNLPARTIKFEIWDTAGQERFASLAPMYYRNAQAALVVYDLTKPTSLIKAKHWVAELQRQASPGIVIALVGNKLDLTSDGGDASGGGDDDGDAEGAGDDSGDARKIPTEEAKAYAEEEGLLFFETSAKTGFNVTEVFTAIANAIPETSLKSARGAGAGAGAGRSGEQQSVSLNGPRDVEGKDGCAC

SEQ ID NO: 5141 - DNA, 705 bp, Gibberella zeae PH-1
  CDS (1)..(705)
atggccgattccaccaacgcccccaagccaagcagtagcgtcaagcttgtgcttcttggtgaagctgctgtcggaaagtcgtctctcgtattgcgcttcgttaacaacgacttccaagaaaacaaggagcccactattggtgccgccttcttgactcagaaatgcaatctcccaacaaggaccatcaagtttgagatttgggatactgccggccaagaacgttttgcctcgctggctcctatgtactatcgaaacgcccaggccgccctcgtcgtatacgatctcaccaagcccacatccctcatcaaagccaagcactgggttgctgagctgcaacgacaggcttctcccggtatcgttatcgcactggtcggtaacaagcttgatcttacaggcgactcgtccagtgtcgcaggtgcggatggggaggagggcgacgactctggcgatgcccgcaaagttcccacggaagaggctcaggcatacgcggaggaggagagcttactgttcttcgagaccagtgccaagagcgggcataatgttaccgaggtgtttactgccatcgcaaacgctatacctgagacgtcgctgaagagcgcgaggggagctggtgcatcaaatgctgccagccggggaagtgaggagcaaagagtgaatcttggaggtcccaaggatgccggcgccaaggatagttgcgcttgctag

SEQ ID NO: 5142 - protein, 234 aa, Gibberella zeae PH-1
MADSTNAPKPSSSVKLVLLGEAAVGKSSLVLRFVNNDFQENKEPTIGAAFLTQKCNLPTRTIKFEIWDTAGQERFASLAPMYYRNAQAALVVYDLTKPTSLIKAKHWVAELQRQASPGIVIALVGNKLDLTGDSSSVAGADGEEGDDSGDARKVPTEEAQAYAEEESLLFFETSAKSGHNVTEVFTAIANAIPETSLKSARGAGASNAASRGSEEQRVNLGGPKDAGAKDSCAC

SEQ ID NO: 5143 - DNA, 648 bp, Candida glabrata CBS 138
  CDS (1)..(648)
atgctacagttcaaactagttctgcttggtgattcctccgttggtaagtcatccattgttcacagatttgtaaaagatacatttgatgaactaagggagagtactattggtgctgcgtttctttcgcaaacagtcaaaattaaagatggtaatgaggatgttgttataaagtttgaaatatgggatactgctggtcaagaaaggtataagtccctggcacccatgtattatagaaacgccaatgcagctttggtggtatatgatgttacccaaccagactcattgtcaaaagctcaaagttgggtgcaagaactacagaataaagtcggagacgaagagctagtaatttatctagttgggaacaaggtggatatagtagaggccgatgaaagtgctagaaagatcgaaaccgaggaaggtgcggagtacgcccaggcacaaaagttattgtttaaggaggtaagtgctaaaacaggtgctggtgttaaagatatattccaagaaattggtgaacagttatatagcaccaagaaggcttcattaaagaataaagatcaaagtcgaagaacggactcagtctcgtccaatactgttgatattcagacacagaggccatcaactaatgatacctcgtcatgttgcagctga

SEQ ID NO: 5144 - protein, 215 aa, Candida glabrata CBS 138
MLQFKLVLLGDSSVGKSSIVHRFVKDTFDELRESTIGAAFLSQTVKIKDGNEDVVIKFEIWDTAGQERYKSLAPMYYRNANAALVVYDVTQPDSLSKAQSWVQELQNKVGDEELVIYLVGNKVDIVEADESARKIETEEGAEYAQAQKLLFKEVSAKTGAGVKDIFQEIGEQLYSTKKASLKNKDQSRRTDSVSSNTVDIQTQRPSTNDTSSCCS

SEQ ID NO: 5145 - DNA, 621 bp, Candida glabrata CBS 138
  CDS (1)..(621)
atgagtgaaacattagtgtatcagaagagcttgaaagtggtgctgctgggggagtccgctgttgggaagtctgcgatagtgacgaggttcagcactgggaagtacctgcggaacaatgccaccattggggcggcgtatgtgaccaaagacctggagtatatacgagacggagacgtataccaagtgcggctggagatatgggataccgctgggcaggagcggtacaggtccctgactccgatgtactacaggaacacagacgttgccattgtggtatttgatgtgagtaacctgcggagtctatcgatggcacacaaatggatagacgagctgaacacatatgtggagaacaaaggacgggagaggataaatatcgtacttgtgggcaataagatggacctgtgcagtgacgaggagcgtagtaccttgccacaaagagttgaagagcagtttcaggccgtgagcgcaaagtcaggggaaggcatagaggagctatttgatcatatcgtcaagggtataccgtcagaccaattcacgctgaagagtgctgcagttgaacagccagacaatgtcgtaaacctgaataataaatcggtattgcaatcaacatgtaattgctaa

SEQ ID NO: 5146 - protein, 206 aa, Candida glabrata CBS 138
MSETLVYQKSLKVVLLGESAVGKSAIVTRFSTGKYLRNNATIGAAYVTKDLEYIRDGDVYQVRLEIWDTAGQERYRSLTPMYYRNTDVAIVVFDVSNLRSLSMAHKWIDELNTYVENKGRERINIVLVGNKMDLCSDEERSTLPQRVEEQFQAVSAKSGEGIEELFDHIVKGIPSDQFTLKSAAVEQPDNVVNLNNKSVLQSTCNC

SEQ ID NO: 5147 - DNA, 627 bp, Candida glabrata CBS 138
  CDS (1)..(627)
atgaacaacaatatcacatctctgaagctggtactattgggtgaagcagcagttgggaaatcctctatcgtattgaggtttgtatccaatgacttttcagagaataaagagcctactatcggtgccgcattcttgacccaacgagttactatcaatgaacatacagtaaagtttgagatatgggacacggcgggccaggaaagatttgcatctctggcaccaatgtactatagaaacgcacaggcggcacttgttgtatatgacgtgactaagccacaatcattcataaaagcacgtcactgggtgaaagagttacaagaacaagctagcaaagatataattatagcactagtggggaacaaaattgatgttctagagaatggtaccgagagaagtgtatctcgtgaagaggccgaaaagcttgcagaggaagaaaacttattattcttcgagactagtgccaaatcgggagaaaatatcacagatgtattcctggccattggtgagaaagtacccttaaaaaccgcaaaccaagcaaatgttccaaataatgctaatgagaatcaaagagtagacctaacatcagtggtaaataatcctgctgctaactcaagctgtagttgctag

SEQ ID NO: 5148 - protein, 208 aa, Candida glabrata CBS 138
MNNNITSLKLVLLGEAAVGKSSIVLRFVSNDFSENKEPTIGAAFLTQRVTINEHTVKFEIWDTAGQERFASLAPMYYRNAQAALVVYDVTKPQSFIKARHWVKELQEQASKDIIIALVGNKIDVLENGTERSVSREEAEKLAEEENLLFFETSAKSGENITDVFLAIGEKVPLKTANQANVPNNANENQRVDLTSVVNNPAANSSCSC

SEQ ID NO: 5149 - DNA, 627 bp, Kluyveromyces lactis NRRL Y-1140
  CDS (1)..(627)
atgaattcaaacgttacgtctatcaagttggtactcctaggagaagctgcggtggggaaatcttccattgttttgcgctttgtgtccaatgattttgctgagaataaagaacccactattggagcagcctttctaacacagcgagtaaatatggctgaccacacaataaagtttgaaatctgggatactgctggtcaggaaagatttgcatcgttggccccaatgtattatagaaatgctcaagcagctttagtggtttatgatgtaacaaagccgcagtcatttatcaaggctcgccactgggtaaaagaattacacgaacaagcgagcaaagggattgtaatcgcattggttggaaataagatggatttgttggaatctgaagaggataggaaagtagccaaagaagaggctgaaaaattgtcacaggaagagaaccttttattcttcgagactagcgctaagactggtgataacgtcaacgaagtgttcttggccattggagagaaaatacccttaaagaagtcggatgggtccaataccgatgggttacgtggaacagaagatggaaggatcgacttgaacaaacccgatgatacctcgaatcccaactcatgtggttgttaa

SEQ ID NO: 5150 - protein, 208 aa, Kluyveromyces lactis NRRL Y-1140
MNSNVTSIKLVLLGEAAVGKSSIVLRFVSNDFAENKEPTIGAAFLTQRVNMADHTIKFEIWDTAGQERFASLAPMYYRNAQAALVVYDVTKPQSFIKARHWVKELHEQASKGIVIALVGNKMDLLESEEDRKVAKEEAEKLSQEENLLFFETSAKTGDNVNEVFLAIGEKIPLKKSDGSNTDGLRGTEDGRIDLNKPDDTSNPNSCGC

SEQ ID NO: 5151 - DNA, 624 bp, Kluyveromyces lactis NRRL Y-1140
  CDS (1)..(624)
atgcttcagttcaaattagtattgttgggagattcttctgttggaaaatccagtattgttcatagattcgtcaaagactcgtttgatgagtacagggaatcgactataggtgcagcttttctttcacaaactattaaattatctgaagagtatgatgaacaagttttgaagtttgaaatttgggatacggccggtcaggaacgctataaatctttggcacctatgtactatcgtaatgcaaatgccgctttagttgtgtacgatgtcactgaaccagattctttgcctaaggccaagctttgggttgatgaattgaaagaaaaggtaaatgacgataagttgatcatctgtcttgtggggaataagttggatctagtatctgaaagggaatcgacctctttagtcgatgaagcggacgcacgcgagtttgcacaagagaataatttgttgttccaccaggtcagtgctaagactggagaaaacgtaatcaaagtcttccaagatattggtgaaagattatatttgcagaacaaagataagatacaggaatcgaagaaacctaataataataatatatcattgcaaagaccaagtacaaatgattcacagtcttgttgctcatga

SEQ ID NO: 5152 - protein, 207 aa, Kluyveromyces lactis NRRL Y-1140
MLQFKLVLLGDSSVGKSSIVHRFVKDSFDEYRESTIGAAFLSQTIKLSEEYDEQVLKFEIWDTAGQERYKSLAPMYYRNANAALVVYDVTEPDSLPKAKLWVDELKEKVNDDKLIICLVGNKLDLVSERESTSLVDEADAREFAQENNLLFHQVSAKTGENVIKVFQDIGERLYLQNKDKIQESKKPNNNNISLQRPSTNDSQSCCS

SEQ ID NO: 5153 - DNA, 666 bp, Debaryomyces hansenii CBS767
  CDS (1)..(666): transl_table=12
atgagtttcccaaatcccgcaacgtccgttaagttagttttgctaggcgaagctgctgttggtaaatcatctttggtcttaagattcgtgagcaacgatttccaagaaaacaaggagccaactataggagcagcatttttaactcaaaagtgtactattggagatcgtaccattaaatatgagatatgggatacagcaggacaagagagattccaatcattagcccctatgtactacagaaatgcacaagcagcattagttgtgtacgatatcactaaaccagcatcattcattaaagccaggcattgggtcaaggaattacacgaacaagcctctaaagacataacgattgctttggtgggtaataagtatgatttagcagagaatgacaacgaaaatgaagaaagcttgaggaaagttagtattgaagaaggaaagaacctcgctgaagaagaaggattattatttttcgaaactagtgccaaatcctcatataatgtcaatgatgtgttcgttggaataggtagcaaaattcctgatacgagtgctaacctgggcacagcttcgggattgaatgtcaatggacagtctaataatgaagggagaattgatttaagtgctggatcaaataacaatcgtggtggtgctgatgcatgtgcttgttag

SEQ ID NO: 5154 - protein, 221 aa, Debaryomyces hansenii CBS767
MSFPNPATSVKLVLLGEAAVGKSSLVLRFVSNDFQENKEPTIGAAFLTQKCTIGDRTIKYEIWDTAGQERFQSLAPMYYRNAQAALVVYDITKPASFIKARHWVKELHEQASKDITIALVGNKYDLAENDNENEESLRKVSIEEGKNLAEEEGLLFFETSAKSSYNVNDVFVGIGSKIPDTSANLGTASGLNVNGQSNNEGRIDLSAGSNNNRGGADACAC

SEQ ID NO: 5155 - DNA, 675 bp, Debaryomyces hansenii CBS767
  CDS (1)..(675): transl_table=12
atgtctactactggttcggcaaatagctcgagcaatcgttttgcccaatttaaactagtcctccttggggaaagtgcagttgggaaatcatcaatagtccatcggttcgtgaagaacacgtttgataatatgagagagtccactattggggcagccttcttgacccaatcaatcacattgccagagaacaatacaactgtcaaatttgagatatgggatactgctggccaggaacgttacaaatcgcttgcgccaatgtactatagaaatgccaatgctgcattgtgtgtatacgacataaccagccgttcgtcattcaccaaggcgcaagactggataaaggaattaaagaaacaggcaccagagggtattgtgatttgcttggtgggtaacaaggcagatttggaggagaacagagaggtcgacgagagagaggtgtcccaatatatcgacgaattgaaccaagaagacaacaaaatggttgcagccgaatgttcagccaaatcgggcgacggggtcgttgacatatttaccaaggtagcaagggccttaccggtggaggaagtcatcagcgggtcttccaacagaaacagacagcctggtaacaggagatcgggtggtgttgatttaggaagagcagctagacagcagcagcaacagagctcttgttgctaa

SEQ ID NO: 5156 - protein, 224 aa, Debaryomyces hansenii CBS767
MSTTGSANSSSNRFAQFKLVLLGESAVGKSSIVHRFVKNTFDNMRESTIGAAFLTQSITLPENNTTVKFEIWDTAGQERYKSLAPMYYRNANAALCVYDITSRSSFTKAQDWIKELKKQAPEGIVICLVGNKADLEENREVDEREVSQYIDELNQEDNKMVAAECSAKSGDGVVDIFTKVARALPVEEVISGSSNRNRQPGNRRSGGVDLGRAARQQQQQSSCC

SEQ ID NO: 5157 - DNA, 630 bp, Yarrowia lipolytica CLIB122
  CDS (1)..(630)
atgtctgcccccagaaaaaccaccagcgtcaaactggtgctgctcggcgaggccgcggtcggcaagtcgtcgctggtgctgcggttcgtcagcaacgagttccaggaaaacaaagagcccaccatcggcgcagccttcctcacacaaaagtgcaacttccccgaccgcacaatcaaatttgaaatctgggacacggccggacaggagcgattcgcctctctggcgcccatgtactatcgaaacgcccagaccgcgctcgtggtctatgacatcaccaagcctcagtcattcatcaaggcccgacactgggtcagcgagctcaagtcccaggcatctccaggcatcatcattgccctggtcggcaacaagcgagatctggtggacgacgacgagtctgcccgaaaggtggcggaggacgagggcaagcagctcgccgaggaggagggtctgctcttttttgaaacctcggcaaagaccggcctcaacgtcaaggacgtgttcatggccattgcccagaagattcccgaggagcagaaggcgccatctggaggcctcagaggagcagaggaggacagcagggtcgacctcaactcggccgtcgctggccccgaaagcagctgtgcttgttag

SEQ ID NO: 5158 - protein, 209 aa, Yarrowia lipolytica CLIB122
MSAPRKTTSVKLVLLGEAAVGKSSLVLRFVSNEFQENKEPTIGAAFLTQKCNFPDRTIKFEIWDTAGQERFASLAPMYYRNAQTALVVYDITKPQSFIKARHWVSELKSQASPGIIIALVGNKRDLVDDDESARKVAEDEGKQLAEEEGLLFFETSAKTGLNVKDVFMAIAQKIPEEQKAPSGGLRGAEEDSRVDLNSAVAGPESSCAC

SEQ ID NO: 5159 - DNA, 624 bp, Yarrowia lipolytica CLIB122
  CDS (1)..(624)
atggccaccccaagaacgtcttctcaagagcgatttgcacagttcaaactcgtgttattaggtgaatcgtttgtgggtaaatcctcgctggtgacccggttcgtcaaggacgagtttctcgagcagagagaatcaactatcggagcagccttcctgacccagactgtctctctggaagacaacaagacagtccggttcgagatttgggatactgccggacaggagcgatacaagtcgctggcccccatgtactaccggaacgccaattgtgctgtggtggtctatgacattacacaggcctcgtcattggagcgatctaaggcatgggtcaaggagctccagcaccgagctgctgacggaatcattattggccttgccggaaataagctggatttggaggacaagcgagaggtgcctacagaggaggctcgagcttacgccgaggaggctggtcttctgttctttgagacctcggccctgacaggagagaatgtgctggagctgtttacagaaatcgcacgaaaagtgccattcgagaactccaccgcaagacccagaatgagcgccaagggagtggacctcaataagaacggaggaaccgaagcccaaggctgtaattgttaa

SEQ ID NO: 5160 - protein, 207 aa, Yarrowia lipolytica CLIB122
MATPRTSSQERFAQFKLVLLGESFVGKSSLVTRFVKDEFLEQRESTIGAAFLTQTVSLEDNKTVRFEIWDTAGQERYKSLAPMYYRNANCAVVVYDITQASSLERSKAWVKELQHRAADGIIIGLAGNKLDLEDKREVPTEEARAYAEEAGLLFFETSALTGENVLELFTEIARKVPFENSTARPRMSAKGVDLNKNGGTEAQGCNC

SEQ ID NO: 5161 - DNA, 657 bp, Aspergillus nidulans FGSC A4
  CDS (1)..(657)
atggcatccagagccgcagcaggcgcccgtccaggtgctaggttcgctcagttcaagctcgttctcctcggagaatctgccgtaggaaagagctcattagtcctgagatttgttaaggaccaattcgacgactatcgagaatcaacaatcggtgccgcattcctgacacaaaccatttcgctggatgaaagtacaacagtgaaatttgagatctgggataccgccggtcaagaaagatacaagtccttggctcccatgtactaccggaatgcgaactgtgctgtcgttgtatatgatatcactcaagcttcatcgctagacaaagccaaatcatgggtcaaggaattacaacgccaggcaaacgaaaatattgtcatcgccctcgcaggcaacaagcttgatcttgttaccgagaaccccgacaagagggctatccccactgctgatgctgaagcatatgcgcgcgaagccggtcttcttttcttcgagacttccgctaaaacgtcttcaaatgtgcgcgaactcttcacagccatcgcaaagaagcttccacttgatcaagctggaccccgaaacatgcgaacagcacctcgccctggtgtagatctccgaccggaagcaccgggaacccaaagtggcggagcgtgtaattgttag

SEQ ID NO: 5162 - protein, 218 aa, Aspergillus nidulans FGSC A4
MASRAAAGARPGARFAQFKLVLLGESAVGKSSLVLRFVKDQFDDYRESTIGAAFLTQTISLDESTTVKFEIWDTAGQERYKSLAPMYYRNANCAVVVYDITQASSLDKAKSWVKELQRQANENIVIALAGNKLDLVTENPDKRAIPTADAEAYAREAGLLFFETSAKTSSNVRELFTAIAKKLPLDQAGPRNMRTAPRPGVDLRPEAPGTQSGGACNC

SEQ ID NO: 5163 - DNA, 777 bp, Aspergillus nidulans FGSC A4
  CDS (1)..(777)
atgtctgaatcaacgcccgcaaatgcgccaaaaccgagcagcagcgtcaaactggtacttctcggggaggccgctgtgggaaagtcctcgctggtgcttcgattcgtcaacaatgactttcaagagaacaaggagcccacgattggagctgcctttctgactcagaaatgctcgcttccctcccggacaatcaaatttgagatctgggataccgccggtcaggagcgctttgcttcgctcgcccccatgtactaccgtaatgctcaggcggcattggtagtctacgatgtgaccaaaccctcttctctgaccaaggccaagcattgggtggcggaactccagcggcaagccagtcctggcattgtgattgctctcgtaggcaacaagttggatttgacgaacgacggcggggagacaccagctgagaccgaacgcgaggcgggtacagagggcgacgacgctgacgacaaccaagaagagcaggaggataatacacctggagatgctcgcaaagtacccacacgggaggcgagtacgtatgcagatgaggagggacttctattctttgagaccagcgccaagacgggcctgaatgtgacagacgtctttactgcaattgccaatgccattcccgagagcagtctgaagagtggacgaggcgctggcgcaggcaccggtcagactacgctagggggtggcggccgatctactgacgactcaagagtcaacctgggagatcgcggcgccgcgacagccaaggagggatgcgcctgttaa

SEQ ID NO: 5164 - protein, 258 aa, Aspergillus nidulans FGSC A4
MSESTPANAPKPSSSVKLVLLGEAAVGKSSLVLRFVNNDFQENKEPTIGAAFLTQKCSLPSRTIKFEIWDTAGQERFASLAPMYYRNAQAALVVYDVTKPSSLTKAKHWVAELQRQASPGIVIALVGNKLDLTNDGGETPAETEREAGTEGDDADDNQEEQEDNTPGDARKVPTREASTYADEEGLLFFETSAKTGLNVTDVFTAIANAIPESSLKSGRGAGAGTGQTTLGGGGRSTDDSRVNLGDRGAATAKEGCAC

SEQ ID NO: 5165 - DNA, 666 bp, Candida albicans SC5314
  CDS (1)..(666): transl_table=12
atgtcgaacaaacaatctaaccaacgttttgcccaattcaaacttgtgcttttaggagaaagtgcagttggtaaatcatctatcgtacaccgttttgtcaagaacacatttgatgatatgagagaatcgactataggtgcagcatttttaacacaaacaataactataccggaatccgagacgacgattaaatttgaaatatgggatactgcaggacaggagcgttacaagtcattggcaccaatgtattatagaaacgccaatgctgcattatgtgtttatgatataactagtcgtagctcatttcaaaaagcccaagattggatcaaagaattgaaaaagcaagctccagaaggtattgttattgctctagttgggaacaagtctgatttagacgatgaaagagaagtcgaatcaagtgaagtgcaagagtatgttcaagagcaaaatagcgatggctgttctataattactgctgaatgttctgctaaatctggagatggggttttggatgtatttaacaaaataggaagagctttacctgtggacgaagttatagatgctagtagatcaagacaaggtgctggtgctggaggaagaagaccaggaggtgttgatttgaatagacctagaggtcaagtaaatcaaagcaactcttgctgttag

SEQ ID NO: 5166 - protein, 221 aa, Candida albicans SC5314
MSNKQSNQRFAQFKLVLLGESAVGKSSIVHRFVKNTFDDMRESTIGAAFLTQTITIPESETTIKFEIWDTAGQERYKSLAPMYYRNANAALCVYDITSRSSFQKAQDWIKELKKQAPEGIVIALVGNKSDLDDEREVESSEVQEYVQEQNSDGCSIITAECSAKSGDGVLDVFNKIGRALPVDEVIDASRSRQGAGAGGRRPGGVDLNRPRGQVNQSNSCC

SEQ ID NO: 5167 - DNA, 651 bp, Candida albicans SC5314
  CDS (1)..(651): transl_table=12
atgagtcaacatccagcccccgcaacagcagtgaaattggttttattgggagaagctgcagtaggaaagtcgtcgttggtgttgcgatttgtgtccaatgatttccaagaaaacaaagagccaactataggagctgcgtttttaactcaaaagtgcaccatcggtgagcgcactataaagtatgaaatctgggacactgctgggcaggagcgttttgcttctcttgccccgatgtattatagaaatgcccaagctgctattgtcgtttacgatattaccaaaccagcttcatttataaaagctagacattgggttaaagagttgcatgagcaggctaatagagatataacgattgcattggttggaaacaagcttgacttggtagaagatgatagtgcagaagatggtgagactttacgaaaggtgagtgtcgaggaagggcaaagtttggctgatgaagaaggtttgttattttttgagaccagtgcaaagactggcaataatgttaacgaggtatttgtgggtattggaagcaagatcccgagtgtgacggttactggtggcgaggctcaagaaggttcaaatggtcgcagaattgatttgactgcaaacactgataatgctaatgctccaagaagcacatgttgctaa

SEQ ID NO: 5168 - protein, 216 aa, Candida albicans SC5314
MSQHPAPATAVKLVLLGEAAVGKSSLVLRFVSNDFQENKEPTIGAAFLTQKCTIGERTIKYEIWDTAGQERFASLAPMYYRNAQAAIVVYDITKPASFIKARHWVKELHEQANRDITIALVGNKLDLVEDDSAEDGETLRKVSVEEGQSLADEEGLLFFETSAKTGNNVNEVFVGIGSKIPSVTVTGGEAQEGSNGRRIDLTANTDNANAPRSTCC

SEQ ID NO: 5169 - DNA, 666 bp, Ustilago maydis 521
  CDS (1)..(666)
atggccgctgctccaaggaaccctcgtcagcttcagttcaagctcgtcctgctcggcgagtcggctgttggcaagtcgagtttggtccttagatttgtcaaggaccaattcgacgactatcgcgagagcaccatcggagctgctttcctcacgcaaactgtcagcctcgatgcacagaccaccgtcaagttcgagatctgggataccgcgggacaagagcgatacaagtcgctcgcacccatgtactaccgtaatgccaactgcgctgtggtagtgtacgacatcacgcagccttcgtcgctcgacaaggccaaagcgtggatccgcgaacttcagcgtcaagctgaccccaatatcatcattgccctggcaggcaacaaggcggatttggcgagcacacgccgtgctatccccaccgaagaggccgaaaagtacgcacaggaagagggtcttctcttcctcgagacttcggccaagaactcgtccaacgtctcggagctgtttaccatgatcgcgcgcaagctgccgacagagcaggcagccgaatcgcagcgcagcggcgccggtcgagcgggcgcaggagctgccggtgcgggaggcgcgagaccaggtgtggaccttagagggcagcaaggaggtcaagagcaggacgcttgcaactgttga

SEQ ID NO: 5170 - protein, 221 aa, Ustilago maydis 521
MAAAPRNPRQLQFKLVLLGESAVGKSSLVLRFVKDQFDDYRESTIGAAFLTQTVSLDAQTTVKFEIWDTAGQERYKSLAPMYYRNANCAVVVYDITQPSSLDKAKAWIRELQRQADPNIIIALAGNKADLASTRRAIPTEEAEKYAQEEGLLFLETSAKNSSNVSELFTMIARKLPTEQAAESQRSGAGRAGAGAAGAGGARPGVDLRGQQGGQEQDACNC

SEQ ID NO: 5171 - DNA, 609 bp, Cryptococcus neoformans var. neoformans B-3501A
  CDS (1)..(609)
atgtctcgaacaacctcgtttaagctcgtccttctcggagaatctgctgttggaaagagcagcttagttctcagattcgtgcgaaatgagttctcagacttcagagaatcgactatcgctgcatttcttactcaatcagtaaagcttagcgagtctacatctatcaaattcgagatatgggatacggcaggacaagaacgctacaaatcgctggctcccatctactttagaaactcaaacgccgctgtaattgtttacgacattacccaaccgcctgagacatcctttgaaaaggccaagtcttgggtgcgggaactccaacgtcaggctgacccgtcaatcgtgattatgcttgtcggaaacaagacagatatggaatctcagcggaaaacttctcgtgagattggtgaacagtatgccaaagaagaaggattgctgtttgcagaagctagtgcaaagaccggggaaggagtcgaggaactttttatggagatcgctaaaaagcttcctcttgccccaccgccgccgagagggcaagttgctggtggtaaaggtgttcaagtatccggacaggaagactctgccactccttcagcttgtacatgttaa

SEQ ID NO: 5172 - protein, 202 aa, Cryptococcus neoformans var. neoformans B-3501A
MSRTTSFKLVLLGESAVGKSSLVLRFVRNEFSDFRESTIAAFLTQSVKLSESTSIKFEIWDTAGQERYKSLAPIYFRNSNAAVIVYDITQPPETSFEKAKSWVRELQRQADPSIVIMLVGNKTDMESQRKTSREIGEQYAKEEGLLFAEASAKTGEGVEELFMEIAKKLPLAPPPPRGQVAGGKGVQVSGQEDSATPSACTC

SEQ ID NO: 5173 - DNA, 675 bp, Tribolium castaneum
  CDS (1)..(675)
atgaaaacaattgttggtaaagtggttgttttgggacatcaaggtgtgggaaaaaccagcacagttatacgctatgtggaaaattctttcagccagcacatcaccccaaccgttggcgcttcattcttcagctgtaaactcctaattgacgacatcactgtaaaacttcaaatatgggacaccgcaggtcaagaacggttcaaagcaatggccccaatgttctatcgcaacgccaatgctgctttaatcgttttcgatatcacactaagacaaagtttcgaaagcatgcaaggatgggtttttgaactcaaacaaaacgttgacaatccaatggtcctgtgcgttgtgggcaacaaaagcgacctagcaaaaaatagacaagtgaatagggacgaggcaatacagtatgccaaaagtataggagctacttatcacgaatgctcagccatgcatgaccagggcgtaggtttagtttttgacgacgtagcgcgaggcttgattcgactgctgggaaatagcagtgaccacaatctgaaagtgtacgacagtgaaaatatcgataatattatggcgaattcgagcgagctcgaagccacagatacggggaaagaggagacggttaatttgagtattaatagcatagcacatggcaatactgtgaagaagtgttgctga

SEQ ID NO: 5174 - protein, 224 aa, Tribolium castaneum
MKTIVGKVVVLGHQGVGKTSTVIRYVENSFSQHITPTVGASFFSCKLLIDDITVKLQIWDTAGQERFKAMAPMFYRNANAALIVFDITLRQSFESMQGWVFELKQNVDNPMVLCVVGNKSDLAKNRQVNRDEAIQYAKSIGATYHECSAMHDQGVGLVFDDVARGLIRLLGNSSDHNLKVYDSENIDNIMANSSELEATDTGKEETVNLSINSIAHGNTVKKCC

SEQ ID NO: 5175 - DNA, 642 bp, Anopheles gambiae
  CDS (1)..(642)
atggcatcgagtccgcgagtaggtggtgccgcccagcgcccgaacggtgcgacacagaacaaaatctgtcaatttaagctcgtcctgctgggcgaatcggccgtcggcaaatcgtcgctggtgttacgcttcgtcaagggccagttccacgagtaccaggaaagtacgatcggtgccgctttcctcacacaaaccctctgcatcgacgatacgacagtgaagttcgaaatctgggacactgctggacaggaaaggtaccacagtttggcgcccatgtactaccgaggtgcacaggccgcgatcgtggtgtacgatattcaaaacagtgatagctttgcgagggccaaaacgtgggtcaaggagcttcaaagacaggcatcgccaaacattgtgattgcattagccggtaacaaggccgatctggcaaacagtcgcgtcgtggactacgaggaggccaagcaatacgctgacgacaataggctactatttatggagacatccgccaaaacggccgtcaatgtgaatgatatattccttgcaatagctaaaaagttacccaagaacgagggtgctggaccgcagcaaaacattagaccaacgcaaaacgaaaccaataggcagaacagcggctgctgtgcttaa

SEQ ID NO: 5176 - protein, 213 aa, Anopheles gambiae
MASSPRVGGAAQRPNGATQNKICQFKLVLLGESAVGKSSLVLRFVKGQFHEYQESTIGAAFLTQTLCIDDTTVKFEIWDTAGQERYHSLAPMYYRGAQAAIVVYDIQNSDSFARAKTWVKELQRQASPNIVIALAGNKADLANSRVVDYEEAKQYADDNRLLFMETSAKTAVNVNDIFLAIAKKLPKNEGAGPQQNIRPTQNETNRQNSGCCA

SEQ ID NO: 5177 - DNA, 672 bp, Vitis vinifera
  CDS (1)..(672)
atgtcgaatctgtatggagatttcaaccaaaagattgattatgtgttcaaggttgtgttgataggagactccgcggttgggaaatcgcaactcctggctcggttcgcgaggaatgaattcaatgtggattcaaaagcaacaattggggttgaatttcaaacaaaaacgcttgctatagatcaaaaggcggtgaaggcacagatatgggacaccgccgggcaggaaaggtaccgagcagtgacgagtgcatactaccgtggtgcagttggtgcaatgttagtctatgacatgactaaacgccaatcatttgaccacatggctaggtggctagaggaactgagggggcatgcagataagaacatcgtgatcatgctcattggcaacaagtcagatttggggagtcttcgagcagtaccaactgaagatgcacaagagtttgcagaaagagagaatctcttcttcatggaaacatcggctctagaggcaaccaatgttgagactgcattcctgactgtcctaactgatatatacaagatcatcagcaagaagaccctcactgccaacactgacacagactccactgggagctcaacccttcttaaggggaccaagattattgtccctgggggtcctgactcggctgctcagaaaggtggctgctgtgggtcataa

SEQ ID NO: 5178 - protein, 223 aa, Vitis vinifera
MSNLYGDFNQKIDYVFKVVLIGDSAVGKSQLLARFARNEFNVDSKATIGVEFQTKTLAIDQKAVKAQIWDTAGQERYRAVTSAYYRGAVGAMLVYDMTKRQSFDHMARWLEELRGHADKNIVIMLIGNKSDLGSLRAVPTEDAQEFAERENLFFMETSALEATNVETAFLTVLTDIYKIISKKTLTANTDTDSTGSSTLLKGTKIIVPGGPDSAAQKGGCCGS

SEQ ID NO: 5179 - DNA, 603 bp, Vitis vinifera
  CDS (1)..(603)
atggcgaccatcggccacaacaatctcaatgcaaaattggttcttcttggtgacatgggagccggaaagtccagtctcgtcttgcgctttgtcaagggccagtttcttgaattccaggaatctacaattggagcggcgttcttttcacagacactagcggtaaatgatgccacagtgaagtttgagatatgggacacagctgggcaggagaggtaccacagcttagctccgatgtactatagaggtgctgctgcggccataattgtctatgacattactagcacagagtcatttgcacgggctaagaagtgggtgcaagaacttcagaaacaaggtaaccctaacatggttatggcgcttgctgggaacaaagctgatttagaagataagaggaaagtgactgctgaagaggcacgtgtctatgctgaagaaaatggccttttcttcacggagacctctgccaaaacagccgtaaatgtcaatgatacattttatgaaatagctaagagattgcccagagctcagcctgctcagaatccagctgggatggttctggtggacagaccagcggaaagttcccaagctgcatcatgctgttcctaa

SEQ ID NO: 5180 - protein, 200 aa, Vitis vinifera
MATIGHNNLNAKLVLLGDMGAGKSSLVLRFVKGQFLEFQESTIGAAFFSQTLAVNDATVKFEIWDTAGQERYHSLAPMYYRGAAAAIIVYDITSTESFARAKKWVQELQKQGNPNMVMALAGNKADLEDKRKVTAEEARVYAEENGLFFTETSAKTAVNVNDTFYEIAKRLPRAQPAQNPAGMVLVDRPAESSQAASCCS

SEQ ID NO: 5181 - DNA, 603 bp, Vitis vinifera
  CDS (1)..(603)
atgggttgctcctcctcccttccggatagaaattctggacggttgggtgggctgaatgcggagaatggtggagcacccgatgcaaaaaacctccgggttaagctggttttgttgggggattctggtgttggaaaaagctgtattgttcttcgttttgttcgtggccagtttgaccctacatccaaggtgactgtaggagcttcattcttgtcacaaacaattgccttgcaagattctacgacagttaagtttgaaatatgggacactgctggtcaagagaggtatgctgcgctggcaccactttactatcgaggtgctgcagttgcagttgtagtgtatgatataacaagcccagaatcattcaacaaagcacagtattgggttaaggaattgcaaaaacatggaagccctgatattgtcatggctttagttgggaacaaagctgatcttcatgagaatcgagaagtaccagttcaagatggtattgattatgcagagaagaatggtatgttctttattgaaacatctgcaaagacagctgataacataaaccagctgtttgaggaaattgctaaaagattgccacgcccttcctcatcgtga

SEQ ID NO: 5182 - protein, 200 aa, Vitis vinifera
MGCSSSLPDRNSGRLGGLNAENGGAPDAKNLRVKLVLLGDSGVGKSCIVLRFVRGQFDPTSKVTVGASFLSQTIALQDSTTVKFEIWDTAGQERYAALAPLYYRGAAVAVVVYDITSPESFNKAQYWVKELQKHGSPDIVMALVGNKADLHENREVPVQDGIDYAEKNGMFFIETSAKTADNINQLFEEIAKRLPRPSSS

SEQ ID NO: 5183 - DNA, 624 bp, Lentinula edodes
  CDS (1)..(624)
atgtccaagcaattccagttcaaattagtattactaggcgagtctgcagttggaaagtctagtctcgttctccgcttcgtgaaggaccaattcgatgactaccgggaaagtaccattggcgctgctttcctcacgcaaactgtgacgctcgaggaccaaaccacagtcaagtttgagatatgggatactgctgggcaagaaagatacaagtcgctggccccaatgtattaccggaatgccaactgtgcggtcgtagtatatgatatcacccagtcagcatcactagagaaagctcgcaattggatccgtgaactacaacgtcaagccgacccctcaatagtgattgctctttgtggaaataaatcagatctttccgctcgccgtcaggtctcggaggaagaggccaagaaatatgctgaggaagaaggactgatgtgggcagaaactagtgcaaagactggcgagggtgtatcggagatttttaccgctatagcgaagaaattacccctgactgcacctccatcggccagaactggtgcaggtcgcgcaccgacaggtcccaagtcagtggatcttaacaagcagccggcgggtcagaactccaatgaaccatgtaattgctaa

SEQ ID NO: 5184 - protein, 207 aa, Lentinula edodes
MSKQFQFKLVLLGESAVGKSSLVLRFVKDQFDDYRESTIGAAFLTQTVTLEDQTTVKFEIWDTAGQERYKSLAPMYYRNANCAVVVYDITQSASLEKARNWIRELQRQADPSIVIALCGNKSDLSARRQVSEEEAKKYAEEEGLMWAETSAKTGEGVSEIFTAIAKKLPLTAPPSARTGAGRAPTGPKSVDLNKQPAGQNSNEPCNC

SEQ ID NO: 5185 - DNA, 609 bp, Picea sitchensis
  CDS (1)..(609)
atgggatgctctgcttcctctgcagggaaatcatcagggctggtccgtggttcaactcttgagaactctggcatgtcagactcgaaaaacttgcggataaagttggttcttttgggtgactcaggtgtcggtaaaagttgcatagttctacgttttgtacgtggccagtttgacccttcatcaaaggtgacagtaggagcatcttttttatcacaaacaattgcattgcaggattctactactgtgaagttcgagatatgggatactgctggtcaggaaaggtatgcttctttagcacctctttattaccggggggcatctgctgcagtgattgtgtatgacataacctgtatggaaacttttcataaagctcaattctgggttaaggagcttcagaaacatgggaatcccaatatagtaatggctctggtgggaaacaaggctgatcttgaagagagccgttctgttggacatgatgttgcacaagcttatgcagatgccaatgggatgttcttaattgagacttctgcaaaaacagcagacaacataaaccagctatttgaggaaattgcaaagcgcttaccccggacaactccattgcagacatag

SEQ ID NO: 5186 - protein, 202 aa, Picea sitchensis
MGCSASSAGKSSGLVRGSTLENSGMSDSKNLRIKLVLLGDSGVGKSCIVLRFVRGQFDPSSKVTVGASFLSQTIALQDSTTVKFEIWDTAGQERYASLAPLYYRGASAAVIVYDITCMETFHKAQFWVKELQKHGNPNIVMALVGNKADLEESRSVGHDVAQAYADANGMFLIETSAKTADNINQLFEEIAKRLPRTTPLQT

SEQ ID NO: 5187 - DNA, 603 bp, Populus trichocarpa
  CDS (1)..(603)
atggccaccactgcaaacaagaatatcaatgctaaattggtgcttctcggggatgttggtgcaggaaagtccagtcttgtactgcgttttgttaaaggacagtttgttgagttccaggaatcaaccataggtgctgcctttttctcgcaaacattggctgtcaatgatgcaactgtaaaatttgagatttgggacacagcaggtcaggagagataccacagcttagctccaatgtactacaggggagctgcagcagcaattattgtgtatgatatatcaaatcaggcctcatttgagcgagcaaaaaaatgggttcaagaacttcaagcacaaggcaacccaaatatggttatggcacttgcggggaacaaagctgatttgctagatgcaaggaaggttgctgccgaggaagcacaagtttttgctcaggagaatggtcttttctttatggaaacctcagcgaaaaccgcaaccaatgtcaatgacattttctatgaaatagcaaaaagactatctcaagtacagccagcgccaaacccttctggaatggttatcatggatagacctacagaaaggacagctagtgcagcttgctgctcataa

SEQ ID NO: 5188 - protein, 200 aa, Populus trichocarpa
MATTANKNINAKLVLLGDVGAGKSSLVLRFVKGQFVEFQESTIGAAFFSQTLAVNDATVKFEIWDTAGQERYHSLAPMYYRGAAAAIIVYDISNQASFERAKKWVQELQAQGNPNMVMALAGNKADLLDARKVAAEEAQVFAQENGLFFMETSAKTATNVNDIFYEIAKRLSQVQPAPNPSGMVIMDRPTERTASAACCS

SEQ ID NO: 5189 - DNA, 606 bp, Populus jackii
  CDS (1)..(606)
atggggtgctcctcttctcttccagataggagtactgggagattgggtggacttaacaattcagagagtggtggagtggctgatgccaaaaacctacgcgtaaagctggttttattaggtgattctggtgttggtaaaagctgtattgttcttcgctttgttcgtggccagtttgatccaacatccaaggtaactattggagcttcatttttgtcacaaacaatagctttacaggattctacaacaattaagtttgagatatgggatactgctggacaagaaaggtatgccgcactagcaccgctatattacagaggtgctgcagttgcagttattgtgtacgatataacaagcccagagacattcaacaaagcacagtattgggttaaggagctacaaaaacatgggagccctgatatagtcatggctttagtaggtaacaaggctgatcttcatgagaagcgagaagtacccactcaagatggcattgaatatgcggagaagaatgggatgttctttattgagacatctgcaaaaactgcagataatataaatcaactgtttgaggaaattgctaagcgactcccgcgcccttcctcaacatga

SEQ ID NO: 5190 - protein, 201 aa, Populus jackii
MGCSSSLPDRSTGRLGGLNNSESGGVADAKNLRVKLVLLGDSGVGKSCIVLRFVRGQFDPTSKVTIGASFLSQTIALQDSTTIKFEIWDTAGQERYAALAPLYYRGAAVAVIVYDITSPETFNKAQYWVKELQKHGSPDIVMALVGNKADLHEKREVPTQDGIEYAEKNGMFFIETSAKTADNINQLFEEIAKRLPRPSST

SEQ ID NO: 5191 - DNA, 681 bp, Physcomitrella patens subsp
  CDS (1)..(681)
atgggctgtacatcttcttcgcccgctgctgtgaaaggctctgggcgcttgcacacctctcaggctgaagctttggattccaaacaaatacgaatcaagttagttctgttgggtgactcaggagtcgggaagagctgcattctcttgcggttcgttcgtggacaattcgatccgtcgtctaaggtgacggttggtgcatcttttctctcccagacgattagcttacaagactcaaccaacgttaaattcgagatatgggacactgctggtcaagaacgatatgcttcgttagcgcccttatattacaggggtgcagcagcggcagtcgtagtgtatgatatcacaaacccggagacattcctgaaagctcaattctgggtcaaagagctgcagaagcatgggaatcctgatattgtaatggctctggtcgggaataaagccgatctcgagaatgagcgagaggtttctcatgcagaagcccaggcctatgccaaaagtaatggcatgttctttattgaaacgtcagcgaagacttctgagaacgtgaaccaattatttgagcaatgcactgaaggcgatattgccaggaagcccaagcatccaagtctgtacagccggtcgagaaattctttgtccaaggtccatcaatttcgcagaattcacccttcaatccgggcctga

SEQ ID NO: 5192 - protein, 226 aa, Physcomitrella patens subsp
MGCTSSSPAAVKGSGRLHTSQAEALDSKQIRIKLVLLGDSGVGKSCILLRFVRGQFDPSSKVTVGASFLSQTISLQDSTNVKFEIWDTAGQERYASLAPLYYRGAAAAVVVYDITNPETFLKAQFWVKELQKHGNPDIVMALVGNKADLENEREVSHAEAQAYAKSNGMFFIETSAKTSENVNQLFEQCTEGDIARKPKHPSLYSRSRNSLSKVHQFRRIHPSIRA

SEQ ID NO: 5193 - DNA, 681 bp, Physcomitrella patens subsp
  CDS (1)..(681)
atgggctgttcatcatcttctcctgctgctgtgaaaggctctggacgtttacaaaccacctcccagcccgatgtgttggattctaaaaatctgcgcattaagctggttctattgggtgactcaggagtcggcaaaagttgcatcctcttacgatttgttcgcggtcaattcgacccatcgtccaaggtgacggttggtgcgtcttttctctctcagacaattaatttgcaagactcaaccatcaagttcgaaatatgggacacggctggacaagaacggtattcctcattagcgcctctatattacaggggagcatcagcggcggttgtagtttacgatattaccaatccggaaacattcctgaaagcgcagttctgggtcaaggagctccaaaagcatggtaaccctgacatcgtaatggcgttggttggaaacaaagctgacctcgaaagtgaacgtgaagtatctcgcgaagaagcccttgcctatgctgaaagtaacggcatgttcttcatcgaaacgtcagcaaagactgctgataatgtgaatcaattatttgagcaatgcactgagggcgatattgccaggaagcccaagcatccaagtctgtacagccggtcgagaaattctctgtccaaggttcatcagtttcgcagaatccatccctcaattcgggcctga

SEQ ID NO: 5194 - protein, 226 aa, Physcomitrella patens subsp
MGCSSSSPAAVKGSGRLQTTSQPDVLDSKNLRIKLVLLGDSGVGKSCILLRFVRGQFDPSSKVTVGASFLSQTINLQDSTIKFEIWDTAGQERYSSLAPLYYRGASAAVVVYDITNPETFLKAQFWVKELQKHGNPDIVMALVGNKADLESEREVSREEALAYAESNGMFFIETSAKTADNVNQLFEQCTEGDIARKPKHPSLYSRSRNSLSKVHQFRRIHPSIRA

SEQ ID NO: 5195 - DNA, 606 bp, Mesembryanthemum crystallinum
  CDS (1)..(606)
atgggttgcgcctcctctgcccccgatagaactgtctctagaggttccagtagtcttaattctgctaatgagggagcttccgatgccaaaaatttgaaagttaagctggtgctgcttggagattctggtgtgggaaagagttgtattgttctccgttttgttcgaggtcaatttgaccccacgtctaaggtgactgttggagcttcttttctctctcaaacgatagcactgcaggactctagtactgttaagtttgaaatatgggacactgctgggcaagaaaggtatgctgctctagcaccgctttactatcgaggagctgccgttgcggttattgtgtatgatataacaagtcctgagtccttcacaaaagcgcaatattgggttaaggaactacaaaagcatgggagtcctgatataatcatggctttggttgggaacaaagctgatcttcaagaacgtcgggaagtacctgcacaggatggtattgaatatgcggagaagaatgggatgttctttattgagacatctgcaaaaacagcagataacattaatcagctttttgaggaaattgctaaacgacttccacgcctgcttccttcatga

SEQ ID NO: 5196 - protein, 201 aa, Mesembryanthemum crystallinum
MGCASSAPDRTVSRGSSSLNSANEGASDAKNLKVKLVLLGDSGVGKSCIVLRFVRGQFDPTSKVTVGASFLSQTIALQDSSTVKFEIWDTAGQERYAALAPLYYRGAAVAVIVYDITSPESFTKAQYWVKELQKHGSPDIIMALVGNKADLQERREVPAQDGIEYAEKNGMFFIETSAKTADNINQLFEEIAKRLPRLLPS

SEQ ID NO: 5197 - DNA, 603 bp, Lotus japonicus
  CDS (1)..(603)
atggctacgatcgggcacaacaatctcaatgctaaattggttctcctcggggatatgggtgctggaaaatccagccttgttttgcgctttgtcaagggtcaatttctcgaatttcaggaatcaacaataggggcggcattcttttcgcagactttggcagtaaacgatgcaactgttaaatttgagatttgggacacagcggggcaagagaggtaccatagcttggctcccatgtattacagaggcgctgctgctgctatcattgtctacgacatcactagctcagattcgtttacacgagctaagaagtgggtccaagagcttcaaaagcaagggaaccctaacatggtcatggctttcgctggtaacaaatctgacttggaagataagagaaaagtgactgctgatgaggcacgtgtttatgctgaagaaaatggtctgtttttcatggagacctctgccaaaactgcagccaatgttaatgatgtattttatgaaatagccaagaggttaccaagggctcagccagctcaaaacccagcagggatggttcttgttgatagacccgccgaaggagctagggcttcatcatgttgttcataa

SEQ ID NO: 5198 - protein, 200 aa, Lotus japonicus
MATIGHNNLNAKLVLLGDMGAGKSSLVLRFVKGQFLEFQESTIGAAFFSQTLAVNDATVKFEIWDTAGQERYHSLAPMYYRGAAAAIIVYDITSSDSFTRAKKWVQELQKQGNPNMVMAFAGNKSDLEDKRKVTADEARVYAEENGLFFMETSAKTAANVNDVFYEIAKRLPRAQPAQNPAGMVLVDRPAEGARASSCCS

SEQ ID NO: 5199 - DNA, 603 bp, Lotus japonicus
  CDS (1)..(603)
atgggttgtgggtcttccctaccagatagggattctaggccgtttggacgagacaatcctgagaatggtggaggacaggacgcgaagaatctacgcgtcaagcttgttctcttaggtgattccggtgttggtaaaagctgtattgttctgcgatttgttcgtggtcagtttgatccaacatccaaggtaactgttggagcttcttttttgtcgcaaacaatagccctgcaagactctacaacagtcaagtttgaaatatgggatactgctggtcaagagaggtatgctgctttggcaccactctattatcgtggtgcagctgttgcagttattgtctatgatataacaagcccagaatctttcagcaaagcgcagtactgggttaaggagctacaaaaacatggaaaccctgatatagtaatggcactggttggtaataaagctgatcttcttgagaagcgggaagtggctgttcaggatggcattgactatgcagagaagaatggaatgttttttatagagacatctgcaaagactgcagataatataaatgaactgtttgaggaaattgcgaaaagactccctcgcccaccaactacttga

SEQ ID NO: 5200 - protein, 200 aa, Lotus japonicus
MGCGSSLPDRDSRPFGRDNPENGGGQDAKNLRVKLVLLGDSGVGKSCIVLRFVRGQFDPTSKVTVGASFLSQTIALQDSTTVKFEIWDTAGQERYAALAPLYYRGAAVAVIVYDITSPESFSKAQYWVKELQKHGNPDIVMALVGNKADLLEKREVAVQDGIDYAEKNGMFFIETSAKTADNINELFEEIAKRLPRPPTT

SEQ ID NO: 5201 - DNA, 603 bp, Nicotiana tabacum
  CDS (1)..(603)
atggcaaccagtggaaacaagaatatgaacgccaaattggtgcttcttggagatgttggagctggaaaatctagtctcctcctgcgttttgttaaaggacaatttattgaatttcaggaatcaactattggtgccgcatttttctcccaaacagtagcagtaaatgatgcaactgtaaaatttgaaatatgggacacagcaggccaagagagataccacagtcttcctccaatgtactatagaggagctgcggctgctataattgtttttgatatcacaaatcaagcatcatttgatagagcaaaaaagtgggttcaggagcttcaggcacaaggtaatccaaatatggtgatggcacttgcggggaataaggcagatttgttagatgcaagaaaagtggctgcagaggaagcacaaacatatgcccaggagaatggtcttttcttcatggaaacatctgcaaaaactgcatctaatgttaatgacattttctatgaaatagcaaatagactgcctcggcttcagccagcacaaaatccatctgggatggttcttatggataggcctgctcaaaccccggctagtgcttcttgttgctcttaa

SEQ ID NO: 5202 - protein, 200 aa, Nicotiana tabacum
MATSGNKNMNAKLVLLGDVGAGKSSLLLRFVKGQFIEFQESTIGAAFFSQTVAVNDATVKFEIWDTAGQERYHSLPPMYYRGAAAAIIVFDITNQASFDRAKKWVQELQAQGNPNMVMALAGNKADLLDARKVAAEEAQTYAQENGLFFMETSAKTASNVNDIFYEIANRLPRLQPAQNPSGMVLMDRPAQTPASASCCS

SEQ ID NO: 5203 - DNA, 600 bp, Oryza sativa
  CDS (1)..(600)
atgggttgctcctcctccgtgccagctcgaagcactggagggttgaacaatattagcaacgataactccgctactgattcaaaggacttgcgtgctaagttggtattgcttggtgactctggtgtagggaaaagttgcattgttcttcgctttgttcgtggtcagtttgatcccacttccaaggtaactgtcggtgcatcatttttatcacaaacattggctttggaggactcaacaatagtgaaatttgaaatatgggataccgctggacaagagaggtatgctgccttggcacctctttactacagaggagctgctgctgcagttgttgtctacgacataactagtccagaatcatttagcaaagcacaatactgggtgaaggaacttcaaaaacatggtagtcctgatattatcatggttttggttggtaataaagctgatctacataaaaatcgacatgtatcttctcaggaagcacaagagtatgcagagaagaataatatggttttcatcgagacatcagcaaagacagctgataatataaaccaagtatttgaggaaattgcgaagaggttgcccaggccaacggcgtcttga

SEQ ID NO: 5204 - protein, 199 aa, Oryza sativa
MGCSSSVPARSTGGLNNISNDNSATDSKDLRAKLVLLGDSGVGKSCIVLRFVRGQFDPTSKVTVGASFLSQTLALEDSTIVKFEIWDTAGQERYAALAPLYYRGAAAAVVVYDITSPESFSKAQYWVKELQKHGSPDIIMVLVGNKADLHKNRHVSSQEAQEYAEKNNMVFIETSAKTADNINQVFEEIAKRLPRPTAS

SEQ ID NO: 5205 - DNA, 663 bp, Saccharomyces cerevisiae
  CDS (1)..(663)
atggacaaacatacagcagctattccaacattaactatcaaagtagtcttactcggagaatctgctgtcgggaagtcctcaatagtcctcaggtttgtatctgacgattttaaagagagcaaagaacctactattggtgccgcatttttaacaaagagaattacaagggatggcaaggtcattaaatttgaaatatgggatacggcaggccaggagagatttgctcctttagcgcctatgtactacagaaatgctcaagctgctttggtagtttttgatgttagtaatgaagggtctttttataaggctcaaaactgggtcgaagaactacacgagaaggtaggacatgatatcgttattgccttggtggggaacaaaatggatttgctgaataatgatgacgagaatgaaaatagggctatggaagcaccagctgtacaaaatctctgtgacagagagaacctcttatatttcgaagcaagcgctaagactggtgagaatatttaccagatatttcaaacattaggcgaaaaagtaccatgtcctgaacaaaatacacgacaaagctctactcatgatcgcacaattaccgataatcaacgaatcgatctcgaatcaacgactgtagaaagtactagggagactggaggttgtaactgctaa

SEQ ID NO: 5206 - protein, 220 aa, Saccharomyces cerevisiae
MDKHTAAIPTLTIKVVLLGESAVGKSSIVLRFVSDDFKESKEPTIGAAFLTKRITRDGKVIKFEIWDTAGQERFAPLAPMYYRNAQAALVVFDVSNEGSFYKAQNWVEELHEKVGHDIVIALVGNKMDLLNNDDENENRAMEAPAVQNLCDRENLLYFEASAKTGENIYQIFQTLGEKVPCPEQNTRQSSTHDRTITDNQRIDLESTTVESTRETGGCNC

SEQ ID NO: 5207 - DNA, 603 bp, Cichorium intybus x Cichorium endivia
  CDS (1)..(603)
atggcgacgatcggacacaataatctcaacgcaaaattggttttgcttggggacatgggagctggtaaatcaagtctcgtgttgcgattcgtcaaaggccaatttctagaattccaggaatcgacgatcggagcggcgtttttttcgcaaaccctagcagtgaatgatgcaacggtgaaattcgagatctgggatacggcgggtcaagaaaggtatcatagtctggctcctatgtactacaggggcgctgcagcagcaattattgtctacgatataactagcgcggattcatttacacgggctaaaaagtgggttcaagaacttcaaaaacaaggtaatccaaacatggtaatggcacttgctggaaataaagctgatcttgaagacaagaggaaagtaacagcagaagaagcacgtgtatatgctgaagagaatggtcttttcttcatggagacatctgctaaaactgctgctaatgttaatgatgtatttcatgaaattgccaagagactacctagagctcagccaactcagaatccagctggaatggttcttgttgacagaccagctgaaggggcccgtgctgcatcatgctgttcataa

SEQ ID NO: 5208 - protein, 200 aa, Cichorium intybus x Cichorium endivia
MATIGHNNLNAKLVLLGDMGAGKSSLVLRFVKGQFLEFQESTIGAAFFSQTLAVNDATVKFEIWDTAGQERYHSLAPMYYRGAAAAIIVYDITSADSFTRAKKWVQELQKQGNPNMVMALAGNKADLEDKRKVTAEEARVYAEENGLFFMETSAKTAANVNDVFHEIAKRLPRAQPTQNPAGMVLVDRPAEGARAASCCS

SEQ ID NO: 5209 - DNA, 603 bp, Cichorium intybus x Cichorium endivia
  CDS (1)..(603)
atggcgacgatcggacacaataatctcaacgcaaaatttgttttgcttggggacatgggagctggtaaatcaagtctcgtgttgcgattcgtcaaaggccaatttctagaattccaggaatcgacgatcggagcggcgtttttttcgcaaaccctagcagtgaatgatgcaacggtgaaattcgagatctgggatacggcgggtcaagaaaggtatcatagtctggctcctatgtactacaggggcgctgcagcagcaattattgtctacgatataactagcgcggattcatttacacgggctaaaaagtgggttcaagaacttcaaaaacaaggtaatccaaacatggtaatggcacttgctggaaataaagctgatcttgaagacaagaggaaagtaacagcagaagaagcacgtgtatatgctgaagagaatggtcttttcttcatggagacatctgctaaaactgctgctaatgttaatgatgtatttcatgaaattgccaagagactacctagagctcagccaactcagaatccagctggaatggttcttgttgacagaccagctgaaggggcccgtgctgcatcatgctgttcataa

SEQ ID NO: 5210 - protein, 200 aa, Cichorium intybus x Cichorium endivia
MATIGHNNLNAKFVLLGDMGAGKSSLVLRFVKGQFLEFQESTIGAAFFSQTLAVNDATVKFEIWDTAGQERYHSLAPMYYRGAAAAIIVYDITSADSFTRAKKWVQELQKQGNPNMVMALAGNKADLEDKRKVTAEEARVYAEENGLFFMETSAKTAANVNDVFHEIAKRLPRAQPTQNPAGMVLVDRPAEGARAASCCS

SEQ ID NO: 5211 - DNA, 651 bp, Pichia pastoris
  CDS (1)..(651)
atggctagaccgtctgtgcaaaataaaaggtcctcacagtcccttttcactcccattgcaagcaaggaggccgatctcaagatagtattgcttggcgaatctgcggtcggtaaatcttccctggttacacgatttgcatcaaacgcttttgatgcagataaagaaagcactataggtgctgcctttattgtcaagaaatactatgtaactgatccagaaacaaacgaggtgaagctaattaatttccagatttgggacaccgccggtcaagagcgttaccaatccctggctccaatgtactatagaaatgcttctgttgccataatagtatttgacctcacagatatatccagcttgacgaaggcagagttctggatagccgaattagaggcatacaacagagaagaacataagatacagattctactagtgggcaataagtcagatttatccaagaatgagaatgacaatcaaatatcggaaacggttgaaaggttgaaggtaccatattttaagacaagtgcaaaagaaggtacaggagtcgacgaattattcaaatacattgtagatagcatagatgacggtatttttgtcgagtctcgggagactttggatttggatcagaaaagcaaaaagtctagttgctgttaa

SEQ ID NO: 5212 - protein, 216 aa, Pichia pastoris
MARPSVQNKRSSQSLFTPIASKEADLKIVLLGESAVGKSSLVTRFASNAFDADKESTIGAAFIVKKYYVTDPETNEVKLINFQIWDTAGQERYQSLAPMYYRNASVAIIVFDLTDISSLTKAEFWIAELEAYNREEHKIQILLVGNKSDLSKNENDNQISETVERLKVPYFKTSAKEGTGVDELFKYIVDSIDDGIFVESRETLDLDQKSKKSSCC

SEQ ID NO: 5213 - DNA, 603 bp, Nicotiana tabacum
  CDS (1)..(603)
atggcgtcaaggcgtcacaataatctcaatgcaaaactcgtgttattaggggacatgggagctggtaaatcaagcttggttatacgattcgtcaagggtcaattccttgaattccaggaatcgacgatcggagcggcgttcttttcgtcaacggtgtcagttaacaatgcaacggtgaagtttgagatctgggatactgctggtcaggagaggtaccacagcttagcgcctatgtactacagaggtgctgcagctgctatcatcgtgtatgacatcacaagcactgaatcacttgcacgagcaaagaaatgggttcaagagttgcagaagcaaggtaatcccaacatggtcatggctcttgctggaaacaaagccgatctagaagataagaggaaggtgactgcagaagaagcacgtctgtacgcagaggaaaacggtctttttttcatggaaacctctgccaaaactgctaccaatgtcaatgatattttctacgaaatagctaaacggttgcctagagctcaacctgcacaaaatccggcaggaatggtactagaagacaaaccagcgcaaggatcacaagctgcatcatgctgtacttaa

SEQ ID NO: 5214 - protein, 200 aa, Nicotiana tabacum
MASRRHNNLNAKLVLLGDMGAGKSSLVIRFVKGQFLEFQESTIGAAFFSSTVSVNNATVKFEIWDTAGQERYHSLAPMYYRGAAAAIIVYDITSTESLARAKKWVQELQKQGNPNMVMALAGNKADLEDKRKVTAEEARLYAEENGLFFMETSAKTATNVNDIFYEIAKRLPRAQPAQNPAGMVLEDKPAQGSQAASCCT

SEQ ID NO: 5215 - DNA, 603 bp, Arabidopsis thaliana
  CDS (1)..(603)
atggctagctctggaaacaagaacatcaacgccaaattggtattactaggagatgttggagctggaaaatcaagtcttgtgctacggtttgttaaagatcaatttgttgaatttcaggaatcaaccattggtgcagcctttttctctcaaacattggctgtgaatgatgcgactgtgaagtttgagatatgggatacagctggtcaggaacgataccacagtttggctccaatgtactacaggggtgcagctgctgctattattgtctttgacattactaatcaagcctcatttgagagggcgaagaaatgggttcaggaactgcaggcacaaggtaaccctaatatggtgatggctcttgctggaaacaaagctgatttattagacgcaaggaaggtgtctgcagaggaggcagagatttatgctcaagagaacagccttttcttcatggaaacctcagcgaagaccgcaacaaatgtcaaagacatattctacgaaatagcgaaaaggctgccgcgtgtacagccagctgaaaacccgacaggaatggttctcccaaacgggccaggggctacggcagtgagttcatcgtgttgtgcttag

SEQ ID NO: 5216 - protein, 200 aa, Arabidopsis thaliana
MASSGNKNINAKLVLLGDVGAGKSSLVLRFVKDQFVEFQESTIGAAFFSQTLAVNDATVKFEIWDTAGQERYHSLAPMYYRGAAAAIIVFDITNQASFERAKKWVQELQAQGNPNMVMALAGNKADLLDARKVSAEEAEIYAQENSLFFMETSAKTATNVKDIFYEIAKRLPRVQPAENPTGMVLPNGPGATAVSSSCCA

SEQ ID NO: 5217 - DNA, 603 bp, Nicotiana plumbaginifolia
  CDS (1)..(603)
atggcatccagtagtcacaacaatctcaatgcaaaactcgtattgttaggcgacatgggagctggtaaatcaagcttggtcatacgattcgtcaagggccagttccttgaatttcaagaatcgacaattggggcagctttcttttcgtctacgctggcagttaataatgctacagtgaagtttgagatatgggatactgctggacaggagaggtaccatagcttagcgcctatgtattatagaggagccgctgctgctattattgtctatgatatcactagctcggattcatttgcaagggcaaaaaaatgggtgcaagaattgcagaagcaaggtaatcctaacatggtcatggctcttgctggcaacaaggctgatctagaagatagaaggaaggttactgcagaagaggcacgcttgtatgctgaggaaaatggtctctttttcatggagacctctgccaaaactgctgtgaatgtcaatgctattttctatgaaatagctaaacggttgcctagagctcaacctgctcaaaatccagcaggaatggttcttgtagacagagcagcagaagggacccgagctacatcatgctgtacttaa

SEQ ID NO: 5218 - protein, 200 aa, Nicotiana plumbaginifolia
MASSSHNNLNAKLVLLGDMGAGKSSLVIRFVKGQFLEFQESTIGAAFFSSTLAVNNATVKFEIWDTAGQERYHSLAPMYYRGAAAAIIVYDITSSDSFARAKKWVQELQKQGNPNMVMALAGNKADLEDRRKVTAEEARLYAEENGLFFMETSAKTAVNVNAIFYEIAKRLPRAQPAQNPAGMVLVDRAAEGTRATSCCT

SEQ ID NO: 5219 - DNA, 633 bp, Saccharomyces cerevisiae
  CDS (1)..(633)
atgaacacatcagtcacttccataaagttggtactgttgggtgaggcagcagttggtaaatcgtcaatagtcctaaggtttgtatctaatgattttgccgaaaataaggagcccaccattggtgcagcattcctcactcaaagagttactataaatgaacatactgttaagtttgaaatatgggacactgctgggcaagagagatttgcatctttagcacctatgtactatagaaacgcacaagctgctcttgtagtatacgacgttacaaaaccacaatcctttattaaagcgcgccactgggtaaaggaattacatgaacaggcatcaaaggatatcatcattgcgttagttggtaacaagatcgatatgctgcaagaaggtggggaaagaaaagtcgcaagggaagaaggtgaaaagctagcggaagaaaagggcttgttgttctttgaaacaagtgcaaagacaggagagaatgttaacgatgtatttttgggaatcggtgaaaagataccactgaagacggctgaagagcaaaatagtgcaagtaacgaacgtgagtcgaacaatcaaagagtggatttgaacgctgctaatgatgggaccagcgcaaacagtgcttgcagttgttag

SEQ ID NO: 5220 - protein, 210 aa, Saccharomyces cerevisiae
MNTSVTSIKLVLLGEAAVGKSSIVLRFVSNDFAENKEPTIGAAFLTQRVTINEHTVKFEIWDTAGQERFASLAPMYYRNAQAALVVYDVTKPQSFIKARHWVKELHEQASKDIIIALVGNKIDMLQEGGERKVAREEGEKLAEEKGLLFFETSAKTGENVNDVFLGIGEKIPLKTAEEQNSASNERESNNQRVDLNAANDGTSANSACSC

SEQ ID NO: 5221 - DNA, 657 bp, Saccharomyces cerevisiae
  CDS (58)..(657)
atgatagtaaaattactccaggaaatacaagtagcacaaaatacggaggaatacgatatggaagcaaccatcaaagtggtactgctaggagattcatcagtggggaaaaccagtatagtgactaggctcaaatcaggtaagtttctagcaaaacatgcggctacgataggtgcggcgttcatcaccaagacaatcgaggttccttctaacgactcctctacggagaaacgtatccatatggagatatgggacacggcgggtcaggaacggtataaatcactggtgccaatgtattatcgagatgcgaatattgctttgattgtattcgaattgggagacgtatccagtctgcaatgtgcaaagacatggtttcaagatttacaggaccgtgctcagggaacgcaggtaattatcgtgggcaataagtacgatttagtctgcgaagagcattcaggggaagtgactataccggcggagttacagggtctgccgtatgtggccgtaagtgcaaagacagggtacaatttcgatacattgaataaaataataatcagtttggttcccgaaagtcaattcaagacattgtcaaagaacaatgaacagggaaatatactggaaataaataaaaaaaaaagcggcagtggctgtatatgttaa

SEQ ID NO: 5222 - protein, 199 aa, Saccharomyces cerevisiae
MEATIKVVLLGDSSVGKTSIVTRLKSGKFLAKHAATIGAAFITKTIEVPSNDSSTEKRIHMEIWDTAGQERYKSLVPMYYRDANIALIVFELGDVSSLQCAKTWFQDLQDRAQGTQVIIVGNKYDLVCEEHSGEVTIPAELQGLPYVAVSAKTGYNFDTLNKIIISLVPESQFKTLSKNNEQGNILEINKKKSGSGCIC

SEQ ID NO: 5223 - DNA, 705 bp, Saccharomyces cerevisiae
  CDS (1)..(705)
atgttgcaatttaaactagttttattgggtgactcatccgtgggtaaatcttccattgttcatcgttttgttaaggatacattcgatgaactacgtgaaagtacgattggtgctgcttttttatctcaatcaatcactattcacccaaacgatggtaatgaaacaaaggatgtcgttataaaatttgaaatctgggatactgctggtcaagaaagatacaagtcattggcaccaatgtattatagaaacgctaatgcagcattagttgtttatgacattacgcaggaagattcactacaaaaggcaaggaactgggttgatgagctgaaaaataaggtaggcgacgacgacttggttatttatttactgggaaacaaagtggatttatgtcaagaaacgcctagcactgagacaagcccagattcaaacgaaggtggagatgaagaacaaaaagtaagagcaattagcactgaagaagcgaaacagtacgcacaagaacaagggttgctgttccgagaagttagtgctaagacaggtgaaggggttaaggaaatttttcaagatattggtgaaaaattatacgatttaaagaaagacgaaattctctctaagcaaaatagacaaatcggtggaggcaataacggacaagtagacattaatttgcaaaggccatccacaaatgatccaacatcttgttgcagttga

SEQ ID NO: 5224 - protein, 234 aa, Saccharomyces cerevisiae
MLQFKLVLLGDSSVGKSSIVHRFVKDTFDELRESTIGAAFLSQSITIHPNDGNETKDVVIKFEIWDTAGQERYKSLAPMYYRNANAALVVYDITQEDSLQKARNWVDELKNKVGDDDLVIYLLGNKVDLCQETPSTETSPDSNEGGDEEQKVRAISTEEAKQYAQEQGLLFREVSAKTGEGVKEIFQDIGEKLYDLKKDEILSKQNRQIGGGNNGQVDINLQRPSTNDPTSCCS

SEQ ID NO: 5225 - DNA, 636 bp, Schizosaccharomyces pombe
  CDS (1)..(636)
atggcatcaaatacagctccaaagaatgtcgttacaatcaatcagaagcttgttcttcttggtgattccgccgttggcaaaagtagtctcgttcttcgattcgttaaagatcaatttgatgattacagagaaagcaccattggagctgcttttttgactcaaacccttcctatagatgaaaacacttccgtaaaactcgaaatttgggatacggctggtcaggaacgttataaatctctagctcctatgtactatcgaaatgctaattgcgctattgtcgtatacgatattactcaagctgcatctctagaaaaggccaaatcttggattaaggaacttcagcgtcaagctccagagggtattgttatagctttggccggcaacaagctggatcttgcccaagaacgtagagctgttgagaaagctgatgctgaagcatatgccgctgaggctaatcttttattctttgaaacttctgctaagactgctgaaaatgtaaatgagctttttactgctattgccaaaaagcttcccttagaagataagctcaaccaggccagaggcgctgtgaatcgtggtgtcaatttgtcagaagctcggcctgctgctcaaccaagcggttcatgctcttgctaa

SEQ ID NO: 5226 - protein, 211 aa, Schizosaccharomyces pombe
MASNTAPKNVVTINQKLVLLGDSAVGKSSLVLRFVKDQFDDYRESTIGAAFLTQTLPIDENTSVKLEIWDTAGQERYKSLAPMYYRNANCAIVVYDITQAASLEKAKSWIKELQRQAPEGIVIALAGNKLDLAQERRAVEKADAEAYAAEANLLFFETSAKTAENVNELFTAIAKKLPLEDKLNQARGAVNRGVNLSEARPAAQPSGSCSC

SEQ ID NO: 5227 - DNA, 600 bp, Oryza sativa
  CDS (1)..(600)
atgggttgctcctcctccgtgccagctcgaagcactggagggttgaacaatattagcaacgataactccgctactgattcaaaggacttgcgtgctaagttggtattgcttggtgactctggtgtagggaaaagttgcattgttcttcgctttgttcgtggtcagtttgatcccacttccaaggtaactgtcggtgcatcatttttatcacaaacattggctttggaggactcaacaatagtgaaatttgaaatatgggataccgctggacaagagaggtatgctgccttggcacctctttactacagaggagctgctgctgcagttgttgtctacgacataactagtccagaatcatttagcaaagcacaatactgggtgaaggaacttcaaaaacatggtagtcctgatattatcatggttttggttggtaataaagctgatctacatgaaaatcgacatgtatcttctcaggaagcacaagagtatgcagagaagaataatatggttttcatcgagacatcagcaaagacagctgataatataaaccaagtatttgaggaaattgcgaagaggttgcccaggccaacggcgtcttga

SEQ ID NO: 5228 - protein, 199 aa, Oryza sativa
MGCSSSVPARSTGGLNNISNDNSATDSKDLRAKLVLLGDSGVGKSCIVLRFVRGQFDPTSKVTVGASFLSQTLALEDSTIVKFEIWDTAGQERYAALAPLYYRGAAAAVVVYDITSPESFSKAQYWVKELQKHGSPDIIMVLVGNKADLHENRHVSSQEAQEYAEKNNMVFIETSAKTADNINQVFEEIAKRLPRPTAS

SEQ ID NO: 5229 - DNA, 648 bp, Oryza sativa
  CDS (1)..(648)
atggcgccggtggtgtcggcgctggccaagtacaagctggtgttcctcggcgaccaggcggtggggaagacggccatcatcacccgcttcatgtacgacaagttcgacgccacctaccaggcgacgatcgggatcgatttcctctccaagacgatgtacctcgaagaccgaaccgtacggctgcagctttgggatacagctgggcaggagaggttccggagcttgatcccaagttacatcagggattcttctgtggcagtgattgtttacgatgtgactggcaagcagtcctttttgagtatatcgaagtggattgaagaggtaaatacacaacgaggcggagatgtgatcatcgtccttgttggaaataaaacagaccttgttgacaagaggcaaatatccactgacgaaggagaagccaaggcacaggagcacggcgccatgttcatggaaaccagcgcaaaagctggattcaacatcaagccactgtttcgcaagatcgctgcatcgctgcctggaatggaggcgctctcatcggcaaagcaggaagacatggtggacataaacctacggcctgctgcctccgggcaaataccttcaggggcagaagcacaagaagaacagaaagcaggcggttgttcctgctga

SEQ ID NO: 5230 - protein, 215 aa, Oryza sativa
MAPVVSALAKYKLVFLGDQAVGKTAIITRFMYDKFDATYQATIGIDFLSKTMYLEDRTVRLQLWDTAGQERFRSLIPSYIRDSSVAVIVYDVTGKQSFLSISKWIEEVNTQRGGDVIIVLVGNKTDLVDKRQISTDEGEAKAQEHGAMFMETSAKAGFNIKPLFRKIAASLPGMEALSSAKQEDMVDINLRPAASGQIPSGAEAQEEQKAGGCSC

SEQ ID NO: 5231 - DNA, 648 bp, Oryza sativa
  CDS (1)..(648)
atggcgccggtggtgtcggcgctggccaagtacaagctggtgttcctcggcgaccaggcggtggggaagacggccatcatcacccgcttcatgtacgacaagttcgacgccacctaccaggcgacgatcgggatcgatttcctctccaagacgatgtacctcgaagaccgaaccgtacggctgcagctttgggatacagctgggcaggagaggttccggagcttgatcccaagttacatcagggattcttctgtggcagtgattgtttacgatgtgactgacaggcagtcctttttgagtatatcgaagtggattgaagaggtaaatacacaacgaggcggagatgtgatcatcgtccttgttggaaataaaacagaccttgttgacaagaggcaaatatccactgacgaaggagaagccaaggcacaggagcacggcgccatgttcatggaaaccagcgcaaaagctggattcaacatcaagccactgtttcgcaagatcgctgcatcgctgcctggaatggaggcgctctcatcggcaaagcaggaagacatggtggacataaacctacggcctgctgcctccgggcaaataccttcaggggcagaagcacaagaagaacagaaagcaggcggttgttcctgctga

SEQ ID NO: 5232 - protein, 215 aa, Oryza sativa
MAPVVSALAKYKLVFLGDQAVGKTAIITRFMYDKFDATYQATIGIDFLSKTMYLEDRTVRLQLWDTAGQERFRSLIPSYIRDSSVAVIVYDVTDRQSFLSISKWIEEVNTQRGGDVIIVLVGNKTDLVDKRQISTDEGEAKAQEHGAMFMETSAKAGFNIKPLFRKIAASLPGMEALSSAKQEDMVDINLRPAASGQIPSGAEAQEEQKAGGCSC

SEQ ID NO: 5233 - DNA, 612 bp, Oryza sativa
  CDS (1)..(612)
atggcggccaacgccggcaacaagatccgcaacgccaaactggttcttcttggagatgtgggcgcaggaaaatctagcttggtgcttcgttttgtaaaaggacagtttgttgagtttcaggaatcgacaattggagcagcatttttctcacagaccttagcagttaatgacgaaaccgtgaagtttgaaatctgggatacagctgggcaggagagatatcacagcttggctcccatgtactataggggtgcggctgctgccatagttgtctatgacatcacgaatccggcctctttcacccgtgcaaagaaatgggttcaagaacttcaagctcaaggtaactcgagtacagtggtggctcttgctggcaacaaagccgatttgctagagactaggcaggtgcaaatagaggaagcaaagacatatgcacaggagaatgggcttttcttcatggaaacatctgcgaaaactgcaacaaatgtgaatgacatattttatgaaattgcaaaaagattgcttcaaggacagccagctcagaacccgcaggccggcatggtcctctcccagagaccaaatgagagactggtcagctctgcttcatgctgctcttga

SEQ ID NO: 5234 - protein, 203 aa, Oryza sativa
MAANAGNKIRNAKLVLLGDVGAGKSSLVLRFVKGQFVEFQESTIGAAFFSQTLAVNDETVKFEIWDTAGQERYHSLAPMYYRGAAAAIVVYDITNPASFTRAKKWVQELQAQGNSSTVVALAGNKADLLETRQVQIEEAKTYAQENGLFFMETSAKTATNVNDIFYEIAKRLLQGQPAQNPQAGMVLSQRPNERLVSSASCCS

SEQ ID NO: 5235 - DNA, 645 bp, Oryza sativa
  CDS (1)..(645)
atggcggcgccgccggctagggctcgggccgactacgattatctcatcaagctgctcctcattggcgacagcggtgtaggaaaaagttgtctcctcctacggttctcagatggctctttcacgactagtttcattaccacaattggtattgacttcaagataaggaccgttgagttggatggtaaacggattaaattgcaaatctgggatactgctggccaagaacgctttcgaactattaccactgcttactacaggggagcaatgggcattttactcgtttatgatgtcaccgatgaatcttcattcaacaacataagaaattggatcagaaacatcgaacaacatgcctctgataatgtgaacaaaattttggtggggaacaaagctgatatggatgaaagcaaaagggctgtacccacttcaaagggacaggctcttgctgatgaatacggaatcaagttctttgaaacgagtgcaaagacaaacctgaatgttgagcaggttttcttttctatagcaagagatatcaaacaaagactctcagagactgattccaagcctgaggaccgaaccatcaagatcaaatcggaaggggaagccgaggcagcggcggctcagaaatcagcttgctgtggatcttag

SEQ ID NO: 5236 - protein, 214 aa, Oryza sativa
MAAPPARARADYDYLIKLLLIGDSGVGKSCLLLRFSDGSFTTSFITTIGIDFKIRTVELDGKRIKLQIWDTAGQERFRTITTAYYRGAMGILLVYDVTDESSFNNIRNWIRNIEQHASDNVNKILVGNKADMDESKRAVPTSKGQALADEYGIKFFETSAKTNLNVEQVFFSIARDIKQRLSETDSKPEDRTIKIKSEGEAEAAAAQKSACCGS

SEQ ID NO: 5237 - DNA, 651 bp, Oryza sativa
  CDS (1)..(651)
atggctgcgccgccggcgagggctcgggcggactacgactacctcatcaagctcctcctcatcggggacagcggtgttggcaagagttgccttctcctgcggttttctgatggttccttcactacaagctttattaccacaattggtattgacttcaaaattagaacaatagagctggacgggaagcgtattaagctacaaatttgggacacagctggccaagaacgtttccggacaattaccactgcgtactaccgtggagccatgggtatcctgcttgtttatgatgtcaccgacgagtcatctttcaacaacattcggaactggattcggaatattgagcaacatgcctctgataatgtcaacaaaattttggttggcaacaaggctgatatggatgagagtaaaagggctgtccctactgcgaaaggccaagcactggctgatgagtatggcatcaaatttttcgaaactagtgcgaagacaaacctcaacgtggagcaagtttttttctccattgcacgtgacattaagcagaggcttgctgagaccgactccaagcctgaggacaagacaatcaagattaacaacaagacggatcagggtgccgacaaaccagcagcttctggatctgcatgctgcggctcctga

SEQ ID NO: 5238 - protein, 216 aa, Oryza sativa
MAAPPARARADYDYLIKLLLIGDSGVGKSCLLLRFSDGSFTTSFITTIGIDFKIRTIELDGKRIKLQIWDTAGQERFRTITTAYYRGAMGILLVYDVTDESSFNNIRNWIRNIEQHASDNVNKILVGNKADMDESKRAVPTAKGQALADEYGIKFFETSAKTNLNVEQVFFSIARDIKQRLAETDSKPEDKTIKINNKTDQGADKPAASGSACCGS

SEQ ID NO: 5239 - DNA, 648 bp, Oryza sativa
  CDS (1)..(648)
atggcggcgccgccggcgagggctcgggccgactacgattacctcatcaagctgctcctcatcggcgacagcggtgttgggaaaagttgtctcctcctacggttctctgatggttccttcaccaccagttttattaccaccatcgggattgatttcaaaataagaacaatcgaactggatggtaaacggattaaacttcaaatctgggatacagctggtcaagaacgtttccgaactattacaactgcctactacaggggagcaatgggtattttgcttgtttatgatgtcaccgacgagtcatcatttaataatataagaaactggattaggaacatagagcaacatgcttccgataatgtgaacaagattttggtaggcaacaaagctgacatggatgaaagcaaaagggccgtaccaacttcaaaggggcaagcacttgctgatgaatatggcatcaagttctttgaaacgagtgcaaagacaaacctgaatgtcgagcaggttttcttttcaatagcaagggatattaagcaaagacttgcggagactgattccaagactgaggatcgcacgatcaagatcaacaaaccagagggtgatgctgaggccacaactttgcagaaatctgcatgctgtggatcgtga

SEQ ID NO: 5240 - protein, 215 aa, Oryza sativa
MAAPPARARADYDYLIKLLLIGDSGVGKSCLLLRFSDGSFTTSFITTIGIDFKIRTIELDGKRIKLQIWDTAGQERFRTITTAYYRGAMGILLVYDVTDESSFNNIRNWIRNIEQHASDNVNKILVGNKADMDESKRAVPTSKGQALADEYGIKFFETSAKTNLNVEQVFFSIARDIKQRLAETDSKTEDRTIKINKPEGDAEATTLQKSACCGS

SEQ ID NO: 5241 - DNA, 627 bp, Oryza sativa
  CDS (1)..(627)
atggcccccgtgtcggcgctcgccaagtacaagctggtgttcctcggcgaccagtccgtcggcaagaccagcatcatcacccgcttcatgtacgacaagttcgacaacacctaccaggctacaatcggtattgacttcctgtcaaagacaatgtaccttgaagataggactgtcagactgcaactttgggatacagctggtcaggaacgattcaggagtttgattccaagctatatcagagactcttccgttgctgtcatcgtatttgatgttgcaagcagacagtctttcctaaacacttcaaaatggatagaggaagttagaactgagaggggcagtgatgttatcattgtgctggttgggaacaaaactgatcttgttgacaagaggcaagtctccatagaggaaggagagggcaaagcgaaagatctcggtgtgatgttcattgaaaccagtgctaaagctggttttaacattaaggcgttgttccgtaagattgcggctgcacttcctggaatggagaccctctcatcagcaaagcaggaagacatggttgatgtgaacttgaagtcaagcaacgccaactcatcccagtctcaggcacaggctgggggatgcagttgttag

SEQ ID NO: 5242 - protein, 208 aa, Oryza sativa
MAPVSALAKYKLVFLGDQSVGKTSIITRFMYDKFDNTYQATIGIDFLSKTMYLEDRTVRLQLWDTAGQERFRSLIPSYIRDSSVAVIVFDVASRQSFLNTSKWIEEVRTERGSDVIIVLVGNKTDLVDKRQVSIEEGEGKAKDLGVMFIETSAKAGFNIKALFRKIAAALPGMETLSSAKQEDMVDVNLKSSNANSSQSQAQAGGCSC

SEQ ID NO: 5243 - DNA, 753 bp, Oryza sativa
  CDS (1)..(753)
atgctgcgtgtccccgagcagctgtcgcacagaagcagttgcaacctgcgagcggaaacccacctccaccccgtcgccggcctgccgccgccgccgccgccgcttgccctcctccgccttactcggcctccggcgcctcctgaccccccggccatgggttgctcttcgtctctgccagctaataatgctggaggggtaggtactatcagcaacgagaattctggtactgatctgaagaacttgcgagtgaagttggtattgcttggagattcaggtgttgggaaaagttgcattgttcttcgctttgtccgtggtcagtttgaccccacttcaaaggtgactgttggtgcatcatttttgtcacaaacattggcgttggaggattccacaacagtaaagtttgaaatatgggatactgctggtcaggagaggtatgctgcattggcacctctttactaccggggagctggtgccgcaattgttgtgtatgacataacaagttcagaatcatttaacaaggcacaatactgggtgaaggaacttcagaaacacggtagtccagatatgatcatggctttggttggaaataaggctgatctacatgacaatcgtagtgtatcctctcaggatgcacaagagtatgcagagaggaacactatgtttttcatcgagacatcagcgaaaacggctgataacataaaccaactattcgaggaaattgcgaagaggttgcccaggccaacaccatcctga

SEQ ID NO: 5244 - protein, 250 aa, Oryza sativa
MLRVPEQLSHRSSCNLRAETHLHPVAGLPPPPPPLALLRLTRPPAPPDPPAMGCSSSLPANNAGGVGTISNENSGTDLKNLRVKLVLLGDSGVGKSCIVLRFVRGQFDPTSKVTVGASFLSQTLALEDSTTVKFEIWDTAGQERYAALAPLYYRGAGAAIVVYDITSSESFNKAQYWVKELQKHGSPDMIMALVGNKADLHDNRSVSSQDAQEYAERNTMFFIETSAKTADNINQLFEEIAKRLPRPTPS

SEQ ID NO: 5245 - DNA, 750 bp, Oryza sativa
  CDS (1)..(750)
atggcggccaaccccggcaacaagatccgcaacgccaagctggttcttcttggagatgtgggcacgggcaagtcgagcctcgttctccggtttgtgaagggccagtttgttgagttccaggagtccaccatcggcgcggccttcttctcgcaaaccttggcggttaacgatgagacggtgaagttcgaaatctgggatactgcagggcaggagaggtatcatagcttggctccgatgtactatcggggtgcggctgccgcgatagttgtctacgacatcacaaatgcggcctctttcacacgtgcaaaaaaatgggttcaagaacttcaagcgcaaggaaacccaaacacgataatggctcttgctggtaacaaggctgatatggtagaggcgaggcaggtgccagcagaagaggcaaagacctacgcacaagagaatggccttttcttcatggaaacatctgcgaaaacggcgatcaatgtgaacgatgtattccacgagatcggtgagtttagatcacaaatcatttccgcagtggatttctgtacgccgacagagctggttggttatttggtgtacaaaaatgtacacagcctgcttctgctaatttctaagcgaatttgcattcttaatctgatttcagcaaagagattgcttcaaggacagcaggctcaagacacaccggctggaatggttctcaaccagagaccagctgagaggatggtgagcagttcttcatgctgctcataa

SEQ ID NO: 5246 - protein, 249 aa, Oryza sativa
MAANPGNKIRNAKLVLLGDVGTGKSSLVLRFVKGQFVEFQESTIGAAFFSQTLAVNDETVKFEIWDTAGQERYHSLAPMYYRGAAAAIVVYDITNAASFTRAKKWVQELQAQGNPNTIMALAGNKADMVEARQVPAEEAKTYAQENGLFFMETSAKTAINVNDVFHEIGEFRSQIISAVDFCTPTELVGYLVYKNVHSLLLLISKRICILNLISAKRLLQGQQAQDTPAGMVLNQRPAERMVSSSSCCS

SEQ ID NO: 5247 - DNA, 612 bp, Oryza sativa
  CDS (1)..(612)
atggcggccaaccccggcaacaagatccgcaacgccaagctggttcttcttggagatgtgggcacgggcaagtcgagcctcgttctccggtttgtgaagggccagtttgttgagttccaggagtccaccatcggcgcggccttcttctcgcaaaccttggcggttaacgatgagacggtgaagttcgaaatctgggatactgcagggcaggagaggtatcatagcttggctccgatgtactatcggggtgcggctgccgcgatagttgtctacgacatcacaaatgcggcctctttcacacgtgcaaaaaaatgggttcaagaacttcaagcgcaaggaaacccaaacacgataatggctcttgctggtaacaaggctgatatggtagaggcgaggcaggtgccagcagaagaggcaaagacctacgcacaagagaatggccttttcttcatggaaacatctgcgaaaacggcgatcaatgtgaacgatgtattccacgagatcgcaaagagattgcttcaaggacagcaggctcaagacacaccggctggaatggttctcaaccagagaccagctgagaggatggtgagcagttcttcatgctgctcataa

SEQ ID NO: 5248 - protein, 203 aa, Oryza sativa
MAANPGNKIRNAKLVLLGDVGTGKSSLVLRFVKGQFVEFQESTIGAAFFSQTLAVNDETVKFEIWDTAGQERYHSLAPMYYRGAAAAIVVYDITNAASFTRAKKWVQELQAQGNPNTIMALAGNKADMVEARQVPAEEAKTYAQENGLFFMETSAKTAINVNDVFHEIAKRLLQGQQAQDTPAGMVLNQRPAERMVSSSSCCS

SEQ ID NO: 5249 - DNA, 612 bp, Brassica napus
  CDS (1)..(612)
atgggatgtgctgcttctcttccagataggaactctggagctttaaacggtctcaccagttcagagaatgcagctccagcagatgctaagaatctacgcgtaaagttagttcttttaggagattctggtgtgggtaaaagctgcattgtccttcaatttgtccgtggtcaatttgacgcaacatctaaggtaactgttggagcttcattcttgtcccaaacaataaccttgcaagactctaccacagtgaagtttgaaatctgggatacagcagggcaagagaggtattctgctcttgctccactatactaccgtggagctggagttgctgttattgtgtatgatataacaagccctgaatcgttcaagaaagctcagtattgggttaaggaactgcagaagcatggaagcccagacattgttatggctttggttggtaacaaagctgatctacatgaaaaaagagaagtaccatccgaggatggtatggagcttgcagagaagaacggcatgttcttcattgaaacgtcagctaagacggctgataacataaatgaactgtttcaggaaattggaaagaggctacctcgtccttctcaaccatcatcatga

SEQ ID NO: 5250 - protein, 203 aa, Brassica napus
MGCAASLPDRNSGALNGLTSSENAAPADAKNLRVKLVLLGDSGVGKSCIVLQFVRGQFDATSKVTVGASFLSQTITLQDSTTVKFEIWDTAGQERYSALAPLYYRGAGVAVIVYDITSPESFKKAQYWVKELQKHGSPDIVMALVGNKADLHEKREVPSEDGMELAEKNGMFFIETSAKTADNINELFQEIGKRLPRPSQPSS

SEQ ID NO: 5251 - DNA, 651 bp, Brassica napus
  CDS (1)..(651)
atggctgctcctcctgctagagctcgcgctgattacgattacctcattaaactactcttgatcggagacagcggtgtgggtaagagttgcctcctcttgcgtttttcagatggctcctttaccaccagtttcattacaaccattggaattgatttcaagatacggactattgagctggatgggaagagaattaagctgcaaatctgggatactgcaggacaggagcggttccggactatcacaactgcgtactaccgtggagccatgggcattttgcttgtgtatgatgtcaccgatgaatcatctttcaacaacatcaggaactggatccgtaacattgagcagcacgcttctgataatgtcaacaagattctcgtggggaacaaggcagatatggatgaaagcaaaagagctgtgccaaaagctaagggacaagctcttgcagatgaatacggaatcaagttcttcgagactagtgccaagacgaacttaaacgttgaggaagttttcttttcaataggtaaagacattaagcaaagactcgcagataccgatgcaagggctgagccacaaacaatcagaatcaaccaatccgaccaaggtgcagggacgtcgcaagctactcagaaatcagcatgttgcggttcgtag

SEQ ID NO: 5252 - protein, 216 aa, Brassica napus
MAAPPARARADYDYLIKLLLIGDSGVGKSCLLLRFSDGSFTTSFITTIGIDFKIRTIELDGKRIKLQIWDTAGQERFRTITTAYYRGAMGILLVYDVTDESSFNNIRNWIRNIEQHASDNVNKILVGNKADMDESKRAVPKAKGQALADEYGIKFFETSAKTNLNVEEVFFSIGKDIKQRLADTDARAEPQTIRINQSDQGAGTSQATQKSACCGS

SEQ ID NO: 5253 - DNA, 615 bp, Zea mays
  CDS (1)..(615)
atggcggcaaccgcgggcggcaacaagatccgcaacgccaagctggttcttcttggggacgtgggcgccggcaagtccagcctggtcctccggtttgtgaaaggccagttcgtcgagttccaggaatccaccatcggcgcggctttcttctcgcagaccctggcggtgaacgacgagacggtcaagttcgagatatgggacacggcggggcaggagcggtaccacagcttggctcccatgtattaccggggcgctgcggctgccatagttgtctacgacatcacgaacgcggcctcttttacgcgtgcgaagaaatgggttcaagaacttcaagcacaaggaaactcgaatacaatagtggctcttgccgggaacaaggctgatttgttagatacgaggcaggtgtcagcagatgaagcaaaggcgtatgctcaagagaatggtctcttcttcatggaaacttctgccaaaacagctaccaatgtgaacgacgtgttctatgagattgcgaagaaactgcttcaagggcagcaggttcagaacccacaaggcgggatggttctcaaccagagaccacctgagaggatggtgagctcttcttcctgctgtgcgtga

SEQ ID NO: 5254 - protein, 204 aa, Zea mays
MAATAGGNKIRNAKLVLLGDVGAGKSSLVLRFVKGQFVEFQESTIGAAFFSQTLAVNDETVKFEIWDTAGQERYHSLAPMYYRGAAAAIVVYDITNAASFTRAKKWVQELQAQGNSNTIVALAGNKADLLDTRQVSADEAKAYAQENGLFFMETSAKTATNVNDVFYEIAKKLLQGQQVQNPQGGMVLNQRPPERMVSSSSCCA

SEQ ID NO: 5255 - DNA, 603 bp, Glycine max
  CDS (1)..(603)
atggctacgatcggacacaacaatctcaatgccaaattggttcttctcggggacatgggtgctgggaaatccagcctcgttttgcgctttgtcaagggtcaatttctcgaatttcaggaatcaacaataggggcagcgttcttttcacagacgctggcagtaaatgacgcgacggtaaagtttgagatatgggacacagcaggacaagagaggtaccatagcttggctcccatgtattacagaggtgctgctgctgctatcattgtctatgacatcactagctcggactcctttacccgaactaagaagtgggtccaagagcttcaaaagcaagggaatcctaatatggtcatggctcttgctggtaacaaagctgatttggaagataagaggaaagtgacagctgaagaagcacgtgtatatgctgaagaaaatggtttgtttttcatggagacctctgccaaaactgcatccaacgttaatgatatattctatgaaatagccaagaggttaccaagggctcagccagctcagaacccagctgggatggtacttgttgatagacccgccgaaggaactagggctgcatcatgttgttcataa

SEQ ID NO: 5256 - protein, 200 aa, Glycine max
MATIGHNNLNAKLVLLGDMGAGKSSLVLRFVKGQFLEFQESTIGAAFFSQTLAVNDATVKFEIWDTAGQERYHSLAPMYYRGAAAAIIVYDITSSDSFTRTKKWVQELQKQGNPNMVMALAGNKADLEDKRKVTAEEARVYAEENGLFFMETSAKTASNVNDIFYEIAKRLPRAQPAQNPAGMVLVDRPAEGTRAASCCS

SEQ ID NO: 5257 - DNA, 618 bp, Triticum aestivum
  CDS (1)..(618)
atggcggccagcgccggcagcaagatccgcaacgccaaactggttcttcttggcgatgtgggtgctgggaaatccagcctggtgcttcggtttgtaaaaggacaatttgttgaattccaggaatcgacaattggagcggctttcttctctcaaacattggctgttaatgacgagactgtgaagtttgaaatttgggatactgctgggcaggagaggtatcacagcttggcccccatgtactacaggggtgctgccgcagccatagttgtctatgacatctcgaaccaggcatccttcacccgagcaaagaaatgggttcaagaacttcaagctcaaggaaaccagaatacagtagtggctcttgctggcaacaaagctgatttgcttgaggcgagggaggttcaaatagaggaagccaagacgtatgcgcaggagaatggcctcttcttcatggaaacatctgctaaaactgcaaccaatgtgaatgacatattttatgagattgcgaagagattgctgcaagggcaggcagcgcagaacccacaggcggcggggatggttctctcccagagacccaatgagagagtggtcagcgcggcttcgtgctgctcctcctga

SEQ ID NO: 5258 - protein, 205 aa, Triticum aestivum
MAASAGSKIRNAKLVLLGDVGAGKSSLVLRFVKGQFVEFQESTIGAAFFSQTLAVNDETVKFEIWDTAGQERYHSLAPMYYRGAAAAIVVYDISNQASFTRAKKWVQELQAQGNQNTVVALAGNKADLLEAREVQIEEAKTYAQENGLFFMETSAKTATNVNDIFYEIAKRLLQGQAAQNPQAAGMVLSQRPNERVVSAASCCSS

SEQ ID NO: 5259 - DNA, 603 bp, Zea mays
  CDS (1)..(603)
atgggttgctcctcctccgtgccagctagaaatactggagggctgaacactatcagcaacgatagctctccagacgccagttcaaaggacttgcgtgctaagttggtattgctgggagactcaggtgttgggaaaagttgcattgttcttcgttttgttcgtggtcagtttgatcctacttccaaggtaactgttggcgcatcttttttatcacaaacattggcattggaggattcaacaatagtgaagtttgaaatttgggatactgctgggcaagagaggtatgctgccttggcgccactttactacagaggagctgctgctgcaattgttgtctatgatataacaagtccggaatcatttagcaaagcacagtattgggtaaaggaacttcagaagcatggtagtcctggtattgtaatggttttggttggtaataaggctgatctacatgataatcgaagtgtatcctcgcaggatgcgcaggactacgcagagaagaacaatatgtttttcattgagacgtcggccaagacagctgataatataaaccaactgtttgaggaaattgcaaagaggttgcctaggccaacggcatcgtga

SEQ ID NO: 5260 - protein, 200 aa, Zea mays
MGCSSSVPARNTGGLNTISNDSSPDASSKDLRAKLVLLGDSGVGKSCIVLRFVRGQFDPTSKVTVGASFLSQTLALEDSTIVKFEIWDTAGQERYAALAPLYYRGAAAAIVVYDITSPESFSKAQYWVKELQKHGSPGIVMVLVGNKADLHDNRSVSSQDAQDYAEKNNMFFIETSAKTADNINQLFEEIAKRLPRPTAS

SEQ ID NO: 5261 - DNA, 648 bp, Zea mays
  CDS (1)..(648)
atggcagcgccaccggcgagggcccgagccgactacgactacctcatcaaactgctcctcatcggtgacagcggtgttggaaaaagttgtctcctgttacggttttcagatggatcattcaccactagcttcattaccactattggcattgacttcaagataaggactgtcgagttggatggcaaacggattaagttgcagatctgggacactgcaggccaagaacgtttccgcacgattactactgcttactacaggggagcaatgggcatcttgcttgtgtacgatgtcacagacgagtcatctttcaataacataagaaattggatcagaaacattgagcaacatgcttcggataacgtgaacaaaattctggtggggaataaagctgatatggatgaaagcaaacgggctgtgcccacttcgaaggggcaagctctcgctgacgaatacgggataaagttttttgaaacgagtgcaaaaacaaacctgaatgtcgagcaggttttcttttccatagcaagggacatcaaacagagactttcggagaccgattccaagcctgaggatcgaactatcaagatcaaggctgaaggggaagctgaggcagcggcggcggcgcagaattcagcttgctgtggctcctga

SEQ ID NO: 5262 - protein, 215 aa, Zea mays
MAAPPARARADYDYLIKLLLIGDSGVGKSCLLLRFSDGSFTTSFITTIGIDFKIRTVELDGKRIKLQIWDTAGQERFRTITTAYYRGAMGILLVYDVTDESSFNNIRNWIRNIEQHASDNVNKILVGNKADMDESKRAVPTSKGQALADEYGIKFFETSAKTNLNVEQVFFSIARDIKQRLSETDSKPEDRTIKIKAEGEAEAAAAAQNSACCGS

SEQ ID NO: 5263 - DNA, 651 bp, Brassica napus
  CDS (1)..(651)
atggctgctccacctgctagggccagagccgattacgactatctcatcaagcttcttttgatcggagatagcggtgtgggtaaaagttgcctgcttctacgtttctctgatggctccttcaccactagcttcatcaccaccattggcattgactttaagatcagaaccattgagcttgatggcaaacgtatcaagctccagatttgggacactgctggtcaagaacgcttccgcactatcaccaccgcttattaccgtggggcaatgggcattttgctagtctatgatgtcacagacgagtcctccttcaacaacattaggaactggattcgtaatatcgaacagcatgcttcagataatgttaacaagatcttggttgggaacaaggctgacatggacgaaagcaagagggctgtacctacagcaaagggtcaggctcttgctgatgagtacggaattaagttcttcgaaactagtgctaagacaaacctaaacgtggaagaagttttcttctccataggcaaggacataaaacagaggctttctgacactgactccaaggcagagcctgccacgatcaagataagccaaacagaccaggcagctggagccgggcaagccacacagaagtctgcatgctgtggaagttaa

SEQ ID NO: 5264 - protein, 216 aa, Brassica napus
MAAPPARARADYDYLIKLLLIGDSGVGKSCLLLRFSDGSFTTSFITTIGIDFKIRTIELDGKRIKLQIWDTAGQERFRTITTAYYRGAMGILLVYDVTDESSFNNIRNWIRNIEQHASDNVNKILVGNKADMDESKRAVPTAKGQALADEYGIKFFETSAKTNLNVEEVFFSIGKDIKQRLSDTDSKAEPATIKISQTDQAAGAGQATQKSACCGS

SEQ ID NO: 5265 - DNA, 615 bp, Brassica napus
  CDS (1)..(615)
atgaatcccgccgagtacgactaccttttcaagctcctgctcattggggattctggcgtgggcaagtcttgtctactgttgagattctctgatgattcgtatgtagaaagttacataagcactattggagtcgattttaaaattcggactgtggagcaagacgggaagacgattaagctccaaatttgggacactgctggtcaagagcgcttcaggactattactagcagttattaccgtggcgcacatggaatcattattgtctacgacgtcacagatcaagaaagctttaataatgtgaagcaatggttgagtgaaattgatcgttatgctagtgacaatgtgaacaaactcctagttggaaacaagtgtgatcttgctgaaaacagagccgttccatatgaaaccgcaaaggcttttgccgatgaaattggaattcctttcatggagactagtgcaaaagatgctacaaacgtggaacaggctttcatggccatgtcggcatccatcaaagagagtatggcaagccaaccagctgggaacattgccagaccgccgacggtgcagatcagaggacagcctgttgcccaaaagaatggctgttgctcaacttga

SEQ ID NO: 5266 - protein, 204 aa, Brassica napus
MNPAEYDYLFKLLLIGDSGVGKSCLLLRFSDDSYVESYISTIGVDFKIRTVEQDGKTIKLQIWDTAGQERFRTITSSYYRGAHGIIIVYDVTDQESFNNVKQWLSEIDRYASDNVNKLLVGNKCDLAENRAVPYETAKAFADEIGIPFMETSAKDATNVEQAFMAMSASIKESMASQPAGNIARPPTVQIRGQPVAQKNGCCST

SEQ ID NO: 5267 - DNA, 651 bp, Brassica napus
  CDS (1)..(651)
atggctggttacaaagcagatgatgaatacgattaccttttcaaggttgttctcatcggtgattccggtgttggaaaatctaatctgctttcacgattcacgaagaacgagtttagtctcgagtccaaatccaccatcggagtcgagttcgcgactcggagtttgaatgttgatgataaagtcatcaaagcccagatttgggatactgctggtcaagaaaggtaccgagccatcactagcgcgtattaccgaggagctgttggagcgcttcttgtctacgacgtaacccgacactccacattcgaaaacgtggagacgtggctcaaagaactcagaaaccacactgatccgaacatcgtagtcatgctcgtgggcaacaaatctgatctccgccacctcgtggctgttcagacagaggacgccaagtcattcgccgagaaagagtctctttgcttcatggaaacctctgctcttgagtccacgaacgtcgaggacgctttcgcgcaagtcctcactcagatccacagtattgtgagtaaaaaggccatggaagcagccagcgagtcagctaacgccccgtcgagaggagacaagatcgaaatcggtaaagatgtttctgccgtcaagaaagctggatgctgttcgaactaa

SEQ ID NO: 5268 - protein, 216 aa, Brassica napus
MAGYKADDEYDYLFKVVLIGDSGVGKSNLLSRFTKNEFSLESKSTIGVEFATRSLNVDDKVIKAQIWDTAGQERYRAITSAYYRGAVGALLVYDVTRHSTFENVETWLKELRNHTDPNIVVMLVGNKSDLRHLVAVQTEDAKSFAEKESLCFMETSALESTNVEDAFAQVLTQIHSIVSKKAMEAASESANAPSRGDKIEIGKDVSAVKKAGCCSN

SEQ ID NO: 5269 - DNA, 603 bp, Brassica napus
  CDS (1)..(603)
atggccaccgctggaaacaagaacatcaacgccaaattggtattgcttggagatgttggggctggaaaatcaagtcttgtgcttcggtttgtcaaagatcagtttgttgagttccaggaatcaaccataggtgcagcttttttctctcaaacactggctgtgaatgacgcaactgtcaagtttgagatatgggatacagctggtcaggaacgttaccatagcttggctccaatgtactacaggggtgcagctgctgccattattgtctttgacattactaatcaagcgtcatttgagagagcgaagaaatgggttcaagaactgcaggcacaaggtaaccctaatatggtgatggctcttgctggaaacaaagctgatttattggatgcaaggaaagtgtctccagaggaggcagagacatatgcgcaagagaacagccttttcttcatggaaacctcagcgaagactgcaacaaatgtcaaagacatcttctacgaaatcgcaaaaaggctaccgcgcgtgcagccagcagaaaacccaacagggatggttctcccaaacgggccaggagctacggcagcaagcgcatcatgttgtgcttaa

SEQ ID NO: 5270 - protein, 200 aa, Brassica napus
MATAGNKNINAKLVLLGDVGAGKSSLVLRFVKDQFVEFQESTIGAAFFSQTLAVNDATVKFEIWDTAGQERYHSLAPMYYRGAAAAIIVFDITNQASFERAKKWVQELQAQGNPNMVMALAGNKADLLDARKVSPEEAETYAQENSLFFMETSAKTATNVKDIFYEIAKRLPRVQPAENPTGMVLPNGPGATAASASCCA

SEQ ID NO: 5271 - DNA, 612 bp, Brassica napus
  CDS (1)..(612)
atgggatgtgctgcttctcttccagataggaactctggagctttaaacggtctcaccagttcagagaatgcagctccagcagatgctaagaatctacgcgtaaagttagttcttttaggagattctggtgtgggtaaaagctgcattgtccttcaatttgtccgtggtcaatttgacgcaacatctaaggtaactgttggagcttcattcttgtcccaaacaataaccttgcaagactctaccacagtgaagtttgaaatctgggatacagcagggcaagagaggtattctgctcttgctccactatactaccgtggagctggagttgctgttattgtgtatgatataacaagccctgaatcgttcaagaaagctcagtattgggttaaggaactgcagaagcatggaagcccagacattgtaatggctttggttggtaacaaagctgatctacatgaaaaaagagaagtaccatccgaggatggtatggagcttgcagagaagaacggcatgttctttattgaaacgtcagctaagacagcagataacataaatgaactgtttgaggaaattggaaagaggctacctcgtccttctcaaccatcatcatga

SEQ ID NO: 5272 - protein, 203 aa, Brassica napus
MGCAASLPDRNSGALNGLTSSENAAPADAKNLRVKLVLLGDSGVGKSCIVLQFVRGQFDATSKVTVGASFLSQTITLQDSTTVKFEIWDTAGQERYSALAPLYYRGAGVAVIVYDITSPESFKKAQYWVKELQKHGSPDIVMALVGNKADLHEKREVPSEDGMELAEKNGMFFIETSAKTADNINELFEEIGKRLPRPSQPSS

SEQ ID NO: 5273 - DNA, 603 bp, Brassica napus
  CDS (1)..(603)
atggccaccgctggaaacaagaacatcaacgccaaattggtactgcttggggatgttggagctggaaaatcaagtcttgtgcttcggttcgtcaaagatcagtttgttgaattccaggaatcaacgataggtgcagccttcttctctcaaacattggctgtgaatgatgcaactgtcaagtttgagatttgggatacagctggccaggaacgttaccatagcttggctcctatgtactacaggggtgctgctgctgccattattgtctttgacattactaatcaaggctcatttgagagggcgaagaaatgggttcaggaactgcaggctcaaggcaatcctaatatggtgatggctcttgctggaaacaaagctgatttattagatgcaaggaaagtgtctgcagaggaggcagagacatatgctctagagaacagccttttcttcatggaaacctcagccaagactgcaacaaatgtcaaagacatattctatgaaatcgcaaaaaggctaccgcgcgtgcagccagcaaaaaacccaacagggatggttcccccaaacgggccaggagctacggcagcaagcgcatcatgttgtgcttaa

SEQ ID NO: 5274 - protein, 200 aa, Brassica napus
MATAGNKNINAKLVLLGDVGAGKSSLVLRFVKDQFVEFQESTIGAAFFSQTLAVNDATVKFEIWDTAGQERYHSLAPMYYRGAAAAIIVFDITNQGSFERAKKWVQELQAQGNPNMVMALAGNKADLLDARKVSAEEAETYALENSLFFMETSAKTATNVKDIFYEIAKRLPRVQPAKNPTGMVPPNGPGATAASASCCA

SEQ ID NO: 5275 - DNA, 672 bp, Brassica napus
  CDS (1)..(672)
atggccggaggaggcggatacggcggcgcatcgggaaaagtcgattacgtcttcaaagtcgttctgatcggcgattcagcagtcgggaaatcgcagctgctcgctcgattcgctagagacgagttcagcttagactccaaggccacaatcggcgtcaagttccagactcgtaccctcaccattgaagagaagagcgtcaaggctcagatctgggataccgccggccaagaaagatacagagcggttacgagcgcttattacagaggagcggctggtgcgatgcttgtttacgatattaccaaacgtgagacctttgaccacatccctcgttggcttgaggagctcagagcgcatgctgataagaacattgtgatcatcctcattggtaacaagtctgatctcgaggatcagagagctattcccaccgaagacgccaaagagtttgcggagaaggaaggtcttttcttcctcgagacgtctgctctgaacgcgaccaatgtggagaactccttcaacactctgatgatggagatcttcaacacggttaacaagaagagtctctcgtctgctgagtcaaataaccctggttctttggctggtaagaagattgttatcccaggtccaggacaggaggttcccgctaagaccagcacgtgctgtagttctgcttga

SEQ ID NO: 5276 - protein, 223 aa, Brassica napus
MAGGGGYGGASGKVDYVFKVVLIGDSAVGKSQLLARFARDEFSLDSKATIGVKFQTRTLTIEEKSVKAQIWDTAGQERYRAVTSAYYRGAAGAMLVYDITKRETFDHIPRWLEELRAHADKNIVIILIGNKSDLEDQRAIPTEDAKEFAEKEGLFFLETSALNATNVENSFNTLMMEIFNTVNKKSLSSAESNNPGSLAGKKIVIPGPGQEVPAKTSTCCSSA

SEQ ID NO: 5277 - DNA, 672 bp, Brassica napus
  CDS (1)..(672)
atgtcgagcggaggatacggagacccgtcgcagaagattgactacgtcttcaagctagtcctgatcggagactccggagtcgggaaatctcagatactctcccgttacgcgagaaacgagttcagcttggactccaaagccaccatcggcgtcgagttccaaactcgaacgctcgtgatggaccacaagagcgtcaaggctcagatctgggacaccgcgggccaagaacggtatagagcggtgacgagtgcttactacagaggagcggttggtgcgatgcttgtttacgacgtgacgcggcgtcagacgttcgatcacatcccgcggtggctggaggagctgagaggccacgcggacaagaacattgtgataatactcgtggggaacaagtctgatctcgaggatcagcgtgcgatctcgacggaagatgctaaggagttcgcggagacggaagggcttttcttcttggagacttcggctctgaacgcggtcaacgtggagacggctttctcgactgttttgactgagatttttaatattgtgaacaagaagaatcttgttgctggggaagggaatggcgatccggggtctcttgctggtaagaagattgacattgttccggggcctgctcaggtggttccgaccaagagtggcatgtgctgtaactcgtag

SEQ ID NO: 5278 - protein, 223 aa, Brassica napus
MSSGGYGDPSQKIDYVFKLVLIGDSGVGKSQILSRYARNEFSLDSKATIGVEFQTRTLVMDHKSVKAQIWDTAGQERYRAVTSAYYRGAVGAMLVYDVTRRQTFDHIPRWLEELRGHADKNIVIILVGNKSDLEDQRAISTEDAKEFAETEGLFFLETSALNAVNVETAFSTVLTEIFNIVNKKNLVAGEGNGDPGSLAGKKIDIVPGPAQVVPTKSGMCCNS

SEQ ID NO: 5279 - DNA, 648 bp, Brassica napus
  CDS (1)..(648)
atggctgctcctcctgctagagctcgcgctgattacgattacctcattaaactactcttgatcggagacagcggtgtgggtaagagttgcctcctcttacgtttctcagatggctcctttaccaccagtttcattacaaccattggaattgatttcaagatacggactattgagctggatgggaagagaattaagctgcaaatctgggatactgctggacaggagcggttccggactatcacaactgcgtactaccgtggagccatgggcattttgcttgtgtatgatgtcaccgatgaatcatctttcaacaatatcaggaactggatccgtaacattgagcagcacgcttctgataatgtcaacaagattctagtggggaacaaggctgatatggatgaaagcaaacgagctgtgccaaaagctaagggccaagctcttgcagatgaatacggaatcaagtttttcgagactagtgccaagactaacctaaacgttgaggaagttttcttttcaattggtaaagacattaagcaaagacttgctgataccgatgcaaaggctgagccacaaacaatcaaaatcaaccaatccgaccaaggtgcagggacatctcaagctactcagaaatcagcatgttgtggttag

SEQ ID NO: 5280 - protein, 215 aa, Brassica napus
MAAPPARARADYDYLIKLLLIGDSGVGKSCLLLRFSDGSFTTSFITTIGIDFKIRTIELDGKRIKLQIWDTAGQERFRTITTAYYRGAMGILLVYDVTDESSFNNIRNWIRNIEQHASDNVNKILVGNKADMDESKRAVPKAKGQALADEYGIKFFETSAKTNLNVEEVFFSIGKDIKQRLADTDAKAEPQTIKINQSDQGAGTSQATQKSACCG

SEQ ID NO: 5281 - DNA, 654 bp, Brassica napus
  CDS (1)..(654)
atggcgaatcatcgaatagacaatgagtacgattacttgttcaagatcgtcctcatcggcgactccggcgtcggcaaatccaacatcctctccagattcaccagaaacgagttctgcctcgaatccaaatccaccatcggcgtcgaattcgccacacgcactctacaggtagaaggcaaaacagtgaaggctcagatttgggatacagcaggacaagagcgttaccgagccatcacaagcgcttactacagaggagccgtcggggctctcctcgtctacgacatcaccaagagacaaaccttcgaaaattctctgaggtggttacgcgagcttagggaccatgccgattccaacattgtgatcatgatggctggaaacaaatcagatctaaaccacctgagatccgttgctgatgaagatggtaggtctctggctgagaaggaaggtttgtcgtttctcgagacgtctgctttggaagcgagtaatatcgagaaagcgtttcagacgatcttgtctgagatttatcatattataagcaagaaagcgttggcggcgcaaaaagctgcaggtaagcttcaggttcccgggcaaggtactgccattaacataacggaatcatctgtagctaaaaggaaaggatgctgttctacctaa

SEQ ID NO: 5282 - protein, 217 aa, Brassica napus
MANHRIDNEYDYLFKIVLIGDSGVGKSNILSRFTRNEFCLESKSTIGVEFATRTLQVEGKTVKAQIWDTAGQERYRAITSAYYRGAVGALLVYDITKRQTFENSLRWLRELRDHADSNIVIMMAGNKSDLNHLRSVADEDGRSLAEKEGLSFLETSALEASNIEKAFQTILSEIYHIISKKALAAQKAAGKLQVPGQGTAINITESSVAKRKGCCST

SEQ ID NO: 5283 - DNA, 654 bp, Brassica napus
  CDS (1)..(654)
atggcgaatcatcgtttagataatgagtacgattacttgttcaagatcgtcctcatcggcgactccggcgtcggcaaatccaacatcctctccagattcaccagaaacgagttctgcctcgaatccaaatccaccatcggcgtcgaattcgccacacgcactctacaggtagaaggcaaaacagtgaaggctcagatttgggatacagcaggacaagagcgttaccgagccatcacaagcgcttactacagaggagccgtcggagctctcctcgtctacgacatcaccaagagacaaaccttcgagaattctctgaggtggttacgcgagcttagggaccatgccgattccaacattgtgatcatgatggctgggaacaaatcagatctaaaccacctgagatctgttgctgatgaagatggtaggtctctggctgagaaggaaggtttgtcgtttcttgagacgtctgctttggaagcgagtaatatcgagaaagcgtttcagacgatcttgtctgagatttatcatattataagcaagaaagcgttggcggcgcaggaagctgcaggtgggcttccggttccggggcaaggtactgctattaacatatcggaatcatctgtaggtaacaggaaaggatgctgttctacctaa

SEQ ID NO: 5284 - protein, 217 aa, Brassica napus
MANHRLDNEYDYLFKIVLIGDSGVGKSNILSRFTRNEFCLESKSTIGVEFATRTLQVEGKTVKAQIWDTAGQERYRAITSAYYRGAVGALLVYDITKRQTFENSLRWLRELRDHADSNIVIMMAGNKSDLNHLRSVADEDGRSLAEKEGLSFLETSALEASNIEKAFQTILSEIYHIISKKALAAQEAAGGLPVPGQGTAINISESSVGNRKGCCST

SEQ ID NO: 5285 - DNA, 651 bp, Brassica napus
  CDS (1)..(651)
atggctgctccaccggctagggccagagccgattacgactatctcataaagcttcttttgattggagatagcggtgtcggtaaaagttgcctcctcctacgtttctcggatggctcattcaccactagcttcattaccaccattggcattgactttaagataagaaccattgagcttgatggcaaacgtatcaagctccagatttgggacactgctggtcaagaacgtttccgcaccatcaccactgcttattaccgtggggcaatgggcattttactagtgtatgatgtcacagacgagtcctccttcaacaacataaggaactggattcggaatatcgaacagcacgcttcagataatgttaacaaaatcttggtaggaaacaaggctgacatggacgaaagcaagagggctgtacctacagccaaaggtcaggcgcttgctgatgagtacggaattaagttcttcgaaactagtgccaagacaaacttaaacgtggaagaagttttcttctccatagggagggacataaaacagaggctttctgacactgactccaaggcagagcctgccacgatcaagataagccaaacagaccaggcagctggagccgggcaggccacacagaagtctgcatgctgtggaagttaa

SEQ ID NO: 5286 - protein, 216 aa, Brassica napus
MAAPPARARADYDYLIKLLLIGDSGVGKSCLLLRFSDGSFTTSFITTIGIDFKIRTIELDGKRIKLQIWDTAGQERFRTITTAYYRGAMGILLVYDVTDESSFNNIRNWIRNIEQHASDNVNKILVGNKADMDESKRAVPTAKGQALADEYGIKFFETSAKTNLNVEEVFFSIGRDIKQRLSDTDSKAEPATIKISQTDQAAGAGQATQKSACCGS

SEQ ID NO: 5287 - DNA, 672 bp, Brassica napus
  CDS (1)..(672)
atgtcaaatcttcataccaatttcaatcaaaagatagattatgtgttcaaagtagtcttgattggcgactctgccgttggcaaatctcagcttctcgctagattctctagaaacgagttcagcatcgagtccaaagcaacgatcggtgtcgagtttcagacaagaacacttaccatcgataataaaactgtcaaagctcaaatatgggacactgccggtcaagaacggtaccgagcggtgacgagtgcatactacagaggtgcagtaggggcaatgcttgtgtacgacataacaaaacgacagtcttttgatcatgtcgcgaggtggttagaagaattgagaggacacgcagacaaaaacattgtgatcatgcttgtaggaaacaaaaccgatctcggcacacttcgagctgtacctaccgaggatgcgaaggagtttgcacaaagagaaaacctcttcttcatggagacatcagctctggattccatcaatgttgagccatctttcctcacggttctgactgaaatctacaggatagtgagcaaaaagaatcttgttgctaatgaggaaggagaatctggtggtgactcttcactcctgcaaggaactaagattgttgttcctggagaagaggctgaagctaaaggaaagggatgttgtggaacatcgtag

SEQ ID NO: 5288 - protein, 223 aa, Brassica napus
MSNLHTNFNQKIDYVFKVVLIGDSAVGKSQLLARFSRNEFSIESKATIGVEFQTRTLTIDNKTVKAQIWDTAGQERYRAVTSAYYRGAVGAMLVYDITKRQSFDHVARWLEELRGHADKNIVIMLVGNKTDLGTLRAVPTEDAKEFAQRENLFFMETSALDSINVEPSFLTVLTEIYRIVSKKNLVANEEGESGGDSSLLQGTKIVVPGEEAEAKGKGCCGTS

SEQ ID NO: 5289 - DNA, 672 bp, Brassica napus
  CDS (1)..(672)
atggccggaggaggcggatacggcggcgcatcgggaaaagtcgattacgtcttcaaagtcgttctgatcggcgattcagcagtcgggaaatcgcagctgctcgctcgattcgctagagacgagttcagcttagactccaaggccacaatcggcgtcgagttccagactcgtaccctcaccattgaagagaagagcgtcaaggctcagatctgggataccgccggccaagaaagatacagagcggttacgagcgcttattacagaggagcggttggtgcgatgcttgtttacgatattaccaaacgtgagacctttgaccacatccctcgttggcttgaggagctcagagcgcatgctgataagaacattgtgatcatcctcattggtaacaagtctgatctcgaggatcagagagctattcccaccgaagacgccaaagagtttgcggagaaggaaggtcttttcttcctcgagacgtctgctctgaacgcgaccaatgtggagaactccttcaacactctgatgatggagatcttcaacacggttaacaagaagagtctctcgtctgctgagtcaaataaccctggttctttggctggtaagaagattgttatcccaggtccaggacaggaggttcccgctaagaccagcacgtgctgtagttctgcttga

SEQ ID NO: 5290 - protein, 223 aa, Brassica napus
MAGGGGYGGASGKVDYVFKVVLIGDSAVGKSQLLARFARDEFSLDSKATIGVEFQTRTLTIEEKSVKAQIWDTAGQERYRAVTSAYYRGAVGAMLVYDITKRETFDHIPRWLEELRAHADKNIVIILIGNKSDLEDQRAIPTEDAKEFAEKEGLFFLETSALNATNVENSFNTLMMEIFNTVNKKSLSSAESNNPGSLAGKKIVIPGPGQEVPAKTSTCCSSA

SEQ ID NO: 5291 - DNA, 654 bp, Brassica napus
  CDS (1)..(654)
atggcggttgctccggcgagagctcgttcggactatgattacctcatcaagctccttctcatcggcgacagcggtgtggggaagagttgcttgttgctgcgtttctcagatgatactttcactacaagcttcattactaccattggaattgacttcaagataagaaccgttgagcttgatgggaagcgtatcaaattgcagatatgggacacggctggtcaagaacgtttcagaactatcaccacagcgtattacagaggagcgatgggcatactccttgtctacgatgtaaccgatgagtcatccttcaacaacattaggaactggatgaagaacatagagcagcatgcctcagataacgtaaacaaaatactggtcggtaacaaagctgacatggatgaaagcaaaagggctatcccaacagcaaagggccaagctttagctgatgagtatggaatcaaattctttgagacgagtgcaaaaacaaacctcaatgtggagtctgttttcctctctatcgccaaagacatcaaacaaagattgacagaaactgatacaaaggctgagccacaaggcatcaagatcactaagcaagatgctgcttcatcgtcttctactacagctgagaaatcagcttgctgtagttacgtttag

SEQ ID NO: 5292 - protein, 217 aa, Brassica napus
MAVAPARARSDYDYLIKLLLIGDSGVGKSCLLLRFSDDTFTTSFITTIGIDFKIRTVELDGKRIKLQIWDTAGQERFRTITTAYYRGAMGILLVYDVTDESSFNNIRNWMKNIEQHASDNVNKILVGNKADMDESKRAIPTAKGQALADEYGIKFFETSAKTNLNVESVFLSIAKDIKQRLTETDTKAEPQGIKITKQDAASSSSTTAEKSACCSYV

SEQ ID NO: 5293 - DNA, 651 bp, Brassica napus
  CDS (1)..(651)
atggctgctccacctgctagggccagagctgattacgactatctcatcaagcttcttttgatcggagatagcggtgtgggtaagagttgtctgcttctacgtttctctgatggctccttcaccactagcttcatcaccaccattggcattgactttaagatcagaaccattgagcttgatggcaaacgtatcaagcttcagatttgggacactgctggtcaagaacgtttccgcaccatcaccaccgcttattaccgtggggcgatgggcattttgctggtctatgatgtcaccgacgagtcctccttcaacaatattaggaactggattcgtaatattgaacaacatgcgtcagataatgttaacaagatcttggttgggaacaaggctgacatggacgaaagcaagagggcggttcctacagcaaagggtcaggctcttgctgatgagtacggaattaagttctttgaaactagtgctaagacaaacctaaacgtggaagaagttttcttctccatcgggagggacataaagcagaggctttctgacactgactccaaggcagagcctgcgacgatcaggataagccaaactgaccaggcagctggagctgcgcaggccacacagaagtctgcatgctgtggaagttaa

SEQ ID NO: 5294 - protein, 216 aa, Brassica napus
MAAPPARARADYDYLIKLLLIGDSGVGKSCLLLRFSDGSFTTSFITTIGIDFKIRTIELDGKRIKLQIWDTAGQERFRTITTAYYRGAMGILLVYDVTDESSFNNIRNWIRNIEQHASDNVNKILVGNKADMDESKRAVPTAKGQALADEYGIKFFETSAKTNLNVEEVFFSIGRDIKQRLSDTDSKAEPATIRISQTDQAAGAAQATQKSACCGS

SEQ ID NO: 5295 - DNA, 651 bp, Brassica napus
  CDS (1)..(651)
atggctgctccacctgctaggggtagagccgattacgattacctcataaagctcctcctaatcggtgatagcggtgtgggcaaaagttgtttgctgttaaggttctctgatggctcattcaccactagcttcatcaccaccattggcattgattttaagatacgaactattgagcttgataccaaacgcatcaagctccagatttgggatactgctggtcaagaacgttttcgaaccatcaccactgcttattaccgaggggcaatgggcattttgctggtctatgatgtcacagacgagtcatcctttaacaatattaggaactggattcgtaatatcgaacagcacgcttcggataatgtcaacaagatcttggtagggaacaaagccgatatggacgagagcaagagggctgttccaacatcaaagggtcaagcacttgctgatgaatatggaatcaagttctttgaaacaagtgccaaaacaaatctaaatgtggaagaggttttcttctcgatagcaaaggacattaagcagagactcacagatactgactcgagagcagagcctgcgacgattaggataagccaaacagaccaggctgctggagccggacaagccacgcagaagtctgcatgctgtggaacttaa

SEQ ID NO: 5296 - protein, 216 aa, Brassica napus
MAAPPARGRADYDYLIKLLLIGDSGVGKSCLLLRFSDGSFTTSFITTIGIDFKIRTIELDTKRIKLQIWDTAGQERFRTITTAYYRGAMGILLVYDVTDESSFNNIRNWIRNIEQHASDNVNKILVGNKADMDESKRAVPTSKGQALADEYGIKFFETSAKTNLNVEEVFFSIAKDIKQRLTDTDSRAEPATIRISQTDQAAGAGQATQKSACCGT

SEQ ID NO: 5297 - DNA, 603 bp, Brassica napus
  CDS (1)..(603)
atggccaccgctggaaacaagaacatcaacgccaaactggtactgcttggggatgttggagctggaaaatcaagtcttgtgcttcggttcgtcaaagatcagtttgttgaattccaggaatcaacgataggtgcagccttcttctctcaaacattggctgtgaatgatgcaactgtcaagtttgagatttgggatacagctggccaggaacgttaccatagcttggctcctatgtactacaggggtgctgctgctgccattattgtctttgacattactaatcaaggctcatttgagagggcgaagaaatgggttcaggaactgcaggctcaaggtaatcctaatatggtgatggctcttgctggaaacaaagctgatttattagatgcaaggaaagtgtctccagaggaggcagagacatatgcgcaagagaacagccttttcttcatggaaacctcagcgaagactgcaacaaatgtcaaagacatcttctacgaaatcgcaaaaaggctaccgcgcgtgcagccagcagaaaacccaacagggatggttctcccaaacgggccaggagctacggcagcaagcgcatcatgttgtgcttaa

SEQ ID NO: 5298 - protein, 200 aa, Brassica napus
MATAGNKNINAKLVLLGDVGAGKSSLVLRFVKDQFVEFQESTIGAAFFSQTLAVNDATVKFEIWDTAGQERYHSLAPMYYRGAAAAIIVFDITNQGSFERAKKWVQELQAQGNPNMVMALAGNKADLLDARKVSPEEAETYAQENSLFFMETSAKTATNVKDIFYEIAKRLPRVQPAENPTGMVLPNGPGATAASASCCA

SEQ ID NO: 5299 - DNA, 648 bp, Brassica napus
  CDS (1)..(648)
atggctgctcctcctgctagagctcgcgctgattacgattacctcattaaactactcttgatcggagacagcggtgtgggtaagagttgcctcctcttgcgtttttcagatggctcctttaccaccagtttcattacaaccattggaattgatttcaagatacggactattgagctggatgggaagagaattaagctgcaaatctgggatactgcaggacaggagcggttccggactatcacaactgcgtactaccgtggagccatgggcattttgcttgtgtatgatgtcaccgatgaatcatctttcaacaacatcaggaactggatccgtaacattgagcagcacgcttctgataatgtcaacaagattctagtggggaacaaggcagatatggatgaaagcaaacgagctgtgccaaaagctaagggacaagctcttgcagatgaatacggaatcaagttcttcgagactagtgccaagacgaacttaaacgttgaggaagttttcttttcaataggtaaagacattaagcaaagacttgcagataccgatgcaagggctgagccacaaacaatcagaatcaaccaatccgaccaaggtgcagggacatctcaagctactcagaaatcagcatgttgtggttag

SEQ ID NO: 5300 - protein, 215 aa, Brassica napus
MAAPPARARADYDYLIKLLLIGDSGVGKSCLLLRFSDGSFTTSFITTIGIDFKIRTIELDGKRIKLQIWDTAGQERFRTITTAYYRGAMGILLVYDVTDESSFNNIRNWIRNIEQHASDNVNKILVGNKADMDESKRAVPKAKGQALADEYGIKFFETSAKTNLNVEEVFFSIGKDIKQRLADTDARAEPQTIRINQSDQGAGTSQATQKSACCG

SEQ ID NO: 5301 - DNA, 654 bp, Brassica napus
  CDS (1)..(654)
atggcgaatagagtggatcaggaatacgattatttgtttaagatcgtgttgatcggagactcgggtgttgggaaatccaacatattgtccagattcacgaggaacgagttttgcttggaatccaaatccaccatcggtgtcgaattcgccaccaggactactcaggtggaaggaaagacgatcaaagctcagatctgggacactgcaggtcaggagaggtacagagccatcactagcgcttactaccgaggcgcagtgggtgccctccttgtctacgacatcaccaagaggcagacctttgacaatgccttgaggtggctccgcgaactcagagaccatgctgattccaacatcgtcatcatgatggctggcaacaaatccgatcttaaccacttgagatccgttgctgaggaagacggtcacaatctagccgagaaggaaggtctctctttccttgagacttctgctctcgaagcaaccaacgtcgagaaagcgtttcagaccatcttaggagagatctaccatatcataagcaaaaaggcactggctgcacaagaagcggctgctgctaactccgccattccaggtcagggaactacgattaacgtcgatgacacatctggaggcgtgaaacgaggctgctgctctacctaa

SEQ ID NO: 5302 - protein, 217 aa, Brassica napus
MANRVDQEYDYLFKIVLIGDSGVGKSNILSRFTRNEFCLESKSTIGVEFATRTTQVEGKTIKAQIWDTAGQERYRAITSAYYRGAVGALLVYDITKRQTFDNALRWLRELRDHADSNIVIMMAGNKSDLNHLRSVAEEDGHNLAEKEGLSFLETSALEATNVEKAFQTILGEIYHIISKKALAAQEAAAANSAIPGQGTTINVDDTSGGVKRGCCST

SEQ ID NO: 5303 - DNA, 612 bp, Zea mays
  CDS (1)..(612)
atggcggccaacgccgggaataagatccgcaacgccaagctggttcttcttggagatgtgggcgctggcaaatctagcttggttcttcggtttgttaagggacagtttgttgaattccaggaatcaacaattggagcagccttcttttcccagaccttagcggtcaatgatgagactgttaagttcgaaatctgggatactgccgggcaggagaggtatcatagcttggctcccatgtactataggggtgcagctgctgccattgttgtctatgacatcacaaatccggcctccttcacccgtgccaagaaatgggttcaagaacttcaagctcaaggaaatcagaataccatagtggctcttgctggaaacaaggctgatatgctagatgcgaggcaggtgccagcagaggaagcaaaggcgtatgctcaggagaatgggctcttcttcatggagacatctgctaaaactgcaatcaatgtgaatgacatattttatgagattgcaaagagattgcttcaagggcaagaggctccaagtccacaggctggaattgttctgaatcagagaccagatgagaggatggtcagcacttcctcgtgctgctcatga

SEQ ID NO: 5304 - protein, 203 aa, Zea mays
MAANAGNKIRNAKLVLLGDVGAGKSSLVLRFVKGQFVEFQESTIGAAFFSQTLAVNDETVKFEIWDTAGQERYHSLAPMYYRGAAAAIVVYDITNPASFTRAKKWVQELQAQGNQNTIVALAGNKADMLDARQVPAEEAKAYAQENGLFFMETSAKTAINVNDIFYEIAKRLLQGQEAPSPQAGIVLNQRPDERMVSTSSCCS

SEQ ID NO: 5305 - DNA, 657 bp, Glycine max
  CDS (1)..(657)
atggcagggtacaagggcgatgacgagtacgattacctcttcaagctggttctgatcggcgattctggtgtggggaagtccaacctgctttcgcgcttcaccaggaacgagttcaatttggagtccaagtccaccataggggttgagttcgccaccaagagcttgaacatcgatgctaaggtcatcaaggctcagatttgggacaccgctggccaggaaaggtaccgtgccattactagtgcttactaccgaggagctgttggtgccttacttgtctatgatgtcacacgccgtgctacatttgagaatgctgcaagatggttgaaagagttgagagatcacacagaccccaacattgtggtcatgcttattggaaataagtcggatcttcgacaccttgttgctgtcccaacagaagatggaaaatcttttgcggagaaggaatctctctacttcatggaaacttctgcattagaagcaaccaatgttgaaaatgcatttacagaggttctttctcagatataccgaatagtgagcaagagaactgttgaggccggcaagaatgccagttcttctgctgtcccatctaaaggacagacaataaatgtgaaagacgattcctccgttttgaagaaaattgggtgctgctcaaactag

SEQ ID NO: 5306 - protein, 218 aa, Glycine max
MAGYKGDDEYDYLFKLVLIGDSGVGKSNLLSRFTRNEFNLESKSTIGVEFATKSLNIDAKVIKAQIWDTAGQERYRAITSAYYRGAVGALLVYDVTRRATFENAARWLKELRDHTDPNIVVMLIGNKSDLRHLVAVPTEDGKSFAEKESLYFMETSALEATNVENAFTEVLSQIYRIVSKRTVEAGKNASSSAVPSKGQTINVKDDSSVLKKIGCCSN

SEQ ID NO: 5307 - DNA, 654 bp, Glycine max
  CDS (1)..(654)
atggctcggagagcagaggaagagtacgattatctgttcaaggttgtactgatcggtgattctggtgttggaaaatccaatctcctgtcccgattcactcgcaacgagttttgcctcgaatccaagtccaccattggagtcgaattcgctactcgcactcttcaggtggagggaagaactgtgaaagctcaaatatgggatactgccggacaggaacgatacagagcaattacgagtgcctactaccggggtgcccttggagctcttcttgtctacgatgtcactaaaccaaccacattcgaaaatgttagccgatggctcaaggagctaagggatcacgccgatgctaacattgtcatcatgttgatcgggaacaagactgatctcaagcatctcagagctgttgccaccgaggatgctcagggttatgccgagaaggaaggcctttctttcatcgagacttccgctcttgaagcaactaatgttgagaatgctttccagactattcttgcagagatataccgcattatcagtaagaaatcactctcttccaatgaccctgctgccaatattattaaagaaggcaagactatcacagttgggggggcacccgaacccaacacaaacaagccttcttgctgtacatcatcttga

SEQ ID NO: 5308 - protein, 217 aa, Glycine max
MARRAEEEYDYLFKVVLIGDSGVGKSNLLSRFTRNEFCLESKSTIGVEFATRTLQVEGRTVKAQIWDTAGQERYRAITSAYYRGALGALLVYDVTKPTTFENVSRWLKELRDHADANIVIMLIGNKTDLKHLRAVATEDAQGYAEKEGLSFIETSALEATNVENAFQTILAEIYRIISKKSLSSNDPAANIIKEGKTITVGGAPEPNTNKPSCCTSS

SEQ ID NO: 5309 - DNA, 654 bp, Glycine max
  CDS (1)..(654)
atggcgggttacagagccgacgacgactacgactacctcttcaaggtggtcctgatcggcgattccggcgtgggcaagtccaacctcctctctcgcttcaccaagaacgagttcaacttggagtccaagtccaccattggcgtcgagttcgccacccgcaccttgaacgtcgattccaaagtcatcaaggcccagatctgggacaccgcaggccaagaaaggtatcgtgccatcaccagtgcatactatcgtggggcagtcggtgcacttctcgtgtatgatgtcactcgccatgcaacatttgaaaatgttgacagatggctgaaagaattgcggaaccacacagatgccaacattgttgtgatgctagttggcaacaaatcagaccttcgtcaccttgtagccgtgtcaactgaagatgggaagtcctatgctgagaaagaatcactttacttcatggaaacctcagctctggaggctactaatgtagagaatgcatttgctgaagttctgactcaaatctaccgcattgttagcaagaaagcagtagagggggctgaaaatggaactgcatctgtgcctgccaaaggagagaaaattgatctgaaaaatgatgtgtctgctttgaagagagttggttgctgctcaagctaa

SEQ ID NO: 5310 - protein, 217 aa, Glycine max
MAGYRADDDYDYLFKVVLIGDSGVGKSNLLSRFTKNEFNLESKSTIGVEFATRTLNVDSKVIKAQIWDTAGQERYRAITSAYYRGAVGALLVYDVTRHATFENVDRWLKELRNHTDANIVVMLVGNKSDLRHLVAVSTEDGKSYAEKESLYFMETSALEATNVENAFAEVLTQIYRIVSKKAVEGAENGTASVPAKGEKIDLKNDVSALKRVGCCSS

SEQ ID NO: 5311 - DNA, 609 bp, Glycine max
  CDS (1)..(609)
atgaatcccgagtatgattatctgttcaagctccttcttattggagactctggtgttggtaaatcatgccttcttctgagatttgctgatgattcgtacatcgagagctacataagcaccattggagttgattttaaaatacgtactgttgagcaggatggaaagaccattaaactacagatctgggacacagccgggcaagaacgatttaggacaatcaccagtagctactatcgtggggcccatgggatcattattgtttatgatgtgacagatgaagagagcttcaataatgtgaagcagtggctcagtgaaattgatcgctatgcaagtgataatgttaacaagcttttggttggaaacaagtgtgatctggaagcaaatagagctgtgtcatatgaaacagctaaagcattcgcagatgaaataggcataccttttatggaaacaagtgcaaaagatgctacaaatgttgaacaggctttcatggcaatggctgcttcaatcaaggatagaatggcaagccaacctgcaaacaatgcaaggcctccaacagtgcagatcaggggacagccagttgcacagaaaggtgggtgctgctcttcctaa

SEQ ID NO: 5312 - protein, 202 aa, Glycine max
MNPEYDYLFKLLLIGDSGVGKSCLLLRFADDSYIESYISTIGVDFKIRTVEQDGKTIKLQIWDTAGQERFRTITSSYYRGAHGIIIVYDVTDEESFNNVKQWLSEIDRYASDNVNKLLVGNKCDLEANRAVSYETAKAFADEIGIPFMETSAKDATNVEQAFMAMAASIKDRMASQPANNARPPTVQIRGQPVAQKGGCCSS

SEQ ID NO: 5313 - DNA, 657 bp, Glycine max
  CDS (1)..(657)
atggcttggtacaagggcgatgacgagtacgattacctcttcaagctggttctgatcggcgattccggtgtcggcaagtccaacctgctttcgcgcttcacgaggaacgagttcaatttggagtccaagtccaccataggggttgagttcgccaccaagagcttggacatcgatgctaaggtcatcaaggctcagatttgggacaccgctggccaggaaaggtaccgtgccattactagtgcttactaccgaggagctgttggtgccttacttgtctatgatgtcacacgccgtgctacatttgagaatgctgcaagatggttgaaagagttgagagatcacacagaccccaacattgtggtcatgcttattggaaataagtcggatcttcgacaccttgtagctgtcccaacagaagatggaaaatcttttgcagagaaggaatctctctacttcatggagacttctgctttagaagcaacaaatgttgaaaatgcatttactgaggttctttctcagatataccgcatagtgagcaagagagcagttgaggccggcaacaatgccagttcttctgctgtcccgtccaaaggacagacaataaatgtgaaagacgattcctcagttttgaagaaaattgggtgctgctcaaactag

SEQ ID NO: 5314 - protein, 218 aa, Glycine max
MAWYKGDDEYDYLFKLVLIGDSGVGKSNLLSRFTRNEFNLESKSTIGVEFATKSLDIDAKVIKAQIWDTAGQERYRAITSAYYRGAVGALLVYDVTRRATFENAARWLKELRDHTDPNIVVMLIGNKSDLRHLVAVPTEDGKSFAEKESLYFMETSALEATNVENAFTEVLSQIYRIVSKRAVEAGNNASSSAVPSKGQTINVKDDSSVLKKIGCCSN

SEQ ID NO: 5315 - DNA, 651 bp, Glycine max
  CDS (1)..(651)
atggcagcaccacctgcgagggcacgtgccgattacgattacctcatcaagcttcttcttattggcgatagcggtgtcggaaagagttgtctgcttttgcgattttctgatggttccttcacaaccagttttatcaccaccattggcattgattttaagataagaaccattgaacttgatggcaaacgcattaagttacaaatctgggatactgctggtcaggagcgatttcgaactattaccacagcttattaccgtggagccatgggcatattgcttgtttatgatgttactgatgaagcatctttcaacaatattaggaattggattcgcaacattgaacaacatgcttctgacaatgtaaacaagatacttgtgggtaacaaggctgatatggatgaaagtaaaagggctgtgcctacctccaaaggtcaagcccttgctgatgagtatggtatcaagttttttgaaaccagtgcgaagacaaacatgaatgtggaggaggttttcttttcaatagcaagagatatcaagcaaaggcttgcagacacagattctaaggctgaacctcagactatcaagattaaccaacccgaccaggcagccaccgggggtctagctgctcaaaaatcggcttgctgtggttcatga

SEQ ID NO: 5316 - protein, 216 aa, Glycine max
MAAPPARARADYDYLIKLLLIGDSGVGKSCLLLRFSDGSFTTSFITTIGIDFKIRTIELDGKRIKLQIWDTAGQERFRTITTAYYRGAMGILLVYDVTDEASFNNIRNWIRNIEQHASDNVNKILVGNKADMDESKRAVPTSKGQALADEYGIKFFETSAKTNMNVEEVFFSIARDIKQRLADTDSKAEPQTIKINQPDQAATGGLAAQKSACCGS

SEQ ID NO: 5317 - DNA, 657 bp, Glycine max
  CDS (1)..(657)
atgggtgccgacgaagactacgattacttgttcaagctggtcctcatcggagattcgggtgttggcaagtccaacctcttgtcccgattcacccgaaacgagttcagcttggagaccaaatccaccatcggcgtcgaattcgccacgcgaagtgtccccgttgatagcaagctcgtcaaggcacaaatctgggacactgcaggccaagaaagatatcgtgcaattacaagtgcatactaccgaggagccgtgggtgctttgatcgtgtacgatgtaacccgacacgtgacattcgagaacgtggagagatggttgaaggagcttcgggatcacacagaagcatacgttgtggtcatgctggtgggaaacaaagcagaccttcgacatttgcgtgcagtgtccacagaagaagccacagaatatgcggagaaagagaacatctacttcatggaaacctctgcccttgagtccctgaacgtaggcaatgctttcgtagaagtgctgactcagatatacaacgttgtgagtaggaagactcttgagaccatggatgatgaccctaattcaaaagccttacccaaaggggaaaccatcgttattggaaccaaagatgatgatgtctcagctgttaaaaagagtggatgctgttccacatag

SEQ ID NO: 5318 - protein, 218 aa, Glycine max
MGADEDYDYLFKLVLIGDSGVGKSNLLSRFTRNEFSLETKSTIGVEFATRSVPVDSKLVKAQIWDTAGQERYRAITSAYYRGAVGALIVYDVTRHVTFENVERWLKELRDHTEAYVVVMLVGNKADLRHLRAVSTEEATEYAEKENIYFMETSALESLNVGNAFVEVLTQIYNVVSRKTLETMDDDPNSKALPKGETIVIGTKDDDVSAVKKSGCCST

SEQ ID NO: 5319 - DNA, 606 bp, Glycine max
  CDS (1)..(606)
atgggttgcggctcctcccttccagataggggctcaaggcagttcccgggtcgacccaattccgagaatggtggagggcaggacgccaagaatctgagggtcaagcttgttctcttaggtgattctggtgttggcaaaagctgtattgttctacgatttgttcgtggtcagtttgatccaacatctaaggtaactgttggagcttcttttttgtcacaaacaatagctctgcaagactctacaacagtcaagtttgaaatatgggatactgctggtcaagagaggtacgctgcgttagcaccactctattaccgtggtgcagcagttgcagttattgtttatgatataacaagcccagaatctttcagcaaagcacagtactgggttaaggagctacaaaaacatggaagccctgatatagtgatggcactggtcggtaataaagctgatcttcttgagaagcgggaagttgctgtccaggatggcactgactatgcagagaagaatggtatgtttttcatagagacatctgcaaagacagcagataatataaatgaactgtttgaggaaattgccaaaagactgcctcgcccatcagttagttga

SEQ ID NO: 5320 - protein, 201 aa, Glycine max
MGCGSSLPDRGSRQFPGRPNSENGGGQDAKNLRVKLVLLGDSGVGKSCIVLRFVRGQFDPTSKVTVGASFLSQTIALQDSTTVKFEIWDTAGQERYAALAPLYYRGAAVAVIVYDITSPESFSKAQYWVKELQKHGSPDIVMALVGNKADLLEKREVAVQDGTDYAEKNGMFFIETSAKTADNINELFEEIAKRLPRPSVS

SEQ ID NO: 5321 - DNA, 609 bp, Glycine max
  CDS (1)..(609)
atgaatcccgagtatgattatctgttcaagctccttcttattggagactctggtgttggtaaatcatgccttcttctgagattttctgatgattcgtacatcgaaagctacataagcaccattggagttgattttaaaatacgtactgttgagcaagatggaaagaccattaaactacagatctgggacacagctgggcaagaacgatttaggacaatcaccagtagctactaccgtggtgcccatgggatcattattgtttatgatgtgacagatgaagagagcttcaataatgtgaagcagtggctcagtgaaattgatcgctatgcaagtgataatgttaacaagcttttggttggcaacaagtgtgatctggaagcaaatagagcagtgtcatatgaaacagctaaggcattcgcagatgaaataggcataccttttatggaaacaagtgcaaaagatgctacaaatgttgaacaggctttcatggcaatggctgcttcaatcaaggatagaatggcaagccaacctgcaaacaatgcaaggcctccaacagtgcagatcaggggacagccagttgcacagaaaggtgggtgctgctcttcctaa

SEQ ID NO: 5322 - protein, 202 aa, Glycine max
MNPEYDYLFKLLLIGDSGVGKSCLLLRFSDDSYIESYISTIGVDFKIRTVEQDGKTIKLQIWDTAGQERFRTITSSYYRGAHGIIIVYDVTDEESFNNVKQWLSEIDRYASDNVNKLLVGNKCDLEANRAVSYETAKAFADEIGIPFMETSAKDATNVEQAFMAMAASIKDRMASQPANNARPPTVQIRGQPVAQKGGCCSS

SEQ ID NO: 5323 - DNA, 645 bp, Glycine max
  CDS (1)..(645)
atggctgctccaccggcaagagctcgtgcggattacgattatctcataaaacttctcttgattggcgatagtggtgtcggaaagagttgccttcttctacgattctctgatggttctttcacaactagtttcatcacaactataggcattgattttaagataagaaccattgagcaggatggaaaacggatcaagctccaaatttgggatactgcaggtcaggagcggttccgaacaattacaactgcttactatcgtggtgctatgggcatattgctagtctatgacgttacagacgaatcttcatttaacaatatcaggaattggattcgcaatattgagcaacatgcttcagacaatgttaacaaaatactggtggggaacaaagctgatatggatgaaagcaaaagggctgtgcctacgtccaagggccaagcactggctgacgagtatgggatcaaattctttgaaactagtgcaaagacaaatctaaacgtggaggaagttttcttctcaatagcaagagatataaaacaaaggctggctgacactgactccaaggcagagccttcaacaatcaaaatcaaccaagaccagtcaggaggggctggacaggctgcacaaaaatcggcttgttgtggttga

SEQ ID NO: 5324 - protein, 214 aa, Glycine max
MAAPPARARADYDYLIKLLLIGDSGVGKSCLLLRFSDGSFTTSFITTIGIDFKIRTIEQDGKRIKLQIWDTAGQERFRTITTAYYRGAMGILLVYDVTDESSFNNIRNWIRNIEQHASDNVNKILVGNKADMDESKRAVPTSKGQALADEYGIKFFETSAKTNLNVEEVFFSIARDIKQRLADTDSKAEPSTIKINQDQSGGAGQAAQKSACCG

SEQ ID NO: 5325 - DNA, 651 bp, Glycine max
  CDS (1)..(651)
atggcagcagcacccgctagagctcgtgccgattacgattacctcatcaagcttcttcttatcggcgacagcggtgtggggaagagttgtctacttttgaggttttctgatggctcattcacaaccagttttatcaccaccattggtatcgattttaagataagaaccattgaactagacagcaaacggattaagttacaaatctgggatactgctggtcaggagcggttccgaactattaccacagcttattaccgtggagccatgggtatcttgctggtttatgatgttactgatgaagcatctttcaataatattaggaattggatccgcaatattgaacaacatgcttctgacaatgtaaacaagatacttgttggcaacaaggctgatatggatgaaagtaaaagggctgtacctacctccaaagggcaagcacttgctgatgagtatggtatcaagttctttgaaactagtgcaaaaaccaacatgaacgtggaagaggtcttcttttcaatagcaagagatattaagcaaaggcttgcagacacagattcaagagctgagcctcagactatcaagattaaccaacctgaccaggcaaccagtggtggtcaacctgcgcaaaagtcggcttgctgtggttcatga

SEQ ID NO: 5326 - protein, 216 aa, Glycine max
MAAAPARARADYDYLIKLLLIGDSGVGKSCLLLRFSDGSFTTSFITTIGIDFKIRTIELDSKRIKLQIWDTAGQERFRTITTAYYRGAMGILLVYDVTDEASFNNIRNWIRNIEQHASDNVNKILVGNKADMDESKRAVPTSKGQALADEYGIKFFETSAKTNMNVEEVFFSIARDIKQRLADTDSRAEPQTIKINQPDQATSGGQPAQKSACCGS

SEQ ID NO: 5327 - DNA, 657 bp, Glycine max
  CDS (1)..(657)
atggctgtggctgatgcatttgatgagcagtgtgattacttgttcaaggctgttctaattggggactcaggagttgggaagtcaaatttgatatcaaggtttgcaaaagatgaattcaggttggattccaagccaaccataggtgtggaatttgcatacagaaacatcaaggtcagggacaagctcatcaaagcacaaatatgggacactgccggccaagagaggtttagagctatcacaagctcatactacagaggagccttgggggcaatgctagtgtatgacataaccaagagagcaacttttgtgaatgtaggaaaatggcttcatgagttgagagagtttggaggagaagacatggtggttgttttggtgggaaacaaatctgatttggatcaatcaaggcaagttgagagagaagaaggaaaagtgtttgcagaaacagaagagttatgcttcatggaaacctctgctttgcagaatctgaatgttgatgaagcattcttggaaatgatcactaagattcatgacatcataagccagaaaagtttggaaaccaaaatgaatggcacagcattaaatcttcctagtgggaaggagattcatatagctgatgaagttactgctactaaacaagctaaatattgttgttcatga

SEQ ID NO: 5328 - protein, 218 aa, Glycine max
MAVADAFDEQCDYLFKAVLIGDSGVGKSNLISRFAKDEFRLDSKPTIGVEFAYRNIKVRDKLIKAQIWDTAGQERFRAITSSYYRGALGAMLVYDITKRATFVNVGKWLHELREFGGEDMVVVLVGNKSDLDQSRQVEREEGKVFAETEELCFMETSALQNLNVDEAFLEMITKIHDIISQKSLETKMNGTALNLPSGKEIHIADEVTATKQAKYCCS

SEQ ID NO: 5329 - DNA, 645 bp, Glycine max
  CDS (1)..(645)
atggctgctccaccggcaagggctcgtgccgattacgattatctcataaagcttctcttgatcggtgacagcggtgttgggaaaagttgcctccttctgcgtttctccgatggttctttcaccactagtttcatcacaactataggcattgattttaagataagaaccattgagcttgatggcaaacggatcaagctccaaatttgggatactgcagggcaggagcggtttcggacaattacaactgcttactaccgtggtgctatgggcatattgctagtctatgatgttacagatgaagcatcatttaacaatatcaggaattggattcgcaatattgagcaacatgcttcagacaatgttaacaaaatactggtggggaacaaagctgatatggatgaaagcaaaagggccgtgcctacgtccaagggccaagcactggctgatgagtatgggatcaaattctttgaaactagtgcaaagacaaatctaaacgtggaggaagttttcttctcaatagcaagagatataaaacaaaggctggctgacactgacaccaaggcagagccatcaacaatcaaaatcaaccaagaccagtcaggaggggctggacaggctgcacaaaaatcggcttgttgtggttga

SEQ ID NO: 5330 - protein, 214 aa, Glycine max
MAAPPARARADYDYLIKLLLIGDSGVGKSCLLLRFSDGSFTTSFITTIGIDFKIRTIELDGKRIKLQIWDTAGQERFRTITTAYYRGAMGILLVYDVTDEASFNNIRNWIRNIEQHASDNVNKILVGNKADMDESKRAVPTSKGQALADEYGIKFFETSAKTNLNVEEVFFSIARDIKQRLADTDTKAEPSTIKINQDQSGGAGQAAQKSACCG

SEQ ID NO: 5331 - DNA, 651 bp, Glycine max
  CDS (1)..(651)
atggcgcatcgagtggaccacgagtatgactatctgttcaagatcgttttgatcggagactcaggtgtaggaaaatctaacatcctctccaggttcactcgaaacgagttctgtttagagtccaaatccactatcggagttgagttcgccaccagaactcttcaggtagagggaaagactgtgaaagcacagatctgggacacagcaggtcaagagcggtaccgtgccattaccagtgcttattacagaggagctgttggagctctactcgtatatgacataaccaagaggcaaacctttgacaatgtccaaaggtggttgcgtgaactgagggaccatgcagactctaatatagttatcatgatggctggaaataaatctgatttgagccatcttagagcgggttcagaggatgatggtcaagcattggcagagagggaaggtctctcgtttcttgagacatctgcactggaagcaaccaacattgagaaggcattccaaaccattttgacagagatttatcatattgttagcaaaaaggcgctcgctgctcaggaagcagctgttggtaccatacttcctggtcaaggtaccaccatcaatgttggggatgcatctgggaatacaaagagaggctgctgctccgcttaa

SEQ ID NO: 5332 - protein, 216 aa, Glycine max
MAHRVDHEYDYLFKIVLIGDSGVGKSNILSRFTRNEFCLESKSTIGVEFATRTLQVEGKTVKAQIWDTAGQERYRAITSAYYRGAVGALLVYDITKRQTFDNVQRWLRELRDHADSNIVIMMAGNKSDLSHLRAGSEDDGQALAEREGLSFLETSALEATNIEKAFQTILTEIYHIVSKKALAAQEAAVGTILPGQGTTINVGDASGNTKRGCCSA

SEQ ID NO: 5333 - DNA, 651 bp, Glycine max
  CDS (1)..(651)
atggccgcagcacccgctagagctcgtgccgattacgattacctcatcaagcttcttcttatcggcgacagcggtgtcgggaagagttgtctgcttttgagattttctgatggctcattcacaaccagttttatcaccaccattggtatcgattttaagataagaaccattgaactagacggcaaacggattaagttacaaatctgggatactgctggtcaggaacggtttcgaactattaccacagcttattaccgtggagccatgggtatcttgctggtttatgatgttactgatgaagcatctttcaataatattaggaattggattcgcaatattgaacaacatgcttctgacaatgtaaacaagatacttgttggcaacaaggctgatatggatgaaagtaaaagggctgtacctacctccaaagggcaagcacttgctgatgagtatggtatcaagttctttgaaactagtgcaaaaaccaacatgaacgtggaagaggtcttcttttcaatagcaagagatattaagcaaaggcttgcagacacagattcaagagctgagcctcagactatcaagattaaccaacctgaccaggcaaccagtggtggtcaacctgcgcaaaagtcggcttgctgtggttcatga

SEQ ID NO: 5334 - protein, 216 aa, Glycine max
MAAAPARARADYDYLIKLLLIGDSGVGKSCLLLRFSDGSFTTSFITTIGIDFKIRTIELDGKRIKLQIWDTAGQERFRTITTAYYRGAMGILLVYDVTDEASFNNIRNWIRNIEQHASDNVNKILVGNKADMDESKRAVPTSKGQALADEYGIKFFETSAKTNMNVEEVFFSIARDIKQRLADTDSRAEPQTIKINQPDQATSGGQPAQKSACCGS

SEQ ID NO: 5335 - DNA, 609 bp, Glycine max
  CDS (1)..(609)
atgaatcccgagtatgattatctgttcaagctccttcttattggagactctggtgttggtaaatcatgccttcttctgagatttgctgatgattcgtacatcgagagctacataagcaccattggagttgattttaaaatacgtactgttgagcaggatggaaagaccattaaactacagatctgggacacagccgggcaagaacgatttaggacaatcaccagtagctactatcgtggggcccatgggatcattattgtttatgatgtgacagatgaagagagcttcaataatgtgaagcagtggctcagtgaaattgatcgctatgcaagtgataatgttaacaagcttttggttggaaacaagtgtgatctggaagcaaatagagctgtgtcatatgaaacagctaaagcattcgcagatgaaataggcataccttttatggaaacaagtgcaaaagatgctacaaatgttgaacaggctgtcatggcaatggctgcttcaatcaaagatagaatggcaagccaacctgcaaacaatgcaaggcctccaacagtgcagatcaggggtcagccagttgcacagaaaggtgggtgctgctcttcctga

SEQ ID NO: 5336 - protein, 202 aa, Glycine max
MNPEYDYLFKLLLIGDSGVGKSCLLLRFADDSYIESYISTIGVDFKIRTVEQDGKTIKLQIWDTAGQERFRTITSSYYRGAHGIIIVYDVTDEESFNNVKQWLSEIDRYASDNVNKLLVGNKCDLEANRAVSYETAKAFADEIGIPFMETSAKDATNVEQAVMAMAASIKDRMASQPANNARPPTVQIRGQPVAQKGGCCSS

SEQ ID NO: 5337 - DNA, 645 bp, Glycine max
  CDS (1)..(645)
atggctgctccaccggcaagggctcgtgccgattacgattatctcataaagcttctcttgatcggtgacagcggtgttggaaaaagttgcctcctcctgcgtttctccgatgggtctttcaccactagtttcatcacaactataggcattgattttaagataagaaccattgagcttgatggaaaacggatcaagctccaaatttgggatactgcggggcaggagcggtttcggacaattacaactgcttactatcgcggtgctatgggcatattgctagtctatgatgttacagatgaagcatcatttaataatatcaggaattggattcgcaatattgagcaacatgcttcagacaatgttaacaaaatactggtggggaacaaagctgatatggatgaaagcaaaagggctgtgcctacgtccaagggccaagcactggctgacgagtatgggatcaaattctttgaaactagtgcaaagacaaatctaaacgtggaggaagttttcttctcaatagcaagagatataaaacaaaggctggctgacactgactccaaggcagagccttcaacaatcaaaatcaaccaagaccagtcaggaggggctggacaggctgcacaaaaatcggcttgttgtggttga

SEQ ID NO: 5338 - protein, 214 aa, Glycine max
MAAPPARARADYDYLIKLLLIGDSGVGKSCLLLRFSDGSFTTSFITTIGIDFKIRTIELDGKRIKLQIWDTAGQERFRTITTAYYRGAMGILLVYDVTDEASFNNIRNWIRNIEQHASDNVNKILVGNKADMDESKRAVPTSKGQALADEYGIKFFETSAKTNLNVEEVFFSIARDIKQRLADTDSKAEPSTIKINQDQSGGAGQAAQKSACCG

SEQ ID NO: 5339 - DNA, 609 bp, Glycine max
  CDS (1)..(609)
atgaatcccgagtatgataatctgttcaagctccttcttattggagactctggtgttggtaaatcatgccttcttctgagatttgctgatgattcgtacatcgagagctacataagcaccattggagttgattttaaaatacgtactgttgagcaggatggaaagaccattaaactacagatctgggacacagccgggcaagaacgatttaggacaatcaccagtagctactatcgtggggcccatgggatcattattgtttatgatgtgacagatgaagagagcttcaataatgtgaagcagtggctcagtgaaattgatcgctatgcaagtgataatgttaacaagcttttggttggaaacaagtgtgatctggaagcaaatagagctgtgtcatatgaaacagctaaagcattcgcagatgaaataggcataccttttatggaaacaagtgcaaaagatgctacaaatgttgaacaggctttcatggcaatggctgcttcaatcaaggatagaatggcaagccaacctgcaaacaatgcaaggcctccaacagtgcagatcaggggacagccagttgcacagaaaggtgggtgctgctcttcctaa

SEQ ID NO: 5340 - protein, 202 aa, Glycine max
MNPEYDNLFKLLLIGDSGVGKSCLLLRFADDSYIESYISTIGVDFKIRTVEQDGKTIKLQIWDTAGQERFRTITSSYYRGAHGIIIVYDVTDEESFNNVKQWLSEIDRYASDNVNKLLVGNKCDLEANRAVSYETAKAFADEIGIPFMETSAKDATNVEQAFMAMAASIKDRMASQPANNARPPTVQIRGQPVAQKGGCCSS

SEQ ID NO: 5341 - DNA, 612 bp, Glycine max
  CDS (1)..(612)
atgaatcccgagtatgactatctgttcaagctccttctgattggagactctggtgttggtaaatcatgccttcttctaagatttgctgatgattcatacattgagagctacataagcaccatcggagttgattttaaaattcgcactgttgagcaggatgggaagacaattaaactacagatttgggatactgctggacaagaacgatttaggacaataactagtagctactatcgtggagcacatggaatcattattgtttatgacgtgacagatgaagatagcttcaataatgtgaagcaatggctcagtgaaattgaccgctatgccagtgataatgttaacaaacttttggttggaaacaagagtgatctgacagcaaatagagttgtctcatatgacacagctaaggaattcgcagatcaaattggcatacctttcatggaaacaagtgcaaaagatgctacaaatgtggaagatgctttcatggccatgtctgctgccatcaagaatagaatggctagtcagccttcagcaaacaatgcaaggcctccaacagtgcagatcagagggcaacctgttggacaaaaaagtggttgctgctcttcctaa

SEQ ID NO: 5342 - protein, 203 aa, Glycine max
MNPEYDYLFKLLLIGDSGVGKSCLLLRFADDSYIESYISTIGVDFKIRTVEQDGKTIKLQIWDTAGQERFRTITSSYYRGAHGIIIVYDVTDEDSFNNVKQWLSEIDRYASDNVNKLLVGNKSDLTANRVVSYDTAKEFADQIGIPFMETSAKDATNVEDAFMAMSAAIKNRMASQPSANNARPPTVQIRGQPVGQKSGCCSS

SEQ ID NO: 5343 - DNA, 654 bp, Glycine max
  CDS (1)..(654)
atggcggcgtacaaagccgacgatgattacgattacttgttcaaggtggttctgatcggcgactccggcgtcggaaaatctaaccttctttctcggttcacgcgaaacgagttcagcctcgaatcgaagtccaccattggcgttgagttcgccaccagaagcattcgcgtcgatgataaggtcgtcaaggctcagatttgggacactgctggtcaagaacggtaccgagctattacaagtgcatattatcgaggagctgttggtgctttactagtctatgatgttacacgtcatgttacttttgaaaatgtggagagatggctaaaagagctgagagatcacacagatgccaacattgtggtgatgcttgtagggaacaaagcagacctgcgtcatctgcgtgcagtttccactgaagatgctacaactttcgctgagcgagagaacacatttttcatggaaacatctgccctcgagtccttgaacgttgaaaatgccttcacagaagtgctgacccagatctatcatgttgtaagcaagaaggcccttgaggttggagatgatccagcagctttaccaaaaggacagacaattaatattgggtcccgtgatgatgtatcggctgtgaagaaatctggatgttgttctgcttga

SEQ ID NO: 5344 - protein, 217 aa, Glycine max
MAAYKADDDYDYLFKVVLIGDSGVGKSNLLSRFTRNEFSLESKSTIGVEFATRSIRVDDKVVKAQIWDTAGQERYRAITSAYYRGAVGALLVYDVTRHVTFENVERWLKELRDHTDANIVVMLVGNKADLRHLRAVSTEDATTFAERENTFFMETSALESLNVENAFTEVLTQIYHVVSKKALEVGDDPAALPKGQTINIGSRDDVSAVKKSGCCSA

SEQ ID NO: 5345 - DNA, 672 bp, Glycine max
  CDS (1)..(672)
atggctagtggaagaagctacggagacgcgaaccagaaggtagattacgtgttcaaggtggtgctaattggtgattccgcggtggggaagtcgcagatacttgcacgcttcgcgagaaacgagttcagtttggactcaaaggccacaatcggcgtcgagttccaaacgcgcactttggtcattcagcacaagagcatcaaggctcagatctgggacactgccggccaagaacgatacagagcagttacaagtgcatactacaggggtgctgttggggcaatgttggtttatgacatcactaaacgtcaaagctttgatcacatacctcgttggttagaagaactgcgtaaccatgcggataagaatatagtcatcattcttataggaaacaaaagtgatcttgagaaccagcgtcaagtacccacagaggatgcaaaagaatttgccgagaaagaaggcttatttttcctagagacctcagcactggaagcaactaacgttgaaacagctttcatgactgttttgacagaaatattcaacattatcaacaagaagaacctagctgctagtgataatcagggaaatgacaactcagcatctttgtctggcaagaagattattgttcctggtcctgcacaggaaattcccaagaggagcatgtgttgtcagtaa

SEQ ID NO: 5346 - protein, 223 aa, Glycine max
MASGRSYGDANQKVDYVFKVVLIGDSAVGKSQILARFARNEFSLDSKATIGVEFQTRTLVIQHKSIKAQIWDTAGQERYRAVTSAYYRGAVGAMLVYDITKRQSFDHIPRWLEELRNHADKNIVIILIGNKSDLENQRQVPTEDAKEFAEKEGLFFLETSALEATNVETAFMTVLTEIFNIINKKNLAASDNQGNDNSASLSGKKIIVPGPAQEIPKRSMCCQ

SEQ ID NO: 5347 - DNA, 651 bp, Glycine max
  CDS (1)..(651)
atggcgcatcgagtagaccacgagtatgactatctgttcaagatcgttttgatcggagactcaggtgtaggcaaatccaacatcctctccaggttcactcgaaacgagttctgtttggagtccaaatccactatcggagttgagttcgccaccagaactcttcaggtagagggtaaaactgtgaaagcacagatctgggacacagcaggtcaagagcggtaccgtgccattaccagtgcttattacagaggagctgttggtgctctacttgtatatgacataaccaagaggcaaacctttgacaatgtccaaaggtggttgcgtgaactgagggaccatgcggattctaatatagttatcatgatggctggaaataaatctgatttgagccatcttagagcagtttcggaggatgatggtcaagcattggcagagagggaaggtctctcgtttcttgagacatctgcactggaagcaaccaacattgagaaggcattccaaaccattttgacagagatttatcatattgttagcaaaaaggcgctcgctgctcaggaagcagctgttggtaccatacttcctggtcaaggtaccaccatcaatgttggggatgcatctgggaatacaaagagaggctgctgctccgcttaa

SEQ ID NO: 5348 - protein, 216 aa, Glycine max
MAHRVDHEYDYLFKIVLIGDSGVGKSNILSRFTRNEFCLESKSTIGVEFATRTLQVEGKTVKAQIWDTAGQERYRAITSAYYRGAVGALLVYDITKRQTFDNVQRWLRELRDHADSNIVIMMAGNKSDLSHLRAVSEDDGQALAEREGLSFLETSALEATNIEKAFQTILTEIYHIVSKKALAAQEAAVGTILPGQGTTINVGDASGNTKRGCCSA

SEQ ID NO: 5349 - DNA, 654 bp, Glycine max
  CDS (1)..(654)
atgggggcgtatagagctgatgaggattacgattatttgttcaaggtggtactgattggggactctggtgtgggaaaatcgaaccttttgtcgaggttcaccaagaacgaattcagccttgaatcaaagtccaccattggggttgagtttgccaccagaagcattagggttgatgataaagttctcaaggctcagatttgggacactgctggccaagaaaggtatcgagcaatcactagtgcatattatcgcggagctgttggtgctttattagtctatgatgttacccgccatgttacatttgaaaatgtggagagatggttgaaggagctcagagatcacacagatgccaacattgtggttatgcttgttgggaacaaagcagacttgcgtcatctgcgagcagtttccaccgaagaaactacaaattttgcggaacgggagaaaacgtttttcatggaaacatccgctctcgagtccctgaacgttgaaagtgccttcacagaagtgctgacacagatctatcatgttgtaagcaagaaggcccttgaaattggtgatgatccagcagcattaccaaaaggacagacgataaatgttgggtctcgtgatgatgcatcggctgtgaagaaagatggatgttgttctgcttga

SEQ ID NO: 5350 - protein, 217 aa, Glycine max
MGAYRADEDYDYLFKVVLIGDSGVGKSNLLSRFTKNEFSLESKSTIGVEFATRSIRVDDKVLKAQIWDTAGQERYRAITSAYYRGAVGALLVYDVTRHVTFENVERWLKELRDHTDANIVVMLVGNKADLRHLRAVSTEETTNFAEREKTFFMETSALESLNVESAFTEVLTQIYHVVSKKALEIGDDPAALPKGQTINVGSRDDASAVKKDGCCSA

SEQ ID NO: 5351 - DNA, 651 bp, Glycine max
  CDS (1)..(651)
atggctcggagagcagaggaagagtacgattatctgttcaaggttgtactgatcggtgattctggtgttggaaaatccaatctcctgtcccgattcactcgcaacgagttttgcctcgaatccaagtccaccattggagtcgaattcgctactcgcactcttcaggtggagggaagaactgtgaaagctcaaatatgggatactgccggacaggaacgatacagagcaattaccagtgcatactacaggggtgcccttggagctcttctagtctacgatgtaactaaaccaaccacattcgaaaacgtcagccgatggctgaaggagctaagggatcatgccgatgctaacattgtcatcatgttgatagggaacaagaccgatctcaagcatctcagagctgttgccaccgaggatgcccagggttattccgagaaggaaggcctttctttcatcgagacttctgctctcgaagcaactaatgttgagaaggctttccagactattcttgcagagatataccgcattatcagtaagaaatcactctcttccaatgagcctgcatctgccaatattaaagaaggcatgactatcactgttgggggaccccaatccaacgcaagcaagccttcttgctgtacatcatcttga

SEQ ID NO: 5352 - protein, 216 aa, Glycine max
MARRAEEEYDYLFKVVLIGDSGVGKSNLLSRFTRNEFCLESKSTIGVEFATRTLQVEGRTVKAQIWDTAGQERYRAITSAYYRGALGALLVYDVTKPTTFENVSRWLKELRDHADANIVIMLIGNKTDLKHLRAVATEDAQGYSEKEGLSFIETSALEATNVEKAFQTILAEIYRIISKKSLSSNEPASANIKEGMTITVGGPQSNASKPSCCTSS

SEQ ID NO: 5353 - DNA, 645 bp, Glycine max
  CDS (1)..(645)
atggctgctccaccggcaagagctcgtgcggattacgattatctcataaaacttctcttgattggcgatagtggtgtcggaaagagttgccttcttctacgattctctgatggttctttcacaactagtttcatcacaactataggcattgattttaagataagaaccattgagcaggatggaaaacggatcaagctccaaatttgggatactgcaggtcaggagcggttccgaacaattacaactgcttactatcgtggtgctatgggcatattgctagtctatgatgttacagatgaagcatcatttaacaatatcaggaattggattcgcaatattgagcaacatgcttcagacaatgttaacaaaatactggtggggaacaaagctgatatggatgaaagcaaaagggctgtgcctacgtccaagggccaagcactggctgatgagtatgggatcaaattctttgaaactagtgcaaagacaaatctaaacgtggaggaagttttcttctcaatagcaagagatataaaacaaaggctggctgacactgacaccaaggcagagccttcaacaatcaaaatcaaccaagaccagtcaggaggggctggacaggctgcacaaaaatcggcttgttgtggttga

SEQ ID NO: 5354 - protein, 214 aa, Glycine max
MAAPPARARADYDYLIKLLLIGDSGVGKSCLLLRFSDGSFTTSFITTIGIDFKIRTIEQDGKRIKLQIWDTAGQERFRTITTAYYRGAMGILLVYDVTDEASFNNIRNWIRNIEQHASDNVNKILVGNKADMDESKRAVPTSKGQALADEYGIKFFETSAKTNLNVEEVFFSIARDIKQRLADTDTKAEPSTIKINQDQSGGAGQAAQKSACCG

SEQ ID NO: 5355 - DNA, 654 bp, Glycine max
  CDS (1)..(654)
atggcggcgtacaaagccgacgatgattacgattacttgttcaaggtggttctgatcggcgactccggcgtcggaaaatctaaccttctttctcggttcacgcgaaacgagttcagcctcgaatcgaagtccaccattggcgttgagttcgccaccagaagcattcgcgtcgatgataaggtcgtcaaggctcagatttgggacactgctggtcaagaacggtaccgagctattacaagtgcatattatcgaggagctgttggtgctttactagtctatgatgttacacgtcatgttacttttgaaaatgtggagagatggctaaaagagctgagagatcacacagatgccaacattgtggtgatgcttgtagggaacaaagcagacctgcgtcatctgcgtgcagtttccactgaagatgctacaactttcgctgagcgagagaacacatttttcatggaaacatctgccctcgagtccttgaatgttgaaaatgccttcacagaagtgctgacccagatctatcatgttgtaagcaagaaggcccttgagattggagacgatccagcagctttgccaaaaggacagacaattaatgttgggtcccgtgatgatgtatcagctgtgaagaaatctggatgttgttctgcttga

SEQ ID NO: 5356 - protein, 217 aa, Glycine max
MAAYKADDDYDYLFKVVLIGDSGVGKSNLLSRFTRNEFSLESKSTIGVEFATRSIRVDDKVVKAQIWDTAGQERYRAITSAYYRGAVGALLVYDVTRHVTFENVERWLKELRDHTDANIVVMLVGNKADLRHLRAVSTEDATTFAERENTFFMETSALESLNVENAFTEVLTQIYHVVSKKALEIGDDPAALPKGQTINVGSRDDVSAVKKSGCCSA

SEQ ID NO: 5357 - DNA, 609 bp, Glycine max
  CDS (1)..(609)
atgaatcccgagtatgattatctgttcaagctccttcttattggagactctggtgttggtaaatcatgccttcttctgagattttctgatgattcgtacatcgaaagctacataagcaccattggagttgattttaaaatacgtaccgttgagcaagatggaaagaccattaaactacagatctgggacacagctgggcaagaacgatttaggacaatcaccagtagctactaccgtggtgcccatgggatcattattgtttatgatgtgacagatgaagagagcttcaataatgtgaagcagtggctcagtgaaattgatcgctatgcaagtgataatgttaacaagcttttggttggcaacaagtgtgatctggaagcaaatagagcagtgtcatatgaaacagctaaggcatttgcagatggaataggcataccttttatggaaacaagtgcaaaagatgctacaaatgtcgaacaggctttcatggcaatgactgcttcaatcaaggatagaatggcaagccaacctgcaaataatgcaaggcctccaacagtgcagatcaggggtcagccagttgcacagaaaggtgggtgctgctctttctga

SEQ ID NO: 5358 - protein, 202 aa, Glycine max
MNPEYDYLFKLLLIGDSGVGKSCLLLRFSDDSYIESYISTIGVDFKIRTVEQDGKTIKLQIWDTAGQERFRTITSSYYRGAHGIIIVYDVTDEESFNNVKQWLSEIDRYASDNVNKLLVGNKCDLEANRAVSYETAKAFADGIGIPFMETSAKDATNVEQAFMAMTASIKDRMASQPANNARPPTVQIRGQPVAQKGGCCSF

SEQ ID NO: 5359 - DNA, 672 bp, Helianthus annuus
  CDS (1)..(672)
atggccaccggtggcggttacagcgatccgagccaaaaaatagactacgtattcaaagtagtgctaatcggagactcagcagtcggcaaatcacaaatactcgctcgattcgccagaaacgagttcagtttggactccaaagcgactattggagtcgaatttcagacgcgaacgcttgtgattcagcacaagtctgttaaagctcagatctgggatactgctggtcaagaaaggtacagagcagtgacaagtgcatactacaggggtgcagtaggagccatgctagtttacgacataaccaaacgccaaacgtttgaccacattccaaggtggctagaagagctacgcaaccacgcagacaaaaacatcgtcattattctaatcggaaacaaatgtgatctggaagaccagcgagcggtccccactgaagacgccaaggagtttactcaaaaggaaggattattctttctagaaacatccgcactcgagtccccaaatgtagaggatgcatttttgaccgttttgaccgagattttcagaatagtcaacaagaaaagtttgaccgcagatgaggagcagaacgggaacccgggttctttggctggcaagaagattattgtccctggtcctgcacaagtaattccggaaaaaaaatcgtgttgtagtttttaa

SEQ ID NO: 5360 - protein, 223 aa, Helianthus annuus
MATGGGYSDPSQKIDYVFKVVLIGDSAVGKSQILARFARNEFSLDSKATIGVEFQTRTLVIQHKSVKAQIWDTAGQERYRAVTSAYYRGAVGAMLVYDITKRQTFDHIPRWLEELRNHADKNIVIILIGNKCDLEDQRAVPTEDAKEFTQKEGLFFLETSALESPNVEDAFLTVLTEIFRIVNKKSLTADEEQNGNPGSLAGKKIIVPGPAQVIPEKKSCCSF

SEQ ID NO: 5361 - DNA, 600 bp, Helianthus annuus
  CDS (1)..(600)
atgagcaacgaatacgattatctcttcaaacttttactcatcggtgactcctccgtcggaaaatcatgccttcttctccgatttgctgatgattcttatgtggatagttacataagcacaattggagttgactttaaaatcaggactgtggagcaggataggaagaccatcaagctgcaaatatgggatactgctggccaggagcggtttcggactataacaagcagttactacagaggagcacatggaataattatagtgtatgatgtgactgagatggagagcttcaacaatgtgaagcaatggctgagtgaaatcgacagatatgcaaatgaatcagtctgcaagcttcttgttggaaacaaatgtgatctagttgagaacaaggttgttgacacacaaacagctaaggcatttgcagatgagctcgggatccctttcctcgagaccagtgcaaaagactccgtaaacgtggaacaggctttcttgacaatggctgcagagataaagaaaaaaatgggtaaccagccaacgggcgacaagagcacagttcaaatcaaagggcagccgattgagcagaagagcaattgttgtggttaa

SEQ ID NO: 5362 - protein, 199 aa, Helianthus annuus
MSNEYDYLFKLLLIGDSSVGKSCLLLRFADDSYVDSYISTIGVDFKIRTVEQDRKTIKLQIWDTAGQERFRTITSSYYRGAHGIIIVYDVTEMESFNNVKQWLSEIDRYANESVCKLLVGNKCDLVENKVVDTQTAKAFADELGIPFLETSAKDSVNVEQAFLTMAAEIKKKMGNQPTGDKSTVQIKGQPIEQKSNCCG

SEQ ID NO: 5363 - DNA, 600 bp, Helianthus annuus
  CDS (1)..(600)
atgagcaacgaatacgattatctcttcaaacttttactcatcggtgactcctccgtcggaaaatcatgccttcttctccgatttgctgatgattcttatgtggatagttacataagcacaattggagttgactttaaaattaggactgtggagcaggataggaagaccatcaagctgcagatatgggatactgctggccaggagcggtttcggactataacaagcagttactacagaggagcacatggaataattatcgtgtatgatgtgactgagatggagagcttcaacaatgtgaagcaatggctgagtgaaatcgacagatatgcaaatgaatcagtctgcaagcttcttgttggaaacaaatgtgatctagttgagaacaaggttgttgacacacaaacagctaaggcatttgcagatgagctcgggatccctttcctcgagaccagtgcaaaagactccgtaaacgtggaacaggctttcttgacaatggctgcagagataaagaaaaaaatgggtaaccagccaacgggcgacaagagcatagttcaaatcaaagggcagccgattgagcagaagagcaattgttgtggttaa

SEQ ID NO: 5364 - protein, 199 aa, Helianthus annuus
MSNEYDYLFKLLLIGDSSVGKSCLLLRFADDSYVDSYISTIGVDFKIRTVEQDRKTIKLQIWDTAGQERFRTITSSYYRGAHGIIIVYDVTEMESFNNVKQWLSEIDRYANESVCKLLVGNKCDLVENKVVDTQTAKAFADELGIPFLETSAKDSVNVEQAFLTMAAEIKKKMGNQPTGDKSIVQIKGQPIEQKSNCCG

SEQ ID NO: 5365 - DNA, 609 bp, Helianthus annuus
  CDS (1)..(609)
atgactcctgagtatgactacctgttcaagcttttgctcattggagattcgggtgtaggaaagtcatgtctacttctgaggtttgctgacgattcttacttggacagttacataagcaccatcggagtcgattttaaaattcgtaccgtggagcaagatgccaaggttatcaagcttcaaatttgggatactgctggccaagaacgttttaggacaatcacaagcagctactatcgaggagcacatggcatcatcgtggtttatgatgtgacggaccaagagagctttaataacgttaagcagtggctgagtgaaatcgaccgttacgctagtgagaacgttaacaagatccttgttggaaacaaatgcgatcttgttgcaaataaagtcgtttcaaccgaaacagccaaggcatttgctgatgaaattggaattccgttcttggaaacaagtgcaaaagatgcaaccaatgtcgaacaggctttcatggccatgacggcttccatcaaagacaggatggcgagtcaacccaatttgaatacctcaaagcctccaacggtcaacattcgtggtcaaccggtctcccagaacagcggatgctgctcttag

SEQ ID NO: 5366 - protein, 202 aa, Helianthus annuus
MTPEYDYLFKLLLIGDSGVGKSCLLLRFADDSYLDSYISTIGVDFKIRTVEQDAKVIKLQIWDTAGQERFRTITSSYYRGAHGIIVVYDVTDQESFNNVKQWLSEIDRYASENVNKILVGNKCDLVANKVVSTETAKAFADEIGIPFLETSAKDATNVEQAFMAMTASIKDRMASQPNLNTSKPPTVNIRGQPVSQNSGCCS

SEQ ID NO: 5367 - DNA, 600 bp, Hordeum vulgare
  CDS (1)..(600)
atgggctgctcctcctccgcgccagctagaagcactggagggctgaacaatatcaacggtagctcttccgccaccgattcaaacgacttgcgtgccaagttggtattgctcggagactctggtgttggaaaaagctgcatcgttcttcgctttgttcgcggtcagttcgatccaacttccaaggtaactgttggtgcatcatttttatcacaaacattggcgttggaggattcgacaatagtgaagtttgaaatctgggatactgctggacaagagagatatgctgccttggcacctctttactacagaggagctgctgctgcggttgttgtctatgacataactagcccagaatcatttaagaaagcacaatattgggtgaaggaacttcaaaaacatggtaatcctggtattgtcatggttttggttggtaataaagctgatctacatgaaagtcgaagcgtaccttctcaggaggcacaagagtatgcagagaagaacagtatgttattcatggagacgtcagcaaaaacatctgataatataaatcaagtatttgaggaaatcgcgaagaggttgcccaagccaacaacgtcttga

SEQ ID NO: 5368 - protein, 199 aa, Hordeum vulgare
MGCSSSAPARSTGGLNNINGSSSATDSNDLRAKLVLLGDSGVGKSCIVLRFVRGQFDPTSKVTVGASFLSQTLALEDSTIVKFEIWDTAGQERYAALAPLYYRGAAAAVVVYDITSPESFKKAQYWVKELQKHGNPGIVMVLVGNKADLHESRSVPSQEAQEYAEKNSMLFMETSAKTSDNINQVFEEIAKRLPKPTTS

SEQ ID NO: 5369 - DNA, 612 bp, Hordeum vulgare
  CDS (1)..(612)
atgaatccggagtatgattacctcttcaagcttttgcttattggagactcaggcgttggcaagtcatgtcttctgttaagatttgcggatgattcgtacctggatagttacatcagtactattggagttgattttaaaatacggactgtggagcaggatggaaagactatcaagctgcaaatctgggacactgctgggcaagaacgttttagaactattaccagcagctactaccgaggggcccatgggattattatagtctacgatgtgacagaccaagatagcttcaacaatgtgaagcagtggctgaacgagattgatcgctatgctagtgagaatgtgaacaagcttctcgtggggaacaaatgtgatctcgctgacaaaagagctgtatcatatgaaacagcaaaggcatttgctgatgagattggcattccattcatggagaccagtgcaaagaacgccctgaatgttgaacaggctttcatggccatggctgcttcgatcaaggataggatggccagccagccagcagcaaacaacgctcgcccagcgactgtacagatccgcgggcaacctgtcgaccagaagaccagctgctgctcttcttag

SEQ ID NO: 5370 - protein, 203 aa, Hordeum vulgare
MNPEYDYLFKLLLIGDSGVGKSCLLLRFADDSYLDSYISTIGVDFKIRTVEQDGKTIKLQIWDTAGQERFRTITSSYYRGAHGIIIVYDVTDQDSFNNVKQWLNEIDRYASENVNKLLVGNKCDLADKRAVSYETAKAFADEIGIPFMETSAKNALNVEQAFMAMAASIKDRMASQPAANNARPATVQIRGQPVDQKTSCCSS

SEQ ID NO: 5371 - DNA, 648 bp, Hordeum vulgare
  CDS (1)..(648)
atggcgcaccgggtggacaacgagtacgactacctcttcaagatcgtgctcatcggcgactccggcgtcggcaagtccaacatcctctcccgcttcacccgcaacgagttctgcctcgagtccaagtccaccatcggcgtcgagttcgccacccgcaccctccagatagaaggcaagaccattaaagctcagatatgggatactgctggccaagagaggtaccgtgcaatcacaagtgcttactacaggggagctgtgggagcacttttggtgtatgacataacaaagaagcaaacttttgaaaacatcaataggtggcttcgtgagctccgtgaccatgctgactccaacatcgttataatgatggttggaaacaagtctgatctcaaccacctgaggtcagtcccagaggaagatggccaggcattagcagagaaggaagggctatccttcctcgagacctcagcactggaagccttgaatgtcgagaaggcgtttcagactatcctttccgacatccatcagatcataagcaagaaggcgcttgctgcccaggaggctgctggcagtggacctccgactcaaggaaccaccatcaatgttgccgattcatccggtaacacaaagaaagggtgctgctctacctag

SEQ ID NO: 5372 - protein, 215 aa, Hordeum vulgare
MAHRVDNEYDYLFKIVLIGDSGVGKSNILSRFTRNEFCLESKSTIGVEFATRTLQIEGKTIKAQIWDTAGQERYRAITSAYYRGAVGALLVYDITKKQTFENINRWLRELRDHADSNIVIMMVGNKSDLNHLRSVPEEDGQALAEKEGLSFLETSALEALNVEKAFQTILSDIHQIISKKALAAQEAAGSGPPTQGTTINVADSSGNTKKGCCST

SEQ ID NO: 5373 - DNA, 651 bp, Hordeum vulgare
  CDS (1)..(651)
atgtcgagcgtggagaaggtggactacgtgtttaaagtggtgctgatcggggactcggccgtcggcaagtcgcagatcctggcgcggttcgctcgtaacgagttcagcctcgactccaaggccaccatcggtgtcgagttccagacgcgcacgctcgtcatcgaccacaagtccgtcaaggctcagatctgggacaccgccggccaggagaggtaccgagctgtcacgagcgcatattacagaggcgctttgggagctctgctagtctatgatatcaccaagcgccagagctttgaccacatacctcgctggctggaggaactccgaggtcatgcagacaaaaacattatcatcatgctggttggcaataagagcgaccttgaagatgagcgggctgtaagcactgaagatgccaaagagtttgccgagaaggagaacctcttcttcctggagacgtccgcgctgcaggccaccaatgttgaaagcgccttccagactgtcttgtcagagatcttcaagatccacagcaagaagaacatagtgaccgacccaaaggccaatggtgctgcgccgccgctggccggcaagaaggttcttgtcccaggcccagcacaggagatcccgaagagcaagtgctgcggttctatgtaa

SEQ ID NO: 5374 - protein, 216 aa, Hordeum vulgare
MSSVEKVDYVFKVVLIGDSAVGKSQILARFARNEFSLDSKATIGVEFQTRTLVIDHKSVKAQIWDTAGQERYRAVTSAYYRGALGALLVYDITKRQSFDHIPRWLEELRGHADKNIIIMLVGNKSDLEDERAVSTEDAKEFAEKENLFFLETSALQATNVESAFQTVLSEIFKIHSKKNIVTDPKANGAAPPLAGKKVLVPGPAQEIPKSKCCGSM

SEQ ID NO: 5375 - DNA, 615 bp, Hordeum vulgare
  CDS (1)..(615)
atggcggccagcgccggcagcaagatccgcaacgccaagctggttcttctcggcgatgtgggtgctgggaaatccagcctggtgcttcggttcgtaaaaggacaatttgttgagttccaggaatcgacaattggagcggctttcttctctcaaacactggctgttaatgacgagactgtgaagtttgaaatctgggatactgctgggcaggagaggtatcatagcttggcccccatgtactataggggtgctgccgcagccatagttgtctatgacatctcgaaccaggcatccttcacccgagcaaagaaatgggttcaagaacttcaagctcaaggaaaccagaatacagtagtggctcttgctggcaacaaagctgatttgctagaggcgagggaggttcaaatagaggaagccaagacatatgcgcaggagaatggcctcttcttcatggaaacgtctgccaagactgcaaccaatgtgaatgacatattttatgagattgcgaagagactgctgcaagggcaggcggcgcagaacccacaggcggcggggatggttctctcccagagacccaacgagagagtggtcagcgcggcttcgtgctgctcctga

SEQ ID NO: 5376 - protein, 204 aa, Hordeum vulgare
MAASAGSKIRNAKLVLLGDVGAGKSSLVLRFVKGQFVEFQESTIGAAFFSQTLAVNDETVKFEIWDTAGQERYHSLAPMYYRGAAAAIVVYDISNQASFTRAKKWVQELQAQGNQNTVVALAGNKADLLEAREVQIEEAKTYAQENGLFFMETSAKTATNVNDIFYEIAKRLLQGQAAQNPQAAGMVLSQRPNERVVSAASCCS

SEQ ID NO: 5377 - DNA, 651 bp, Hordeum vulgare
  CDS (1)..(651)
atggcgcaccgggtggacaacgagtacgactacctcttcaagatcgtgctcatcggcgactccggcgtcggcaagtccaacatcctctcccgcttcacccgcaacgagttctgcctcgagtccaagtccaccatcggcgtcgagttcgccacccggaccctccagatagaaggaaagactgtcaaggcccagatctgggacacggcaggacaggagaggtatcgggcaattacaagtgcatactatcgaggggccgttggtgcacttgtcgtgtacgatgtgacacgccatgtgacctttgagaatgtggagaggtggttgaaggagctccgggatcacacagatgcaaacattgtcatcatgcttgtcggcaacaaagctgatctacgccaccttagggctgtatcagtggaggatgccaaggcctttgctgagagggaaagcaccttctttatggaaacatctgcgttggaggccatgaacgttgaaaacgccttcactgaggttctgactcagatctatcgcgtggtcagcaagaaggccctcgacataggcgatgaccctgctgctccaccgagaggacaaaccatcaacgttggtggcaaggatgatgtctctgctgtgaaaaaggcaggctgctgttcatcctaa

SEQ ID NO: 5378 - protein, 216 aa, Hordeum vulgare
MAHRVDNEYDYLFKIVLIGDSGVGKSNILSRFTRNEFCLESKSTIGVEFATRTLQIEGKTVKAQIWDTAGQERYRAITSAYYRGAVGALVVYDVTRHVTFENVERWLKELRDHTDANIVIMLVGNKADLRHLRAVSVEDAKAFAERESTFFMETSALEAMNVENAFTEVLTQIYRVVSKKALDIGDDPAAPPRGQTINVGGKDDVSAVKKAGCCSS

SEQ ID NO: 5379 - DNA, 612 bp, Hordeum vulgare
  CDS (1)..(612)
atgaaccccgaatatgactacctcttcaagctgctgctcattggggactcgggcgtggggaagtcttgcctgctgctgaggtttgcggatgattcatatcttgagagctatatcagtactattggcgttgacttcaaaatccgcaccgttgagcaagatgggaagacgataaagctgcaaatttgggatactgctgggcaagaacgatttaggaccatcacaagcagctactaccgtggtgcccatggcatcattgtcgtgtatgatgtgactgaccaggagagcttcaacaacgtcaaacagtggcttaatgaaattgacaggtacgctagtgaaaatgtgaacaagcttttggtggggaacaagtgcgatctagctgagagcagagtagtttcttacgaggctggcaaggcccttgccgatgagattggaataccatttctggaaaccagtgccaaggacgcaacaaatgtggagaaggcatttatgaccatggccgcagagataaagaacaggatggcaagccagccagctggaaatgctagcaagcctgccacggtgcaaatgcggggtcagcctgttgctcagcaaaacggatgctgttcgtcttga

SEQ ID NO: 5380 - protein, 203 aa, Hordeum vulgare
MNPEYDYLFKLLLIGDSGVGKSCLLLRFADDSYLESYISTIGVDFKIRTVEQDGKTIKLQIWDTAGQERFRTITSSYYRGAHGIIVVYDVTDQESFNNVKQWLNEIDRYASENVNKLLVGNKCDLAESRVVSYEAGKALADEIGIPFLETSAKDATNVEKAFMTMAAEIKNRMASQPAGNASKPATVQMRGQPVAQQNGCCSS

SEQ ID NO: 5381 - DNA, 654 bp, Hordeum vulgare
  CDS (1)..(654)
atgggcggacgtgtggatcacgagtactcctacctgttcaagatggtgctcatcggggatagcggcgtcggcaagtccaacatcctctcccgattcacccgcaaccacttctccctcgactccaagtccaccatcggcgtggagttcgccaccaagtccttgcagatggagggaaaaacaataaaggctcagatctgggacacagctggtcaggagaggtatcgtgcaattacaagcgcatattaccggggcgctgtaggggctctccttgtatatgacatcacaaagaagcagagctttgacaatgttaataggtggctgcatgagctccgtgatcacgctgactccagcattgtcatcatgatggtcggtaacaagtccgacctgacacatctaagggctgtctctgaggatcaaggcaaggcactggcagaaaaggagggcctgtttttccttgagacatcagctatggaggctgtgaatgtggtagaagcgtttcagactatcatcacagaggtctatggtattgtcaacaagaaagcactggccgccaaagaagcagcagcagcagctgttccattgccttcccagggtaaaaccatcagcgttgacagtactgtgggcaattcaaagagggcatgctgcaatacttga

SEQ ID NO: 5382 - protein, 217 aa, Hordeum vulgare
MGGRVDHEYSYLFKMVLIGDSGVGKSNILSRFTRNHFSLDSKSTIGVEFATKSLQMEGKTIKAQIWDTAGQERYRAITSAYYRGAVGALLVYDITKKQSFDNVNRWLHELRDHADSSIVIMMVGNKSDLTHLRAVSEDQGKALAEKEGLFFLETSAMEAVNVVEAFQTIITEVYGIVNKKALAAKEAAAAAVPLPSQGKTISVDSTVGNSKRACCNT

SEQ ID NO: 5383 - DNA, 651 bp, Linum usitatissimum
  CDS (1)..(651)
atggctgctccgcccgcaagagctcgtgccgattatgattaccttataaagctcctcctgatcggcgataccggtgtgggtaagagttgcctcctcctacgtttctcagatggttccttcaccactagtttcattacgaccataggtattgatttcaagataaggacaattgagcttgatggaaaacggatcaagttgcaaatatgggatactgctggtcaagagcgtttccgcactattacaactgcttactatcgtggagcaatgggtattttgctcgtgtatgatgtcactgatgagtcatcattcaacaatatcaggaattggattcgcaacattgaacaacatgcctctgataatgtgaacaagatcttggttggaaacaaagccgatatggatgagagcaaaagggcggttcctaccgcaaagggccaggctcttgcagacgaatacggcatcaagttctttgagacgagtgcaaagacaaacttaaacgtggaggaggttttcttctcaatagccagagacatcaagcaacgacttgcagatacggattcaaagtccgagccacagacgatcaagattaaccagccggaccaggcgggtggttcgaaccaggctgcacaaaagtctgcttgctgtggttcttag

SEQ ID NO: 5384 - protein, 216 aa, Linum usitatissimum
MAAPPARARADYDYLIKLLLIGDTGVGKSCLLLRFSDGSFTTSFITTIGIDFKIRTIELDGKRIKLQIWDTAGQERFRTITTAYYRGAMGILLVYDVTDESSFNNIRNWIRNIEQHASDNVNKILVGNKADMDESKRAVPTAKGQALADEYGIKFFETSAKTNLNVEEVFFSIARDIKQRLADTDSKSEPQTIKINQPDQAGGSNQAAQKSACCGS

SEQ ID NO: 5385 - DNA, 639 bp, Linum usitatissimum
  CDS (1)..(639)
atgggatcttcttcaggtagtagtgggtatgatctgtcgttcaagttgttgttgattggagattcaagtgttggcaaaagcagcctgcttgtcagcttcatctccaccacctctgctgaagaagatcttgctcccaccattggtgtggacttcaagatcaagcagctgacagtagctggcaagagattgaagctcaccatttgggatactgctgggcaggagaggttcaggacactaacaagctcttactacaggaatgcacagggaatcatacttgtttatgacgtgacaaggagagagacctttacgaacctatcggacgtatgggctaaagaagttgagctctactgcacaaaccaggactgtgtcaagatgcttgttggcaacaaagttgacaaagactctgacagaactgtaaccagagaagaaggaatggaacttgcaaaacagcacggatgtttgttcctcgagtgcagtgccaaaactcgtgaaaacgtggagcaatgcttcgaggagctcgcgcaaaagataaaggatgttccaagtctcttggaagaaggatctacagccgggaagaggaacattctaaagcaaaacccagatcgacaaatgtctcaaagcaacggctgttgctcttaa

SEQ ID NO: 5386 - protein, 212 aa, Linum usitatissimum
MGSSSGSSGYDLSFKLLLIGDSSVGKSSLLVSFISTTSAEEDLAPTIGVDFKIKQLTVAGKRLKLTIWDTAGQERFRTLTSSYYRNAQGIILVYDVTRRETFTNLSDVWAKEVELYCTNQDCVKMLVGNKVDKDSDRTVTREEGMELAKQHGCLFLECSAKTRENVEQCFEELAQKIKDVPSLLEEGSTAGKRNILKQNPDRQMSQSNGCCS

SEQ ID NO: 5387 - DNA, 651 bp, Linum usitatissimum
  CDS (1)..(651)
atggctggctaccgacctgaagaagactacgattacttgctcaagctcgttctgatcggcgattccggtgtcggcaaatccaacttgctctccaggttcaccaagaacgagttcaatctcgagtccaagtccactatcggggtcgagttcgccaccaagagcatgaacctcgatggcaaggtcatcaaggctcagatttgggacaccgctggccaagaaaggtaccgcgccataacaagcgcatactacagaggagcggtcggtgctttactcgtctacgacgtgactcgccgctcaatattcgaaaacgtggcgaggtggctgaaagagttgagggagcacaccgaccccaacatcgtcgtcatgctcataggcaacaaatcagatctcaggcacctggtagctgtccagaccgaggatgcgaaagcatatgcagagagggagtccatgtacttcatggagacatcagctctcaccgcaacaaacgtggagagtgccttcaccgaagtcatgacgcagatatacaagatcgtgagcaagagggctgtcgatggaaccaatgacggtacgacaggagtacctctgaagggagagaccatcaacgtgaagcaggaaggttctgttctcaagagaatggggtgctgttcttag

SEQ ID NO: 5388 - protein, 216 aa, Linum usitatissimum
MAGYRPEEDYDYLLKLVLIGDSGVGKSNLLSRFTKNEFNLESKSTIGVEFATKSMNLDGKVIKAQIWDTAGQERYRAITSAYYRGAVGALLVYDVTRRSIFENVARWLKELREHTDPNIVVMLIGNKSDLRHLVAVQTEDAKAYAERESMYFMETSALTATNVESAFTEVMTQIYKIVSKRAVDGTNDGTTGVPLKGETINVKQEGSVLKRMGCCS

SEQ ID NO: 5389 - DNA, 651 bp, Linum usitatissimum
  CDS (1)..(651)
atggctgctccgcccgcaagagctcgtgccgattatgattaccttataaagctcctcctgatcggcgatagcggtgtgggtaagagttgcctcctcctacgtttctcagatggttccttcaccactagtttcattacgaccattggtattgatttcaagataaggacaattgagcttgatggaaaacggatcaagttgcaaatatgggatactgctggtcaagagcgtttccgcactattacaactgcttactatcgtggagcaatgggtattttgctcgtgtatgatgtcactgatgagtcatcattcaacaatatcaggaattggattcgcaacattgaacaacatgcctctgataatgtgaacaagatcttggttggaaacaaagccgatatggatgagagcaaaagggcggttcctaccgcaaagggccaggctcttgcagacgaatacggcatcaagttctttgagacgagtgcaaagacaaacttaaacgtggaggaggttttcttctcaatagccagagacatcaagcaacgacttgcagatacggattcaaagtccgagccacagacgatcaagattaaccagccggaccaggcgggtggttcgaaccaggctgcacaaaagtctgcttgctgtggttcttag

SEQ ID NO: 5390 - protein, 216 aa, Linum usitatissimum
MAAPPARARADYDYLIKLLLIGDSGVGKSCLLLRFSDGSFTTSFITTIGIDFKIRTIELDGKRIKLQIWDTAGQERFRTITTAYYRGAMGILLVYDVTDESSFNNIRNWIRNIEQHASDNVNKILVGNKADMDESKRAVPTAKGQALADEYGIKFFETSAKTNLNVEEVFFSIARDIKQRLADTDSKSEPQTIKINQPDQAGGSNQAAQKSACCGS

SEQ ID NO: 5391 - DNA, 606 bp, Linum usitatissimum
  CDS (1)..(606)
atgggcaccgaatacgactatctcttcaagcttctgctaatcggcgactcctccgttggaaaatcttgcctgctgctccgatttgctgatgattcgtacgttgacagctacatcagtactataggagttgatttcaaaatcagaactgtggagctggatggaaagacggtcaagcttcagatctgggatactgctggtcaggagcgctttagaacaataacaagcagttattaccgaggggcacatggaatcatcattgtctatgatgttactgacatggacagcttcaacaatgtcaaacaatggttaaatgagattgaccgatatgcaaatgatactgtatgcaagcttttggttgggaacaaatgcgatcttgttgagaacaaagttgtcgatacgcagacagcaaaggcgttggccgatgagctaggcatcccttttctggagaccagtgccaaagattcaataaatgtggaacaagctttcttaacaatggctgcagaaattaagaaaaaaatgggtaatcaaccgacagctagcaaggcgaccggaacggttcagatgaaaggacaaccgatccagcaaagcaacaactgctgtggttaa

SEQ ID NO: 5392 - protein, 201 aa, Linum usitatissimum
MGTEYDYLFKLLLIGDSSVGKSCLLLRFADDSYVDSYISTIGVDFKIRTVELDGKTVKLQIWDTAGQERFRTITSSYYRGAHGIIIVYDVTDMDSFNNVKQWLNEIDRYANDTVCKLLVGNKCDLVENKVVDTQTAKALADELGIPFLETSAKDSINVEQAFLTMAAEIKKKMGNQPTASKATGTVQMKGQPIQQSNNCCG

SEQ ID NO: 5393 - DNA, 651 bp, Glycine max
  CDS (1)..(651)
atggcagcaccacctgcgagggcacgtgccgattacgattacctcatcaagcttcttcttattggcgatagcggtgtgggaaagagttgtctgcttttgcgattttctgatggttccttcacaaccagttttatcaccaccattggcattgattttaagataagaaccattgaacttgatggcaaacgcattaagttacaaatctgggatacagctggtcaggagcgatttcgaactattaccacagcttattaccgtggagccatgggtatcttgctcgtttatgatgttactgatgaagcatctttcaacaatattagaaattggattcgcaacattgaacaacatgcttctgacaatgtaaacaagatacttgtgggtaacaaggctgatatggatgaaagtaaaagggctgtgcctacctccaaaggtcaagcccttgctgatgagtatggtatcaagtttttcgaaaccagtgcaaagacaaacatgaatgtggaggaggttttcttttcaatagcaagagatatcaagcaaaggcttgctgacacagattctaaggctgaacctcagactatcaagattaaccaacccgaccagacagctacagggggtcttgcggctcaaaaatcggcttgctgtggttcatga

SEQ ID NO: 5394 - protein, 216 aa, Glycine max
MAAPPARARADYDYLIKLLLIGDSGVGKSCLLLRFSDGSFTTSFITTIGIDFKIRTIELDGKRIKLQIWDTAGQERFRTITTAYYRGAMGILLVYDVTDEASFNNIRNWIRNIEQHASDNVNKILVGNKADMDESKRAVPTSKGQALADEYGIKFFETSAKTNMNVEEVFFSIARDIKQRLADTDSKAEPQTIKINQPDQTATGGLAAQKSACCGS

SEQ ID NO: 5395 - DNA, 666 bp, Oryza sativa
  CDS (1)..(666)
atggcggcgggcggaggcggcggctacagggcggaggacgactacgactacctgttcaagacggtgctcatcggcgactccggcgtgggcaagtccaacctgctgtcgcgtttcaccaagaacgagttctgcctcgagtccaagtccaccatcggggtcgagttcgccacccgcagcatccaggtcgacggcaaggtcgtcaaggcccagatttgggacaccgccggccaggagagataccgtgctattacaagtgcctattacagaggagcagtaggtgcactgcttgtctatgatgtcactcggcgtgctactttcgataatgtggcacgctggctaaaagagctgagagaccacactgaccctagtattgttgtcatgctagtaggcaacaaatccgatctccgccatctggtggctgtttcaactgaagatggaaaggaatatgctgaggctgagtcattgtacttcatggagacatctgcattagacgccacaaatgtagagaatgcttttgcagaagttttgactcagatataccaaactgtcagcaagaagacggttgaggcatcagatgatggatcaaatgctccaatcaaaggagagaagattaatgtgaaagatgacgtgtctgcgctgaagagaattggctgttgctcaaattag

SEQ ID NO: 5396 - protein, 221 aa, Oryza sativa
MAAGGGGGYRAEDDYDYLFKTVLIGDSGVGKSNLLSRFTKNEFCLESKSTIGVEFATRSIQVDGKVVKAQIWDTAGQERYRAITSAYYRGAVGALLVYDVTRRATFDNVARWLKELRDHTDPSIVVMLVGNKSDLRHLVAVSTEDGKEYAEAESLYFMETSALDATNVENAFAEVLTQIYQTVSKKTVEASDDGSNAPIKGEKINVKDDVSALKRIGCCSN

SEQ ID NO: 5397 - DNA, 654 bp, Oryza sativa
  CDS (1)..(654)
atggcggcggggtaccgggcggaggacgactacgactacctcttcaaggtggtcctcatcggcgactccggcgtcggcaagtccaacctcctctcccgcttcacccgcaacgagttcagcctcgagtccaagtccaccatcggcgtcgagttcgccacccgctccctccaggtcgacggcaaggtcgtcaaggcccagatttgggacaccgccggccaggagcgataccgtgctattactagtgcatattaccgaggtgctgttggagcgttgcttgtctatgatgtcacccggcactcaacctttgagaatgttgagcgctggttgaaggaattgagggaccatacagacccaaacatagttgtcatgctagttggcaacaagtctgatctgcgccatcttgtagcggttcaaaccgatgaagggaaggcattcgcggagagagaatcgctctatttcatggagacctctgcgctcgagtccaccaacgttgagaatgcatttgcagaggtcttgacccagatctaccgcatcgtgagcaagaggtcagtcgaagcaggtgatgatgcaggttctggtcctggcaagggtgagaagatcaatataaaggatgatgtttcggcggtgaagaagggcggctgctgctcgggctaa

SEQ ID NO: 5398 - protein, 217 aa, Oryza sativa
MAAGYRAEDDYDYLFKVVLIGDSGVGKSNLLSRFTRNEFSLESKSTIGVEFATRSLQVDGKVVKAQIWDTAGQERYRAITSAYYRGAVGALLVYDVTRHSTFENVERWLKELRDHTDPNIVVMLVGNKSDLRHLVAVQTDEGKAFAERESLYFMETSALESTNVENAFAEVLTQIYRIVSKRSVEAGDDAGSGPGKGEKINIKDDVSAVKKGGCCSG

SEQ ID NO: 5399 - DNA, 675 bp, Oryza sativa
  CDS (1)..(675)
atggcggcggcggcggcggcggcggggtacagcgcggaggaggagtacgactacctgttcaaggtggtgctgatcggggacagcggcgtggggaagtcgaacctgctgtcgcggttcgcgcgggacgagttcagcctggagaccaggtccaccatcggcgtcgagttcgccaccaagaccgtccgcgtcgacgacaggctcgtcaaggcccagatctgggacaccgccggccaagagaggtaccgcgccatcacgagcgcctactaccgcggcgcggtgggcgcgctggtggtgtacgacgtgacgcgccgcatcacgttcgagaacgcggagcggtggctcaaggagctccgcgaccacacggacgccaacatcgtcgtcatgctcgtgggcaacaaggccgacctgcgccacctccgcgccgtccccgcggaggacgccagggcgttcgccgaggcgcacgggaccttctccatggagacgtcggcgctggaggccaccaacgtggagggcgccttcaccgaggtgctcgcgcagatctaccgcgtcgtcagccggaacgcgctcgacatcggcgacgaccccgccgcgccgccccgggggcggaccatcgacgtcagcgccaaggatgacgccgtcacccccgtgaacagctcagggtgctgctcgtcttga

SEQ ID NO: 5400 - protein, 224 aa, Oryza sativa
MAAAAAAAGYSAEEEYDYLFKVVLIGDSGVGKSNLLSRFARDEFSLETRSTIGVEFATKTVRVDDRLVKAQIWDTAGQERYRAITSAYYRGAVGALVVYDVTRRITFENAERWLKELRDHTDANIVVMLVGNKADLRHLRAVPAEDARAFAEAHGTFSMETSALEATNVEGAFTEVLAQIYRVVSRNALDIGDDPAAPPRGRTIDVSAKDDAVTPVNSSGCCSS

SEQ ID NO: 5401 - DNA, 651 bp, Oryza sativa
  CDS (1)..(651)
atggcgcaccgggtggacaacgagtacgactacctgttcaagatcgtcctcatcggcgattccggcgtcggcaagtccaacatcctctcccgcttcacccgcaacgagttcttcctcgagtccaagtccaccatcggcgtcgagttcgccacccgcaccctgcagatagaagggaagactatcaaggctcagatatgggacacggcaggtcaagagagataccgtgcaatcacgagtgcttattacaggggtgcagttggagcacttcttgtattcgacataacaaagaggcaaaccttcgacaatgttcagaggtggctgcgggagctccgggaccatgcagacgccaacattgttgtcatgatggtcggaaacaagtctgacttaaaccatctacgatcagtccccgaggaagatggccatgcgttctctgagaaagaaggtctctccttccttgagacgtctgctctggaagcgattaatgtggagaaagcattccatactgtattgagtgaaattcaccagattgtaagcaagaaagcacttgcagctcaggaatccgcgtctacaaatgggcgttccatgcaaggaactacgatcaacgttgctgaagctccagccgccacaaaaggttcttgctgttctagttaa

SEQ ID NO: 5402 - protein, 216 aa, Oryza sativa
MAHRVDNEYDYLFKIVLIGDSGVGKSNILSRFTRNEFFLESKSTIGVEFATRTLQIEGKTIKAQIWDTAGQERYRAITSAYYRGAVGALLVFDITKRQTFDNVQRWLRELRDHADANIVVMMVGNKSDLNHLRSVPEEDGHAFSEKEGLSFLETSALEAINVEKAFHTVLSEIHQIVSKKALAAQESASTNGRSMQGTTINVAEAPAATKGSCCSS

SEQ ID NO: 5403 - DNA, 648 bp, Oryza sativa
  CDS (1)..(648)
atggcgggggctccgtcgaggtcgcgcggcgacttcgaccacctcatcaagctcctcctcatcggcgacagcggagtaggaaagagttgcttgcttctgaggttctcagatgacactttcactacaagttttatcaccaccattggcattgatttcaaggttcggacagttgagcttgatggaaagcgtgtaaaattgcagatttgggatactgctggtcaagaacgtttccggacaattacaactgcctactatagaggtgctatgggcattctgcttgtttatgatgttacagacgagtcatccttcaacaacattagaaattggatccgcaacatagaacaacatgcatctgataatgtcaacaagattttggtgggcaacaaggttgatatggatacaaagcgggtggtgtccacagctcaaggacaaaagctcgcagatgagtatggaatgaaattttttgagacgagtgcaaaaacaaatcagaacgtggagcaggtattctttaccattgcaagggacataaagcaaagattgaccgaaactgttgctgcagcagctgagcccccaactattcaaatcagtaggcaagaaccagatcaggcagctgcctcgtcaagatggtcagcctgctgtaacacctga

SEQ ID NO: 5404 - protein, 215 aa, Oryza sativa
MAGAPSRSRGDFDHLIKLLLIGDSGVGKSCLLLRFSDDTFTTSFITTIGIDFKVRTVELDGKRVKLQIWDTAGQERFRTITTAYYRGAMGILLVYDVTDESSFNNIRNWIRNIEQHASDNVNKILVGNKVDMDTKRVVSTAQGQKLADEYGMKFFETSAKTNQNVEQVFFTIARDIKQRLTETVAAAAEPPTIQISRQEPDQAAASSRWSACCNT

SEQ ID NO: 5405 - DNA, 639 bp, Oryza sativa
  CDS (1)..(639)
atgggctcgaagccgccgccgccgccgcagcccagcgtctccttcaagctcgtcctcctcggcgacgggagagtaggcaaaacatctcttgtgctgcggtatgtgaatgatgtcttctcagacaaacaggaagcaactgttcaagcttcatatttgacaaagcgccttgttgttgaaggtgtgcctattacgctctctatctgggatacagctggacaagagaagttccatgcactaggccctatatactatcgtgatgcagacgctgctcttttagtatatgacatcacagacaatgatacttttcttcgtgtcacaaagtgggtgaaagagcttaagcaaatggcaaataaagatattgttatggccattgcagcaaataaaagtgacctggttagatcaaaacacatagacactaatgaagcagcaagctatgcagaaagtattggggcaactctctttgttacttctgccaaagctggtactgggattgatgatatcttcagtgacatagccaagagattattagagagaagaaaaaacagctccgatggcttgtcactggctcatccaaagaaaggcattttaatcgtcgacgatgaacctgagaaagaacctccaccaaagtgctgctcatag

SEQ ID NO: 5406 - protein, 212 aa, Oryza sativa
MGSKPPPPPQPSVSFKLVLLGDGRVGKTSLVLRYVNDVFSDKQEATVQASYLTKRLVVEGVPITLSIWDTAGQEKFHALGPIYYRDADAALLVYDITDNDTFLRVTKWVKELKQMANKDIVMAIAANKSDLVRSKHIDTNEAASYAESIGATLFVTSAKAGTGIDDIFSDIAKRLLERRKNSSDGLSLAHPKKGILIVDDEPEKEPPPKCCS

SEQ ID NO: 5407 - DNA, 612 bp, Oryza sativa
  CDS (1)..(612)
atgaatcccgagtacgactaccttttcaaacttctcctcattggtgattctggtgttgggaaatcgtgcttgcttctcagatttgcggatgattcatacctggacagctacatcagcacaattggagttgattttaaaatacggacagtagagcaggatgggaagaccatcaagcttcaaatctgggatactgctggacaagaacgtttcaggacaattacaagcagctattaccggggagctcatggaattattattgtatatgatgtgacagaccaagaaagcttcaacaatgtgaagcagtggttgaatgaaattgatcgttatgcaagtgacaatgttaacaagctcctcgttgggaacaagagcgacctaactgccaacaaagttgtgtcatctgaaacagctaaggcgtttgctgatgagatgggcatcccattcatggagacaagtgccaagaacgccactaatgtggagcaggcctttatggctatggctgcatccatcaaggacaggatggcgagccaaccggccgctgcaaatgcaaggccaccgacggtgcagatccgcgggcaacctgtcaaccagaagacgtcgtgctgctcgtcctaa

SEQ ID NO: 5408 - protein, 203 aa, Oryza sativa
MNPEYDYLFKLLLIGDSGVGKSCLLLRFADDSYLDSYISTIGVDFKIRTVEQDGKTIKLQIWDTAGQERFRTITSSYYRGAHGIIIVYDVTDQESFNNVKQWLNEIDRYASDNVNKLLVGNKSDLTANKVVSSETAKAFADEMGIPFMETSAKNATNVEQAFMAMAASIKDRMASQPAAANARPPTVQIRGQPVNQKTSCCSS

SEQ ID NO: 5409 - DNA, 654 bp, Oryza sativa
  CDS (1)..(654)
atggcgtaccgggcggacgacgactacgactacctcttcaaggtggtgctcatcggggactccggggtcgggaagtcgaacctgctgtcccgcttcacgcgcaacgagttcagcctcgagtccaagtccaccatcggcgtcgagttcgccacccgcagcatccacgtcgacgacaaggtcgtcaaggcccagatctgggacaccgccgggcaagaaagatatcgagctattacaagcgcatactatcgcggagcagtaggggcactcgttgtctatgatgtcacgcgacatgtcacctttgagaatgtggagaggtggatgagggagctcaaggatcacacggacgccaacatcgtgatcatgcttgtggggaacaaggcagatttgcgccaccttagggctgtctcgactgaggatgcgaaagcatttgctgagaaagagaacactttcttcatggagacgtcggccctggagtcaatgaatgtggagaatgccttcactgaagtgctcacccagatatatcatgtagtgagcaagaaggctcttgacatcggcgatgacccagctgcaccaccaaaggggcagaccatcaatgttggtggcaaagatgatgtctctgcagtgaaaaagtctgcttgttgttcatcagcgtag

SEQ ID NO: 5410 - protein, 217 aa, Oryza sativa
MAYRADDDYDYLFKVVLIGDSGVGKSNLLSRFTRNEFSLESKSTIGVEFATRSIHVDDKVVKAQIWDTAGQERYRAITSAYYRGAVGALVVYDVTRHVTFENVERWMRELKDHTDANIVIMLVGNKADLRHLRAVSTEDAKAFAEKENTFFMETSALESMNVENAFTEVLTQIYHVVSKKALDIGDDPAAPPKGQTINVGGKDDVSAVKKSACCSSA

SEQ ID NO: 5411 - DNA, 609 bp, Oryza sativa
  CDS (1)..(609)
atgaatcccgagtatgactacctcttcaagcttctgctcatcggagactcgggcgtcgggaagtcttgcctgcttctgaggtttgcggacgattcatatctggagagctatatcagtaccatcggtgttgattttaaaatccgcactgttgagcaagatgggaagacaataaagctgcaaatttgggatactgctggccaagagcgatttaggaccattacaagcagctactaccgtggtgcccacgggatcattgttgtttatgatgtgactgatcaggagagcttcaacaatgtcaagcagtggctgaatgaaattgataggtatgctagtgaaaatgtgaacaagctcttggtggggaacaagtgtgatctagctgagaacagagtggtttcttatgaggctggcaaggcccttgctgatgagattggaataccattcctggagaccagtgcgaaggatgcaacaaatgtggagaaggcattcatgaccatggcaggagagataaagaacaggatggcaagccaaccggctacaaatgcaagcaagcctgcaaccgtgcaaatgcgaggccaacctgttgcccagcaaagcagctgctgctcttga

SEQ ID NO: 5412 - protein, 202 aa, Oryza sativa
MNPEYDYLFKLLLIGDSGVGKSCLLLRFADDSYLESYISTIGVDFKIRTVEQDGKTIKLQIWDTAGQERFRTITSSYYRGAHGIIVVYDVTDQESFNNVKQWLNEIDRYASENVNKLLVGNKCDLAENRVVSYEAGKALADEIGIPFLETSAKDATNVEKAFMTMAGEIKNRMASQPATNASKPATVQMRGQPVAQQSSCCS

SEQ ID NO: 5413 - DNA, 612 bp, Oryza sativa
  CDS (1)..(612)
atgaatcccgagtatcactatctgttcaagctccttctgattggagactctggtgttggtaaatcatgccttcttctaagatttgctgatgattcatacattgagagctacataagcaccatcggagttgattttaaaattcgcactgttgagcaggatgggaagacaattaaactacagatttgggatactgctggacaagaacgatttaggacaataactagtagctactatcgtggagcacatggaatcattattgtttatgacgtgacagatgaagatagcttcaataatgtgaagcaatggctcagtgaaattgaccgctatgccagtgataatgttaacaaacttttggttggaaacaagagtgatctgacagcaaatagagttgtctcatatgacacagctaaggaattcgcagatcaaattggcatacctttcatggaaacaagtgcaaaagatgctacaaatgtggaagatgctttcatggccatgtctgctgccatcaagaatagaatggctagtcagccttcagcaaacaatgcaaggcctccaacagtgcagatcagagggcaacctgttggacaaaaaagtggttgctgctcttcctaa

SEQ ID NO: 5414 - protein, 203 aa, Oryza sativa
MNPEYHYLFKLLLIGDSGVGKSCLLLRFADDSYIESYISTIGVDFKIRTVEQDGKTIKLQIWDTAGQERFRTITSSYYRGAHGIIIVYDVTDEDSFNNVKQWLSEIDRYASDNVNKLLVGNKSDLTANRVVSYDTAKEFADQIGIPFMETSAKDATNVEDAFMAMSAAIKNRMASQPSANNARPPTVQIRGQPVGQKSGCCSS

SEQ ID NO: 5415 - DNA, 639 bp, Oryza sativa
  CDS (1)..(639)
atgggctcgaagccgccgccgccgccgcagcccagcgtctccttcaagctcgtcctcctcggcgacgggagagtaggcaaaacatctcttgtgctgcggtatgtgaatgatgtcttctcagacaaacaggaagcaactgttcaagcttcatatttgacaaagcgccttgttgttgaaggtgtgcctattacgctctctatctgggatacagctggacaagagaagttccatgcactaggccctatatactatcgtgatgcagacgctgctcttttagtatatgacatcacagacaatgatacttttcttcgtgtcacaaagtgggtgaaagagcttaagcaaatggcaaataaagatattgttatggccattgcagcaaataaaagtgacctggttagatcaaaacacatagacactaatgaagcagcaagctatgcagaaagtattggggcaactctctttgttacttctgccaaagctggtactgggattgatgatatcttcagtgacatagccaagagattattagagaaaagaaaaaacagctccgatggcttgtcactggctcatccaaagaaagtcattttaatcgtcgacgatgaacctgagaaagaacctccaccaaagtgctgctcatag

SEQ ID NO: 5416 - protein, 212 aa, Oryza sativa
MGSKPPPPPQPSVSFKLVLLGDGRVGKTSLVLRYVNDVFSDKQEATVQASYLTKRLVVEGVPITLSIWDTAGQEKFHALGPIYYRDADAALLVYDITDNDTFLRVTKWVKELKQMANKDIVMAIAANKSDLVRSKHIDTNEAASYAESIGATLFVTSAKAGTGIDDIFSDIAKRLLEKRKNSSDGLSLAHPKKVILIVDDEPEKEPPPKCCS

SEQ ID NO: 5417 - DNA, 612 bp, Oryza sativa
  CDS (1)..(612)
atgaatcccgagtacgactaccttttcaaacttctcctcattggtgattctggtgttgggaaatcgtgcttgcttctcagatttgcggatgactcatacctggacagctatatcagcacaattggagttgattttaaaatacggacagtagagcaggatgggaagaccatcaagcttcaaatctgggatactgctggacaagaacgtttcaggacgattacaagcagctattaccggggagctcatggaataattattgtatacgatgtgacagaccaagaaagcttcaacaatgtgaagcagtggttgaatgaaattgatcgttatgcaagtgacaatgtaaacaagctccttgttgggaacaagagcgacctaactgccaacaaagttgtgtcatctgaaacagctaaggcgtttgctgatgagatgggcatccccttcatggagacaagtgccaagaacgccactaatgtggagcaggccttcatggctatggccgcatccatcaaggacaggatggctagccaaccggccgcttcaaatgcaaggccaccgaccgtgcagatccgcgggcaacctgtcaaccagaagacgtcgtgctgctcgtcctaa

SEQ ID NO: 5418 - protein, 203 aa, Oryza sativa
MNPEYDYLFKLLLIGDSGVGKSCLLLRFADDSYLDSYISTIGVDFKIRTVEQDGKTIKLQIWDTAGQERFRTITSSYYRGAHGIIIVYDVTDQESFNNVKQWLNEIDRYASDNVNKLLVGNKSDLTANKVVSSETAKAFADEMGIPFMETSAKNATNVEQAFMAMAASIKDRMASQPAASNARPPTVQIRGQPVNQKTSCCSS

SEQ ID NO: 5419 - DNA, 654 bp, Zea mays
  CDS (1)..(654)
atggcgggggcaggagacaaggtggactacgtcttcaaggtggtgctgatcggcgactcggcggttggcaagtcgcagatcctcgcgcgcttcgcccgcaacgagttcagcctcgactccaaggccaccatcggcgtcgagttccagacccgcaccctcgtcatcgaccacaggagcgtcaaggcccagatctgggacaccgccggccaggagaggtacagagctgtgacaagtgcttattacagaggtgcactgggagctttgctggtctatgacattaccagacgccagagcttcgatcatataccccgctggctagatgaactccgagcccatgccgacaagaacattgtgataatgctggttggcaacaagagtgatctcgaggagcagcgagcggtgagcactgaagatgccaaggagtttgccgagaaggagaacctcttcttcctggagacctctgcgctccaggcaacaaacgtagagagtgcttttcaaactgtcttgacagagatattcaagatccacagcaagaagaacatggtgtcggagccgaagagcaatggagctgcccaagcaatgccggggacaaaggtccttgtcccaggtccggcgcaggaaatcccaaagagcaagtgctgcagttccatgtga

SEQ ID NO: 5420 - protein, 217 aa, Zea mays
MAGAGDKVDYVFKVVLIGDSAVGKSQILARFARNEFSLDSKATIGVEFQTRTLVIDHRSVKAQIWDTAGQERYRAVTSAYYRGALGALLVYDITRRQSFDHIPRWLDELRAHADKNIVIMLVGNKSDLEEQRAVSTEDAKEFAEKENLFFLETSALQATNVESAFQTVLTEIFKIHSKKNMVSEPKSNGAAQAMPGTKVLVPGPAQEIPKSKCCSSM

SEQ ID NO: 5421 - DNA, 612 bp, Zea mays
  CDS (1)..(612)
atggcggccaacgccgggaataagatccgcaacgccaagctggttcttcttggagatgtgggcgctggcaaatctagcttggttcttcggtttgttaagggacagtttgttgaattccaggaatcaacaattggagcagccttcttttcccagaccttagcggtcaatgatgagactgttaagttcgaaatctgggatactgccgggcaggagaggtatcatagcttggctcccatgtactataggggtgcagctgctgccattgttgtctatgacatcacaaatccggcctccttcacccgtgccaagaaatgggttcaagaacttcaagctcaaggaaatcagaataccatagtggctcttgctggaaacaaggctgatatgctagatgcgaggcaggtgccagcagaggaagcaaaggcgtatgctcaggagaatgggctcttcttcatggagacatctgctaaaactgcaatcaatgtgaatgacatattttatgagattgcaaagaaattgcttcaagggcaacaagctccaagcccacaggctggaatggttctgaatcagagaccaaatgagaggacggtcagcagttcttcatgctgctcttga

SEQ ID NO: 5422 - protein, 203 aa, Zea mays
MAANAGNKIRNAKLVLLGDVGAGKSSLVLRFVKGQFVEFQESTIGAAFFSQTLAVNDETVKFEIWDTAGQERYHSLAPMYYRGAAAAIVVYDITNPASFTRAKKWVQELQAQGNQNTIVALAGNKADMLDARQVPAEEAKAYAQENGLFFMETSAKTAINVNDIFYEIAKKLLQGQQAPSPQAGMVLNQRPNERTVSSSSCCS

SEQ ID NO: 5423 - DNA, 645 bp, Zea mays
  CDS (1)..(645)
atggcggcgcctccggcgagggcccgggccgactacgacttcctcatcaagctgctcctcatcggcgatagcggtgttgggaaaagttgtctccttttacggttctcagatggctccttcactactagcttcatcaccaccattgggattgacttcaaaataagaacagttgagcttgatggtaagcgcataaagttacagatatgggatactgctggtcaagaacgttttcgaactattacaaccgcctactacaggggtgcaatgggaattttgcttgtctatgatgttactgatgagtcatctttcaataatataagaaactggataaggaacattgagcaacatgcttccgacaatgtgaataaaattttggtaggcaacaaagctgacatggatgaaagcaaacgcgctgtaccgacttcaaaagggcaggctcttgctgacgagtatggcatcaagttttttgaaacgagtgcgaagaccaacctgaatgtggagcaggtttttttctccatagcaagagatatcaagcaaaggctttctgaatctgattcaaagccagaggatcgcacgatcagtattaacagacctgatggtggtgaggcttcggcttcacaaaaatcagcttgctgcggatcgtga

SEQ ID NO: 5424 - protein, 214 aa, Zea mays
MAAPPARARADYDFLIKLLLIGDSGVGKSCLLLRFSDGSFTTSFITTIGIDFKIRTVELDGKRIKLQIWDTAGQERFRTITTAYYRGAMGILLVYDVTDESSFNNIRNWIRNIEQHASDNVNKILVGNKADMDESKRAVPTSKGQALADEYGIKFFETSAKTNLNVEQVFFSIARDIKQRLSESDSKPEDRTISINRPDGGEASASQKSACCGS

SEQ ID NO: 5425 - DNA, 645 bp, Triticum aestivum
  CDS (1)..(645)
atggctgcgccgccggcgagggcccgggccgactacgactacctcatcaagctcctcctcatcggggacagcggtgttggcaagagttgcctccttctgcggttctctgatggctccttcactacgagctttattaccacgatcggtattgactttaagatcagaacaatagagctggatcagaaacgtattaagctacaaatatgggacacggctggtcaagaacgtttccggactattaccactgcgtattaccgtggagccatgggtatcctgcttgtttatgacgtcaccgatgagtcatctttcaacaacataaggaactggatccggaacatcgagcagcatgcctctgacaatgtcaacaaaattttgattggcaacaaggctgatatggatgagagtaaaagggctgtacctactgcgaaggggcaagctttggctgatgaatacggcatcaagttctttgaaactagtgccaagacaaacctcaacgtggagcaagttttcttctccattgcccgcgacattaagcagaggcttgccgagaccgattccaagcctgaggacaagaccatcaagattaacaaggcagaaggcggcgacgccccggcagcttcggggtctgcctgctgtggctcttaa

SEQ ID NO: 5426 - protein, 214 aa, Triticum aestivum
MAAPPARARADYDYLIKLLLIGDSGVGKSCLLLRFSDGSFTTSFITTIGIDFKIRTIELDQKRIKLQIWDTAGQERFRTITTAYYRGAMGILLVYDVTDESSFNNIRNWIRNIEQHASDNVNKILIGNKADMDESKRAVPTAKGQALADEYGIKFFETSAKTNLNVEQVFFSIARDIKQRLAETDSKPEDKTIKINKAEGGDAPAASGSACCGS

SEQ ID NO: 5427 - DNA, 648 bp, Triticum aestivum
  CDS (1)..(648)
atggcgcaccgggtggacaacgagtacgactacctcttcaagatcgtgctcatcggcgactccggcgtcggcaagtccaacatcctctcccgcttcacccgcaacgagttctgcctcgagtccaagtccaccatcggcgtcgagttcgccacccgcaccctccaggtagaaggcaagaccattaaagctcagatatgggatactgctggccaagagaggtaccgtgcaatcacaagtgcttactacaggggagctgtgggagctcttttggtgtatgacataacaaagaagctatcatttgaaaacatcaataggtggcttagtgagctccgtaaccatgctgactccaacatcgtcatcatgatggttggaaacaaatccgaccttaaccacctgaggtcagttcaggaggaagaagggcaggcattagcagagaaggaagggctatccttccttgagacctcggcactggaagccttgaacgtcgagaaggcgtttcagactatcctttccgacatccatcagatcataagcaagaaggcgctcgctgcccaggaggctgcaggaagtggacctccgactcaaggaaccaccatcaatgttgccgattcatccggcaacatgaagaaagggtgctgttctacctag

SEQ ID NO: 5428 - protein, 215 aa, Triticum aestivum
MAHRVDNEYDYLFKIVLIGDSGVGKSNILSRFTRNEFCLESKSTIGVEFATRTLQVEGKTIKAQIWDTAGQERYRAITSAYYRGAVGALLVYDITKKLSFENINRWLSELRNHADSNIVIMMVGNKSDLNHLRSVQEEEGQALAEKEGLSFLETSALEALNVEKAFQTILSDIHQIISKKALAAQEAAGSGPPTQGTTINVADSSGNMKKGCCST

SEQ ID NO: 5429 - DNA, 654 bp, Triticum aestivum
  CDS (1)..(654)
atgggcggacgggtggatcacgagtactcctacctgttcaagatggtgctcatcggggatagcggcgtcggcaagtccaacatactctcccgattcacccgcaaccacttctccctcgactccaagtccaccatcggcgtggagttcgccaccaagtccttgcagatggagggaaaaacaataaaggctcagatctgggacactgctggccaggagaggtaccgtgcaattacaagcgcatattaccggggcgctgtaggggctctccttgtatatgacatcacaaagaagcagagctttgacaatgttaataggtggctgcgtgagctccgtgatcacgctgactctagcattgtcatcatgatggtcggtaacaagtctgacctgacacatctaagagctgtctctgaagatcaaggcaaggcactggctgaaaaggagggcctgtttttccttgagacatcagctatggaggctgtaaatgtggtagaagcctttcagactatcatcacagaggtctatggtattgtcaacaagaaagcactggccgccaaagcagcagcagcagcagctgttccattgccttcccagggtaaaaccatcagcattgacagtactgccgggaactcaaagaaggcatgctgcaatacttga

SEQ ID NO: 5430 - protein, 217 aa, Triticum aestivum
MGGRVDHEYSYLFKMVLIGDSGVGKSNILSRFTRNHFSLDSKSTIGVEFATKSLQMEGKTIKAQIWDTAGQERYRAITSAYYRGAVGALLVYDITKKQSFDNVNRWLRELRDHADSSIVIMMVGNKSDLTHLRAVSEDQGKALAEKEGLFFLETSAMEAVNVVEAFQTIITEVYGIVNKKALAAKAAAAAAVPLPSQGKTISIDSTAGNSKKACCNT

SEQ ID NO: 5431 - DNA, 651 bp, Triticum aestivum
  CDS (1)..(651)
atggcgagcggggagaaggtggactatgtgtttaaagtggtgctgatcggggactcggccgtcggcaagtcgcagatcctggcgcggttcgcgcgcaacgagttcagcctcgactccaaggccaccatcggtgtcgagttccagacgcgcacgctcgtcatcgaccacaagtccgtcaaggcccagatctgggacaccgccggccaggagaggtacagagctgtcacgagcgcatattacagaggcgctttgggagctctgctagtctatgacatcaccaagcgccagagctttgaccacatacctcgctggctggaggaactccgaggtcatgcagacaaaaacattgtcatcatgctggttggcaataagagcgaccttgaagatgagcgggctgttagcactgaggatgccaaagagtttgccgagaaggagaacctcttcttcctggagacgtccgcgctgcaggccaccaatgtcgaaagcgccttccagactgtcttgtcagagatcttcaagatccacagcaagaagaacattgtaaccgacccaaaggccaatggtgctgcgccgccgctggccggcaagaaggttcttgtcccaggcccagcacaggagatcccaaagagcaagtgctgcagttctatgtaa

SEQ ID NO: 5432 - protein, 216 aa, Triticum aestivum
MASGEKVDYVFKVVLIGDSAVGKSQILARFARNEFSLDSKATIGVEFQTRTLVIDHKSVKAQIWDTAGQERYRAVTSAYYRGALGALLVYDITKRQSFDHIPRWLEELRGHADKNIVIMLVGNKSDLEDERAVSTEDAKEFAEKENLFFLETSALQATNVESAFQTVLSEIFKIHSKKNIVTDPKANGAAPPLAGKKVLVPGPAQEIPKSKCCSSM

SEQ ID NO: 5433 - DNA, 612 bp, Triticum aestivum
  CDS (1)..(612)
atgaatccggagtatgactatctctttaagcttctgcttatcggagactcaggtgttggcaagtcatgccttctcttaagatttgccgatgactcgtacctggagagttatatcagtactattggtgttgatttcaaaatacgtaccgtggagcaagatggaaagactatgaagctgcaaatctgggacactgctgggcaagaacgcttcagaactattactagcagctactatcgaggggctcacgggatcattattgtctatgacgtgacagaccaggacagcttcaacaatgtgaagcagtggttgaacgagattgatcgctatgctagtgagaatgttaacaagcttcttgtagggaacaaatctgatctcactgacaaaagagttgtatcatatgagacagcgaaggcatttgctgatgagattggcatcccattcatggagaccagtgcaaagaatgccttgaacgttgagcaggctttcatggctatgtctgcttcaatcaaggacaggatggcgagccagccagccgcaaacagcgctcgcccagccacggtgcagatacgcgggcaacctgtcgaacagaagacgagctgctgctcttcttga

SEQ ID NO: 5434 - protein, 203 aa, Triticum aestivum
MNPEYDYLFKLLLIGDSGVGKSCLLLRFADDSYLESYISTIGVDFKIRTVEQDGKTMKLQIWDTAGQERFRTITSSYYRGAHGIIIVYDVTDQDSFNNVKQWLNEIDRYASENVNKLLVGNKSDLTDKRVVSYETAKAFADEIGIPFMETSAKNALNVEQAFMAMSASIKDRMASQPAANSARPATVQIRGQPVEQKTSCCSS

SEQ ID NO: 5435 - DNA, 645 bp, Triticum aestivum
  CDS (1)..(645)
atggcggcgccgccggctagggctcgggccgactacgactacctcatcaagctcctcctcatcggcgacagcggtgttgggaaaagttgtctgcttctgcggttctcagatggctccttcaccactagcttcatcaccactattggtattgacttcaagataaggactgttgagttggatggcaagcggattaagttgcagatctgggatactgctggccaagaacgctttcggactataactactgcctactacaggggagcgatgggcattttacttgtttatgatgtcacggacgaggcgtcattcaataacataagaaattggatcaaaaacattgaacagcatgcttcagataacgtgagcaaaattttggtggggaacaaagcggatatggatgaaagcaaaagggctgttcccacttcaaagggccaggccctggccgatgaatatgggatccagttctttgaagcgagtgcaaagacaaacatgaatgtcgagcaggttttcttctctatagcaagagacatcaaacagagactctcggaggcagattccaagactgagggggggactatcaagatcaacacggagggtgatgccagtgcagcagcaggacagaagtcggcttgctgtgggtcttga

SEQ ID NO: 5436 - protein, 214 aa, Triticum aestivum
MAAPPARARADYDYLIKLLLIGDSGVGKSCLLLRFSDGSFTTSFITTIGIDFKIRTVELDGKRIKLQIWDTAGQERFRTITTAYYRGAMGILLVYDVTDEASFNNIRNWIKNIEQHASDNVSKILVGNKADMDESKRAVPTSKGQALADEYGIQFFEASAKTNMNVEQVFFSIARDIKQRLSEADSKTEGGTIKINTEGDASAAAGQKSACCGS

SEQ ID NO: 5437 - DNA, 612 bp, Triticum aestivum
  CDS (1)..(612)
atgaatcccgagtatgattacctcttcaagcttttgcttattggagactcgggtgttggcaagtcatgtcttctgttaagatttgcagacgactcgtacctggatagttacatcagtactattggagttgatttcaaaataaggactgtggagcaggacggaaagactatcaagctgcaaatttgggacactgctgggcaagaacgttttagaactattaccagcagctactaccgaggggcccatgggattattatcgtctatgatgtgacagaccaagatagcttcaacaatgtgaagcagtggttgaacgagattgaccgctatgccagtgagaatgtgaacaagcttctcgtggggaacaaatgtgatctggctgacaaaagagctgtgtcatatgaaacagcaaaggcatttgctgatgagattggcatcccattcatggagaccagcgcaaagaacgccctgaatgttgaacaggctttcatggccatggctgcttcaatcaaggataggatggcgagccagccagccgcaaacaacgctcgcccagctactgtacagatccgcgggcaacctgtcgagcagaagaccagctgttgctcttcttag

SEQ ID NO: 5438 - protein, 203 aa, Triticum aestivum
MNPEYDYLFKLLLIGDSGVGKSCLLLRFADDSYLDSYISTIGVDFKIRTVEQDGKTIKLQIWDTAGQERFRTITSSYYRGAHGIIIVYDVTDQDSFNNVKQWLNEIDRYASENVNKLLVGNKCDLADKRAVSYETAKAFADEIGIPFMETSAKNALNVEQAFMAMAASIKDRMASQPAANNARPATVQIRGQPVEQKTSCCSS

SEQ ID NO: 5439 - DNA, 612 bp, Triticum aestivum
  CDS (1)..(612)
atgaatccggagtatgactatctctttaagcttctgcttatcggagactcaggtgttggcaagtcatgccttctcttaagatttgccgatgactcatacctggagagttatatcagtactattggtgttgatttcaaaatacgtaccgtggagcaagatggaaagactatgaagctgcaaatctgggacactgctgggcaagaacgcttcagaactattactagcagctactatcgaggggctcacgggatcattattgtctatgacgtgacagaccaggacagcttcaacaatgtgaagcagtggttgaacgagattgatcgctatgctagtgagaatgttaacaagcttcttgtagggaacaaatctgatctcactgacaaaagagttgtatcatatgagacagcgaaggcatttgctgatgagattggcatcccattcatggagaccagtgcaaagaatgccttgaacgttgagcaggctttcatggctatgtctgcttcaatcaaggacaggatggcgagccagccagccgcaaacagcgctcgcccagccacggtgcagatacgcgggcaacctgtccaacagaagaagagctgctgctcttcttga

SEQ ID NO: 5440 - protein, 203 aa, Triticum aestivum
MNPEYDYLFKLLLIGDSGVGKSCLLLRFADDSYLESYISTIGVDFKIRTVEQDGKTMKLQIWDTAGQERFRTITSSYYRGAHGIIIVYDVTDQDSFNNVKQWLNEIDRYASENVNKLLVGNKSDLTDKRVVSYETAKAFADEIGIPFMETSAKNALNVEQAFMAMSASIKDRMASQPAANSARPATVQIRGQPVQQKKSCCSS

SEQ ID NO: 5441 - DNA, 651 bp, Triticum aestivum
  CDS (1)..(651)
atggcgtacagggcggaggacgactacgactacctgttcaaggtggtgctgatcggggactccggggtgggcaagtccaacctgctcacccgcttcacccgcaacgagttcagcctcgagtccaagtccaccatcggcgtcgagttcgccacccgcagcatccacgtcgacgacaaggtcgtcaaggcccagatctgggacaccgccggccaggagaggtaccgggcgatcacaagcgcgtactaccgcggggcggtgggcgccctggtggtctacgacgtcacgaggcacgtcaccttcgagaacgtcgagaggtggctgagggagctcaaggaccacacggacgccaacatcgtgatcatgctcgtggggaacaaggcggacctgcgccacctcaggaccgtcccgtccgaggacgccaaggccttcgccgagcgcgagaacaccttcttcatggagacgtccgccctcgaggcgatgaacgtcgaggacgccttcaccgaggtgctctcgcagatctaccgcgtggtgagcaagaaggccctcgacatcggcgacgaccccgccgcgccccccaagggcaagaccatcaacgtcggctccaaggacgacgtgtccgcggtgaagaaatccaactgttgttcgtcttag

SEQ ID NO: 5442 - protein, 216 aa, Triticum aestivum
MAYRAEDDYDYLFKVVLIGDSGVGKSNLLTRFTRNEFSLESKSTIGVEFATRSIHVDDKVVKAQIWDTAGQERYRAITSAYYRGAVGALVVYDVTRHVTFENVERWLRELKDHTDANIVIMLVGNKADLRHLRTVPSEDAKAFAERENTFFMETSALEAMNVEDAFTEVLSQIYRVVSKKALDIGDDPAAPPKGKTINVGSKDDVSAVKKSNCCSS

SEQ ID NO: 5443 - DNA, 618 bp, Triticum aestivum
  CDS (1)..(618)
atggcggccaacgccggcaacaagatccgcaacgccaaactggttcttcttggagatgtaggcgctggcaaatccagcctggtgcttcggtttgtaaaaggacaatttgttgaattccaggaatcgacaattggagcggctttcttctctcaaaccttggctgttaatgacgagactgtgaagtttgaaatctgggatactgctgggcaggagaggtatcacagcttggcccccatgtactataggggtgctgccgcagctatagttgtctatgacatctcgaaccaggcatccttcacccgagcaaagaaatgggttcaagaacttcaagctcaaggaaaccagaatacagtagtggctcttgctggcaacaaagctgatttgctcgaggcgagggaggttcaaatagaggaagccaagacatatgcgcaggagaatggcctcttcttcatggaaacgtctgctaaaactgcaaccaatgtgaatgacatattttatgagattgcgaagagattgcttcaggggcaggcggcgcagaacccacagacggcggggatggttctctcccagagacccaatgagagagtggtcagcgcggcttcgtgctgctcctcctga

SEQ ID NO: 5444 - protein, 205 aa, Triticum aestivum
MAANAGNKIRNAKLVLLGDVGAGKSSLVLRFVKGQFVEFQESTIGAAFFSQTLAVNDETVKFEIWDTAGQERYHSLAPMYYRGAAAAIVVYDISNQASFTRAKKWVQELQAQGNQNTVVALAGNKADLLEAREVQIEEAKTYAQENGLFFMETSAKTATNVNDIFYEIAKRLLQGQAAQNPQTAGMVLSQRPNERVVSAASCCSS

SEQ ID NO: 5445 - DNA, 612 bp, Triticum aestivum
  CDS (1)..(612)
atgaatcccgaatatgactacctcttcaagctgctgctcattggggactcgggcgtggggaagtcttgcctgctgctgaggtttgcggatgattcatatctggagagctatatcagtactattggtgttgacttcaaaatccgcaccgttgagcaagatggaaagacgataaagctgcaaatttgggatactgctggacaagagcgatttgggaccatcacaagcagctactaccgtggtgcccacggcatcattgttgtgtatgatgtgactgaccaggagagcttcaacaacgtcaaacagtggcttaatgaaattgacaggtatgctagtgaaaatgtgaacaagcttttggtggggaacaagtgcgatctagctgagagcagagtggtttcttacgaggctggcaaggcccttgccgatgagattggaataccattcctggaaaccagtgccaaggatgcaacaaatgtggagaaggcatttatgaccatggctgcagagataaagaacaggatggcaagccaaccggctggaaatgccagcaagcctgccaccgtgcaaatgcggggtcagcctgttgcccagcaaaacggatgctgctcgtcttga

SEQ ID NO: 5446 - protein, 203 aa, Triticum aestivum
MNPEYDYLFKLLLIGDSGVGKSCLLLRFADDSYLESYISTIGVDFKIRTVEQDGKTIKLQIWDTAGQERFGTITSSYYRGAHGIIVVYDVTDQESFNNVKQWLNEIDRYASENVNKLLVGNKCDLAESRVVSYEAGKALADEIGIPFLETSAKDATNVEKAFMTMAAEIKNRMASQPAGNASKPATVQMRGQPVAQQNGCCSS

SEQ ID NO: 5447 - DNA, 648 bp, Triticum aestivum
  CDS (1)..(648)
atggcgcaccgggtggacaacgagtacgactacctcttcaagatcgtgctcatcggcgactccggcgtcggcaagtccaacatcctctcccgcttgacccgcaacgagatctgcctcgagtccaagtccaccatcggcgtcgagttcgccacccgcaccctccaggtagaaggcaagaccattaaggctcagatatgggatactgctggccaagagaggtaccgtgcaatcacaagtgcttactacaggggagctgtgggagctcttttggtgtatgacataacaaagaagctatcatttgaaaacatcaataggtggcttagtgagctccgtaaccatgctgactccaacatcgtcatcatgatgggtggaaacaaatccgaccttaaccacctgaggtcagttcaggaggaagaagggcaggcattagcagagaaggaagggctatccttccttgagacctcggcactggaagccttgaacgtcgagaaggcgtttcagactatcctttccgacatccatcagatcataagcaagaaggcgctcgctgcccaggaggctgcaggaagtggacctccgactcaaggaaccaccatcaatgttgccgattcatccggcaacatgaagaaagggtgctgttctacctag

SEQ ID NO: 5448 - protein, 215 aa, Triticum aestivum
MAHRVDNEYDYLFKIVLIGDSGVGKSNILSRLTRNEICLESKSTIGVEFATRTLQVEGKTIKAQIWDTAGQERYRAITSAYYRGAVGALLVYDITKKLSFENINRWLSELRNHADSNIVIMMGGNKSDLNHLRSVQEEEGQALAEKEGLSFLETSALEALNVEKAFQTILSDIHQIISKKALAAQEAAGSGPPTQGTTINVADSSGNMKKGCCST

SEQ ID NO: 5449 - DNA, 612 bp, Triticum aestivum
  CDS (1)..(612)
atgaatcctggatatgactacctcttcaagctgctgctcattggggactcgggcgtggggaagtcctgcctgcttctgaggtttgcggatgattcatatctggagagctatatcagtactattggtgttgacttcaaaatccgcaccgttgagcaagatgggaagacgataaagctgcaaatttgggatactgctggccaagagcgatttaggaccatcacaagcagctactaccgcggtgcccatggcatcattgttgtgtatgatgtgactgaccaggagagcttcaacaacgtcaaacagtggcttaatgaaatcgacaggtacgctagtgaaaatgtgaacaagcttttggtggggaacaagtgcgatctagctgagagcagagtggtttcttacgaggctggcaaggcccttgccgatgagattggaataccattcctggaaaccagtgccaaggatgcaacaaatgtggaaaaggcatttatgaccatggccgcagagataaagaacaggatggcaagccagccggctggaaatgccagcaagcctgccacagtgcacccccggggtcagcctgttgctcagcagaacggatgctgctcgtcttga

SEQ ID NO: 5450 - protein, 203 aa, Triticum aestivum
MNPGYDYLFKLLLIGDSGVGKSCLLLRFADDSYLESYISTIGVDFKIRTVEQDGKTIKLQIWDTAGQERFRTITSSYYRGAHGIIVVYDVTDQESFNNVKQWLNEIDRYASENVNKLLVGNKCDLAESRVVSYEAGKALADEIGIPFLETSAKDATNVEKAFMTMAAEIKNRMASQPAGNASKPATVHPRGQPVAQQNGCCSS

SEQ ID NO: 5451 - DNA, 609 bp, Glycine max
  CDS (1)..(609)
atgaatcccgagtatgattatctgttcaagctccttcttattggagactctggtgttggtaaatcatgccttcttctgagattttctgatgattcgtacatcgaaagctacataagcaccattggagttgattttaaaatacgtaccgttgagcaagatggaaagaccattaaactacagatctgggacacagctgggcaagaacgatttaggacaatcaccagtagctactaccgtggtgcccatgggatcattattgtttatgatgtgacagatgaagagagcttcaataatgtgaagcagtggctcagtgaaattgatcgctatgcaagtgataatgttaacaagcttttggttggcaacaagtgtgatctggaagcaaatagagcagtgtcatatgaaacagctaaggcatttgcagatggaataggcataccttttatggaaacaagtgcaaaagatgctacaaatgtcgaacaggctttcatggcaatgactgcttcaatcaaggatagaatggcaagccaacctgcaaataatgcaaggcctccaacagtgcagatcaggggtcagccagttgcacagaaaggtgggtgctgctcttcctga

SEQ ID NO: 5452 - protein, 202 aa, Glycine max
MNPEYDYLFKLLLIGDSGVGKSCLLLRFSDDSYIESYISTIGVDFKIRTVEQDGKTIKLQIWDTAGQERFRTITSSYYRGAHGIIIVYDVTDEESFNNVKQWLSEIDRYASDNVNKLLVGNKCDLEANRAVSYETAKAFADGIGIPFMETSAKDATNVEQAFMAMTASIKDRMASQPANNARPPTVQIRGQPVAQKGGCCSS

SEQ ID NO: 5453 - DNA, 612 bp, Zea mays
  CDS (1)..(612)
atgaatcccgagtacgactaccttttcaaacttctgcttattggtgattctggtgttgggaaatcatgcttgcttctcagatttgcagacgattcttatttggacagctatatcagcacaattggggttgatttcaaaattcgcacagtggagcaagatgggaagaccataaaacttcaaatttgggatactgctgggcaagagcgcttcaggacaatcactagcagctactaccgcggagctcatggaatcattattgtatatgacgtgacagaccaagaaagcttcaataatgtgaagcaatggttgaacgagatagaccgttatgcaagtgataatgttaacaagctccttgttgggaacaagagtgaccttactgccaacaaagttgtggcaactgagacagcaaaggcgtttgctgatgagatgggcatcccattcatggagacgagtgccaaaaacgccatcaacgtggagcaggccttcatggctatggctgcatccatcaaggataggatggccagccaaccagccgcggccaacgcaaggccagcgaccgtgcagatccgcgggcaacccgtcaaccagaagacgtcttgctgctcgtcctaa

SEQ ID NO: 5454 - protein, 203 aa, Zea mays
MNPEYDYLFKLLLIGDSGVGKSCLLLRFADDSYLDSYISTIGVDFKIRTVEQDGKTIKLQIWDTAGQERFRTITSSYYRGAHGIIIVYDVTDQESFNNVKQWLNEIDRYASDNVNKLLVGNKSDLTANKVVATETAKAFADEMGIPFMETSAKNAINVEQAFMAMAASIKDRMASQPAAANARPATVQIRGQPVNQKTSCCSS

SEQ ID NO: 5455 - DNA, 612 bp, Zea mays
  CDS (1)..(612)
atgaatcccgagtacgactaccttttcaaacttctgcttattggtgattctggtgttgggaaatcatgcttgcttctcagatttgcggatgattcatatttggacagctacatcagcacaattggggttgattttaaaattcggacagtagagcaagatgggaagaccataaaacttcaaatttgggatactgctgggcaagagcgcttcaggaccatcactagcagctactaccgtggagctcatggaatcattattgtatatgacgtgacagaccaagaaagcttcaataatgtgaagcaatggttaaatgaaattgatcgttatgcaagtgacaatgttaacaagctccttgttgggaacaagagcgacctaactgccaacaaagttgtggcaactgagacagcaaaggcatttgctgatgagatgggcatcccgttcatggagacgagtgccaaaaacgccaccaacgtggagcaggccttcatggctatggctgcatccatcaaggacaggatggccagccaaccagccgcggccaacgcaaggccagcgacggtgcagatccgcgggcaacccgtcaaccagaagacgtcttgctgctcgtcttaa

SEQ ID NO: 5456 - protein, 203 aa, Zea mays
MNPEYDYLFKLLLIGDSGVGKSCLLLRFADDSYLDSYISTIGVDFKIRTVEQDGKTIKLQIWDTAGQERFRTITSSYYRGAHGIIIVYDVTDQESFNNVKQWLNEIDRYASDNVNKLLVGNKSDLTANKVVATETAKAFADEMGIPFMETSAKNATNVEQAFMAMAASIKDRMASQPAAANARPATVQIRGQPVNQKTSCCSS

SEQ ID NO: 5457 - DNA, 654 bp, Zea mays
  CDS (1)..(654)
atggcgggggctggagacaaggtggactacgtcttcaaggtggtgctgatcggcgactcggcggttggcaagtcgcagatcctcgcccgcttcgcccgcaacgagttcagcctcgactccaaggccaccatcggcgtcgagttccagacccgcaccctcgtcatcgaccacaggagcgtcaaggcccagatctgggacaccgccggccaggagaggtacagagctgtgacaagtgcttattacagaggtgcactgggagctttgctggtctatgacattaccagacgccagagcttcgatcatataccccgctggctagatgaactccgagcccatgctgacaagaacattgtgataatgctggttggcaacaagagtgatctcgaggagcagcgagcggtgagcactgaagatgccaaggagtttgccgagaaggagaacctcttcttcctggagacctctgcgctccaggcaacaaacgtagagagtgcttttcaaactgtcttgacagagatattcaagatccacagcaagaagaacatggtgtcggagccgaagagcaatggagctgccccagcaatgccggggacaaaggtccttgtcccaggtccggcgcaggaaatcccaaagagcaagtgctgcagttccatgtga

SEQ ID NO: 5458 - protein, 217 aa, Zea mays
MAGAGDKVDYVFKVVLIGDSAVGKSQILARFARNEFSLDSKATIGVEFQTRTLVIDHRSVKAQIWDTAGQERYRAVTSAYYRGALGALLVYDITRRQSFDHIPRWLDELRAHADKNIVIMLVGNKSDLEEQRAVSTEDAKEFAEKENLFFLETSALQATNVESAFQTVLTEIFKIHSKKNMVSEPKSNGAAPAMPGTKVLVPGPAQEIPKSKCCSSM

SEQ ID NO: 5459 - DNA, 648 bp, Zea mays
  CDS (1)..(648)
atggcgcaccgagtggacaacgagtacgactacctcttcaagatcgtgctcatcggcgactccggcgtcggcaagtccaacatcctttcccggttcacccgcaacgagttctgcctcgagtccaagtccaccatcggcgtcgagttcgccacccgcaccctccagatcgaagggaaaaccatcaaagctcaaatatgggatactgcggggcaagagaggtaccgtgcaatcacaagtgcttactacagaggagccgtgggtgcacttctagtctatgacatcacgaagaagcagacatttgaaaacatacagaggtggctccgcgagctccgtgaccacgcggactccaacatcgtgatcatgatggtcggcaacaagtccgacctgaaccacctgaggtcggttccagaggaagatgggcaggcgttagcggagaaggaaggcctatccttcctcgagacatccgccctcgaagcccttaacgtcgagaaggcgtttcagaccgtcctctccgacatccatcagatcataagcaagaaggcgcttgcagcccaagaggcagcaggcagtggacctccaggtcaaggaaccaccatcaacgttgcggattcgtctgccaacatgaagggagggtgctgctcttcctag

SEQ ID NO: 5460 - protein, 215 aa, Zea mays
MAHRVDNEYDYLFKIVLIGDSGVGKSNILSRFTRNEFCLESKSTIGVEFATRTLQIEGKTIKAQIWDTAGQERYRAITSAYYRGAVGALLVYDITKKQTFENIQRWLRELRDHADSNIVIMMVGNKSDLNHLRSVPEEDGQALAEKEGLSFLETSALEALNVEKAFQTVLSDIHQIISKKALAAQEAAGSGPPGQGTTINVADSSANMKGGCCSS

SEQ ID NO: 5461 - DNA, 648 bp, Zea mays
  CDS (1)..(648)
atggcgcaccgtatggacaacgagtacgactacctcttcaagatcgtgctcatcggcgactccggcgtcggcaagtccaacatcctctcccgattcacccgcaacgagttctgcctcgagtccaagtccaccatcggcgtcgagttcgccacccgcaccctgcaggttgaagggaaaaccatcaaagcccaaatatgggatactgctgggcaagagaggtaccgtgcaatcacaagtgcgtactacagaggagctgtgggtgcacttctagtctacgacatcacgaagaagcagacattcgaaaacatacagaggtggcttcgtgagctccgcgaccacgccgactccaacattgtgatcatgatggttggtaacaagtccgacctgaaccacctgaggtcggttgcagaggaagacgggcaggcattggcagagaaggaaggcctatccttcctcgagacatccgccctcgaagcgctcaatgtcgagaaggcgttccagaccgtcctctctgatattcaccaaatcataagcaagaaggcacttgcagctcaagaggcagcaggcagtgggcctccaggtcaaggaaccaccatcaacatcgcagacccatctgccaacacgaagagaggatgctgctcttcataa

SEQ ID NO: 5462 - protein, 215 aa, Zea mays
MAHRMDNEYDYLFKIVLIGDSGVGKSNILSRFTRNEFCLESKSTIGVEFATRTLQVEGKTIKAQIWDTAGQERYRAITSAYYRGAVGALLVYDITKKQTFENIQRWLRELRDHADSNIVIMMVGNKSDLNHLRSVAEEDGQALAEKEGLSFLETSALEALNVEKAFQTVLSDIHQIISKKALAAQEAAGSGPPGQGTTINIADPSANTKRGCCSS

SEQ ID NO: 5463 - DNA, 648 bp, Zea mays
  CDS (1)..(648)
atggcggcgccgccggcgagggcccgggccgactacgactaccttatcaagctgctcctcattggagacagcggtgttggcaagagttgcctcctgttgcggttctctgatggttccttcactacaagctttattaccacaattggtattgactttaagatacgaacgatagaattggatggcaagcgtataaagctacagatttgggatacggcgggccaagaacgcttccggactattaccaccgcgtactaccgaggagctatgggcatcttgctggtttatgatgtcaccgatgaatcttcttttaacaacatccgaaactggattcggaacattgaacaacacgcctctgataatgtcaacaagattttggttggcaacaaggccgatatggacgaaagcaagagggctgtacctactgcaaaaggacaagcacttgctgatgagtacgggatcaagttttttgaaacgagtgcgaagacaaacctgaatgtggagcaagtgtttttctccatcgcacgtgacatcaagcagaggcttgcggagactgattcaaagccagaggacaaggcaatcaaaattaacaagccagaccagggttccgaggcaccagctgcccagcgatctgcttgctgcggctcataa

SEQ ID NO: 5464 - protein, 215 aa, Zea mays
MAAPPARARADYDYLIKLLLIGDSGVGKSCLLLRFSDGSFTTSFITTIGIDFKIRTIELDGKRIKLQIWDTAGQERFRTITTAYYRGAMGILLVYDVTDESSFNNIRNWIRNIEQHASDNVNKILVGNKADMDESKRAVPTAKGQALADEYGIKFFETSAKTNLNVEQVFFSIARDIKQRLAETDSKPEDKAIKINKPDQGSEAPAAQRSACCGS

SEQ ID NO: 5465 - DNA, 612 bp, Zea mays
  CDS (1)..(612)
atgaatcccgagtacgactacctcttcaagctgctcctcatcggggactccggtgttgggaagtcttgcctgctgctgaggtttgcggatgattcatatctggagagctatatcagtactattggagttgattttaaaatccgcaccgttgagcaagatgggaagacaataaagctacagatttgggatactgctggccaagaacgctttaggaccatcacaagcagctactaccgtggagctcatggcattattgttgtgtatgatgtaactgaccaggagagctttaacaatgtcaagcagtggctgaatgaaattgataggtatgccagtgaaaatgtgaacaagcttttggtggggaacaagtgtgacctggctgagaacagagtagtttcttacgaggctggcaaggcccttgctgatgacatcggaataccattccttgagactagtgccaaggatgcaacaaatgtggagaaggcattcatgaccatggcaggggagataaagaacaggatggcaagtcaaccagctgcaagtggtgctagtaggcctgcaactgtgcaaatgcggggtcagcctgtttctcagcaaagcagctgctgctcttga

SEQ ID NO: 5466 - protein, 203 aa, Zea mays
MNPEYDYLFKLLLIGDSGVGKSCLLLRFADDSYLESYISTIGVDFKIRTVEQDGKTIKLQIWDTAGQERFRTITSSYYRGAHGIIVVYDVTDQESFNNVKQWLNEIDRYASENVNKLLVGNKCDLAENRVVSYEAGKALADDIGIPFLETSAKDATNVEKAFMTMAGEIKNRMASQPAASGASRPATVQMRGQPVSQQSSCCS

SEQ ID NO: 5467 - DNA, 612 bp, Zea mays
  CDS (1)..(612)
atggcggccaacttcgggaacaagatccgcaacgccaagctggttcttcttggagatgtaggcgctggcaaatctagcttggttcttcggtttgtcaagggacagtttgttgaattccaggaatcaacaatcggagcagctttcttttcccagaccttagcggtaaatgatgagactgttaagtttgaaatctgggatactgctgggcaggagaggtatcatagcttggcccccatgtattataggggtgcagccgccgccattgttgtctatgacatcacaaatccggcctccttcacccgtgccaagaaatgggttcaagaacttcaagctcaaggaaatccgaatacaatagtggctcttgctggtaacaaggttgatatgctagatgcgaggcacgtggcagtagaggaagcaaagacgtatgcccaggagaacggtctcttcttcatggagacatctgctaaaactgcaatcaatgtgaatgacatattttatgagattgcaaagagattgcttcaagggcaagaggctccaagtccacaggctggaattgttctgaatcagagaccagatgagaggatggtcagcacttcctcgtgctgctcatga

SEQ ID NO: 5468 - protein, 203 aa, Zea mays
MAANFGNKIRNAKLVLLGDVGAGKSSLVLRFVKGQFVEFQESTIGAAFFSQTLAVNDETVKFEIWDTAGQERYHSLAPMYYRGAAAAIVVYDITNPASFTRAKKWVQELQAQGNPNTIVALAGNKVDMLDARHVAVEEAKTYAQENGLFFMETSAKTAINVNDIFYEIAKRLLQGQEAPSPQAGIVLNQRPDERMVSTSSCCS

SEQ ID NO: 5469 - DNA, 630 bp, Zea mays
  CDS (1)..(630)
atgaatcccgagtacgactaccttttcaaacttctgcttattggtgattctggtgttgggaaatcatgcttgcttctcagatttgcagacgattcttatttggacagctatatcagcacaattggggttgatttcaaaattcgcacagtggagcaagatgggaagaccataaaacttcaaatttgggatactgctgggcaagagcgcttcaggacaatcactagcagctactaccgcggagctcatggaatcattattgtatatgacgtgacagaccaagaaagcttcaataatgtgaagcaatggttgaacgagatagaccgttatgcaagtgataatgttaacaagctccttgttgggaacaagagtgaccttactgccaacaaagttgtggcaactgagacagcaaaggcgtttgctgatgagatgggcatcccattcatggagacgagtgccaaaaacgccatcaacgtggagcaggccttcatggctatggctgcatccatcaaggataggtacagccaatgtgccaggatggccagccaaccagccgcggccaacgcaaggccagcgaccgtgcagatccgcgggcaacccgtcaaccagaagacgtcttgctgctcgtcctaa

SEQ ID NO: 5470 - protein, 209 aa, Zea mays
MNPEYDYLFKLLLIGDSGVGKSCLLLRFADDSYLDSYISTIGVDFKIRTVEQDGKTIKLQIWDTAGQERFRTITSSYYRGAHGIIIVYDVTDQESFNNVKQWLNEIDRYASDNVNKLLVGNKSDLTANKVVATETAKAFADEMGIPFMETSAKNAINVEQAFMAMAASIKDRYSQCARMASQPAAANARPATVQIRGQPVNQKTSCCSS

SEQ ID NO: 5471 - DNA, 645 bp, Zea mays
  CDS (1)..(645)
atggcggcgccgccggctagggcccgggccgactacgactacctcatcaagctgctcctcatcggcgatagcggtgttgggaaaagttgtctccttttacggttctcagatggctccttcactactagctttatcaccaccattgggattgacttcaaaataagaacagttgagcttgatggtaagcgcataaagttacagatatgggatactgctggtcaagaacgttttcgaactattacaaccgcctactacaggggtgcaatgggaattttgcttgtctatgatgttactgatgagtcatctttcaataatataagaaactggataaggaacattgagcaacatgcttccgacaatgtgaataaaattttggtaggcaacaaagctgacatggatgaaagcaaacgcgctgtaccgacttcaaaagggcaggctcttgctgacgagtatggcatcaagttttttgaaacgagtgcgaagaccaacctgaatgtggagcaggtttttttctccatagcaagggatatcaagcaaaggctttctgaatctgattcaaagccagaggatcgcacgatcagtattaacagacctgatggcggtgaggcttcggcttcacaaaaatcagcttgctgcggatcgtga

SEQ ID NO: 5472 - protein, 214 aa, Zea mays
MAAPPARARADYDYLIKLLLIGDSGVGKSCLLLRFSDGSFTTSFITTIGIDFKIRTVELDGKRIKLQIWDTAGQERFRTITTAYYRGAMGILLVYDVTDESSFNNIRNWIRNIEQHASDNVNKILVGNKADMDESKRAVPTSKGQALADEYGIKFFETSAKTNLNVEQVFFSIARDIKQRLSESDSKPEDRTISINRPDGGEASASQKSACCGS

SEQ ID NO: 5473 - DNA, 645 bp, Zea mays
  CDS (1)..(645)
atggcggcgcctccggcgagggcccgggccgactacgacttcctcatcaagctgctcctcatcggagatagcggtgttgggaaaagttgtctccttttacggttctcagatggctccttcactactagcttcatcaccaccattgggattgacttcaaaataagaacagttgagcttgatggtaagcgcataaagttacagatatgggatactgctggtcaagaacgttttcgaactattacaaccgcctactacaggggtgcaatgggaattttgcttgtctatgatgttactgatgagtcatctttcaataatataagaaactggataaggaacattgagcaacatgcttccgacaatgtgaataaaattttggtaggcaacaaagctgacatggatgaaagcaaacgcgctgtaccgacttcaaaagggcaggctcttgctgacgagtatggcatcaagttttttgaaacgagtgcgaagaccaacctgaatgtggagcaggtttttttctccatagcaagggatatcaagcaaaggctttctgaatcagattcaaagccagaggatcgcacgatcagtattaacagccctgatggcggtgaggcttcggtttcacaaaaatcagcttgctgcggatcgtga

SEQ ID NO: 5474 - protein, 214 aa, Zea mays
MAAPPARARADYDFLIKLLLIGDSGVGKSCLLLRFSDGSFTTSFITTIGIDFKIRTVELDGKRIKLQIWDTAGQERFRTITTAYYRGAMGILLVYDVTDESSFNNIRNWIRNIEQHASDNVNKILVGNKADMDESKRAVPTSKGQALADEYGIKFFETSAKTNLNVEQVFFSIARDIKQRLSESDSKPEDRTISINSPDGGEASVSQKSACCGS

SEQ ID NO: 5475 - DNA, 603 bp, Zea mays
  CDS (1)..(603)
atgggttgctcctcctccgtgccagctagaaatactggagggctgaacactatcagcaacgatagctctccagccaccagttcaaaggacttgcgtgctaagttggtattgctgggagactcaggtgttgggaaaagttgcattgttcttcgttttgttcgtggtcagtttgatcctacttccaaggtaactgttggcgcatcttttttatcacaaacattggcattggaggattcaacaatagtgaagtttgaaatttgggatactgctgggcaagagaggtatgctgccttggcgccactttactacagaggagctgctgctgcaattgttgtctatgatataacaagtccggaatcatttagcaaagcacagtattgggtaaaggaacttcagaagcatggtagtcctggtattgtaatggttttggttggtaataaggctgatctacatgataatcgaagtgtatcctcgcaggatgcacaagactacgcagagaagaacaatatgtttttcattgagacgtcggccaagacagctgataatataaaccaactgtttgaggaaattgcaaagaggttgcctaggccaacggcatcgtga

SEQ ID NO: 5476 - protein, 200 aa, Zea mays
MGCSSSVPARNTGGLNTISNDSSPATSSKDLRAKLVLLGDSGVGKSCIVLRFVRGQFDPTSKVTVGASFLSQTLALEDSTIVKFEIWDTAGQERYAALAPLYYRGAAAAIVVYDITSPESFSKAQYWVKELQKHGSPGIVMVLVGNKADLHDNRSVSSQDAQDYAEKNNMFFIETSAKTADNINQLFEEIAKRLPRPTAS

SEQ ID NO: 5477 - DNA, 654 bp, Zea mays
  CDS (1)..(654)
atgggcgggcgggtggatcacgagtactcctacctgttcaagatggtcctcatcggagacagcggcgtcggcaagtccaatatcctctctcgcttcacgcgcaaccacttctccctcgactccaagtccaccatcggcgtcgagttcgccaccaagtccctgcagatggacggcaaaacaataaaggctcagatctgggacacagctgggcaggaaaggtaccgtgcaattacaagtgcttactaccgtggagccgtgggagcactgcttgtgtacgacatcacaaagaggcagagcttcgacaatgttcacaggtggcttcgtgaactccgcgaccatgctgactccagtattgtgatcatgatggtcggtaacaaatctgacctaatccacctgagagctatctctgaggatgaaggcaaagcgttggctgagaaggaggggttgttcttcctcgagacatcagctatggaggctataaacgtggagcaagccttccagactatcatgacggaggtctatggcattgtcaacaggaaagcgctggctgccaaagaagcagcagctgcaactgcttcgttgccctcccagggtaaaatcatcagcattgacagcactgcaggaaacacaaagagggcatgctgctctacctaa

SEQ ID NO: 5478 - protein, 217 aa, Zea mays
MGGRVDHEYSYLFKMVLIGDSGVGKSNILSRFTRNHFSLDSKSTIGVEFATKSLQMDGKTIKAQIWDTAGQERYRAITSAYYRGAVGALLVYDITKRQSFDNVHRWLRELRDHADSSIVIMMVGNKSDLIHLRAISEDEGKALAEKEGLFFLETSAMEAINVEQAFQTIMTEVYGIVNRKALAAKEAAAATASLPSQGKIISIDSTAGNTKRACCST

SEQ ID NO: 5479 - DNA, 645 bp, Zea mays
  CDS (1)..(645)
atggcggcgccgccggcgagggcccgggccgactacgactacctcatcaagctgctcctcatcggcgatagcggtgttgggaaaagttgtctccttttgcggttctcagatggctctttcaccactagctttatcaccaccattgggattgacttcaaaataagaacagttgagcttgatggtaagcgcgtaaagttacagatatgggatactgctggtcaagagcggtttcgaactattacaaccgcctactacaggggtgcaatgggaattttgcttgtctatgatgttactgatgagtcatctttcaataatataagaaactggattaggaacatagagcaacatgcttccgacaatgtgaataaaattttggtaggcaacaaagctgacatggatgaaagcaaacgggctgtgccaacttcaagagggcaggctcttgctgatgagtatggcatcaaattttttgaaacgagtgcgaagacgaacctgaatgtggagcaggttttcttctccatagcaagagatatcaagcaaaggcttgctgaatctgattcaaagccagaggatcgcacgatcagtatcaacagacctgagggtggtgaggcttcagcgtcacaaaaatcagcttgctgcggatcgtga

SEQ ID NO: 5480 - protein, 214 aa, Zea mays
MAAPPARARADYDYLIKLLLIGDSGVGKSCLLLRFSDGSFTTSFITTIGIDFKIRTVELDGKRVKLQIWDTAGQERFRTITTAYYRGAMGILLVYDVTDESSFNNIRNWIRNIEQHASDNVNKILVGNKADMDESKRAVPTSRGQALADEYGIKFFETSAKTNLNVEQVFFSIARDIKQRLAESDSKPEDRTISINRPEGGEASASQKSACCGS

SEQ ID NO: 5481 - DNA, 645 bp, Zea mays
  CDS (1)..(645)
atggcagcgccaccggcgagggcccgagccgactacgactacctcatcaaactgctcctcatcggtgacagcggtgttggaaaaagttgtctcctgttacggttttcagatggatcattcaccactagcttcattaccactattggcattgacttcaagataaggactgtcgagttggatggcaaacggattaagttgcagatctgggacactgcaggccaagaacgtttccgcacgattactactgcttactacaggggagcaatgggcatcttgcttgtgtacgatgtcacagacgagtcatctttcaataacataagaaattggatcagaaacattgagcaacatgcttcggataacgtgaacaaaattctggtggggaataaagctgatatggatgaaagcaaacgggctgtgcccacttcaaagggacaagctctcgctgacgaatatgggataaagttctttgaaacgagcgcaaagacaaacctgaacgtcgagcaggttttcttttctatagcaagggatatcaaacagagactttcagagactgattccaagcctgaggatcgaactatcaagatcaaggctgaaggggaagctgatgcagcagaggcgcagaaatcagcttgctgcggctcttga

SEQ ID NO: 5482 - protein, 214 aa, Zea mays
MAAPPARARADYDYLIKLLLIGDSGVGKSCLLLRFSDGSFTTSFITTIGIDFKIRTVELDGKRIKLQIWDTAGQERFRTITTAYYRGAMGILLVYDVTDESSFNNIRNWIRNIEQHASDNVNKILVGNKADMDESKRAVPTSKGQALADEYGIKFFETSAKTNLNVEQVFFSIARDIKQRLSETDSKPEDRTIKIKAEGEADAAEAQKSACCGS

SEQ ID NO: 5483 - DNA, 654 bp, Zea mays
  CDS (1)..(654)
atgggggggcgggtggatcacgagtactcttacctgttcaagatggtgctcatcggggacagcggcgtcggcaagtccaatatcctctctcgcttcacgcgcaaccacttctccctcgactccaagtccaccatcggcgtcgagttcgccaccaagtccctgcagattgacggcaaaacaataaaggctcagatctgggacacagctgggcaggaaaggtaccgtgcgattacaagcgcctactaccgtggcgccgtggccgccctgcttgtgtacgacatcacgaagaggcagagcttcgacaacgttcacaggtggcttcgtgagctccgcgaccacgctgactccagcatcgtgatcatgatggtgggcaacaaatccgacctgatccacttgagagctatctctgaggacgaaggcaaagcgttggctgagaaggaagggctgttcttcctcgagacgtcagctatggaggccatcaacgtggaggaagccttccagactattatcacggaggtgtatggcatcgtcaacaggaaagcgctggccgccaaggaagcagctgccacagctgccccattgccttcacagggcaaaaccatcagcattgacagcaatgcaggaaatacaaagaaggcatgctgctctacataa

SEQ ID NO: 5484 - protein, 217 aa, Zea mays
MGGRVDHEYSYLFKMVLIGDSGVGKSNILSRFTRNHFSLDSKSTIGVEFATKSLQIDGKTIKAQIWDTAGQERYRAITSAYYRGAVAALLVYDITKRQSFDNVHRWLRELRDHADSSIVIMMVGNKSDLIHLRAISEDEGKALAEKEGLFFLETSAMEAINVEEAFQTIITEVYGIVNRKALAAKEAAATAAPLPSQGKTISIDSNAGNTKKACCST

SEQ ID NO: 5485 - DNA, 654 bp, Zea mays
  CDS (1)..(654)
atggcggggggcggggataaggtggactacgtcttcaaggtggtgctcatcggcgactccgctgtcggcaagtcgcagatccttgcgcgcttcgcccgcaacgagtttagcctcgactcgaaggccaccattggggtcgagttccagactcggacgctcgtcatcgaacacaagtccgtcaaggcgcagatctgggacaccgccgggcaggagaggtatagagctgtcacaagtgcctactacagaggtgctttgggagctctgctagtctatgatatcacaaaacgccagagcttcgaccacatacctcgctggctggaagagcttcggggccatgctgacaaaaacattgtgatcatgctggttggcaacaagagcgacctcgaagacgagcgtgccgtaagcaccgaggacgccaaggagtttgccgagaaggagaacctcttcttccttgagacctccgcgctgcaggcgaccaatgtagaaaatgccttccagaccgtcttgacagagatctttaagatccacagcaagaagaacatggcagcggacccaagggccaatggggccgcaccatcgctggcagggaagaaggtcatcgtcccaggcccagctcaggagatccctaagagcaagtgctgcagttccatgtga

SEQ ID NO: 5486 - protein, 217 aa, Zea mays
MAGGGDKVDYVFKVVLIGDSAVGKSQILARFARNEFSLDSKATIGVEFQTRTLVIEHKSVKAQIWDTAGQERYRAVTSAYYRGALGALLVYDITKRQSFDHIPRWLEELRGHADKNIVIMLVGNKSDLEDERAVSTEDAKEFAEKENLFFLETSALQATNVENAFQTVLTEIFKIHSKKNMAADPRANGAAPSLAGKKVIVPGPAQEIPKSKCCSSM

SEQ ID NO: 5487 - DNA, 25 bp, Artificial sequence
  primer
atggataaacatacagcagctattc

SEQ ID NO: 5488 - DNA, 23 bp, Artificial sequence
  primer
ttagcagttacaacccccagtct

SEQ ID NO: 5489 - protein, 208 aa, Artificial sequence
  consensus sequence
  Variant (2)..(3): Xaa in position 2 to 3 is any amino acid
  Variant (5)..(5): Xaa in position 5 is any amino acid
  Variant (8)..(9): Xaa in position 8 to 9 is any amino acid
  Variant (14)..(17): Xaa in position 14 to 17 is any amino acid
  Variant (20)..(23): Xaa in position 20 to 23 is any amino acid
  Variant (24)..(24): Xaa in position 24 is any or no amino acid
  Variant (26)..(30): Xaa in position 26 to 30 is any amino acid
  Variant (31)..(31): Xaa in position 31 is any or no amino acid
  Variant (35)..(36): Xaa in position 35 to 36 is any amino acid
  Variant (38)..(40): Xaa in position 38 to 40 is any amino acid
  Variant (42)..(47): Xaa in position 42 to 47 is any amino acid
  Variant (48)..(57): Xaa in position 48 to 57 is any or no amino acid
  Variant (59)..(60): Xaa in position 59 to 60 is any amino acid
  Variant (70)..(76): Xaa in position 70 to 76 is any amino acid
  Variant (82)..(86): Xaa in position 82 to 86 is any amino acid
  Variant (90)..(90): Xaa in position 90 is any amino acid
  Variant (92)..(95): Xaa in position 92 to 95 is any amino acid
  Variant (96)..(97): Xaa in position 96 to 97 is any or no amino acid
  Variant (99)..(103): Xaa in position 99 to 103 is any amino acid
  Variant (104)..(104): Xaa in position 104 is any or no amino acid
  Variant (106)..(107): Xaa in position 106 to 107 is any amino acid
  Variant (109)..(119): Xaa in position 109 to 119 is any amino acid
  Variant (120)..(124): Xaa in position 120 to 124 is any or no amino acid
  Variant (126)..(126): Xaa in position 126 is any amino acid
  Variant (130)..(130): Xaa in position 130 is any amino acid
  Variant (132)..(135): Xaa in position 132 to 135 is any amino acid
  Variant (136)..(171): Xaa in position 136 to 171 is any or no amino acid
  Variant (173)..(180): Xaa in position 173 to 180 is any amino acid
  Variant (182)..(184): Xaa in position 182 to 184 is any amino acid
  Variant (185)..(192): Xaa in position 185 to 192 is any or no amino acid
  Variant (194)..(194): Xaa in position 194 is any amino acid
  Variant (199)..(202): Xaa in position 199 to 202 is any amino acid
  Variant (205)..(207): Xaa in position 205 to 207 is any amino acid
KXXLXGDXXVGKSXXXXRFXXXXXFXXXXXXTIGXXFXXXTXXXXXXXXXXXXXXXXKXXIWDTAGQERXXXXXXXYYRGAXXXXXVYDXTXXXXXXFXXXXXXWXXEXXXXXXXXXXXXXXXXLXGNKXDXXXXXXXXXXXXXXXXXXXXXXXXXXXXXXXXXXXXXXXXVXXXXXXXXAXXXXXXXXXXXFXETSAXXXXNVXXXF

SEQ ID NO: 5490 - protein, 25 aa, Artificial sequence
  protein pattern
  Variant (2)..(2): Xaa in position 2 is Ile, Leu or Val
  Variant (3)..(3): Xaa in position 3 is Leu or Val
  Variant (5)..(5): Xaa in position 5 is Ile or Leu
  Variant (7)..(7): Xaa in position 7 is Asp or Glu
  Variant (8)..(8): Xaa in position 8 is any amino acid
  Variant (9)..(9): Xaa in position 9 is Ala or Gly
  Variant (10)..(10): Xaa in position 10 is Ala or Val
  Variant (14)..(15): Xaa in position 14 to 15 is any amino acid
  Variant (16)..(16): Xaa in position 16 is any or no amino acid
  Variant (18)..(18): Xaa in position 18 is any or no amino acid
  Variant (21)..(21): Xaa in position 21 is Ala, Ser, Thr or Val
  Variant (22)..(22): Xaa in position 22 is any amino acid
  Variant (23)..(23): Xaa in position 23 is Asp, Gly or Asn
  Variant (24)..(24): Xaa in position 24 is Asp, Glu, Gln, Ser or Thr
  Variant (25)..(25): Xaa in position 25 is Phe or Tyr
KXXLXGXXXXGKSXXXLXRFXXXXX

SEQ ID NO: 5491 - protein, 8 aa, Artificial sequence
  protein pattern
  Variant (2)..(2): Xaa in position 2 is Ala or Val
  Variant (6)..(6): Xaa in position 6 is any amino acid
  Variant (8)..(8): Xaa in position 8 is Leu or Met
LXGNKXDX

SEQ ID NO: 5492 - DNA, 387 bp, Zea mays
  CDS (1)..(387)
atggcggcttcgaaggcggcagcggcggcggcaacaccggtgacgccgacagaggggacggtgatcgcgatccacagcctggaggagtggagcatccagatcgaggaggccaacagcgccaagaagctggtggtgattgacttcactgcaacatggtgtcctccgtgccgcgccatggctccaatttttgctgatatggccaagaagtccccaaatgttgttttcctgaaagttgatgtggatgaaatgaagaccattgctgagcaattcagcgtagaggccatgccaacattcctgttcatgagggagggcgacgtcaaggacagggtcgttggcgcagcaaaggaagagctagcaaggaagcttgaactacacatggcctcgtag

SEQ ID NO: 5493 - protein, 128 aa, Zea mays
MAASKAAAAAATPVTPTEGTVIAIHSLEEWSIQIEEANSAKKLVVIDFTATWCPPCRAMAPIFADMAKKSPNVVFLKVDVDEMKTIAEQFSVEAMPTFLFMREGDVKDRVVGAAKEELARKLELHMAS

SEQ ID NO: 5494 - DNA, 381 bp, Zea mays
  CDS (1)..(381)
atggcggccgaggagggtgccgtgatcgcgtgccacaccaaggacgagttcgacgcccgcatggccaaggccaaggagcagggcaagctggtggtcatcgacttcatggccccctggtgcagtgggtgccagatgatggccccggtgtacgcggactgcgccagcaagtacccttccgcggtcttcctcgaggtcgacgtggacgaactgctggaagtcgcgaagatctacggcgtccatgtgatgccgaccttctgcttcatcaggaacggcgagacgctcgagagctttgctaccgtcgacgaggacgagctccgggacgccgtcaggaagtacgccgccgctggcactacgacggctcctgcctcggcgtccgcctaa

SEQ ID NO: 5495 - protein, 126 aa, Zea mays
MAAEEGAVIACHTKDEFDARMAKAKEQGKLVVIDFMAPWCSGCQMMAPVYADCASKYPSAVFLEVDVDELLEVAKIYGVHVMPTFCFIRNGETLESFATVDEDELRDAVRKYAAAGTTTAPASASA

SEQ ID NO: 5496 - DNA, 405 bp, Oryza sativa
  CDS (1)..(405)
atgggctccttcttctcgacgatgttcacgccgccgcccgccgccgacgacggcggcgactcgcgcgtggtggccgtccactccacggccacctgggacgagcagtggggcgcccacaagagcaaccccaacaagctgatcgtgatcgacttctccgccacctggtgcgggccctgccgcttcatcgagccggccttcaaggacatggccggacgcttcgccgacgccgtcttcttcaagatcgatgtcgacgaactttcggaagtggcgaggcaatggaaagtggaggccatgccgacctttgtgttaatcaagggcgggaaggaggttagtcgcgtggttggtgctaagaaggatgaactggagaggaaagtcaacatgttcatttcatcctcctcatcctaa

SEQ ID NO: 5497 - protein, 134 aa, Oryza sativa
MGSFFSTMFTPPPAADDGGDSRVVAVHSTATWDEQWGAHKSNPNKLIVIDFSATWCGPCRFIEPAFKDMAGRFADAVFFKIDVDELSEVARQWKVEAMPTFVLIKGGKEVSRVVGAKKDELERKVNMFISSSSS

SEQ ID NO: 5498 - DNA, 369 bp, Oryza sativa
  CDS (1)..(369)
atggccgccgaggagggagtcgtgatcgcctgccacaacaaggacgagttcgacgcccagatgaccaaggccaaggaggccggcaaagtggtcataattgacttcactgcttcctggtgtggcccttgccgcttcatcgccccagtgttcgctgaatacgccaaaaagttccctggtgctgtcttcctgaaggttgatgttgatgagctgaaggaagttgctgaaaagtacaatgtcgaggcaatgccgaccttcctattcatcaaggatggtgctgaggctgacaaggtcgttggcgccaggaaggatgacctccagaacaccatcgtgaagcacgtcggtgccactgctgcatctgcttctgcctaa

SEQ ID NO: 5499 - protein, 122 aa, Oryza sativa
MAAEEGVVIACHNKDEFDAQMTKAKEAGKVVIIDFTASWCGPCRFIAPVFAEYAKKFPGAVFLKVDVDELKEVAEKYNVEAMPTFLFIKDGAEADKVVGARKDDLQNTIVKHVGATAASASA

SEQ ID NO: 5500 - DNA, 417 bp, Oryza sativa
  CDS (1)..(417)
atgggcggcgccttctcgacgtcgaagccgaagcccgccgccggcgaggagggcggcgagtccgccgtggtggccgtccactccaaggccaagtgggacgagctgtgggacgcccacaagaacaccacaaagctggtggtgatagacttctcggcgtcgtggtgtgggccgtgcaagatgatggagccggtgttcaaggagatggccggccgcttcaccgacgtcgccttcctcaaggtcgacgtcgacgagctcgcggaggtggcgcggacctggcgggtggaggcgatgccgacgttcgtgctggcgaggggcggcgaggaggtcggccgcatcgtcggcgccgacaaggacgagctcgagaagaccatcaacacgctcaggtcatcgtcgtcgtcgacggcgacgacgacgtga

SEQ ID NO: 5501 - protein, 138 aa, Oryza sativa
MGGAFSTSKPKPAAGEEGGESAVVAVHSKAKWDELWDAHKNTTKLVVIDFSASWCGPCKMMEPVFKEMAGRFTDVAFLKVDVDELAEVARTWRVEAMPTFVLARGGEEVGRIVGADKDELEKTINTLRSSSSSTATTT

SEQ ID NO: 5502 - DNA, 366 bp, Glycine max
  CDS (1)..(366)
atggccatggcatatgttgctagatcatcggagtcatctcaagtgcttaatttccattccactgctaaatggaatgctcactttgatgccttgaaacaaactaacaaactgatggtggttgatttcactgcttcatggtgtggaccttgcaaactcatggacccagttatccaagagtttgctacaaagtacagagatgtcgagtttgtgaagattgatgtggatgagttaatggaggtatctcaacattaccaagtgcagggaatgccaactttcatgctgattaagaaaggcaacgtggctgataaagtggtgggagtaagaaaggaggagctacaaaggttgattgaacaacaccgaaaataa

SEQ ID NO: 5503 - protein, 121 aa, Glycine max
MAMAYVARSSESSQVLNFHSTAKWNAHFDALKQTNKLMVVDFTASWCGPCKLMDPVIQEFATKYRDVEFVKIDVDELMEVSQHYQVQGMPTFMLIKKGNVADKVVGVRKEELQRLIEQHRK

SEQ ID NO: 5504 - DNA, 363 bp, Glycine max
  CDS (1)..(363)
atggctggctcatcggaagagggacaagtcattagctgccacaccgttgaagaatggaacgatcaactccagaagggcaacgaatccaagaaactcattgttgtggattttactgcttcttggtgtggaccatgccgtttcattgcaccattcttggctgagctggctaagaagttcacaagtgtcatattcctaaaggtggatgtggacgaattaaagagtgtttctcaagattgggctattgaggctatgcccacttttgtgtttgtgaaagagggaacgcttctggacaaagtggtgggagcaaagaaggatgagctgcagcagaaaatacagaaacatgtggcttcagctagtgcttaa

SEQ ID NO: 5505 - protein, 120 aa, Glycine max
MAGSSEEGQVISCHTVEEWNDQLQKGNESKKLIVVDFTASWCGPCRFIAPFLAELAKKFTSVIFLKVDVDELKSVSQDWAIEAMPTFVFVKEGTLLDKVVGAKKDELQQKIQKHVASASA

SEQ ID NO: 5506 - DNA, 402 bp, Glycine max
  CDS (1)..(402)
atgggcggtatactttctgggcttcttggcagcgacgcggcggcggcggcgtcttcgccggagagttctacttctagagtctcctccttccactcgtcgccgcgctggcagctctacttcaacgagatcaaagataccgataagctcgttgtgatagatttctcggcgtcgtggtgcggtccttgcaaattcatagagccagcgattcacgccatggccgacaagttcaacgacgttgacttcgtcaagatcgacgtcgacgaattacctgatgtggcgcaggagtttcaggtgcaggcgatgccgactttcgtgttgtggaagaaagggaaggaagtcgacaaggttgtgggcgcaaagaaggacgagctcgagaagaagattgagaaacatcgatcgtga

SEQ ID NO: 5507 - protein, 133 aa, Glycine max
MGGILSGLLGSDAAAAASSPESSTSRVSSFHSSPRWQLYFNEIKDTDKLVVIDFSASWCGPCKFIEPAIHAMADKFNDVDFVKIDVDELPDVAQEFQVQAMPTFVLWKKGKEVDKVVGAKKDELEKKIEKHRS

SEQ ID NO: 5508 - DNA, 354 bp, Glycine max
  CDS (1)..(354)
atggcggaagagggacaagtgatcggtgtccacagcgtagaggagtggaaggaacatctcaagaagggagaagagtccaagaaattgattgtggtggattttactgcttcttggtgcggtccatgccgtttcattgccccaattcttgcagagtttgctaaaaagttgccgaatgtcaccttcctcaaggtggatgtggatgaattggagactgtttccaaggagtggggaattgaggctatgccaaccttcctgttcttgaaagaaggcaagctggtggacaaggttgtgggtgccaagaaagaggagctgcaattgacaatagccaaacatgccgcaattgctgctgcttga

SEQ ID NO: 5509 - protein, 117 aa, Glycine max
MAEEGQVIGVHSVEEWKEHLKKGEESKKLIVVDFTASWCGPCRFIAPILAEFAKKLPNVTFLKVDVDELETVSKEWGIEAMPTFLFLKEGKLVDKVVGAKKEELQLTIAKHAAIAAA

SEQ ID NO: 5510 - DNA, 378 bp, Glycine max
  CDS (1)..(378)
atggaagccacaacagagcagaacaattcaaaggtggtgctgattgattctttgcaatcttgggagttccatgtcaaccaggcctccaatcagaatagtcctgttgttgttcacttcactgcttcatggtgcatgccatcggtggctatgactcctgtttttgaagaactggcttcaagctatccggatgttctgtttctcactgttgatgttgatgaagtcaaggaggtagccaccaaaatggatgtaaaggcaatgccaacatttttgtttctgaaggactgtgccgtggtggagaaggtggttggtgctaatccagaagagataaagaaaaggatagatgggcttgctgagtccactcgtgtctcactggcgtag

SEQ ID NO: 5511 - protein, 125 aa, Glycine max
MEATTEQNNSKVVLIDSLQSWEFHVNQASNQNSPVVVHFTASWCMPSVAMTPVFEELASSYPDVLFLTVDVDEVKEVATKMDVKAMPTFLFLKDCAVVEKVVGANPEEIKKRIDGLAESTRVSLA

SEQ ID NO: 5512 - DNA, 363 bp, Glycine max
  CDS (1)..(363)
atggcaggctcctcggaggagggacaagtcattagctgtcacaccgttgacgcatggaacgatcaactccagaagggcaaccaatccaagaaactcattgttgtggattttactgcttcttggtgtggaccatgccgtttcattgcaccattcttggctgagctggctaagaagttcacaagtgtcgtattcctaaaggtggatgtggacgaattaaagagtgtttctcaagactgggctattgaggctatgcccacttttgtgtttgtgaaagagggaacacttctaagcaaagtggtgggagcaaagaaggatgagctgcagcagacaatagagaaatatgtggcttcagctagtgcttaa

SEQ ID NO: 5513 - protein, 120 aa, Glycine max
MAGSSEEGQVISCHTVDAWNDQLQKGNQSKKLIVVDFTASWCGPCRFIAPFLAELAKKFTSVVFLKVDVDELKSVSQDWAIEAMPTFVFVKEGTLLSKVVGAKKDELQQTIEKYVASASA

SEQ ID NO: 5514 - DNA, 375 bp, Glycine max
  CDS (1)..(375)
atggaagcctcagagcagaacaattcaaaggtagtgttgattgattctttgcagtcatgggagttccacgtcaaccaagcctataatcagaatactcctgttgttgttcacttcactgcttcatggtgcatgccatcggtggctatgactcctgtttttgaagaactggcttcaagctatccggaagttctgtttctcactgttgatgttgatgaagtcaaggaggtagccaccaaaatggatgtaaaggcaatgccaacatttttgctgctgaaggacggtgctgcggtggacaaggtggttggtgccaatccagaagagataaagaaaaggatagatggggttgctgagtccactcgtgtctcactggcatag

SEQ ID NO: 5515 - protein, 124 aa, Glycine max
MEASEQNNSKVVLIDSLQSWEFHVNQAYNQNTPVVVHFTASWCMPSVAMTPVFEELASSYPEVLFLTVDVDEVKEVATKMDVKAMPTFLLLKDGAAVDKVVGANPEEIKKRIDGVAESTRVSLA

SEQ ID NO: 5516 - DNA, 396 bp, Glycine max
  CDS (1)..(396)
atgggcagtgcattttctgccctattcggccgcgggtccaccgtcgccgaagggtcgtcggagagtttacacgtgttgccgttccactcgtcggagcgctggcagctacacttcaacgaggtcaaagagacctctaagctcgttgtgatagatttcacggcgtcgtggtgcggcccttgcagattcatagctccggtatttaacgagatggccaagaagtttagcaacgctgagtttgtcaagatcgatgtcgacgaattacctgatgtggctaaggattttaaggtggaggcgatgccgacgtttgtgttgtgtaagaaaggaaaagaagttgatagggttgtgggcgccaggaaggacgagctccagaacaagattcagaaacattatcaataa

SEQ ID NO: 5517 - protein, 131 aa, Glycine max
MGSAFSALFGRGSTVAEGSSESLHVLPFHSSERWQLHFNEVKETSKLVVIDFTASWCGPCRFIAPVFNEMAKKFSNAEFVKIDVDELPDVAKDFKVEAMPTFVLCKKGKEVDRVVGARKDELQNKIQKHYQ

SEQ ID NO: 5518 - DNA, 354 bp, Glycine max
  CDS (1)..(354)
atggccgaagagggacaagtgattggtgtccacagcgtggaggagtgggaggaacatctcaagaagggacaagagtccaagaaattgattgtggtggattttactgcttcttggtgcggcccatgccgtttcattgccccaattcttgcggatatggctaaaaagttgccgaatgtcaccttcctcaaggtggatgtggatgaattggcgactgtttccagggagtgggaagttgaggctatgccaaccttcctattcttgaaagaaggcaagctggtgaagaagcttgtgggtgccaggaaagaggagctgcaagacataatagtcaaacttgctgcaattgatgctgcctga

SEQ ID NO: 5519 - protein, 117 aa, Glycine max
MAEEGQVIGVHSVEEWEEHLKKGQESKKLIVVDFTASWCGPCRFIAPILADMAKKLPNVTFLKVDVDELATVSREWEVEAMPTFLFLKEGKLVKKLVGARKEELQDIIVKLAAIDAA

SEQ ID NO: 5520 - DNA, 372 bp, Glycine max
  CDS (1)..(372)
atggctgaagtggaagagggacaggtcatcggcgtccacaccgttgatgagtggaagctgcaactccagaatgcaaaagactccaaaaaactgattgtggtggattttactgcttcctggtgtggtccatgccgttttatggccccagttcttgcagagattgcaaagaaaactcctgaattgatcttcctcaaagtggatgtggatgaagtgaggcctgttgctgaggaatattccattgaggccatgccaaccttcctcttcttgaaagatggcgagatcgtggacaaggtggttggtgctagtaaggatgaccttcaagccaccatagccaagcatgcatctgctgttgctgctgcttcttcttcttga

SEQ ID NO: 5521 - protein, 123 aa, Glycine max
MAEVEEGQVIGVHTVDEWKLQLQNAKDSKKLIVVDFTASWCGPCRFMAPVLAEIAKKTPELIFLKVDVDEVRPVAEEYSIEAMPTFLFLKDGEIVDKVVGASKDDLQATIAKHASAVAAASSS

SEQ ID NO: 5522 - DNA, 375 bp, Glycine max
  CDS (1)..(375)
atgggagccaacttatccaacgtggagaatgctcataaatcatccggccaccttctcaccttccattccaccgctaaatggaagactcactttgatgcctccaaacaaactaacaagttgatggtgatcgatttcacggctacatggtgtggaccttgcaaatccatggacccaattatccaagagtatgctgcaaagtacaccaacgtggaattcatcaaaattgatgtggatgaattgatggaggtctctcaagaattcaaggtgcaggcaatgccaacattcatattgataaagaaaggcaaagttgttgataaggtggtgggtgcaaaaaaggaagagctgcaaaagcttattgagaaacatctaaattaa

SEQ ID NO: 5523 - protein, 124 aa, Glycine max
MGANLSNVENAHKSSGHLLTFHSTAKWKTHFDASKQTNKLMVIDFTATWCGPCKSMDPIIQEYAAKYTNVEFIKIDVDELMEVSQEFKVQAMPTFILIKKGKVVDKVVGAKKEELQKLIEKHLN

SEQ ID NO: 5524 - DNA, 360 bp, Glycine max
  CDS (1)..(360)
atggctgaagagggtcaggttgtcggcgtccacaccgttgatgcgtggaaccagcaactgcagaatggaaaagactcccaaaaattgattgtggtggattttactgcttcctggtgtggtccatgccgttttattgccccagttctggcagagattgctaggcatactcctcaagtgatcttcctcaaggtggatgtggatgaagtgaggcctgttgctgaggaatattccattgaggccatgccaaccttcctcttcttgaaagatggcaagatcgtggataaggttgttggtgctaagaaggaggagctgcaactcaccatagccaagcatgtatctgctgctgctgcttcttcttga

SEQ ID NO: 5525 - protein, 119 aa, Glycine max
MAEEGQVVGVHTVDAWNQQLQNGKDSQKLIVVDFTASWCGPCRFIAPVLAEIARHTPQVIFLKVDVDEVRPVAEEYSIEAMPTFLFLKDGKIVDKVVGAKKEELQLTIAKHVSAAAASS

SEQ ID NO: 5526 - DNA, 381 bp, Sorghum bicolor
  CDS (1)..(381)
atggcgactacggaggcggcggcggcgacaccggtggcgccggcagaggggtcggtgatcgcgatccacagcctcgacgagtggagcatccagatcgaggaggccaacagcgccaagaagctggtggtgattgacttcactgctacttggtgtccaccatgccgcatgatagctccagtttttgctgaactggccaagaagcacccaaatgttgttttcctgaaagttgatgttgatgaaatgaagaccattgctgagcaattcagtgttgaggccatgccaacattcctgttcatgagggagggcgacgtcaaggacagggttgtcggcgcagcaaaggaagagctagcaaataagcttcaactgcagatggcccagtag

SEQ ID NO: 5527 - protein, 126 aa, Sorghum bicolor
MATTEAAAATPVAPAEGSVIAIHSLDEWSIQIEEANSAKKLVVIDFTATWCPPCRMIAPVFAELAKKHPNVVFLKVDVDEMKTIAEQFSVEAMPTFLFMREGDVKDRVVGAAKEELANKLQLQMAQ

SEQ ID NO: 5528 - DNA, 417 bp, Zea mays
  CDS (43)..(417)
atggggaagcggtggatcccactggaggccaacccggatgtcatgaaccagttcatatggggtctgggagtctccgagagggctgtgcagttctgcgacgtctacggcctggaggagtggagcatccagatcgaggaggccaacagcgccaagaagctcgtggtgattgacttcactgcaacatggtgtcctccgtgccgcgccatggctccaatttttgctgatatggccaagaagtccccaaatgttgttttcctgaaagttgatgtcgatgaaatgaagaccattgctgagcaattcagcgtagaggccatgccaacattcctgttcatgagggagggcgacgtcaaggacagggtcgttggcgcagcaaaggaagagctagcaaggaagcttgaactacacatggcctcgtag

SEQ ID NO: 5529 - protein, 124 aa, Zea mays
MNQFIWGLGVSERAVQFCDVYGLEEWSIQIEEANSAKKLVVIDFTATWCPPCRAMAPIFADMAKKSPNVVFLKVDVDEMKTIAEQFSVEAMPTFLFMREGDVKDRVVGAAKEELARKLELHMAS

SEQ ID NO: 5530 - DNA, 369 bp, HORDEUM VULGARE VAR. DISTICHUM
  CDS (1)..(369)
atggcggcgtcggcaacggcggcggcagtggcggcggaggtgatctcggtccacagcctggagcagtggaccatgcagatcgaggaggccaacaccgccaagaagctggtggtgattgacttcactgcatcatggtgcggaccatgccgcatcatggctccagttttcgctgatctcgccaagaagttcccaaatgctgttttcctcaaggtcgacgtggatgaactgaagcccattgctgagcaattcagtgtcgaggccatgccaacgttcctgttcatgaaggaaggagacgtcaaggacagggttgtcggagctatcaaggaggaactgaccgccaaggttgggcttcacgcggcggcccagtaa

SEQ ID NO: 5531 - protein, 122 aa, HORDEUM VULGARE VAR. DISTICHUM
MAASATAAAVAAEVISVHSLEQWTMQIEEANTAKKLVVIDFTASWCGPCRIMAPVFADLAKKFPNAVFLKVDVDELKPIAEQFSVEAMPTFLFMKEGDVKDRVVGAIKEELTAKVGLHAAAQ

SEQ ID NO: 5532 - DNA, 366 bp, Oryza sativa Japonica Group
  CDS (1)..(366)
atggcggcggcctcagcggcggcgcaggcggagggaacggtgatcgcgatccacagcctcgacgagtggaccatccagatcgaggaggccaacagcgccaagaagctggttgtgattgacttcactgcatcatggtgcggaccatgccgcatcattgctccagtttttgccgatctagcaaagaagcacacaaatgctgtttttctgaaggttgacgtcgatgaactgaagcctattgctgagcaattcagtgttgaggctatgccaacattcctgtttatgaaggagggagatgttaaagacagggttgtcggtgctatgaaggatgaactggcgagcaagcttgagctacatatggccatgtag

SEQ ID NO: 5533 - protein, 121 aa, Oryza sativa Japonica Group
MAAASAAAQAEGTVIAIHSLDEWTIQIEEANSAKKLVVIDFTASWCGPCRIIAPVFADLAKKHTNAVFLKVDVDELKPIAEQFSVEAMPTFLFMKEGDVKDRVVGAMKDELASKLELHMAM

SEQ ID NO: 5534 - DNA, 387 bp, Zea mays
  CDS (1)..(387)
atggcggcttcggaggcggcggcggcggcggcgacaccggtggcgccgacagaggggacggtgatcgcgatccacagcctggaggagtggagcatccagatcgaggaggccaacagcgccaagaagctggtggtgattgacttcactgcaacatggtgtcctccgtgccgcgccatggctccaatttttgctgatatggccaagaagtccccaaatgttgttttcctgaaagttgatgtcgatgaaatgaagaccattgctgagcaattcagcgtagaggccatgccaacattcctgttcatgagggagggcgacgtcaaggacagggtcgttggcgcagcaaaggaagagctagcaaggaagcttgaactacacatggcctcgtag

SEQ ID NO: 5535 - protein, 128 aa, Zea mays
MAASEAAAAAATPVAPTEGTVIAIHSLEEWSIQIEEANSAKKLVVIDFTATWCPPCRAMAPIFADMAKKSPNVVFLKVDVDEMKTIAEQFSVEAMPTFLFMREGDVKDRVVGAAKEELARKLELHMAS

SEQ ID NO: 5536 - DNA, 369 bp, Zea mays
  CDS (1)..(369)
atggcgtccgagcagggagtcgtgatcgcgtgccacagcaaggctgagtttgacgcccacatgaccaaggcccaggaagccggcaagctggtggtcatcgacttcactgccgcctggtgcggtccatgccgcgccatcgccccactgttcgtcgaacacgccaagaagttcactcaggtcgtgttcctgaaggtggacgtggacgaagtgaaggaagtcaccgcggcctacgaggtcgaggcgatgccgaccttccacttcgtcaagaacggcaagacggtcgcgaccatcgtgggtgccaagaaggacgagctcctggccctgatcgagaagcatgccgcgcctgcgcctgcgtctgcgtctgcctaa

SEQ ID NO: 5537 - protein, 122 aa, Zea mays
MASEQGVVIACHSKAEFDAHMTKAQEAGKLVVIDFTAAWCGPCRAIAPLFVEHAKKFTQVVFLKVDVDEVKEVTAAYEVEAMPTFHFVKNGKTVATIVGAKKDELLALIEKHAAPAPASASA

SEQ ID NO: 5538 - DNA, 369 bp, Zea mays
  CDS (1)..(369)
atggcgtccgaggagggagtcgtgatcgcctgccacaccaaggccgacttcgacgcccacatggccaaggccaaggaggccggcaagctggtgatcattgacttcacggcctcctggtgcggcccctgccgcttcatcgcgccactgttcgtcgagcacgccaagaagttcacccaggctgtgttcctgaaggtggacgtggacgagctgaaggaagttgccgcggcctacgatgtcgaggcgatgccgaccttccacttcgtcaagaacggggtgacggtggagaccgtcgtcggtgccaggaaggagaacctcctggcccagatcgagaagcactgcgccgcggccgtgcctgctgcgtctgcgtag

SEQ ID NO: 5539 - protein, 122 aa, Zea mays
MASEEGVVIACHTKADFDAHMAKAKEAGKLVIIDFTASWCGPCRFIAPLFVEHAKKFTQAVFLKVDVDELKEVAAAYDVEAMPTFHFVKNGVTVETVVGARKENLLAQIEKHCAAAVPAASA

SEQ ID NO: 5540 - DNA, 360 bp, Arabidopsis thaliana
  CDS (1)..(360)
atggcggcagaagagggtcaagtgattggttgtcacacgaacgatgtatggactgtgcaacttgataaagccaaagaatccaacaagctgattgtgattgatttcactgcttcatggtgtccaccatgccgcatgattgctccaattttcaacgatttggccaagaagttcatgtcaagtgccatcttcttcaaggtggatgttgatgaacttcagagtgttgctaaagagtttggtgtggaggcaatgccaacctttgtgttcattaaagccggcgaagttgtggataagctcgttggtgcgaataaagaagatcttcaggcgaaaatagtgaagcatactggtgttacaactgcgtaa

SEQ ID NO: 5541 - protein, 119 aa, Arabidopsis thaliana
MAAEEGQVIGCHTNDVWTVQLDKAKESNKLIVIDFTASWCPPCRMIAPIFNDLAKKFMSSAIFFKVDVDELQSVAKEFGVEAMPTFVFIKAGEVVDKLVGANKEDLQAKIVKHTGVTTA

SEQ ID NO: 5542 - DNA, 357 bp, Arabidopsis thaliana
  CDS (1)..(357)
atggccggtgaaggagaagtgattgcttgccataccctcgaagtttggaacgagaaggtcaaagacgccaatgaatccaagaaactgattgtgatagacttcacagcatcatggtgtccaccttgccgtttcattgcaccagtgtttgcagagatggctaagaagttcactaatgttgtcttcttcaagatcgatgttgatgaattgcaagctgttgctcaggaattcaaagttgaggcaatgcctacttttgttttcatgaaagaaggcaacatcattgatcgtgttgtcggtgctgcgaaagatgagatcaatgagaagctgatgaagcatggtggtcttgtagcttctgcttga

SEQ ID NO: 5543 - protein, 118 aa, Arabidopsis thaliana
MAGEGEVIACHTLEVWNEKVKDANESKKLIVIDFTASWCPPCRFIAPVFAEMAKKFTNVVFFKIDVDELQAVAQEFKVEAMPTFVFMKEGNIIDRVVGAAKDEINEKLMKHGGLVASA

SEQ ID NO: 5544 - DNA, 345 bp, Arabidopsis thaliana
  CDS (1)..(345)
atggcttcggaagaaggacaagtgatcgcctgccacaccgttgagacatggaacgagcagcttcagaaggctaatgaatccaaaactcttgtggtggttgatttcacggcttcttggtgtggaccatgtcgtttcatcgctccattctttgctgatttggctaagaaacttcctaacgtgcttttcctcaaggttgatactgatgaattgaagtcggtggcaagtgattgggcgatacaggcgatgccaaccttcatgtttttgaaggaagggaagattttggacaaagttgttggagccaagaaagatgagcttcagtctaccattgccaaacacttggcttaa

SEQ ID NO: 5545 - protein, 114 aa, Arabidopsis thaliana
MASEEGQVIACHTVETWNEQLQKANESKTLVVVDFTASWCGPCRFIAPFFADLAKKLPNVLFLKVDTDELKSVASDWAIQAMPTFMFLKEGKILDKVVGAKKDELQSTIAKHLA

SEQ ID NO: 5546 - DNA, 357 bp, Arabidopsis thaliana
  CDS (1)..(357)
atggccgcagaaggagaagttatcgcttgccacaccgttgaagattggaccgagaagctcaaagccgccaacgaatccaagaaactgattgtgatagacttcactgcaacatggtgcccaccttgccgtttcattgcacccgtctttgctgacttagccaagaagcacctcgacgtagtcttcttcaaggtcgatgttgacgaattgaacactgttgctgaggagtttaaagttcaggcaatgccaacgtttatcttcatgaaagaaggagagatcaaggagactgtggttggtgctgctaaagaagaaatcattgccaatctcgagaagcacaagacagttgttgctgctgcttga

SEQ ID NO: 5547 - protein, 118 aa, Arabidopsis thaliana
MAAEGEVIACHTVEDWTEKLKAANESKKLIVIDFTATWCPPCRFIAPVFADLAKKHLDVVFFKVDVDELNTVAEEFKVQAMPTFIFMKEGEIKETVVGAAKEEIIANLEKHKTVVAAA

SEQ ID NO: 5548 - DNA, 312 bp, Ashbya gossypii ATCC 10895
  CDS (1)..(312)
atggtgtccgaaatcaagtccctttctgaatttgagtccgccgtgggctccgacaagctcgtggtcgtggacttctacgccacgtggtgcggtccctgcaagatgatcgcgcccatgattgagaagtttgccacccagttccaggaggcgtcattctacaaggtggacgtggacgcggccgcggaggtggcgcacaagtaccagatcacgtcgatgcccacgattctatttttcaagaacgggcaggcggtggacaaggtggtcggcgcggacgtgcagtcgatcagaaccaagattgcgcagcacctgtag

SEQ ID NO: 5549 - protein, 103 aa, Ashbya gossypii ATCC 10895
MVSEIKSLSEFESAVGSDKLVVVDFYATWCGPCKMIAPMIEKFATQFQEASFYKVDVDAAAEVAHKYQITSMPTILFFKNGQAVDKVVGADVQSIRTKIAQHL

SEQ ID NO: 5550 - DNA, 417 bp, Neosartorya fischeri NRRL 181
  CDS (1)..(417)
atggactacacccgcattatcctcgctctcgctgtctacatcgcaatccgccttatctacaaccgcttcttctccagccccgccgcaaccatgtctcacggcaaagttatagctgtcgataatcccgtcatctacaaagcgcttacctcgtccggccctgtcgtcgtcgatttcttcgccacttggtgtgggccttgcgtggccatcgcgcctaaattgggggagctaagcgagacgtaccccaatgtgcgattcatccaggtcgatgtcgacaaggtgcgctctgtggcgcaggagatgaatatccgggcgatgccgacgtttgtgctgtataaggatggtcagcctctggagaagagggttgttggtgggaatgtgagggagttggaggagatgattaagagtatttctgcttag

SEQ ID NO: 5551 - protein, 138 aa, Neosartorya fischeri NRRL 181
MDYTRIILALAVYIAIRLIYNRFFSSPAATMSHGKVIAVDNPVIYKALTSSGPVVVDFFATWCGPCVAIAPKLGELSETYPNVRFIQVDVDKVRSVAQEMNIRAMPTFVLYKDGQPLEKRVVGGNVRELEEMIKSISA

SEQ ID NO: 5552 - DNA, 390 bp, Pichia stipitis CBS 6054
  CDS (1)..(390): transl_table=12
atgccttatactcccgactctaacgtcaagcatttaaccagcttggaagaattaaacgacttgatttccattagagacaagcttacggtagtcgatttccatgctccttggtgtggtccctgcagagcctttgaacctgtgtttgaagagatagctgaaaaagtcccagaaattcaattcgctaaggtcaacatcgaagtcgccaaggacattgccttgagatacaaggttgcctctttacccacatttatctacttcaagaatggcaagaaggtagacatcctggttggagttggaggtaatagattgttccatttgatcaagttgaacacagggttagatattagtaccagaattgtcaagaaaatggacagaaaccagattgaatga

SEQ ID NO: 5553 - protein, 129 aa, Pichia stipitis CBS 6054
MPYTPDSNVKHLTSLEELNDLISIRDKLTVVDFHAPWCGPCRAFEPVFEEIAEKVPEIQFAKVNIEVAKDIALRYKVASLPTFIYFKNGKKVDISVGVGGNRLFHLIKLNTGLDISTRIVKKMDRNQIE

SEQ ID NO: 5554 - DNA, 396 bp, Ostreococcus lucimarinus CCE9901
  CDS (1)..(396)
atgcgcgcgagcgcgaagagcgcgcgacgcgcgacgacgaaacccgcgcgggcggggacgattcgctgcggtgcggtgcaaaagatgaacgccgaggagctggagatcgcgatggcgaaccgtgatcgaccgatggtgattgatttctacgccacgtggtgcgggccgtgcgtgctgatgtcgagcgagctggagaaggtgcaggaacagctcggggacaaggtgcagtgcgtgaaggtggacacggacgaggagagcgatttggcgacgcagttgcagattcaaggcttgcccacgctggtgttcgtgagcacggactcgtccaaacccgcgctgcgcacggaagggatgctgccggcggagacggtgatttcagtcatcgaaaatgaactttaa

SEQ ID NO: 5555 - protein, 131 aa, Ostreococcus lucimarinus CCE9901
MRASAKSARRATTKPARAGTIRCGAVQKMNAEELEIAMANRDRPMVIDFYATWCGPCVLMSSELEKVQEQLGDKVQCVKVDTDEESDLATQLQIQGLPTLVFVSTDSSKPALRTEGMLPAETVISVIENEL

SEQ ID NO: 5556 - DNA, 342 bp, Chlamydomonas reinhardtii
  CDS (1)..(342)
atgggcggttctgttattgtgatcgactccaaggcggcttgggacgctcagctggccaagggcaaggaggagcacaagccgattgttgtcgacttcactgctacgtggtgcggtccttgcaagatgattgcgccgctgtttgagacgctgagcaacgactatgctggcaaggtcatcttcctgaaggtcgatgttgacgccgtcgcggctgttgccgaggctgccggcatcaccgccatgcccaccttccatgtgtacaaggatggcgtgaaggcggacgacctagtgggcgccagccaggacaagctcaaggccctggtcgccaagcacgccgccgcgtaa

SEQ ID NO: 5557 - protein, 113 aa, Chlamydomonas reinhardtii
MGGSVIVIDSKAAWDAQLAKGKEEHKPIVVDFTATWCGPCKMIAPLFETLSNDYAGKVIFLKVDVDAVAAVAEAAGITAMPTFHVYKDGVKADDLVGASQDKLKALVAKHAAA

SEQ ID NO: 5558 - DNA, 414 bp, Physcomitrella patens subsp. patens
  CDS (1)..(414)
atggctgcagagaaggataaggtattgacgggtgtagctgagacgctggcttcccagagcttgggcgattcttctttacctgtgaactttcatggtaacctggtaagtgcaaatagcgacgaggagcttctgagtctcctccaacgagctaaaatctccaagcaacctgccgtagtcaactatggtgccccatggtgtcatgtatgtcagcatatgctgcctacgttttgcaacttgagcaacgagtatgcttcagcattgtttatctacgcagatgtggacaagtgttatgaaactacaagagatgtgcgctacaccccaaccttccgcttctatcgcgatggtgagaaggtagatgacttctatggtgctggtccgcagagactacgagaccgaatctggctgcacacttga

SEQ ID NO: 5559 - protein, 137 aa, Physcomitrella patens subsp. patens
MAAEKDKVLTGVAETLASQSLGDSSLPVNFHGNLVSANSDEELLSLLQRAKISKQPAVVNYGAPWCHVCQHMLPTFCNLSNEYASALFIYADVDKCYETTRDVRYTPTFRFYRDGEKVDDFYGAGPQRLRDRIWLHT

SEQ ID NO: 5560 - DNA, 354 bp, Physcomitrella patens subsp. patens
  CDS (1)..(354)
atggatcatggaaaggttcatgttattaacaactcggcagcctgggacgccaagttggcagaggccacgagcactggaaagatagttctcgtcgattttaccgccacttggtgcggaccttgccggctgatggcacctattttcgttgaacttagcaagaagtatgaaaacatcatatttttgaaggtggacgtcgacgaagttaaggacgtgacatctcagtgggaagtgcgcgctatgcccacattcatatttatcaaagacggaaagagtattcacaaggtagttggtgcaaacaaggatgagctcgagaagaagtgtcaacaattcgctagcctccccagcacagtctga

SEQ ID NO: 5561 - protein, 117 aa, Physcomitrella patens subsp. patens
MDHGKVHVINNSAAWDAKLAEATSTGKIVLVDFTATWCGPCRLMAPIFVELSKKYENIIFLKVDVDEVKDVTSQWEVRAMPTFIFIKDGKSIHKVVGANKDELEKKCQQFASLPSTV

SEQ ID NO: 5562 - DNA, 330 bp, Aspergillus oryzae RIB40
  CDS (1)..(330)
atgcctgttacagctatcgaatcataccaacagttccaggagcttatcaccggtgataagcctgttttaattgatttctgggcaacatggtgtggaccttgcagagcaatctcccctgtttttgaggaaatgtcaaacgccgagggctttgataatgtcgggttttataaagttgatgtcgatgcacaagaacaaattgcccaagaagttggtattagagcaatgcctactttcatgctctttcgcaatggtgccaaagttggcgatctggttggagctaatagccaaggattgacagagcttgttaaaaaggcaactgctctcccctaa

SEQ ID NO: 5563 - protein, 109 aa, Aspergillus oryzae RIB40
MPVTAIESYQQFQELITGDKPVLIDFWATWCGPCRAISPVFEEMSNAEGFDNVGFYKVDVDAQEQIAQEVGIRAMPTFMLFRNGAKVGDLVGANSQGLTELVKKATALP

SEQ ID NO: 5564 - DNA, 318 bp, Coprinopsis cinerea okayama7#130
  CDS (1)..(318)
atgggcgtcactcctatcaactccctcgaggaattcaagaccatcattaacggcgacaagcccgtcattatcgacttctgggctacttggtgtggaccctgccgaatcatctctcccatcttcgagaagttctcggacaccaccgacaaagtcggcttctacaaggtcgacgtcgacgcccaacaagaaatttcgcaagaagttggcgttcgagctatgcccacgttcaccgtcttccagaatggcaacaaagtagatgagctcgtcggtgctgtacccgggaagctcgaggagctcgtcaagaagttctctgcttaa

SEQ ID NO: 5565 - protein, 105 aa, Coprinopsis cinerea okayama7#130
MGVTPINSLEEFKTIINGDKPVIIDFWATWCGPCRIISPIFEKFSDTTDKVGFYKVDVDAQQEISQEVGVRAMPTFTVFQNGNKVDELVGAVPGKLEELVKKFSA

SEQ ID NO: 5566 - DNA, 354 bp, Laccaria bicolor S238N-H82
  CDS (1)..(354)
atgcccgtcaacgcgatcacgtccctccaagaattcaacgacatcatcagcagcgggaagccagttgtcatcgacttctgggcagcgtggtgtggaccatgcagagcgatttcacccgtcttcgaaaagttttcaaaccttgaagagaacacgggggtggagttctacaaggtcgatgttgatagccagagggagatctctcaagaagtcgggattaaagctatgccaacatttttgctgttccaaggcggaaacaaagtcggtgatgttgttggtgccaatccccaagcaatcgaggccctcgttcaaaaaggcttcgccatgtatatgtactttcttgtaacggaccattga

SEQ ID NO: 5567 - protein, 117 aa, Laccaria bicolor S238N-H82
MPVNAITSLQEFNDIISSGKPVVIDFWAAWCGPCRAISPVFEKFSNLEENTGVEFYKVDVDSQREISQEVGIKAMPTFLLFQGGNKVGDVVGANPQAIEALVQKGFAMYMYFLVTDH

SEQ ID NO: 5568 - DNA, 348 bp, Vitis vinifera
  CDS (1)..(348)
atggcagaagaggggcaagtgatcggtgtccactctgtggaggcatggaacgatcatctccagaagtgcaacgagtccaacaagctgattgttgttgatttcactgcttcatggtgtggaccatgccgcttcattacaccattcctggttgagctggctaagaaaatacctactgtcacttttcttaaggtggatgtggatgaattgaagtctgttgctactgattgggctgtggaggcaatgccgactttcatgtttctgaaacaaggcaagattgtggataaggtggtgggagccaacaaagatagtctgcagcagactattgctaagcacatggctactgcctaa

SEQ ID NO: 5569 - protein, 115 aa, Vitis vinifera
MAEEGQVIGVHSVEAWNDHLQKCNESNKLIVVDFTASWCGPCRFITPFLVELAKKIPTVTFLKVDVDELKSVATDWAVEAMPTFMFLKQGKIVDKVVGANKDSLQQTIAKHMATA

SEQ ID NO: 5570 - DNA, 345 bp, Vitis vinifera
  CDS (1)..(345)
atggcggaagagggacaagttgtcggttgccacagtgtggaatcgtggaaggagcaattccagcatggaatagagtccaagaaactggtggtggtggatttcactgcttcatggtgtgggccatgtcgtgtcattagcccatttctggcagagcttgccaagaagatgcctaatgtcatatttctcaaggtggatgtggatgaattggagactgttgctaaggagtgggaagtggaggccatgccaacctttctgttcctgaaagaaggaaacgtagtggacaaggttgtgggtgcaaaaagagaagaactggtgcagaagacagagaagcatgcaactgcttga

SEQ ID NO: 5571 - protein, 114 aa, Vitis vinifera
MAEEGQVVGCHSVESWKEQFQHGIESKKLVVVDFTASWCGPCRVISPFLAELAKKMPNVIFLKVDVDELETVAKEWEVEAMPTFLFLKEGNVVDKVVGAKREELVQKTEKHATA

SEQ ID NO: 5572 - DNA, 330 bp, Aspergillus flavus NRRL3357
  CDS (1)..(330)
atgcctgttacagctatcgaatcataccaacagttccaggagcttatcaccggtgataagcctgttttaattgatttctgggcaacatggtgtggaccttgcagagcaatctcccctgtttttgaggaaatgtcaaacgccgagggcttggataatgtcgggttttataaagttgatgtcgatgcacaagaacaaattgcccaagaagttggtattagagcaatgcctactttcatgctctttcgcaatggtgccaaagttggcgatctggttggagctaatagccaaggattgacagagcttgttaaaaaggcaactgctctcccctaa

SEQ ID NO: 5573 - protein, 109 aa, Aspergillus flavus NRRL3357
MPVTAIESYQQFQELITGDKPVLIDFWATWCGPCRAISPVFEEMSNAEGLDNVGFYKVDVDAQEQIAQEVGIRAMPTFMLFRNGAKVGDLVGANSQGLTELVKKATALP

SEQ ID NO: 5574 - DNA, 324 bp, Magnaporthe grisea 70-15
  CDS (1)..(324)
atgactgtccacaaccttaccaacgcccaggatttcaaggacgccctcaagtcccacaagttcgtcctcgtcgactttttcgccacatggtgtggaccttgcagggccatcgcccccaagatcgccgagtggtccgatgcgttccccaacatccactacgtcaaggtcgacgtcgacgaggtccctgatgtcgcccaggagtacaacgtccgcgccatgccgacattcctgctcttcaaggatggagagaaggtggacgaggttgttggcgccaacccacccaagctgcaggccctcatcagcgcaaaccacccgtcgtcatag

SEQ ID NO: 5575 - protein, 107 aa, Magnaporthe grisea 70-15
MTVHNLTNAQDFKDALKSHKFVLVDFFATWCGPCRAIAPKIAEWSDAFPNIHYVKVDVDEVPDVAQEYNVRAMPTFLLFKDGEKVDEVVGANPPKLQALISANHPSS

SEQ ID NO: 5576 - DNA, 315 bp, Cryptococcus neoformans var. neoformans JEC21
  CDS (1)..(315)
atggtcaaggctattgaatcttacgacgagtggaagactctcacttctggctccgatgtcgtcgtcgtcgactactgggcgacttggtgcggtccttgcaagatgatctctccccactttgccaagcttgagggcaagtttcccaatgtcaagtttgccaaggtcgatgttgaggagcaagaggacattgccaaggaggctcaaatcaaggccatgcctacttttgtcgcctacaaagacggcaaggtgattgagactgttactggtgctgtccccgcaaagatcaatgctttgctcgacaaggtcgcggcttaa

SEQ ID NO: 5577 - protein, 104 aa, Cryptococcus neoformans var. neoformans JEC21
MVKAIESYDEWKTLTSGSDVVVVDYWATWCGPCKMISPHFAKLEGKFPNVKFAKVDVEEQEDIAKEAQIKAMPTFVAYKDGKVIETVTGAVPAKINALLDKVAA

SEQ ID NO: 5578 - DNA, 351 bp, Aspergillus fumigatus Af293
  CDS (1)..(351)
atgcctgttaccgagatcacctccgctaaactttctacacacggcagattcgaacagttcaaagaactcactgacggtgacaagcctgttgtaatcgacttttgggcaacatggtgtgggccgtgcaaggctatttcgccccttttcgagaagatgtcggataatcccgaatatggcaatgtcgggttctacaaagttgatgtcgatgagcaggagcaggtctctcaagaggtcggcatccgtgcaatgccaacctttgttctctttaagaacgggtataagattggtgaagctgtgggagccgctccaccacgtctggaaggacttctcaacactgcacgctctctatag

SEQ ID NO: 5579 - protein, 116 aa, Aspergillus fumigatus Af293
MPVTEITSAKLSTHGRFEQFKELTDGDKPVVIDFWATWCGPCKAISPLFEKMSDNPEYGNVGFYKVDVDEQEQVSQEVGIRAMPTFVLFKNGYKIGEAVGAAPPRLEGLLNTARSL

SEQ ID NO: 5580 - DNA, 318 bp, Clostridium leptum DSM 753
  CDS (1)..(318): transl_table=11
atggcagttattgagcttacgaaacaaaactttcagtcggaggttgcagaaagcaaggaaaaggttttaatcgatttttgggcgtcctggtgcgggccatgcagaatggtatcaccaatcgtagatgaaatcgcggaggaatctcctgcgggcgttaaggtatgcaaggtgaatgtggatgagcagccggagcttgcacagcagtttcaggtgatgagtattcccactttgctggtcatgaaggatggcaagccggtagccagctctgtaggcgccagacccaagcagtttatcgtgaaaatgatcgaggaagcttaa

SEQ ID NO: 5581 - protein, 105 aa, Clostridium leptum DSM 753
MAVIELTKQNFQSEVAESKEKVLIDFWASWCGPCRMVSPIVDEIAEESPAGVKVCKVNVDEQPELAQQFQVMSIPTLLVMKDGKPVASSVGARPKQFIVKMIEEA

SEQ ID NO: 5582 - DNA, 327 bp, Verrucomicrobium spinosum DSM 4136
  CDS (1)..(327): transl_table=11
atggctagcgaaaccctggtcaccttgaccgaagaaaacttctccgctgaagtgcaaaactccacggtgcccgtgatcgtggacttctgggcggaatggtgcggtccgtgccgcatgctcaccccgattcttgaagacctggccaaggacaaggcaggcgcagtgaagatcggcaaggtgaacgtggacgacaaccagaacctcgccgcgcagttcaacgtgcgctccatccccatgctggtgtttttcaaggatggccaggccaaggatgtcgtcgtgggcgttcagtccaaggatgccctcagccgcaagctggaagctctctga

SEQ ID NO: 5583 - protein, 108 aa, Verrucomicrobium spinosum DSM 4136
MASETLVTLTEENFSAEVQNSTVPVIVDFWAEWCGPCRMLTPILEDLAKDKAGAVKIGKVNVDDNQNLAAQFNVRSIPMLVFFKDGQAKDVVVGVQSKDALSRKLEAL

SEQ ID NO: 5584 - DNA, 363 bp, Medicago truncatula
  CDS (1)..(363)
atggcagctgaagaaggacaggtgatcggtgttcataccgttgaacagtggaaggaggagatccagaagggaaatgactccaaaaaactgattgtggtggattttactgcttcatggtgtggtccatgccgttttattgctccaattctagctgagattgctaagaagatacctgaagtcatcttcctcaaggtggatattgatgaagtaaagagtgttgctaaggaatggtctgttgaggctatgccaacattcttgttcttgaaagaaggtaaggaagtggataaggtagttggtgctaggaaggaagagctggaaaatgcaatcaccaagcataaggatgcaactgttgctactgcttga

SEQ ID NO: 5585 - protein, 120 aa, Medicago truncatula
MAAEEGQVIGVHTVEQWKEEIQKGNDSKKLIVVDFTASWCGPCRFIAPILAEIAKKIPEVIFLKVDIDEVKSVAKEWSVEAMPTFLFLKEGKEVDKVVGARKEELENAITKHKDATVATA

SEQ ID NO: 5586 - DNA, 360 bp, Citrus hybrid cultivar
  CDS (1)..(360)
atggcagcagcagaagagggacaagtcatcgggtgccacaccgttgaggcctggaacgagcagctccagaagagcaatgaaaccaaacagctggttgttgttgatttcactgcttcgtggtgcggaccatgccgtttcattgctcctttcttggcagagctggccaagaaactgcctaatgtcctgtttctgaaggttgatgtggatgaactgaagagtgttgccactgactgggcagtggaggccatgccaactttcatgttcctgaaagaggggaagattgtggacaaggtggttggatcaaagaaagaggaactgcagcagactattgccaagcatctggcaactgcctctgcctaa

SEQ ID NO: 5587 - protein, 119 aa, Citrus hybrid cultivar
MAAAEEGQVIGCHTVEAWNEQLQKSNETKQLVVVDFTASWCGPCRFIAPFLAELAKKLPNVLFLKVDVDELKSVATDWAVEAMPTFMFLKEGKIVDKVVGSKKEELQQTIAKHLATASA

SEQ ID NO: 5588 - DNA, 405 bp, Medicago truncatula
  CDS (1)..(405)
atgggatcatttctctcttccttagtcggcggcgactccgccaccgcctcacagtcatcagaatcatcggagaactcttccgtcaagactttccactcatctgctcgctggcaacttcacttcaacgaactcaaagattctcctcgtcttgtggtgattgatttctctgctacatggtgtggaccttgtaaaatgatggaaccgattcttcaagctatggctaatgaattcactgatgttgaattcatcaaaattgatgttgatgaattatcggatgtggcgcaggagtttaaggtgcaggctatgccaacgtttctgttgttgaagaatgggaaagaggttgacaaggttgttggagcaaagaaggatgaacttaaaaacaaggttcaaaagcacaaagcttag

SEQ ID NO: 5589 - protein, 134 aa, Medicago truncatula
MGSFLSSLVGGDSATASQSSESSENSSVKTFHSSARWQLHFNELKDSPRLVVIDFSATWCGPCKMMEPILQAMANEFTDVEFIKIDVDELSDVAQEFKVQAMPTFLLLKNGKEVDKVVGAKKDELKNKVQKHKA

SEQ ID NO: 5590 - DNA, 363 bp, Glycine max
  CDS (1)..(363)
atggcaggttcatcagaagagggacaagtcattagctgccacaccgttgaagaatggaacgatcaactccagaagggcaacgaatccaagaaactcattgttgtggattttactgcttcttggtgtggaccatgccgtttcattgcaccattcttggctgagctggctaagaagttcacaagtgtcatattcctaaaggtggatgtggacgaattaaagagtgtttctcaagattgggctattgaggctatgcccacttttgtgtttgtgaaagagggaacgcttctggacaaagtggtgggagcaaagaaggatgagctgcagcagaaaatacagaaacatgtggcttcatctaatgcttag

SEQ ID NO: 5591 - protein, 120 aa, Glycine max
MAGSSEEGQVISCHTVEEWNDQLQKGNESKKLIVVDFTASWCGPCRFIAPFLAELAKKFTSVIFLKVDVDELKSVSQDWAIEAMPTFVFVKEGTLLDKVVGAKKDELQQKIQKHVASSNA

SEQ ID NO: 5592 - DNA, 402 bp, Brassica juncea
  CDS (1)..(402)
atgggaggtgtattatcatctgtgttaggaggtggtggtggagatgaagcagtcgcggggaatgattccgaaagccgcgtcatgaagtttagctcatcggctcggtggcagcttcacttcaacgagatcaaagaatcctcgaaactgctggtggttgacttctcagcatcctggtgtggaccttgtaggatgatcgagcctgcgttcatcgccatggctgccaagttcactgatgttgaattcgtcaaattggatgtcgatgaacttcccgatgtggctaaagagttcaatgtgacggggatgccaacttttgtgctggtgaaaaatggtaaagagattgaaaggatcgttggagcaaggaaagatgaactcgagaagaaagttctcaaacacagggcatag

SEQ ID NO: 5593 - protein, 133 aa, Brassica juncea
MGGVLSSVLGGGGGDEAVAGNDSESRVMKFSSSARWQLHFNEIKESSKLLVVDFSASWCGPCRMIEPAFIAMAAKFTDVEFVKLDVDELPDVAKEFNVTGMPTFVLVKNGKEIERIVGARKDELEKKVLKHRA

SEQ ID NO: 5594 - DNA, 601 bp, Picea sitchensis
  CDS (92)..(463)
gacacaaagcatttgagattttaaaagcacacacgaaacatttgagattgaaacgcgcagaattgatattttgtgagaagaggaagaagagatggcggagggaaacgtgtttgcatgtcactctacagaggcatggcgctccaagctgcaggaggccatcgatactagacgactggtggtggtagattttactgcaacttggtgtggaccttgtcgagtcatcagtccagtgtttgttgagctgtcaaagaagttcccagaaatatttttcttgaaggttgatgtggacgaattgagggatgtcgctcaagagtgggatgtggaggccatgcccacatttatctttatcagggatggaagggctgttgataaggttgtgggtgcaaagaaagatgatcttgaaagaaaagttgcagccctagctgctactactacagaagcagcccttgttgcacaagcctaggcgctgtttttatatgctacatgcttatgctattatctttttgaattaaaactattaggcgatatgtcggtgtggatatcttgcaaatttttaaacttgacagtaaatattgctattttcctaaaaaaaaaaaaaaaa

SEQ ID NO: 5595 - protein, 123 aa, Picea sitchensis
MAEGNVFACHSTEAWRSKLQEAIDTRRLVVVDFTATWCGPCRVISPVFVELSKKFPEIFFLKVDVDELRDVAQEWDVEAMPTFIFIRDGRAVDKVVGAKKDDLERKVAALAATTTEAALVAQA

SEQ ID NO: 5596 - DNA, 664 bp, Populus trichocarpa
  CDS (83)..(451)
gaaggcaaagaaagcgtatctttcttctgtgataataacctccgcgtctgtttcctttgaaagtctgtagagagttcgagaaatggcagctgaagatggacaagtgatcgggtgccacactgttgaggcgtgggacgagcagttgcagagaggaaatgaatctaagaagctggtggtgattgattttgctgcttcatggtgtggtccgtgccgtgtcattgctcctttcctggctgagctggctaggaaacttcccgatgttatcttccttaaggttgatgttgatgaattgaagactgtcgctcaggattgggctgtggaggcaatgccaactttcatgttcctgaaagaggggaagattgtggacaaagttgtgggagcaaggaaggatgaactgcagcaggctatagcaaagcacacagctcctgctgctgctactgcttctgcttgaagctgatgaatttgcttatcgttttttgatatatgctattagaaatctggattctgaagcttggtttttatcttttgcttgaatggtgaactatcaatggtttttgctatggcatgaatccatgtgttcaaccgatgcttgttttatgaaatataatcttttacagttatcccagttgcttttaactgcagctgcccaaaaaaaaaaaaaaaa

SEQ ID NO: 5597 - protein, 122 aa, Populus trichocarpa
MAAEDGQVIGCHTVEAWDEQLQRGNESKKLVVIDFAASWCGPCRVIAPFLAELARKLPDVIFLKVDVDELKTVAQDWAVEAMPTFMFLKEGKIVDKVVGARKDELQQAIAKHTAPAAATASA

SEQ ID NO: 5598 - DNA, 369 bp, Zea mays
  CDS (1)..(369)
atggcgtccgagcagggagtcgtgatcgcgtgccacagcaaggctgagttcgacgcccacatgaccaaggcccaggaagccggcaagctggtggtcatcgacttcactgccgcctggtgcggtccatgccgcgccatcgccccactgttcgtcgaacacgccaagaagttcactcaggtcgtcttcctgaaggtggacgtggacgaagtgaaggaagtcaccgcggcctacgaggtcgaggcgatgccgaccttccacttcgtcaagaacggcaagacggtcgcgaccatcgtgggtgccaggaaggacgagctcctggcccagatcgagaagcatgccgcgcctgcgcctgcgtctgcgtctgcctaa

SEQ ID NO: 5599 - protein, 122 aa, Zea mays
MASEQGVVIACHSKAEFDAHMTKAQEAGKLVVIDFTAAWCGPCRAIAPLFVEHAKKFTQVVFLKVDVDEVKEVTAAYEVEAMPTFHFVKNGKTVATIVGARKDELLAQIEKHAAPAPASASA

SEQ ID NO: 5600 - DNA, 414 bp, Penicillium marneffei (strain ATCC 18224 / CBS 334.59 / QM 7333)
  CDS (1)..(414)
atggagttctcttggccgctactcattttgatcgcatatgttgtgatttccgtcgctcgggctcgcagctcaagcagcggccctgccactcctccacatggcacagtgatcaatgttgagagtcaacaagcgttcaaagaactaaccgcctccggtcccgtcgtcgtcgatttcttcgccacatggtgcgttccttgcagagtcattgcccccaaaatcggcgaattcagcaaaacctatacgaatgtgcgcttcctccaagtggacgttgataaacagcagcagattacacaggacctaggtgttactgccatgccgacttttattttgttcaataatggcaaacagcttccggatcgcattcaaggcgcaaacattagggctttggagaatgctatcaagcagattgcttag

SEQ ID NO: 5601 - protein, 137 aa, Penicillium marneffei (strain ATCC 18224 / CBS 334.59 / QM 7333)
MEFSWPLLILIAYVVISVARARSSSSGPATPPHGTVINVESQQAFKELTASGPVVVDFFATWCVPCRVIAPKIGEFSKTYTNVRFLQVDVDKQQQITQDLGVTAMPTFILFNNGKQLPDRIQGANIRALENAIKQIA

SEQ ID NO: 5602 - DNA, 387 bp, Zea mays
  CDS (1)..(387)
atggcggcttcggaggcggcagcggcggcggcaacaccggtgacgccgacagaggggacggtgatcgcgatccacagcctggaggagtggagcatccagatcgaggaggccaacagcgccaagaagctggtggtgattgacttcactgcaacatggtgtcctccgtgccgcgccatggctccaatttttgctgatatggccaagaagtccccaaatgttgttttcctgaaagttgatgtggatgaaatgaagaccattgctgagcaattcagcgtagaggccatgccaacattcctgttcatgagggagggcgacgtcaaggacagggtcgttggcgcagcaaaggaagagctagcaaggaagcttgaactacacatggcctcgtag

SEQ ID NO: 5603 - protein, 128 aa, Zea mays
MAASEAAAAAATPVTPTEGTVIAIHSLEEWSIQIEEANSAKKLVVIDFTATWCPPCRAMAPIFADMAKKSPNVVFLKVDVDEMKTIAEQFSVEAMPTFLFMREGDVKDRVVGAAKEELARKLELHMAS

SEQ ID NO: 5604 - DNA, 390 bp, Zea mays
  CDS (1)..(390)
atggcggcttcggcggcggcggcggcggcggcggcgacaccggtggcgccgacagaggggacggtgatcgcgatccacagcctggaggagtggagcatccagatcgaggaggccaacagcgccaagaagctggtggtgattgacttcactgcaacatggtgtcctccgtgccgcgccatggctccaatttttgctgatatggccaagaagtccccaaatgttgttttcctgaaagttgatgtcgatgaaatgaagaccattgctgagcaattcagcgtagaggccatgccaacattcctgttcatgagggagggcgacgtcaaggacagggtcgttggcgcagcaaaggaagagctagcaaggaagcttgaactacacatggcctcgtag

SEQ ID NO: 5605 - protein, 129 aa, Zea mays
MAASAAAAAAAATPVAPTEGTVIAIHSLEEWSIQIEEANSAKKLVVIDFTATWCPPCRAMAPIFADMAKKSPNVVFLKVDVDEMKTIAEQFSVEAMPTFLFMREGDVKDRVVGAAKEELARKLELHMAS

SEQ ID NO: 5606 - DNA, 369 bp, Zea mays
  CDS (1)..(369)
atggcgtccgagcagggagtcgtgatcgcgtgccacagcaaggctgagtttgacgcccacatgaccaaggcccaggaagccggcaagctggtggtcatcgacttcactgccgcctggtgcggtccatgccgcgccatcgccccactgttcgtcgaacacgccaagaagttcactcaggtcgtcttcctgaaggtggacgtggacgaagtgaaggaagtcaccgcggcctacgaggtcgaggcgatgccgaccttccacttcgtcaagaacggcaagacggtcgcgaccatcgtgggtgccaggaaggacgagctcctggccctgatcgagaagcatgccgcgcctgcgcctgcgactgcgtctgcctaa

SEQ ID NO: 5607 - protein, 122 aa, Zea mays
MASEQGVVIACHSKAEFDAHMTKAQEAGKLVVIDFTAAWCGPCRAIAPLFVEHAKKFTQVVFLKVDVDEVKEVTAAYEVEAMPTFHFVKNGKTVATIVGARKDELLALIEKHAAPAPATASA

SEQ ID NO: 5608 - DNA, 369 bp, Zea mays
  CDS (1)..(369)
  misc_feature (192)..(192): r is g or a
  misc_feature (227)..(227): s is g or c
atggcgtccgagcagggagtcgtgatcgcgtgccacagcaaggctgagttcgacgcccacatgaccaaggcccaggaagccggcaagctggtggtcatcgacttcactgccgcctggtgcggtccatgccgcgccatcgccccactgttcgtcgaacacgccaagaagttcactcaggtcgtcttcctgaargtggacgtggacgaagtgaaggaagtcaccgcggsctacgaggtcgaggcgatgccgaccttccacttcgtcaagaacggcaagacggtcgcgaccatcgtgggtgccaggaaggacgagctcctggcccagatcgagaagcatgccgcgcctgcgcctgcgtctgcgtctgcctaa

SEQ ID NO: 5609 - protein, 122 aa, Zea mays
  misc_feature (76)..(76): The Xaa at location 76 stands for Ala, or Gly.
MASEQGVVIACHSKAEFDAHMTKAQEAGKLVVIDFTAAWCGPCRAIAPLFVEHAKKFTQVVFLKVDVDEVKEVTAXYEVEAMPTFHFVKNGKTVATIVGARKDELLAQIEKHAAPAPASASA

SEQ ID NO: 5610 - DNA, 387 bp, Zea mays
  CDS (1)..(387)
atggcggcttcggaggcggcagcggcggcggcaacaccggtgacgccgacagaggggacggtgatcgcgatccacagcctggaggagtggagcatccagatcgaggaggccaacagcgccaagaagctggtggtgatcgacttcactgcaacatggtgtcctccgtgccgcgccatgtctccaatttttgctgatatggccaagaagtccccaaatgttgttttcctgaaagttgatgtggatgaaatgaagaccattgctgagcaattcagcgtagaggccatgccaacattcctgttcatgagggagggcgacgtcaaggacagggtcgttggcgcagcaaaggaagagctagcaaggaagcttgaactacacatggcctcgtag

SEQ ID NO: 5611 - protein, 128 aa, Zea mays
MAASEAAAAAATPVTPTEGTVIAIHSLEEWSIQIEEANSAKKLVVIDFTATWCPPCRAMSPIFADMAKKSPNVVFLKVDVDEMKTIAEQFSVEAMPTFLFMREGDVKDRVVGAAKEELARKLELHMAS

SEQ ID NO: 5612 - DNA, 426 bp, Zea mays
  CDS (1)..(426)
atggcggaggaagcagtccgatgtgatgcggttcgtgcagcgcgtgcgctgctgggagtacaggcagcagccggccatcgtccgccgacagaggggacggtgatcgcgatccacagcctggaggagtggagcatccagatcgaggaggccaacagcgccaagaagctggtggtgattgacttcactgcaacatggtgtcctccgtgccgcgccatggctccaatttttgctgatatggccaagaagtccccaaatgttgttttcctgaaagttgatgtggatgaaatgaagaccattgctgagcaattcagcgtagaggccatgccaacattcctgttcatgagggagggcgacgtcaaggacagggtcgttggcgcagcaaaggaagagctagcaaggaagcttgaactacacatggcctcgtag

SEQ ID NO: 5613 - protein, 141 aa, Zea mays
MAEEAVRCDAVRAARALLGVQAAAGHRPPTEGTVIAIHSLEEWSIQIEEANSAKKLVVIDFTATWCPPCRAMAPIFADMAKKSPNVVFLKVDVDEMKTIAEQFSVEAMPTFLFMREGDVKDRVVGAAKEELARKLELHMAS

SEQ ID NO: 5614 - DNA, 363 bp, Zea mays
  CDS (1)..(363)
atggcgtccgaggagggagtcgtgatcgcctgccacaccaaggccgacttcgacgcccacatggccaaggccaaggaggccggcaagctggtgatcattgacttcacggcctcctggtgcggcccctgccgcttcatcgcgccactgttcgtcgagcacgccaagaagttcacccaggctgtgttcctgaaggtggacgtggacgagctgaaggaagttgccgcggcctacgatgtcgaggcgatgccgaccttccacttcgtcaagaacggggtgacggtggagaccgtcgtcggtgccaggaaggagaacctcctggcccagatcgagaagcactgcgccgcggccgtgcctgctgcgtag

SEQ ID NO: 5615 - protein, 120 aa, Zea mays
MASEEGVVIACHTKADFDAHMAKAKEAGKLVIIDFTASWCGPCRFIAPLFVEHAKKFTQAVFLKVDVDELKEVAAAYDVEAMPTFHFVKNGVTVETVVGARKENLLAQIEKHCAAAVPAA

SEQ ID NO: 5616 - DNA, 408 bp, Talaromyces stipitatus (strain ATCC 10500 / CBS 375.48 / QM 6759 / NRRL 1006)
  CDS (1)..(408)
atggagttctcttggccagtgatcattttaatagcatatattgtcatctcggtcgttcgagctagcagctccaacagcggtcctgcccctcaacatggcaaagtaatcaatgtcgagagtcaacaagcattcaaagaactgactgcctccggccccgtcgtcgtcgatttcttcgccacatggtgcggtccttgcaaagccattgcacccaaagttggcgagctcagcgaaacctatacgaatgtgcgtttcctccaagtagatgtcgataaacagcagcagattgcacgcgaccttggggtgactgccatgccaacatttgtattgttcaagaacggcaaggagcttgatcgaattcgaggagccaatgctagagctctggagaatggtatcgaacagattgcttaa

SEQ ID NO: 5617 - protein, 135 aa, Talaromyces stipitatus (strain ATCC 10500 / CBS 375.48 / QM 6759 / NRRL 1006)
MEFSWPVIILIAYIVISVVRASSSNSGPAPQHGKVINVESQQAFKELTASGPVVVDFFATWCGPCKAIAPKVGELSETYTNVRFLQVDVDKQQQIARDLGVTAMPTFVLFKNGKELDRIRGANARALENGIEQIA

SEQ ID NO: 5618 - DNA, 357 bp, Ricinus communis
  CDS (1)..(357)
atggctgaagaaggacaagtgattgcctgccacacagttgaggcctggaccgagcagctcgagaagggacaggagaccaagaaactgattgttgttgattttactgcttcatggtgtgggccttgccgtttcatagctccaattcttgcagagatggccaagaagatgcctaatgtcacttttttgaaggtggatgtggatgaattgaagtctgtggctgaggattgggctgtggaggcaatgccaacttttatgtttctgaaagaaggaaaaatagtgcacaaggttgtgggtgccaacaaagaggaattgcagatgaccattgcaaagtatgctaccccggttggagcagcatag

SEQ ID NO: 5619 - protein, 118 aa, Ricinus communis
MAEEGQVIACHTVEAWTEQLEKGQETKKLIVVDFTASWCGPCRFIAPILAEMAKKMPNVTFLKVDVDELKSVAEDWAVEAMPTFMFLKEGKIVHKVVGANKEELQMTIAKYATPVGAA

SEQ ID NO: 5620 - DNA, 402 bp, Ricinus communis
  CDS (1)..(402)
atgggatcgattctctctgcccttgttggcgactccgcagccgccggagactctttgtcaggcgatcattctggagtgcaaactttccactcatctgaacgttggcagcttcacttcaattccatcaaagattcatcacagttgatggtggtagattttgctgcttcttggtgtggaccttgcaagttcatggaaccagaaatcaaatctatggctactaagtatagtgatgtccaattttccaagattgatgttgatgaattgcctggtgtagcacaagaatttggagtgcaggcaatgccaacatttgtgctggtgaagaaagggaaagaagtggatagggtggtaggagccaagaaggatgagcttctgaagaagatcgagaagcacagggctgcttga

SEQ ID NO: 5621 - protein, 133 aa, Ricinus communis
MGSILSALVGDSAAAGDSLSGDHSGVQTFHSSERWQLHFNSIKDSSQLMVVDFAASWCGPCKFMEPEIKSMATKYSDVQFSKIDVDELPGVAQEFGVQAMPTFVLVKKGKEVDRVVGAKKDELLKKIEKHRAA

SEQ ID NO: 5622 - DNA, 411 bp, Ricinus communis
  CDS (1)..(411)
atgtcgcttcttcggagagcagaaaaaactacaagaatgtatactattaattactcaaatgatttttcagacacaaagcaatccagggttgtggaaatccattctacagaccagtggagaagcttctttgatgcctcaaaaagaaacaacaaactgttggtggttcaattcacggctacatggtgcagaccttgtcgtttcatggatccgactgttcaagagtttgccgctaagttcacggatgttgattttatcaagatcgatgtggataagttgatgaaagtggctgaccaatttgaggcgaccacattgccagcatttgtactgatcaagaaagggaaacaagttgataaggttgtaggagccaaaaggattgatctgcacaacaagatagagcaacagaggatctga

SEQ ID NO: 5623 - protein, 136 aa, Ricinus communis
MSLLRRAEKTTRMYTINYSNDFSDTKQSRVVEIHSTDQWRSFFDASKRNNKLLVVQFTATWCRPCRFMDPTVQEFAAKFTDVDFIKIDVDKLMKVADQFEATTLPAFVLIKKGKQVDKVVGAKRIDLHNKIEQQRI

SEQ ID NO: 5624 - DNA, 399 bp, Ricinus communis
  CDS (1)..(399)
atggatcatcatgataatgactctgatcagcacgttgaatttgctggtaataatgtgagcctcattactaccaaagagagttgggaccagaagctgtcggaagctagtaaggatggaaaaattgtcttggcgaatttcagtgcaacatggtgtggtccttgtagaatgattgcaccattctaccgtgaactgtctgagaaatacccttcgattatgttcttgttgattgatgttgatgaattagctgacttcagcagctcttgggatatcaaagctactcctacatttttctttcttagagatgggcagcaacttgacaagcttgtgggagccaacaagccggagctacagaagaagataattgctgttctagacacggtgacagattgtaacaaatga

SEQ ID NO: 5625 - protein, 132 aa, Ricinus communis
MDHHDNDSDQHVEFAGNNVSLITTKESWDQKLSEASKDGKIVLANFSATWCGPCRMIAPFYRELSEKYPSIMFLLIDVDELADFSSSWDIKATPTFFFLRDGQQLDKLVGANKPELQKKIIAVLDTVTDCNK

SEQ ID NO: 5626 - DNA, 399 bp, Chryseobacterium gleum ATCC 35910
  CDS (1)..(399): transl_table=11
ttgtgctctaaaaatcgtaattttgaacatccgataagaggattaaaagaaaataatattaataaaataaaagaaacaaaaatggctttagaaattacagacagctcatttcaggatacggttttaaaatcagacaaaccggtattagtagacttctgggcagtatggtgtggaccttgcagaactttaggaccaatcatcgaagaagtagcatcagattttgaaggtaaagcagtagttgggaaagtagatgtggataacaaccaggaaatctctatgcagtatggtatcagaaatattcctacagttcttatctttaaaaacggagaagtagtagataaattagtaggtgtagctccaaaagaagtaatcgctgaaaaattaagcgctcacttataa

SEQ ID NO: 5627 - protein, 132 aa, Chryseobacterium gleum ATCC 35910
MCSKNRNFEHPIRGLKENNINKIKETKMALEITDSSFQDTVLKSDKPVLVDFWAVWCGPCRTLGPIIEEVASDFEGKAVVGKVDVDNNQEISMQYGIRNIPTVLIFKNGEVVDKLVGVAPKEVIAEKLSAHL

SEQ ID NO: 5628 - DNA, 393 bp, Triticum turgidum subsp. durum (durum wheat)
  CDS (1)..(393)
atggcggcggcggcgacggcgacgactacagcggcggcgacggcggcggcggtggggccgggggaggtgatctccgtccacagcctggagcagtggaccatgcagatcgaggaggccaacgccgccaagaagctggtggtgattgacttcactgcatcatggtgcggaccatgccgcatcatggctccaatttttgctgatctcgccaagaagttcccagctgctgttttcctcaaggtcgacgttgatgaactgaagcccattgctgagcaattcagcgtcgaggccatgccaaccttcctgttcatgaaggaaggagacgtcaaggacagggttgtcggagctatcaaggaggagctgacgaccaaggttgggctccacgcggctgcctag

SEQ ID NO: 5629 - protein, 130 aa, Triticum turgidum subsp. durum (durum wheat)
MAAAATATTTAAATAAAVGPGEVISVHSLEQWTMQIEEANAAKKLVVIDFTASWCGPCRIMAPIFADLAKKFPAAVFLKVDVDELKPIAEQFSVEAMPTFLFMKEGDVKDRVVGAIKEELTTKVGLHAAA

SEQ ID NO: 5630 - DNA, 354 bp, Eucalyptus grandis
  CDS (1)..(354)
atggcggaagagggccaggtgatcagttgccacagcgccgagtcgtggagcgagcagatcgccaagagcaacgaatccgacaagctggtggttgtcgatttcactgcttcatggtgcggaccatgccgtttcattgcaccattcctagctgagctggccaagagattccctaatgttctgtttctgaaagttgatgttgatgagctgaagacggtcgctcaagagtgggccgtggaggcgatgccgactttcatgtttgtgaagggaggaaagattgttgacagggtggtaggagcccagaaggatcagctgcagatgaccttagctaagcacatggcaaccgcttcggcttaa

SEQ ID NO: 5631 - protein, 117 aa, Eucalyptus grandis
MAEEGQVISCHSAESWSEQIAKSNESDKLVVVDFTASWCGPCRFIAPFLAELAKRFPNVLFLKVDVDELKTVAQEWAVEAMPTFMFVKGGKIVDRVVGAQKDQLQMTLAKHMATASA

SEQ ID NO: 5632 - DNA, 339 bp, Curvularia lunata
  CDS (1)..(339)
atgagcgaagaaaccaagcagggcgttcacaacctcgccaacaaggcccaattcgaggctgctatcaacgacaaggagaccctcatggtcctcgactgcttcgcgacatggtgtggtccttgcaaggtgattgctccccaagttgtcaagctctctgagaagtaccccaacgcccgcttcttcaagctcgacgtcgatgacgttcccgacgtcgcccaggaactcggtatccgcgctatgcccaccttccttttgttcaagggcggcgacaagatcagcgaggttgttggtgccaaccccaaggcacttgaggccgccatccagtccaactacgagtag

SEQ ID NO: 5633 - protein, 112 aa, Curvularia lunata
MSEETKQGVHNLANKAQFEAAINDKETLMVLDCFATWCGPCKVIAPQVVKLSEKYPNARFFKLDVDDVPDVAQELGIRAMPTFLLFKGGDKISEVVGANPKALEAAIQSNYE

SEQ ID NO: 5634 - DNA, 372 bp, Solanum berthaultii
  CDS (1)..(372)
atggctacttcatctgaggaaggacaagtgatcggctgccacaaggttgaggactgggaggtgcagccccagaagggcgtggagaccaaaaaactggtggtggtggattttactgcttcctggtgcggcccttgccgttttattgccccaattcttgctgacattgctaagaagatgcaccatgttatattcctcaaggttgatgttgatgaactgaagaaagttgcagaggattggaatgtggaggcaatgcctacctttgtcttcattaaagaggggaaagaagtggatagggtggttggtgccaataaagacggattgcttcagaccatagagaagcatggtgctgctcctgctattgtgactgcttga

SEQ ID NO: 5635 - protein, 123 aa, Solanum berthaultii
MATSSEEGQVIGCHKVEDWEVQPQKGVETKKLVVVDFTASWCGPCRFIAPILADIAKKMHHVIFLKVDVDELKKVAEDWNVEAMPTFVFIKEGKEVDRVVGANKDGLLQTIEKHGAAPAIVTA

SEQ ID NO: 5636 - DNA, 354 bp, Medicago sativa
  CDS (1)..(354)
atggccgcagaagagggacaagtgatcggagttcacactgtggaggcttggaaggaacacctcgagaagggaaatggatccaagaaactgattgtagttgatttcaccgcttcttggtgtggcccgtgccgtttcattgccccaattttggcagagattgctaaaaagctgcccaatgtcaccttcctcaaggttgatgttgatgaattgaagactgttgctgaggagtgggcagttgatgctatgccaacattcctgttcttgaaagaaggaaaactggtggacaaggttgttggtgctcagaaggagcagctgcaagcagcaataaccaagcatgcaactactgatgcttga

SEQ ID NO: 5637 - protein, 117 aa, Medicago sativa
MAAEEGQVIGVHTVEAWKEHLEKGNGSKKLIVVDFTASWCGPCRFIAPILAEIAKKLPNVTFLKVDVDELKTVAEEWAVDAMPTFLFLKEGKLVDKVVGAQKEQLQAAITKHATTDA

SEQ ID NO: 5638 - DNA, 339 bp, Helicosporidium sp. subsp. Simulium jonesii
  CDS (1)..(339)
atgggtggcgcagtaattcaagtgaccaacaagaccgagtttgattcccacctatctacggctgcgtccaagggcaagctggtcgtggttgactttacagccacttggtgcggcccctgcaagatgattgcccccttttttgcgaagttgagcggggagtatcccgatgtcgtcttccttaaggtggacgtggacgaggtcgaggcggttgctgcggagcacggcatcactgccatgcccaccttcctcttcttcaaggatggcaaacaggtggattctctgactggtgccaatcaggagcgcctgcgtgccatgctgactcagcatgcccagagctag

SEQ ID NO: 5639 - protein, 112 aa, Helicosporidium sp. subsp. Simulium jonesii
MGGAVIQVTNKTEFDSHLSTAASKGKLVVVDFTATWCGPCKMIAPFFAKLSGEYPDVVFLKVDVDEVEAVAAEHGITAMPTFLFFKDGKQVDSLTGANQERLRAMLTQHAQS

SEQ ID NO: 5640 - DNA, 429 bp, Plantago major
  CDS (1)..(429)
atgggctcgtttctctcttccgtgatcggaatcggaccggccgatgcggcggagacacctgccggagactcatcggagccttcgcgcgtcatggcgttccactcgtcgcaacgctggcagctccacttcaactcctccaagcagttaaacaaactgatggttgtggatttcacggcgacttggtgtggaccttgcaagttcatggcgcctgttttcgctgaactttctaccaagtacagtgatgttgattttgtcaaaatcgacgtcgatgagctcgctgatgtggcgcgggagtttggtgtgcaggcgatgccaacattcatgttactaaagcaaggaaaacaagttggtaccgttgtgggagctaagaaagatgaactggagaagaagatcctcgaacacagggaagcccctagatttgctgcatag

SEQ ID NO: 5641 - protein, 142 aa, Plantago major
MGSFLSSVIGIGPADAAETPAGDSSEPSRVMAFHSSQRWQLHFNSSKQLNKLMVVDFTATWCGPCKFMAPVFAELSTKYSDVDFVKIDVDELADVAREFGVQAMPTFMLLKQGKQVGTVVGAKKDELEKKILEHREAPRFAA

SEQ ID NO: 5642 - DNA, 360 bp, Plantago major
  CDS (1)..(360)
atggctacttcttcagaagagggacaagtgtacagcgttcactccgttgaggagtttaaggatcatcttgagaagagcaaggaggccaagaagctggtggttattgacttcactgcttcgtggtgtggaccatgccgcttcatcgccccaatcttggctgagctcgcgaagaagacaccacatgttatgtttctcaaggtcgatgttgatgaactgaaggctatttcagtggagtacgaagtcgaggctatgccgacttttgttttcctcaaggacgggaagccaattgacaggcttgttggtgcaaagaaggaagatctgctggcaaagattaccacacatggtactgttgtggcttga

SEQ ID NO: 5643 - protein, 119 aa, Plantago major
MATSSEEGQVYSVHSVEEFKDHLEKSKEAKKLVVIDFTASWCGPCRFIAPILAELAKKTPHVMFLKVDVDELKAISVEYEVEAMPTFVFLKDGKPIDRLVGAKKEDLLAKITTHGTVVA

SEQ ID NO: 5644 - DNA, 408 bp, Glycine max
  CDS (1)..(408)
atgggcgctatactttctgccttaactggcggtgccgcaacggcggcgacgtcttcgccggagagttctgcttctagggtccagtctttccactcttcggcgcgctggcagctccacttcaacgagctcaaagaaaccaataagctcgttgtgatagatttctcggcgtcgtggtgcggcccttgcaaattcatagagccagcgattcacgccatgtccgaaaagttcaccgacgttgacttcgtcaagatcgacgtcgacgaattgccggatgtggcgaaggagtttaatgtggaggcgatgccgacgttcgtgttgtgtaagaaagggaaggaagtcgacaaggttgtgggcgcaaagaaggacgagctcgaaaagaagattgagaaacatcgatcgcaatcttag

SEQ ID NO: 5645 - protein, 135 aa, Glycine max
MGAILSALTGGAATAATSSPESSASRVQSFHSSARWQLHFNELKETNKLVVIDFSASWCGPCKFIEPAIHAMSEKFTDVDFVKIDVDELPDVAKEFNVEAMPTFVLCKKGKEVDKVVGAKKDELEKKIEKHRSQS

SEQ ID NO: 5646 - DNA, 375 bp, Capsicum annuum
  CDS (1)..(375)
atggctgctacttcatctgaagaaggacaagtttttggttgccacaacgttgaggagtgggatcagcacttcaagaagggtgtcgagactaagaaattggtggtggtggattttaccgcatcctggtgcggtccttgccgttttattgccccaattcttgctgacattgctaagaagatgccccatgtcatattcctcaaggttgatgttgatgaactaaagactgttgcagaggaatggaatgtggatgctatgccaacatttgtcttctttaaagatggcgaagaagtggatagggttgttggtgcccagaaagaggagttgcaggcggccatacttaagcatgttggtgctcctgctactgtgacagcttga

SEQ ID NO: 5647 - protein, 124 aa, Capsicum annuum
MAATSSEEGQVFGCHNVEEWDQHFKKGVETKKLVVVDFTASWCGPCRFIAPILADIAKKMPHVIFLKVDVDELKTVAEEWNVDAMPTFVFFKDGEEVDRVVGAQKEELQAAILKHVGAPATVTA

SEQ ID NO: 5648 - DNA, 372 bp, Ipomoea batatas
  CDS (1)..(372)
atggccgccgcgacttcttcggaggagggacaggtgatcgcctgccacaccgtggatcactggaaggagcagttcgctaagggcgttgagaccaaaagactggtggtggttgatttcactgcttcctggtgcggtccttgccgcatgattgctccaatactggctgaaattgcaaagaaaatggctcatgtgatattcgtcaaggttgatgttgatgaactgcaggctgtggctgcggaatacaaggtggaggcgatgccgactttcgtgttcctcaaggatggcaaggaagtggataggatggtgggtgcaaagaaggatgatctgcagaactgcataactaagcatgctgcagcagtcatgactgcttag

SEQ ID NO: 5649 - protein, 123 aa, Ipomoea batatas
MAAATSSEEGQVIACHTVDHWKEQFAKGVETKRLVVVDFTASWCGPCRMIAPILAEIAKKMAHVIFVKVDVDELQAVAAEYKVEAMPTFVFLKDGKEVDRMVGAKKDDLQNCITKHAAAVMTA

SEQ ID NO: 5650 - DNA, 432 bp, Ipomoea batatas
  CDS (1)..(432)
atgggaggggctctgtcgagtgtgctgggtggcgatgcggcggcggcggcggcatcagccgatgactcatcatcgtccgaaccctctcgggtcactgtatttcattcatctcaacgatggcagctgcacttcaacgcctccaaacaactcaataaattgatggtggtggattttgcggcagcatggtgtgggccctgcaagatgatggagccgatggtcaaacaaatggctaccaagttcaccgacgttgatttcataaagatagacgtcgatgagctctcggatgtggcccaggagttttcagtgcaggctatgccgacgttcttactgctgaagcaaggcaaggaggtgggtagggtagtgggagccaagaaagatgagcttgaaaggaagatcgtccagcataaggaagtccccaaatttgctgcttga

SEQ ID NO: 5651 - protein, 143 aa, Ipomoea batatas
MGGALSSVLGGDAAAAAASADDSSSSEPSRVTVFHSSQRWQLHFNASKQLNKLMVVDFAAAWCGPCKMMEPMVKQMATKFTDVDFIKIDVDELSDVAQEFSVQAMPTFLLLKQGKEVGRVVGAKKDELERKIVQHKEVPKFAA

SEQ ID NO: 5652 - DNA, 372 bp, Citrus paradisi
  CDS (1)..(372)
atggccgaggagggacaagtgatcagctgccacactgttgaatcctggaacgagcagctccaaaagggcattgcggcaaagaaactgatagtggtggattttacggcttcatggtgcccgccatgcaagttgatgtctccaattttgagtgaattggcgaagaagctgcccgctgtcatattcttgaaggtggatgttgatgaattgcagtccgtcgctgaggaatgggctgtggaagccatgccgacctttgtactgacgaaagacggcaaagtcctggagaggattgtgggagcgaagaaagatgagctgcagctggctgtcgaaaagcacgcaacaactgttgagaatgcaactactgctaatgcttga

SEQ ID NO: 5653 - protein, 123 aa, Citrus paradisi
MAEEGQVISCHTVESWNEQLQKGIAAKKLIVVDFTASWCPPCKLMSPILSELAKKLPAVIFLKVDVDELQSVAEEWAVEAMPTFVLTKDGKVLERIVGAKKDELQLAVEKHATTVENATTANA

SEQ ID NO: 5654 - DNA, 396 bp, Leymus chinensis
  CDS (1)..(396)
atggggggctgtgtgggaaagggtcgtagcattgtggaagaaaagcttgatttcaaaggtggaaatgtgcatgtcataacaaccaaagaggactgggaccagaagattgaagaagcaaacaaggatgggaaaattgttgtagcaaacttcagtgcttcgtggtgtgggccatgccgtgtcattgcacctgtttatgctgagatgtccaagacttatcctcagctcatgttcttgacaattgatgttgatgacctaatggatttcagctcaacatgggacatccgtgcaaccccaacgttcttcttccttaaaaacggccagcagatcgacaagctcgtcggcgccaacaaacctgagctcgagaagaaagtacaagctcttggcgatggcagctga

SEQ ID NO: 5655 - protein, 131 aa, Leymus chinensis
MGGCVGKGRSIVEEKLDFKGGNVHVITTKEDWDQKIEEANKDGKIVVANFSASWCGPCRVIAPVYAEMSKTYPQLMFLTIDVDDLMDFSSTWDIRATPTFFFLKNGQQIDKLVGANKPELEKKVQALGDGS

SEQ ID NO: 5656 - DNA, 393 bp, Pisum sativum
  CDS (1)..(393)
atgggctcaattctctcttccctcatcggcggcgaaccagctgccgccttagaatcctccgatcacgccgtcaaaacattccactcatccgcacgctggcagctccacttcaacgaaatcaaagactcgcctcgtctcgttgtgattgatttctctgctacgtggtgtggaccgtgtaaaatgatggaaccgattgtttatgccatggctaacgaattcacggacgttgaattcatcaagatcgacgttgacgaattatcggatgtggcgcaggagtttaaggtgcaggctatgccgacgtttttgttgttgaagaatggggaagaggtggataagattgttggtgccaaaaaagatgaactcaaaaacaagattaaaaaatacagagcttag

SEQ ID NO: 5657 - protein, 130 aa, Pisum sativum
MGSILSSLIGGEPAAALESSDHAVKTFHSSARWQLHFNEIKDSPRLVVIDFSATWCGPCKMMEPIVYAMANEFTDVEFIKIDVDELSDVAQEFKVQAMPTFLLLKNGEEVDKIVGAKKDELKNKIKKYRA

SEQ ID NO: 5658 - DNA, 342 bp, Pisum sativum
  CDS (1)..(342)
atggcggaagagggacaagtgatcggtgttcacaccgtggatgcttggaaggaacagttagagaagggaaaagcctcaaagaaactgattgtagttgatttcactgcttcttggtgcggtccatgccgttttattgccccaattttggcagagattgctaaaaagcttacacatgtcactttccttaaggttgacgtggatgaattgaagactgtttccgaggagtggggaattgaagctatgccaacattcttgttcttgaaagatggtgaacttgtggacaaagttgtgggtgccaagaaggaggagctgcaattgaaaattgacaagcatgcagcttga

SEQ ID NO: 5659 - protein, 113 aa, Pisum sativum
MAEEGQVIGVHTVDAWKEQLEKGKASKKLIVVDFTASWCGPCRFIAPILAEIAKKLTHVTFLKVDVDELKTVSEEWGIEAMPTFLFLKDGELVDKVVGAKKEELQLKIDKHAA

SEQ ID NO: 5660 - DNA, 357 bp, Triticum aestivum
  CDS (1)..(357)
atggccgccgaggagggagccgtgatagcgtgccacaccaagcaagagttcgacacccacatggctaatggcaaggagaccggcaagctggtgatcattgacttcactgcttcctggtgcggtccttgtcgtgtcatagccccagtctttgctgagtacgccaagaagttccctggcgccattttcctgaaggtggacgttgacgagctgaaggacgtcgctgaagcatacaacgttgaggcaatgccgaccttcctgtttatcaaggatggtgcgaaggtggacactgttgtcggtggcaggaaggatgatatccataccaagatagtggccctcatgggttctgcatctgcctaa

SEQ ID NO: 5661 - protein, 118 aa, Triticum aestivum
MAAEEGAVIACHTKQEFDTHMANGKETGKLVIIDFTASWCGPCRVIAPVFAEYAKKFPGAIFLKVDVDELKDVAEAYNVEAMPTFLFIKDGAKVDTVVGGRKDDIHTKIVALMGSASA

SEQ ID NO: 5662 - DNA, 396 bp, Hordeum vulgare var. distichum
  CDS (1)..(396)
atgggaggctgtgtgggcaagggtcgtggcgttgtggaagaaaagcttgatttcaaaggtggaaatgtgcatgtcataacaaccaaagaggactgggaccagaagattgaagaagcaaacaaggatgggaaaattgttgtagcaaacttcagtgcttcgtggtgtgggccatgccgtgtcattgcacctgtttatgctgagatgtccaagacttatcctcaactcatgttcttgacaattgatgttgatgacctaatggatttcagctcaacatgggacatccgcgcaaccccgacgttcttcttcctcaaaaacggccagcagatcgacaagctcgtcggcgccaacaaacccgagctggagaagaaagtgcaagctcttggtgatggcagttga

SEQ ID NO: 5663 - protein, 131 aa, Hordeum vulgare var. distichum
MGGCVGKGRGVVEEKLDFKGGNVHVITTKEDWDQKIEEANKDGKIVVANFSASWCGPCRVIAPVYAEMSKTYPQLMFLTIDVDDLMDFSSTWDIRATPTFFFLKNGQQIDKLVGANKPELEKKVQALGDGS

SEQ ID NO: 5664 - DNA, 402 bp, Brassica campestris
  CDS (1)..(402)
atgggaggtgtattatcatctgtgttaggaggtggtggtggagatgaaccactcgcggggaatgaatccgaaagtcgcgtcatgaagtttagctcatcggctcggtggcagcttcacttcaacgagatcaaagaatcctcgaaactgctggtggttgacttctcagcatcctggtgtggaccttgcaggatgatagagcctgcgttcatcgccatgtctgccaagttcagtgatgttgaattcctcaaattggatgtcgatgaacttcccgatgtggctaaagagttcaatgtgacggggatgccaacttttgtgctggtgaaaaatggtaaagagattgaaaggatcgttggagcaaggaaagatgaacttgagaagaaagttctcaaacacagggcatag

SEQ ID NO: 5665 - protein, 133 aa, Brassica campestris
MGGVLSSVLGGGGGDEPLAGNESESRVMKFSSSARWQLHFNEIKESSKLLVVDFSASWCGPCRMIEPAFIAMSAKFSDVEFLKLDVDELPDVAKEFNVTGMPTFVLVKNGKEIERIVGARKDELEKKVLKHRA

SEQ ID NO: 5666 - DNA, 399 bp, Oryza sativa
  CDS (1)..(399)
atgggaggttgtgtgggcaagggacgacgacatattgaggaagacaagcttgatttcaaaggtggaaatgttcatgtcataacaagcaaagaggactgggataggaagattgaagaagcaaacaaggatgggaaaattgttgtggcaaatttcagtgcttcctggtgtggaccatgtcgtgttattgcacctatttatgctgagatgtcaaagacttatcctcaactcatgttcttgacaatagatgttgatgacctaatggatttcagctcatcatgggatatccgcgcaaagccgacctttttcttcataaaaaacgagaagcaggtcgacaagcttgtgggcgccaacaaacctgagctcgaaaagaaggttcaggcacttgctgatggcagctga

SEQ ID NO: 5667 - protein, 132 aa, Oryza sativa
MGGCVGKGRRHIEEDKLDFKGGNVHVITSKEDWDRKIEEANKDGKIVVANFSASWCGPCRVIAPIYAEMSKTYPQLMFLTIDVDDLMDFSSSWDIRAKPTFFFIKNEKQVDKLVGANKPELEKKVQALADGS

SEQ ID NO: 5668 - DNA, 363 bp, Cucurbita maxima
  CDS (1)..(363)
atggctgttgaaggtcaagtgattccacttcgcgatgctgaagaattcgatgcgataatcgataaagagaaggaatctggcagactgattgtgatcgattttactgcttcctggtgcccgccatgccgtttcattgctccagtattcgcagagttggctaaggcgcacgtccatgtcactttcttgaaagtggacgtcgataatgtcaaggaaattgctaagaggttcgaggtgacagcgatgccgacctttgttttcctgaaaggaggaaacgaagttcacaggattgttggtgcggacaaggtggagctaggggttaaagtactggagttaagcgctgcacctgctacttgtgcttcttag

SEQ ID NO: 5669 - protein, 120 aa, Cucurbita maxima
MAVEGQVIPLRDAEEFDAIIDKEKESGRLIVIDFTASWCPPCRFIAPVFAELAKAHVHVTFLKVDVDNVKEIAKRFEVTAMPTFVFLKGGNEVHRIVGADKVELGVKVLELSAAPATCAS

SEQ ID NO: 5670 - DNA, 360 bp, Arabidopsis thaliana
  CDS (1)..(360)
atggcggcagaagagggtcaagtgattagttgtcacacgaacgatgtatggactgtgcaacttgataaagccaaagaatccaacaagctgattgtgattgatttcactgcttcatggtgtccaccatgccgcatgattgctccaattttcaacgatttggccaagaagttcatgtcaagtgccatcttcttcaaggtggatgttgatgaacttcagagtgttgctaaagagtttggtgtggaggcaatgccaacctttgtgttcattaaagccggcgaagttgtggataagctcgttggtgcgaataaagaagatcttcaggcgaaaatagtgaagcatactggtgttacaactgcgtaa

SEQ ID NO: 5671 - protein, 119 aa, Arabidopsis thaliana
MAAEEGQVISCHTNDVWTVQLDKAKESNKLIVIDFTASWCPPCRMIAPIFNDLAKKFMSSAIFFKVDVDELQSVAKEFGVEAMPTFVFIKAGEVVDKLVGANKEDLQAKIVKHTGVTTA

SEQ ID NO: 5672 - DNA, 432 bp, Populus tremula x Populus tremuloides
  CDS (1)..(432)
atggagtttgcttggccagttcttcagcgaggaagaacagtgcaaacaagcttctttaattttgatcactccaatggatttccatgcacaaagccagctgctggggttgtggatgtccattctgtaggcgcatggagatcctatttcgaggccaacaagcaaaacaacaaattgctggtgattgaattcacggcgacatggtgtggaccttgccgatacatggagcagaccatgaaggactttgctgccaagtacacagacgttgtgttcatcaggattgacgttgatgaattgcagcatgtggctcagcaattcaatgtgactaccatgccagcattttcactcttgaagaaagggaagatagttgacgaggtagcaggggtcaagaagagtgagcttcagaacaagattgagaagcatgggatgatatga

SEQ ID NO: 5673 - protein, 143 aa, Populus tremula x Populus tremuloides
MEFAWPVLQRGRTVQTSFFNFDHSNGFPCTKPAAGVVDVHSVGAWRSYFEANKQNNKLLVIEFTATWCGPCRYMEQTMKDFAAKYTDVVFIRIDVDELQHVAQQFNVTTMPAFSLLKKGKIVDEVAGVKKSELQNKIEKHGMI

SEQ ID NO: 5674 - DNA, 411 bp, Prunus persica
  CDS (1)..(411)
atggcggaggaaaatcaagtcatcggctgccacactactcaagcctgggaagagcagctccataagggaaacgagaacaagaaactggtggtggtggatttcacggcttcgtggtgtggaccgtgccggttgatcgccccaatcttggcggagttggctaagaagaccccagaagtgacgttcctaaaggtggacgtggatgaactgaggactgtttccgaggagtggggtgtggaggcaatgcctaccttcctcttcctcaaggaaggcaagatagtggacaaggttgtgggtgccaagaaagacgagttacagatcaaagttgccaagcatgtcgccgctgccgccgctgcctccgccacctctgcctctgccaccgctgctacagctactgctactgcatctgcttaa

SEQ ID NO: 5675 - protein, 136 aa, Prunus persica
MAEENQVIGCHTTQAWEEQLHKGNENKKLVVVDFTASWCGPCRLIAPILAELAKKTPEVTFLKVDVDELRTVSEEWGVEAMPTFLFLKEGKIVDKVVGAKKDELQIKVAKHVAAAAAASATSASATAATATATASA

SEQ ID NO: 5676 - DNA, 357 bp, Pisum sativum
  CDS (1)..(357)
atggcagcagaaaatgaggtgatcgctgttcattccgatgaatcatggaaggaacagatccagaaaggaaccgaatccaaaaaactgattgtggtggattttactgcttcgtggtgcggtccatgccgttttattgctccaattctagcagagattgctaagaagacacctcaagtcatcttcctcaaggtggacattgacgaattagagagtgttgccgaggaatggtctatcgaggctatgccaaccttcttgctcttgaaagaaggcatggaagtggataaggtagttggtgctaagaaggaagaactgcagctggcaataaccaagcatgcaacaactgttgctactgcttga

SEQ ID NO: 5677 - protein, 118 aa, Pisum sativum
MAAENEVIAVHSDESWKEQIQKGTESKKLIVVDFTASWCGPCRFIAPILAEIAKKTPQVIFLKVDIDELESVAEEWSIEAMPTFLLLKEGMEVDKVVGAKKEELQLAITKHATTVATA

SEQ ID NO: 5678 - DNA, 363 bp, Pisum sativum
  CDS (1)..(363)
atggcaggttcatcagaagagggacaagttatcagctgtcacagcgttgatgcatggaacgatatccttcacagaggcaatgaatccaagaaactgattgttgtggactttactgcttcttggtgtggaccatgccgtttcattgcaccattccttggtgaattggctaagaagtttacaaatgtcatattccttaaggtggacgtggacgaactaaagtctgttgctcaagattgggctgttgaggctatgccaacatttgtgtttgtgaaagaaggaacgattttgggcaaagtggttggagcaaagaaagaagaactgcagcagacaattgaaagacatgtggcttcatctaatgcttag

SEQ ID NO: 5679 - protein, 120 aa, Pisum sativum
MAGSSEEGQVISCHSVDAWNDILHRGNESKKLIVVDFTASWCGPCRFIAPFLGELAKKFTNVIFLKVDVDELKSVAQDWAVEAMPTFVFVKEGTILGKVVGAKKEELQQTIERHVASSNA

SEQ ID NO: 5680 - DNA, 366 bp, Oryza sativa subsp. japonica
  CDS (1)..(366)
atggcggcggcctcagcgacggcgcaggcggagggaacggtgatcgcgatccacagcctcgacgagtggaccatccagatcgaggaggccaacagcgccaagaagctggttgtgattgacttcactgcatcatggtgcggaccatgccgcatcattgctccagtttttgccgatctagcaaagaagcacacaaatgctgtttttctgaaggttgacgtcgatgaactgaagcctattgctgagcaattcagtgttgaggctatgccaacattcctgtttatgaaggagggagatgttaaagacagggttgtcggtgctatgaaggatgaactggcgagcaagcttgagctacatatggccatgtag

SEQ ID NO: 5681 - protein, 121 aa, Oryza sativa subsp. japonica
MAAASATAQAEGTVIAIHSLDEWTIQIEEANSAKKLVVIDFTASWCGPCRIIAPVFADLAKKHTNAVFLKVDVDELKPIAEQFSVEAMPTFLFMKEGDVKDRVVGAMKDELASKLELHMAM

SEQ ID NO: 5682 - DNA, 378 bp, Triticum aestivum
  CDS (1)..(378)
atggcggcgtcggcggcgacggcaacggcggcggcggtgggggcgggggaggtgatctccgtccacagcctggagcagtggaccatgcagatcgaggaggccaacgccgccaagaagctggtggtcattgacttcactgcatcgtggtgtggaccctgccgcattatggctccaattttcgctgatctcgccaagaagttcccagctgctgttttcctcaaggtcgatgttgatgaactgaagtccattgctgagcaattcagcgtggaggccatgccaaccttcctgttcatgaaggaaggagacgtcaaggacagggttgtcggagctatcaaggaggaactgacgaacaaggttgggctacacgcggcccagtaa

SEQ ID NO: 5683 - protein, 125 aa, Triticum aestivum
MAASAATATAAAVGAGEVISVHSLEQWTMQIEEANAAKKLVVIDFTASWCGPCRIMAPIFADLAKKFPAAVFLKVDVDELKSIAEQFSVEAMPTFLFMKEGDVKDRVVGAIKEELTNKVGLHAAQ

SEQ ID NO: 5684 - DNA, 396 bp, Lolium perenne
  CDS (1)..(396)
atgggaggctgtgtgggcaaggaccgtagcattgtggaagataagcttgatttcaaaggtggaaatgtgcatgtcatcacaaccaaagaggactgggaccaaaaggttgcagaagctaacaaagatgggaaaattgttgtggcgaatttcagcgcttcctggtgtggcccatgccgtgtcattgcacctgtttatgctgagatgtcaaagacttatccccaactcatgttcttgacaattgacgttgatgacctaatggatttcagctcaacatgggacatccgtgcaaccccgacgttcttcttcctcaagaacggccagctgattgacaagctcgtcggcgccaacagacctgagctcgaaaagaaagtacaagctattggcgatggcagctga

SEQ ID NO: 5685 - protein, 131 aa, Lolium perenne
MGGCVGKDRSIVEDKLDFKGGNVHVITTKEDWDQKVAEANKDGKIVVANFSASWCGPCRVIAPVYAEMSKTYPQLMFLTIDVDDLMDFSSTWDIRATPTFFFLKNGQLIDKLVGANRPELEKKVQAIGDGS

SEQ ID NO: 5686 - DNA, 378 bp, Hevea brasiliensis
  CDS (1)..(378)
atggagacccaagagcagcaagctaagtcaagagtggtgaaggtggattcggtggagtcttgggacttctatgttacccaagccaataatcaaggctgccctattgttgtacactttactgcttcatggtgtatcccctctgtggccatgaacccttttttcgaggaattagcctcggcttatccagatgtcctgtttctagctgttgatgtcgatgaagtcaaggaggtggcttctaaactggaggtaaaggccatgcctacatttgtgctgatgaaggatggtgcacaaattgacaggctggtgggtgccaatccagaggagataaggaaaaggattggtgggtttgctcagtccattcgtgtggctgtagcctag

SEQ ID NO: 5687 - protein, 125 aa, Hevea brasiliensis
METQEQQAKSRVVKVDSVESWDFYVTQANNQGCPIVVHFTASWCIPSVAMNPFFEELASAYPDVLFLAVDVDEVKEVASKLEVKAMPTFVLMKDGAQIDRLVGANPEEIRKRIGGFAQSIRVAVA

SEQ ID NO: 5688 - DNA, 321 bp, Coprinus comatus
  CDS (1)..(321)
atggtccaagttatatccaacctcgatgagttcaacaagctcaccaacagcgggaagatcatcatcattgatttctgggctacatggtgtggtccttgccgtgtcattagtcccatcttcgagaagttctcagaaaaatacggtgccaataacatcgtcttcgcaaaggtggatgtagacactgcctccgatatctctgaggaagcaaaaatccgtgctatgcccactttccaggtttataaggatggtcagaagatcgatgagctcgttggtgctaacccaactgcacttgagtcccttgtccagaagtctttagcgtga

SEQ ID NO: 5689 - protein, 106 aa, Coprinus comatus
MVQVISNLDEFNKLTNSGKIIIIDFWATWCGPCRVISPIFEKFSEKYGANNIVFAKVDVDTASDISEEAKIRAMPTFQVYKDGQKIDELVGANPTALESLVQKSLA

SEQ ID NO: 5690 - DNA, 381 bp, Nicotiana tabacum
  CDS (1)..(381)
atggctgctaacgatgctacttcatccgaggagggacaagtgttcggctgccacaaggttgaggaatggaacgagtacttcaagaaaggcgttgagactaagaaactggtggtggtcgattttactgcttcatggtgcggcccttgccgttttattgccccaattcttgctgacattgctaagaagatgccccatgttatattcctcaaggttgatgttgatgaactgaagactgtttcagcggaatggagtgtggaggcaatgccaacttttgtcttcattaaagatggaaaagaagtggacagagttgttggtgccaagaaagaggagttgcagcagaccatagtgaagcatgctgctcctgctactgtcactgcttga

SEQ ID NO: 5691 - protein, 126 aa, Nicotiana tabacum
MAANDATSSEEGQVFGCHKVEEWNEYFKKGVETKKLVVVDFTASWCGPCRFIAPILADIAKKMPHVIFLKVDVDELKTVSAEWSVEAMPTFVFIKDGKEVDRVVGAKKEELQQTIVKHAAPATVTA

SEQ ID NO: 5692 - DNA, 360 bp, Brassica napus
  CDS (1)..(360)
atggctgcagaagagggacaagtgatcggttgccacgagattgatgtatgggccgtgcagctcgacacagccaaacaatccaacaagctgattgtgatagatttcactgcttcatggtgcccaccatgccgcatgattgctccagttttcgcagatctggccaagaagttcatgtcaagtgccatcttcttcaaggtggacgtcgatgaactgcagaatgtagctcaagagtttggtgtggaggcaatgccgacctttgttctcatcaaagacggaaatgttgttgataaggtcgttggtgcaaggaaggaagatcttcatgccacaatagccaagcatactggtgttgctactgcttaa

SEQ ID NO: 5693 - protein, 119 aa, Brassica napus
MAAEEGQVIGCHEIDVWAVQLDTAKQSNKLIVIDFTASWCPPCRMIAPVFADLAKKFMSSAIFFKVDVDELQNVAQEFGVEAMPTFVLIKDGNVVDKVVGARKEDLHATIAKHTGVATA

SEQ ID NO: 5694 - DNA, 357 bp, Nicotiana tabacum
  CDS (1)..(357)
atggcagaggaaggacaagtcatcggcgtccacacggttgatgcatggaacgagcatctccaaaagggaattgatgacaaaaaactgatagttgtggacttcactgcttcttggtgcggtccctgtaagttcattgcctcattctatgcagagttggccaagaagatgcccactgttaccttcctgaaagtggatgtggatgaattgaagtcggtagctactgactgggctgtggaggcaatgccaactttcatgttcctcaaggagggaaagattgttgataaggtggtaggagccaaaaaagatgagctgcagcagaccattgccaagcacatcagtagtacctcaacagcctaa

SEQ ID NO: 5695 - protein, 118 aa, Nicotiana tabacum
MAEEGQVIGVHTVDAWNEHLQKGIDDKKLIVVDFTASWCGPCKFIASFYAELAKKMPTVTFLKVDVDELKSVATDWAVEAMPTFMFLKEGKIVDKVVGAKKDELQQTIAKHISSTSTA

SEQ ID NO: 5696 - DNA, 372 bp, Brassica oleracea
  CDS (1)..(372)
atggccgcaacagcagaagtgatcccagcaggagaagtgatcgcttgccacaccgtcgaggactggaacaacaagttgaaggcagccaaagaatccaacaaactgattgtgatagacttcacagcagtgtggtgcccaccttgccgtttcattgcacctatctttgtcgagctcgctaagaagcaccttgatgttgtcttcttcaaggtcgacgtcgatgaattggctactgttgctcaggagttcgatgttcaggccatgccaacctttgtctacatgaaaggcgaagagaagctcgacaaggttgttggtgctgccaaggaggaaatcgaagccaagcttttgaagcactctcaagttgctgccgcttga

SEQ ID NO: 5697 - protein, 123 aa, Brassica oleracea
MAATAEVIPAGEVIACHTVEDWNNKLKAAKESNKLIVIDFTAVWCPPCRFIAPIFVELAKKHLDVVFFKVDVDELATVAQEFDVQAMPTFVYMKGEEKLDKVVGAAKEEIEAKLLKHSQVAAA

SEQ ID NO: 5698 - DNA, 372 bp, Brassica rapa
  CDS (1)..(372)
atggccgcaacagcagaattgatcccagcaggagaagtgatcgcttgccacaccgtcgaggactggaacaacaagctcaaggcagccaaagaatccaacaaactgattgtgatagacttcacagcagtgtggtgcccaccttgccgtttcattgcacccatctttgtcgagctcgctaagaagcaccttgatgttgtcttcttcaaggtcgacgtcgatgaattggccactgttgctaaggagttcgatgttcaggccatgccgacctttgtctacatgaaaggcgaagagaagctcgacaaggttgttggtgctgcgaaggaggaaatcgaagccaagcttttgaagcactctcaagttgctgccgcttga

SEQ ID NO: 5699 - protein, 123 aa, Brassica rapa
MAATAELIPAGEVIACHTVEDWNNKLKAAKESNKLIVIDFTAVWCPPCRFIAPIFVELAKKHLDVVFFKVDVDELATVAKEFDVQAMPTFVYMKGEEKLDKVVGAAKEEIEAKLLKHSQVAAA

SEQ ID NO: 5700 - DNA, 351 bp, Fagopyrum esculentum
  CDS (1)..(351)
atggcggaagaagcacaagttatcgcatgccacacggtccaggagtggaacgagaagttccagaaagccaaggattccggcaaattgattgtgatcgatttcaccgcatcatggtgcggtccctgccgcgtcataactccgtacgtgtctgagcttgccaagaagtttcctcatgtggccttcttcaaagtggatgttgatgatttgaaggatgtcgctgaggaatacaaggtggaggcaatgccgagctttgttatactgaaagaggggcaggaggttgaaaggattgtgggtgccaggaaggacgaactccttcataagatagcagttcatgccccaatcactgcttga

SEQ ID NO: 5701 - protein, 116 aa, Fagopyrum esculentum
MAEEAQVIACHTVQEWNEKFQKAKDSGKLIVIDFTASWCGPCRVITPYVSELAKKFPHVAFFKVDVDDLKDVAEEYKVEAMPSFVILKEGQEVERIVGARKDELLHKIAVHAPITA

SEQ ID NO: 5702 - DNA, 378 bp, Picea mariana
  CDS (1)..(378)
atggcggagggaaacgtgtttgcatgtcactctacagagggctggcgctccaagctgcaggaggccatcgatactaaacgtctggtggcagtagatttcactgcaacgtggtgtggaccttgtcgagtcataggtccagtgtttgttgagctgtcaaagaagttcccagaaatatttttcttgaaggtcgatgtggacgaattgagggatgtcgctcaagagtgggatgtggaggccatgcctacatttatctttatcaaggatggaaaggctgttgataaggttgtgggtgcaaagaaagatgatcttgaaagaaaagttgcagccctagcagctgctgctactactacagaagcaacccttcctgcacaagcttag

SEQ ID NO: 5703 - protein, 125 aa, Picea mariana
MAEGNVFACHSTEGWRSKLQEAIDTKRLVAVDFTATWCGPCRVIGPVFVELSKKFPEIFFLKVDVDELRDVAQEWDVEAMPTFIFIKDGKAVDKVVGAKKDDLERKVAALAAAATTTEATLPAQA

SEQ ID NO: 5704 - DNA, 357 bp, Ricinus communis
  CDS (1)..(357)
atggcagcagaagaagggcaagtgatcgggtgccacactgttgaggcatggaatgagcaattgcagaagggaaatgataccaagggactgatcgttgttgattttactgcttcatggtgtggaccatgccgtttcattgctcccttcttggctgagctggccaagaaactgccaaatgttaccttcctgaaggtggatgtggatgaactgaagactgttgctcacgagtgggctgtggagtcaatgccaacctttatgttcctgaaggaggggaagattatggacaaggtggttggagcaaagaaagacgaactgcagcaaactatagcgaaacacatggctactgcttccacttaa

SEQ ID NO: 5705 - protein, 118 aa, Ricinus communis
MAAEEGQVIGCHTVEAWNEQLQKGNDTKGLIVVDFTASWCGPCRFIAPFLAELAKKLPNVTFLKVDVDELKTVAHEWAVESMPTFMFLKEGKIMDKVVGAKKDELQQTIAKHMATAST

SEQ ID NO: 5706 - DNA, 384 bp, Triticum aestivum
  CDS (1)..(384)
atggcggcgtcggcggcgacggcgacggcgacggcggcggcggtaggggcgggggaggtgatctccgtccacagcctggagcagtggaccatgcagatcgaggaggccaacgccgccaagaagctggtggtgattgacttcactgcatcatggtgcggaccatgccgcattatggctccaattttcgctgatctcgccaagaagttcccagctgctgttttcctcaaggtcgacgttgatgaactgaagcccattgctgagcaattcagcgtggaggccatgccaaccttcctgttcatgaaggaaggagatgtcaaggacagggttgtcggagctatcaaggaggaactgacgaccaaggttgggctacacgcggcccagtaa

SEQ ID NO: 5707 - protein, 127 aa, Triticum aestivum
MAASAATATATAAAVGAGEVISVHSLEQWTMQIEEANAAKKLVVIDFTASWCGPCRIMAPIFADLAKKFPAAVFLKVDVDELKPIAEQFSVEAMPTFLFMKEGDVKDRVVGAIKEELTTKVGLHAAQ

SEQ ID NO: 5708 - DNA, 396 bp, Oryza sativa
  CDS (1)..(396)
atggggtcctgtgtgggaaaggaacgcagtgatgaagaagacaagattgacttcaaaggtggcaatgtgcatgtgattagtaacaaagagaattgggaccacaaaattgcagaggcaaacaaggatgggaaaattgtgattgcaaatttcagtgctgcatggtgtggaccatgccgtgtcattgcacctgtatatgctgagatgtcacagacatacccccagttcatgttcttgactatagatgtcgacgagttaatggacttcagctcatcatgggacatccgagcgacaccgacgttcttcttcctaaagaacggggagcaggtggacaagctcgtcggcgccaacaagccggagctggagaagaaagtggccgcgcttgctgacagcgcctga

SEQ ID NO: 5709 - protein, 131 aa, Oryza sativa
MGSCVGKERSDEEDKIDFKGGNVHVISNKENWDHKIAEANKDGKIVIANFSAAWCGPCRVIAPVYAEMSQTYPQFMFLTIDVDELMDFSSSWDIRATPTFFFLKNGEQVDKLVGANKPELEKKVAALADSA

SEQ ID NO: 5710 - DNA, 414 bp, Oryza sativa
  CDS (1)..(414)
atggggaattgtttgcgtaaggctcaagcggatgatgattctgatcataatgtggagtttgcttctgggaatgtgcaagttattactaccaaagaatcttgggaccaaaagttggaacaagcgaggagggacagtaaaattgttattgcaaatttcagtgccacatggtgtggtccttgtaagatgattgcaccatattattgcgagttgtccgagaaatacccatctatcatgttcttattagtcgatgtggatgaactagctgacttcagcactttatgggacatcaaagccacaccaactttcttctttcttaaagatggaaaagaggttgacaaacttgtaggagccaacaagccagagctggagaagaagattgttgtgattaatgatgcagtgcctcataagcaatag

SEQ ID NO: 5711 - protein, 137 aa, Oryza sativa
MGNCLRKAQADDDSDHNVEFASGNVQVITTKESWDQKLEQARRDSKIVIANFSATWCGPCKMIAPYYCELSEKYPSIMFLLVDVDELADFSTLWDIKATPTFFFLKDGKEVDKLVGANKPELEKKIVVINDAVPHKQ

SEQ ID NO: 5712 - DNA, 408 bp, Oryza sativa
  CDS (1)..(408)
atgggttgctgtggcagcagcactgtagacgccgaggagcacctggactacagtggcggaaatgtgactttggtaactgatcaaaagaattgggacaatacaatggaagaagtagctgagcatggcaaaacagttgtgctaaaattcagtgcaatttggtgcactccgtgtaggaatgctgcccctctattcgctgaactttcactgaagtatcctgacattgttttcgtgtccgtggatgtagacgaaatgccggagctggtgacgcaatacgatgtgcgtgcaaccccaacgttcatcttcatgaaaaacaatgaggagattgataagcttgttggaggcaaccatgaagatcttcaggaaaagttcgaacagcttaaccggccaaagttatatgatgatgtataa

SEQ ID NO: 5713 - protein, 135 aa, Oryza sativa
MGCCGSSTVDAEEHLDYSGGNVTLVTDQKNWDNTMEEVAEHGKTVVLKFSAIWCTPCRNAAPLFAELSLKYPDIVFVSVDVDEMPELVTQYDVRATPTFIFMKNNEEIDKLVGGNHEDLQEKFEQLNRPKLYDDV

SEQ ID NO: 5714 - DNA, 423 bp, Brassica napus
  CDS (1)..(423)
atgggaagctgtgtctctaagggcaaagaagacgatgattcaatccataacgttgatttttccggtggcaacgttcatctcatcacaactaaagaaagctgggatgagaaactagccgaagctggccgtgatggcaaaattgtgattgcaaacttcagcgcgacatggtgtgggccttgtaaggtcgtggcaccgttcttcatcgagctctcagagaaacatccttctatcatgttccttcttgtagatgttgatgaactcagcgattttagctcatcatgggacataaaggcaacaccaaccttcttctttcttaaaaacggtcagcaaataggcaagcttgttggtgctaacaagcctgagctacagaagaaggttacttccatccttgactctgtacctgagagtccacaacggccttga

SEQ ID NO: 5715 - protein, 140 aa, Brassica napus
MGSCVSKGKEDDDSIHNVDFSGGNVHLITTKESWDEKLAEAGRDGKIVIANFSATWCGPCKVVAPFFIELSEKHPSIMFLLVDVDELSDFSSSWDIKATPTFFFLKNGQQIGKLVGANKPELQKKVTSILDSVPESPQRP

SEQ ID NO: 5716 - DNA, 381 bp, Brassica napus
  CDS (1)..(381)
atggaagatcaagaactgcagaagagttcaagagttgttaaagtcgattctcctgagtcatggaacttttatgtgagtcaagccaagagtcaggcttgtcctattgtggctcatttcacagcatcttggtgtattccttctgtgtttatgaactcgttctttgaagatcttgcctctagctataaggatgctctgtttcttatagttgatgttgatgaagtcaaggaagtggcgagacggctaaaggtaaaggctatgcctacttttatgttcttgaaggatggtaatacgatggacaaactggtgggcgcaaatcctgatgagatcaagaaaagggtcgatggtttcgttcagtcctcacgccttgttcatattgcttag

SEQ ID NO: 5717 - protein, 126 aa, Brassica napus
MEDQELQKSSRVVKVDSPESWNFYVSQAKSQACPIVAHFTASWCIPSVFMNSFFEDLASSYKDALFLIVDVDEVKEVARRLKVKAMPTFMFLKDGNTMDKLVGANPDEIKKRVDGFVQSSRLVHIA

SEQ ID NO: 5718 - DNA, 456 bp, Brassica napus
  CDS (1)..(456)
atgggtgctaatgtttcttcgccagaccagaggtattcagtgacggccgacctcccttccaggaggccatggacacctcgcttcgagtcccatatttctccttacaaagtcaacatcccccttattgtggaaatcaagaacaagaatcagtggaaatctcggctcaacagtctcaaggacaccaacaagctgcttgtgatcgagttcacggccaaatggtgtggaccttgtaaatcccttgagccgaaggttgaagagttggcggctaagtacacagatgttgaattcgtgaagattgatgtcgatgtgttaatgagtgtgtggatggagtacaaccttcatactttgcctgcgattgtattcatgaagagaggccaagaagtagacagagttgtgggtgtgaagtttgatgaattagagaggaaactccacaaatacgcacaatccttcttttga

SEQ ID NO: 5719 - protein, 151 aa, Brassica napus
MGANVSSPDQRYSVTADLPSRRPWTPRFESHISPYKVNIPLIVEIKNKNQWKSRLNSLKDTNKLLVIEFTAKWCGPCKSLEPKVEELAAKYTDVEFVKIDVDVLMSVWMEYNLHTLPAIVFMKRGQEVDRVVGVKFDELERKLHKYAQSFF

SEQ ID NO: 5720 - DNA, 387 bp, Brassica napus
  CDS (1)..(387)
atgggttccaacgtttcatctgtgcatgatgttccttcatcagcggaaaccaagaatggtttggttgtggaaatggaatcaagaagacagtggagatctctctttgattccatgaaaggctcaaataaattgctagtgattgatttcactgctgcatggtgtggaccttgtaaagcaatggaacctagagttaaggagatcgtttctaggtatccagaagctgtttttgcgagggttgatgtggatagattcatggatgtggctggaacatatagagcaaatactcttccagcctttgtttttgtgaagagaggagaagagattgatagggttgttggagccaaacctgatgaacttgtgtacaagattgaaaagcatagggtttaa

SEQ ID NO: 5721 - protein, 128 aa, Brassica napus
MGSNVSSVHDVPSSAETKNGLVVEMESRRQWRSLFDSMKGSNKLLVIDFTAAWCGPCKAMEPRVKEIVSRYPEAVFARVDVDRFMDVAGTYRANTLPAFVFVKRGEEIDRVVGAKPDELVYKIEKHRV

SEQ ID NO: 5722 - DNA, 423 bp, Brassica napus
  CDS (1)..(423)
atgggaagctgcgtctctaaggacacaggagacgatgattcagttcataacgttgatttctcgggtgggaatgttcatctgattacaacaaaagagagctgggatgagaaattagctgaagctggtcgtgatggcaaaattgtgattgcaaacttcagcgccacatggtgcggtccatgtaagattgtggcaccgttttacgtggagctctctgagaaacatccttctcttatgttccttctcgtagatgttgatgaacttagtgattttagctcaacatgggacataaaggcaacaccaaccttcttctttctaaagaacggggagcaaataggcaagcttgttggagctaacaagcctgagctacagaagaaggttacttctatcatcgactctgttcctgaaagtccacaacggccttga

SEQ ID NO: 5723 - protein, 140 aa, Brassica napus
MGSCVSKDTGDDDSVHNVDFSGGNVHLITTKESWDEKLAEAGRDGKIVIANFSATWCGPCKIVAPFYVELSEKHPSLMFLLVDVDELSDFSSTWDIKATPTFFFLKNGEQIGKLVGANKPELQKKVTSIIDSVPESPQRP

SEQ ID NO: 5724 - DNA, 360 bp, Triticum aestivum
  CDS (1)..(360)
atggcggaggaggggaaggtgatcgcgatccacagccaggagcagtgggccgccaagatcgaggaggctggcagcagcacgaagctggtggtgatcgacttcactgcaacatggtgcggaccatgccgcttcatttctccaatcttagatgagattgccaagaagcttccaaatgttcttttcctcaaggtggatgttgatgaaatgaagtcaattgccgaggagttcagtgtcgaggccatgccgacgtttgtgcttatgaaggaaggaaaggtcgtggacaaggttgtgggagctgccaaggaggagctgattgggaagattgcgaagcacagtgcaactgcatgcatagtggagtag

SEQ ID NO: 5725 - protein, 119 aa, Triticum aestivum
MAEEGKVIAIHSQEQWAAKIEEAGSSTKLVVIDFTATWCGPCRFISPILDEIAKKLPNVLFLKVDVDEMKSIAEEFSVEAMPTFVLMKEGKVVDKVVGAAKEELIGKIAKHSATACIVE

SEQ ID NO: 5726 - DNA, 390 bp, Zea mays
  CDS (1)..(390)
atggagatccagcaccaccgggggctgggcaactccaaggttgtcaaggtgcagagcgaggaggcgtgggatctgttcaccgatcaagcgagcaacgaaggccggcccgttgttgcccatttcggagcgtcatggtgcgtgacgtccctgtccatgaactacaagtttgaggagctggcgcagacccaccccgaggtcttgttcctctacgtggacgtcgacgatgtccagagtgtttcatccaggtacggagtgaaggccatgccgacgttcttcctcatcaagagcaaggaggtggtggggaagatcgtcggggcgaacccagacgaggtgaagaagctggtggatgcttccgccgaacccttggagactcagatagtcgtggagtag

SEQ ID NO: 5727 - protein, 129 aa, Zea mays
MEIQHHRGLGNSKVVKVQSEEAWDLFTDQASNEGRPVVAHFGASWCVTSLSMNYKFEELAQTHPEVLFLYVDVDDVQSVSSRYGVKAMPTFFLIKSKEVVGKIVGANPDEVKKLVDASAEPLETQIVVE

SEQ ID NO: 5728 - DNA, 357 bp, Linum usitatissimum
  CDS (1)..(357)
atggcagcggaggaaggcctggtgtttggttgccataccgttgaagagtgggaggcccagcttcagaaggctaacgaatctaagaagctggtggttgttgatttcactgcgacatggtgtgggccttgccgtttgatggtgccattcctcgcagagcttgctaagaagctgcccacagttaccttcctcaaggtcgatgtggatgaactcaaaacagttgctgaggattgggctgttgaggcaatgccaacattcatgtttgtgaaaaatggaaagatactcgacagggtggttggtgccaagaaggaagagctgcagtatactatcaacaagtatttggctactgcctctgcttga

SEQ ID NO: 5729 - protein, 118 aa, Linum usitatissimum
MAAEEGLVFGCHTVEEWEAQLQKANESKKLVVVDFTATWCGPCRLMVPFLAELAKKLPTVTFLKVDVDELKTVAEDWAVEAMPTFMFVKNGKILDRVVGAKKEELQYTINKYLATASA

SEQ ID NO: 5730 - DNA, 420 bp, Helianthus annuus
  CDS (1)..(420)
atggggcattgcttctcttcgcctcgggctgatgaagacgagaccaacagtcatgctcagcttgcgggaggtaacgtgactctcatcactaccaagaacgcttgggatcaaaaactggcagaagcaaagactcaaggcaaaatagtgattggcaacttcagtgcaacttggtgtggtccatgcaaatcaatggcaccttactacattgagctatcagagaagtatccttctcttatgtttctgaccgtagacgttgacgaattaacggattttagcacacaactggatgtaaaagctactccaacattcttcttctttaaagatggtcaacaaattgataaacttgtgggagccaacaagcctgaactgcagaaaaagataaccgccattgttgattcacaagcaaccataaatccataa

SEQ ID NO: 5731 - protein, 139 aa, Helianthus annuus
MGHCFSSPRADEDETNSHAQLAGGNVTLITTKNAWDQKLAEAKTQGKIVIGNFSATWCGPCKSMAPYYIELSEKYPSLMFLTVDVDELTDFSTQLDVKATPTFFFFKDGQQIDKLVGANKPELQKKITAIVDSQATINP

SEQ ID NO: 5732 - DNA, 372 bp, Brassica napus
  CDS (1)..(372)
atgggaactgtaatatcaaatctgctgggggcagatgaagggaatgaatccgagcatagtggcgtcactaagttgagctcatcagctcagtggcagcttcacttcaacgggatgaaagattcgaaccagctgctggtgattgacttcttcgcaagctggtgtgggccttgtaagttcatcgagcccgcgttcagacacatggctgtcaagttcactgatgttagcttcgtcaaggaggtggctagagagttcaacgtgaatgcgatgccaacttttgtgctggtgaaaaatggtaaagaggttgacaggatagttggaaccaaacaagctgaacttgagaataaagttaccaaacacagggggggacagtga

SEQ ID NO: 5733 - protein, 123 aa, Brassica napus
MGTVISNLLGADEGNESEHSGVTKLSSSAQWQLHFNGMKDSNQLLVIDFFASWCGPCKFIEPAFRHMAVKFTDVSFVKEVAREFNVNAMPTFVLVKNGKEVDRIVGTKQAELENKVTKHRGGQ

SEQ ID NO: 5734 - DNA, 372 bp, Brassica napus
  CDS (1)..(372)
atggccgcaacagcagaagtgatcccagcaggagaagtgatcgcttgccacaccgtcgatgactggaacaacaagttcaaggccgccaaagaatccaacaagctgattgtgatagacttcacagcaacatggtgcccaccttgccgtttcattgcacccatcttcgtcgagttggctaagaagcaccttgatgtcgttttcttcaaggtcgatgtcgatgaattgaattctgttgctaaggatttcgaagttgaggccatgccgacctttgtctacatgaagggtgaagagaaggtcgacaaggtggtcggtgctgcgaaagatgaaatcgtagccaagcttgagaagcactctcaagttgcttcggcttga

SEQ ID NO: 5735 - protein, 123 aa, Brassica napus
MAATAEVIPAGEVIACHTVDDWNNKFKAAKESNKLIVIDFTATWCPPCRFIAPIFVELAKKHLDVVFFKVDVDELNSVAKDFEVEAMPTFVYMKGEEKVDKVVGAAKDEIVAKLEKHSQVASA

SEQ ID NO: 5736 - DNA, 456 bp, Brassica napus
  CDS (1)..(456)
atgatgactcaaagtgaaagtgtcaataagaaagcaattattcaattaaaagtatcaaaatcaaagagagagagagagaaaacaatggccgcaacagcagaagtgatcccagcaggagaagtgatcgcttgccacaccgtcgaggactggaacaacaagttgaaggcagccaaagaatccaacaaactgattgtgatagacttcacagcagtgtggtgcccaccttgccgtttcattgcacccatctttgtcgagctcgctaagaagcaccttgatgttgtcttcttcaaggtcgacgtcgatgaattggctactgttgctcaggagttcgatgttcaggccatgccaacctttgtctacatgaaaggcgaagagaagctcgacaaggttgttggtgctgccaaggaggaaatcgaagccaagcttttgaagcactctcaagttgctgccgcttga

SEQ ID NO: 5737 - protein, 151 aa, Brassica napus
MMTQSESVNKKAIIQLKVSKSKREREKTMAATAEVIPAGEVIACHTVEDWNNKLKAAKESNKLIVIDFTAVWCPPCRFIAPIFVELAKKHLDVVFFKVDVDELATVAQEFDVQAMPTFVYMKGEEKLDKVVGAAKEEIEAKLLKHSQVAAA

SEQ ID NO: 5738 - DNA, 354 bp, Brassica napus
  CDS (1)..(354)
atggccggagaaggagaagtgatcgcttgccacaccatcgaagtctggaacgagaagatcaaagccgccaacgaatccaagaaactgatcgtgatagacttcactgctacatggtgcccaccttgccgcttcattgcaccagtcttcgtagacatggccaagaagttcctcaacgtcgtcttcttcaagatcgacgtggacgaactgcaatccgttgctaaagaattcaaagtcgaggcaatgcccacttttctcttcatgagagaaggtgagatcgtggaccgtgttgtcggtgcaaggaaggaggaaatccatcagacattgatgaagcacggtggtgttgcttctgcttaa

SEQ ID NO: 5739 - protein, 117 aa, Brassica napus
MAGEGEVIACHTIEVWNEKIKAANESKKLIVIDFTATWCPPCRFIAPVFVDMAKKFLNVVFFKIDVDELQSVAKEFKVEAMPTFLFMREGEIVDRVVGARKEEIHQTLMKHGGVASA

SEQ ID NO: 5740 - DNA, 387 bp, Brassica napus
  CDS (1)..(387)
atgggttccaacgtttcatctgtgcatgatgttccttcatcagcggaaaccaagaatggtttggttgtggaaatggaatcaagaagacagtggagatctctctttgattccatgaaaggctcaaataaattgctagtgattgatttcactgctgcatggtgtggaccttgtaaagcaatggaacctagagttaaggagatcgtttctaggtatccagaagctgtttttgcgagggttgatgtggatagattcatagatgtggctggaacatatagagcaaatactcttccagcctttgtttttgtgaagagaggagaagagattgatagcgttgttggagccaaacctgatgaacttgtgtacaagattgaaaagcatacggcttaa

SEQ ID NO: 5741 - protein, 128 aa, Brassica napus
MGSNVSSVHDVPSSAETKNGLVVEMESRRQWRSLFDSMKGSNKLLVIDFTAAWCGPCKAMEPRVKEIVSRYPEAVFARVDVDRFIDVAGTYRANTLPAFVFVKRGEEIDSVVGAKPDELVYKIEKHTA

SEQ ID NO: 5742 - DNA, 456 bp, Brassica napus
  CDS (1)..(456)
atgatgactcaaagtgaaagtgtcaataaggcagcaattattcaattaaaagtatcaaaatcaaagagagagagagagaaaacaatggccgcaacagcagaattgatcccagcaggagaagtgatcgcttgccacaccgtcgaggactggaacaacaagctcaaggcagccaaagaatccaacaaactgattgtgatagacttcacagcagtgtggtgcccaccttgccgtttcattgcacccatctttgtcgagctcgctaagaagcaccttgatgttgtcttcttcaaggtcgacgtcgatgaattggctactgttgctcaggagttcgatgttcaggccatgccaacctttgtctacatgaaaggcgaagagaagctcgacaaggttgttggtgctgccaaggaggaaatcgaagccaagcttttgaagcactctcaagttgctgccgcttga

SEQ ID NO: 5743 - protein, 151 aa, Brassica napus
MMTQSESVNKAAIIQLKVSKSKREREKTMAATAELIPAGEVIACHTVEDWNNKLKAAKESNKLIVIDFTAVWCPPCRFIAPIFVELAKKHLDVVFFKVDVDELATVAQEFDVQAMPTFVYMKGEEKLDKVVGAAKEEIEAKLLKHSQVAAA

SEQ ID NO: 5744 - DNA, 354 bp, Brassica napus
  CDS (1)..(354)
atggccggagaaggagaagtgatcgcttgccacaccatcgaagtctggaacgagcagatcaaagccgccaacgactccaagaaactgatcgtgatagacttcactgctacatggtgcccaccttgccgtttcattgcaccagtcttcgtagagatggccaagaagttcctcaacgtcgtcttcttcaagatcgatgtggacgaattgcaatccgttgctaaagaattcaaagtggaggcaatgcccacttttctcttcatgagggaaggtgagatcgtggaccgtgttgtcggtgcaaggaaggaggaaatccatcagacattgatgaagcacggtggtgttgcttctgcttaa

SEQ ID NO: 5745 - protein, 117 aa, Brassica napus
MAGEGEVIACHTIEVWNEQIKAANDSKKLIVIDFTATWCPPCRFIAPVFVEMAKKFLNVVFFKIDVDELQSVAKEFKVEAMPTFLFMREGEIVDRVVGARKEEIHQTLMKHGGVASA

SEQ ID NO: 5746 - DNA, 360 bp, Brassica napus
  CDS (1)..(360)
atggcggcagaagagggacaagtgatcggttgccacgagattgatgtatgggccgtgcagctcgacacagccaaacaatccaacaagctgattgtgatagatttcactgcttcatggtgcccaccatgccgcatgattgctccagttttcgcagatctggccaagaagttcatgtcaagtgccatcttcttcaaggtggacgtcgatgaactgcagaatgtagctcaagagtttggtgtggaggcaatgccgacctttgtgttcatcaaagacggaaatgttgttgataaggtcgttggtgcaaggaaggaagatcttcatgccacaatagccaagcatactggtgttgctactgcttaa

SEQ ID NO: 5747 - protein, 119 aa, Brassica napus
MAAEEGQVIGCHEIDVWAVQLDTAKQSNKLIVIDFTASWCPPCRMIAPVFADLAKKFMSSAIFFKVDVDELQNVAQEFGVEAMPTFVFIKDGNVVDKVVGARKEDLHATIAKHTGVATA

SEQ ID NO: 5748 - DNA, 402 bp, Brassica napus
  CDS (1)..(402)
atgggaggtgtattatcatctgtgtttggaggtggtggagaagaagcagttgcagcgaatgaatccgagcaaagtcgcgtcatgaagtttagctcatcggctcggtggcagcttcacttcaacgagatcaaagaatcctcgaaactgctggtggttgacttctcagcatcctggtgtggaccttgtaggatgatcgagcctgcgttcatcgccatggctgccaagttcactgatgttgaattcgtcaaattggatgtcgatgaacttcccgatgtggctaaagagttcaatgtgacggggatgccaacttttgtgctggtgaaaaatggtaaagagattgaaaggatcgttggagcaaggaaagatgaacttgagaagaaagttctcaaacacagggcatag

SEQ ID NO: 5749 - protein, 133 aa, Brassica napus
MGGVLSSVFGGGGEEAVAANESEQSRVMKFSSSARWQLHFNEIKESSKLLVVDFSASWCGPCRMIEPAFIAMAAKFTDVEFVKLDVDELPDVAKEFNVTGMPTFVLVKNGKEIERIVGARKDELEKKVLKHRA

SEQ ID NO: 5750 - DNA, 561 bp, Brassica napus
  CDS (1)..(561)
atgactctctccctccgaatcgctccgtcaccggtatcgttccgttactctccggctccgtccaccccctccggcgtcggattacgtccggccaagcagcgctgccggatcccgaactcaggcgtcgcggcgaaaacaggatcatgttctagcggtggtgttttagatttaaggaagaggatcgccggttcctgtgtggcgaggtgtagcttagaaacggtgaatgtcagtgtcggcgaggtgacggaggttgacaaggacacgttttggccaatcgttaaagccgctggtgataagcttgttgtcctcgacatgtacactcagtggtgtggtccatgcaaagttatggctcctaaatacaaagagctatcagagaagtaccaggacatggtgtttcttaagcttgactgcaacgaagaaaacaagccagtggcacaggagctaggaattagagtggttccaacctttaagatcttgaaggacaacaaggtgataaaggaagtggtcggggcaaaatttgatgagttgcttgcagccattgaggcagcgaggtcaggctga

SEQ ID NO: 5751 - protein, 186 aa, Brassica napus
MTLSLRIAPSPVSFRYSPAPSTPSGVGLRPAKQRCRIPNSGVAAKTGSCSSGGVLDLRKRIAGSCVARCSLETVNVSVGEVTEVDKDTFWPIVKAAGDKLVVLDMYTQWCGPCKVMAPKYKELSEKYQDMVFLKLDCNEENKPVAQELGIRVVPTFKILKDNKVIKEVVGAKFDELLAAIEAARSG

SEQ ID NO: 5752 - DNA, 345 bp, Brassica napus
  CDS (1)..(345)
atggctggtgaagaaggacaagtgatcgcatgtcacaccgtggaggcatggaatgaacaactccaaaagggcaatgactctaaaactcttgtggtggttgatttcacggcgtcttggtgtgggccatgtcgtttcatagctccattctttgctgatttggctaagaaactccctaatgtgatgttcctcaaggttgatattgatgaactaaagtcagtggcgagtgactgggcgattgagtcgatgccaacattcatgttcatgaaagaagggaagattgtggacaaagttgttggagccaagaaagatgagcttcagtctactattgccaagcacttggcttaa

SEQ ID NO: 5753 - protein, 114 aa, Brassica napus
MAGEEGQVIACHTVEAWNEQLQKGNDSKTLVVVDFTASWCGPCRFIAPFFADLAKKLPNVMFLKVDIDELKSVASDWAIESMPTFMFMKEGKIVDKVVGAKKDELQSTIAKHLA

SEQ ID NO: 5754 - DNA, 402 bp, Zea mays
  CDS (1)..(402)
atgggctccttcttctcgaccttagtgacgccccctccggccgccgacgacccgaactgcgccgtggtggccgcgcactccaaggccacctacgacgagcagtgggcggcccacaagagcagcagcaagctgatggtgatcgacttctcggcgtcctggtgcgggccctgccgcttcatcgagccggccttcaaggagctggcctcccgcttcaccgatgccatcttcgtcaaggtcgacgtcgacgagctcgcggaggtcgcaaggacatggaaggtagaggcgatgccaacgttcgtgctggtcaaggatgggaaggaggtaggccgtgtgattggggctaagaaggacgagcttgagaggaagatcaggatgttcgtcacgtcatcttcctcgtcctaa

SEQ ID NO: 5755 - protein, 133 aa, Zea mays
MGSFFSTLVTPPPAADDPNCAVVAAHSKATYDEQWAAHKSSSKLMVIDFSASWCGPCRFIEPAFKELASRFTDAIFVKVDVDELAEVARTWKVEAMPTFVLVKDGKEVGRVIGAKKDELERKIRMFVTSSSSS

SEQ ID NO: 5756 - DNA, 366 bp, Glycine max
  CDS (1)..(366)
atggccatggcatatgttgctagatcatcggagtcatctcaagtgcttaatttccattccactgctaaatggaatgctcactttgatgccttgaaacaaactaacaaactgatggtggttgatttcactgcttcatggtgtggaccttgcaaactcatggacccagttatccaagagtttgctacaaaatacagagatgttgagtttgtcaagattgatgtggatgagttaatggaggtatctcaacattaccaagtgcagggaatgccaactttcatgctgattaagaaaggcaaagtggctgataaagtggtgggagtgagaaaggaggagctacaaaggttgattgaacaacacagaaaataa

SEQ ID NO: 5757 - protein, 121 aa, Glycine max
MAMAYVARSSESSQVLNFHSTAKWNAHFDALKQTNKLMVVDFTASWCGPCKLMDPVIQEFATKYRDVEFVKIDVDELMEVSQHYQVQGMPTFMLIKKGKVADKVVGVRKEELQRLIEQHRK

SEQ ID NO: 5758 - DNA, 417 bp, Glycine max
  CDS (1)..(417)
atggcacccacaatctataatttttcgtattctaaaaggttttcagagtcattcaattcttcaaaatcaaaaagagagtcatccagttccaacatccttgctttccactccacagctcaatggaatgctcattataaagccaccaaagaaactaacaaactgatggtacttgatttcacagccacatggtgtggaccttgcaaactcatggacccagttatccaagagtttgctggaaattacacagatgttgacttcatcaagattgatgtggaggagttaacggaagtgtctcaagcactccaggtctaccaattgccaacattcatactcgttaagaaaggcaaagttgctgatagagtggtgggggtgaaaaaggaggagctgaaaaggtcgattgagaagcacagaaaataa

SEQ ID NO: 5759 - protein, 138 aa, Glycine max
MAPTIYNFSYSKRFSESFNSSKSKRESSSSNILAFHSTAQWNAHYKATKETNKLMVLDFTATWCGPCKLMDPVIQEFAGNYTDVDFIKIDVEELTEVSQALQVYQLPTFILVKKGKVADRVVGVKKEELKRSIEKHRK

SEQ ID NO: 5760 - DNA, 381 bp, Glycine max
  CDS (1)..(381)
atgaaaggtcaacaacagctaaaaaaatctaaggtggtgaaaattgactcaagaaaatcatgggaacaccacataactaatgcaaccaataaaggctaccctgttatggttcatttctctgcttattggtgcatgccttcaatagctatgaatcatttctttcaacaactggcctccacctatcaaaatgttctctttctgaatgttgatgttgatgaggtcaaggaagttgcttccaagttggaaattaaagcaattcctaccttttgtttgatgaatggaggagctccagtggataaaattgtgggtgcaaaccctgatgaattaaggaaaaggatcaattgttttattcaccagaaacattcacccaagtcagtgtga

SEQ ID NO: 5761 - protein, 126 aa, Glycine max
MKGQQQLKKSKVVKIDSRKSWEHHITNATNKGYPVMVHFSAYWCMPSIAMNHFFQQLASTYQNVLFLNVDVDEVKEVASKLEIKAIPTFCLMNGGAPVDKIVGANPDELRKRINCFIHQKHSPKSV

SEQ ID NO: 5762 - DNA, 423 bp, Glycine max
  CDS (1)..(423)
atgggctccttgttttcttcccccagcgccaccgaggcggagaatcctgacgtgaaagcggagaatcctgacgtgaaagcgaggagttctgatcacgtgaaagcgttcgactccgcggagagctggcagagctactggaaagagatcaaagactcccctaagccagttgtgatttttttcacggcgtcctggtgtggcccttgcaaattcatcactccactgtttcacgagatggccgcaaagtatccaaacgctgactacgtcaaaatcgacgtggaagaattatctggtgtggcgaaggagtataaggtgaaggcgatgccgacgttcgtggcgtggaaggaaggaaaggaagttgagagggttgtgggagccaataaggaagagctcgagaaaaagattaagcaactttctcaatcgtga

SEQ ID NO: 5763 - protein, 140 aa, Glycine max
MGSLFSSPSATEAENPDVKAENPDVKARSSDHVKAFDSAESWQSYWKEIKDSPKPVVIFFTASWCGPCKFITPLFHEMAAKYPNADYVKIDVEELSGVAKEYKVKAMPTFVAWKEGKEVERVVGANKEELEKKIKQLSQS

SEQ ID NO: 5764 - DNA, 414 bp, Glycine max
  CDS (1)..(414)
atggggaattgtttgcgcaaggctcatgcggatgatgattctgatcatattgtggagcttgcttctgggaatgtgcaacttattactaccaaagaatcttgggaccaaaagttggatcaagcgaggaaggagagtaaaattgtaattgcaaatttcagtgcaacatggtgtggtccttgtaaggtgattgcaccacattattgcgagttgtccgtgaaatacccgtctatcatgttcttattagtcgatgtggatgaactagctgacttcagcacttcgtgggacatcaaagccacaccaactttcttctttcttaaagatggaaaagaagttgacaaacttgtaggagccaacaagccagagctggagaagaagattgttgtggttaatgatgtagtgcctcataagcaatag

SEQ ID NO: 5765 - protein, 137 aa, Glycine max
MGNCLRKAHADDDSDHIVELASGNVQLITTKESWDQKLDQARKESKIVIANFSATWCGPCKVIAPHYCELSVKYPSIMFLLVDVDELADFSTSWDIKATPTFFFLKDGKEVDKLVGANKPELEKKIVVVNDVVPHKQ

SEQ ID NO: 5766 - DNA, 420 bp, Glycine max
  CDS (1)..(420)
atggggagttgtgtgtctaagaatcatgctaaggataatgattctgatcatgatgtggattttgctgctgggaatgtgaaacttattaccaccaaagaagcgtgggaccaatctttggaagaagcaaggaggggtggcaaaattgtgattgcaaatttcagtgcaacatggtgtggtccttgtaagatgattgcgccatattacagcgagttatctgagaaatacacatctatgatgttcttgttagttgatgtggatgatctaactgacttcagcacttcatgggacatcaaagccacaccaactttcttctttcttaaagatggacaacaacttgacaaacttgtaggagccaacaagccagaactgctgaagaagattgttgtcattaatgattcgcttcccgaatataagcagtga

SEQ ID NO: 5767 - protein, 139 aa, Glycine max
MGSCVSKNHAKDNDSDHDVDFAAGNVKLITTKEAWDQSLEEARRGGKIVIANFSATWCGPCKMIAPYYSELSEKYTSMMFLLVDVDDLTDFSTSWDIKATPTFFFLKDGQQLDKLVGANKPELLKKIVVINDSLPEYKQ

SEQ ID NO: 5768 - DNA, 423 bp, Glycine max
  CDS (1)..(423)
atgggctccttgttttcttcccccagcgccaccgaggcggagaatcctgacgtgaaagcggagaatcctgacgtgaaagcgaggagttctgatcacgtgaaagcgttcgactccgcggagagctggcagagctactggaaagagatcaaagactcccctaagccagttgtgatatttttcacggcgtcctggtgtggcccttgcaaattcatcactccagtgtttaaccagatagccgcagagtttgcaaacgctgacttcgtcaagatcgacgtggacgaattatctggtgtggcgaaggagtttaaggtggaggcgatgccgacgttcgtgttgtggaaggaaggaaaggaagttgagagggttgtgggagccaagaaggaagagctcgagaaaaagattaagcaactttctcaatcgtga

SEQ ID NO: 5769 - protein, 140 aa, Glycine max
MGSLFSSPSATEAENPDVKAENPDVKARSSDHVKAFDSAESWQSYWKEIKDSPKPVVIFFTASWCGPCKFITPVFNQIAAEFANADFVKIDVDELSGVAKEFKVEAMPTFVLWKEGKEVERVVGAKKEELEKKIKQLSQS

SEQ ID NO: 5770 - DNA, 414 bp, Glycine max
  CDS (1)..(414)
atggggaattgtttgcgcaaggctcatgcggatgatgattctgatcatattgtggagtttgcttctgggaatgtgcaacttattactaccaaagaatcttgggaccaaaagttggatcaagcgaggaaggagagtaaaattgtaattgcaaatttcagtgcaacatggtgtggtccttgtaaggtgattgcaccacattattgcgagttgtccgtgaaatacccgtctatcatgttcttattagtcgatgtggatgaactagctgacttcagcacttcgtgggacatcaaagccacaccaactttcttctttcttaaagatggaaaagaagttgacaaacttgtaggagccaacaagccagagctggagaagaagattgttgtggttaatgatgtagtgcctcataagcaatag

SEQ ID NO: 5771 - protein, 137 aa, Glycine max
MGNCLRKAHADDDSDHIVEFASGNVQLITTKESWDQKLDQARKESKIVIANFSATWCGPCKVIAPHYCELSVKYPSIMFLLVDVDELADFSTSWDIKATPTFFFLKDGKEVDKLVGANKPELEKKIVVVNDVVPHKQ

SEQ ID NO: 5772 - DNA, 417 bp, Glycine max
  CDS (1)..(417)
atggcacccacaatctataatttttcgtattctaaaaggttttcagagtcattcaattcttcaacatcaaaaaaggagtcatccagttccaacatccttgctttccactccatagctcaatggaatgctcattataaagccaccaaagaaactaacaagctgatggtacttgatttcacagccacatggtgtggaccttgcaaactcatggaccctgttatcctagagtttgctggaaattacacagatgttgagttcatcaagattgatgtggaggagttaacggaagtgtctcaagcactccaggtccaccaattgccaacattcatactcgttaagaaaggcaaagttgctgatagagtggtgggggtgaaaaaggaggagctgaaaaggtcgattgagaagcacagaaaataa

SEQ ID NO: 5773 - protein, 138 aa, Glycine max
MAPTIYNFSYSKRFSESFNSSTSKKESSSSNILAFHSIAQWNAHYKATKETNKLMVLDFTATWCGPCKLMDPVILEFAGNYTDVEFIKIDVEELTEVSQALQVHQLPTFILVKKGKVADRVVGVKKEELKRSIEKHRK

SEQ ID NO: 5774 - DNA, 420 bp, Glycine max
  CDS (1)..(420)
atggggagttgtgtgtctaagaatcatgctagggataatgattctgatcataatgtggattttgctgctgggaatgtgaaacttattaccaccaaagaagcgtgggaccaatatttggaagaagcaaggagggatggcaaaattgtgattgcaaatttcagtgcaacatggtgtggtccttgtaagatgattgcgccatattacagcgagttatctgagaaatacacatctatgatgttcttgttagttgatgtggatgatctaactgacttcagcacttcatgggacatcaaagccacaccaactttcttctttcttaaagatggacaacaacttgacaaacttgtaggagccaacaagccagaactgctgaagaagattgttgtcattaatgattcgcttcccgaatataagcagtga

SEQ ID NO: 5775 - protein, 139 aa, Glycine max
MGSCVSKNHARDNDSDHNVDFAAGNVKLITTKEAWDQYLEEARRDGKIVIANFSATWCGPCKMIAPYYSELSEKYTSMMFLLVDVDDLTDFSTSWDIKATPTFFFLKDGQQLDKLVGANKPELLKKIVVINDSLPEYKQ

SEQ ID NO: 5776 - DNA, 405 bp, Glycine max
  CDS (1)..(405)
atgggcgctatactttctgccttaactggcggtgccgcaacggcggcgacgtcttcgccggagagttctgcttctagggtccagtctttccactcttcggcgcgctggcagctccacttcaacgagctcaaagaaaccaataagctcgttgtgatagatttctcggcgtcgtggtgcggcccttgcaaattcatagagccagcgattcacgccatgtccgaaaagttcaccgacgttgacttcgtcaagatcgacgtcgacgaattgccggatgtggcgaaggagtttaatgtggaggcgatgccgacgttcgtgttgtgtaagaaagggaaggaagtcgacaagggagtgggcgcagagacggacgacctcgaaagaagattgaaaaatcggatcgaatcatag

SEQ ID NO: 5777 - protein, 134 aa, Glycine max
MGAILSALTGGAATAATSSPESSASRVQSFHSSARWQLHFNELKETNKLVVIDFSASWCGPCKFIEPAIHAMSEKFTDVDFVKIDVDELPDVAKEFNVEAMPTFVLCKKGKEVDKGVGAETDDLERRLKNRIES

SEQ ID NO: 5778 - DNA, 366 bp, Helianthus annuus
  CDS (1)..(366)
atggctgaagaaggaattgttgtcggttgccacaacgctgatcaatggaaagagcattttgataagcacaaggcttctcagaaattggttgttgtggatttcactgcttcatggtgcggtccttgccgtgtaattgcaccgatcttggctgattatgctaaaaagtttcctcatgtcgccttcttgaaggtcgatgtcgatgaagttgagagtgttgctcaggagtattcagtggaagcgatgccgacgttcttgttcttcaagaacggtgtgaaggtggacacagttgttggtgctaagaaggatgaacttcttgcctgcattgtgaagcatgctggagaggctgctgcaactgtatctgcttag

SEQ ID NO: 5779 - protein, 121 aa, Helianthus annuus
MAEEGIVVGCHNADQWKEHFDKHKASQKLVVVDFTASWCGPCRVIAPILADYAKKFPHVAFLKVDVDEVESVAQEYSVEAMPTFLFFKNGVKVDTVVGAKKDELLACIVKHAGEAAATVSA

SEQ ID NO: 5780 - DNA, 396 bp, Hordeum vulgare
  CDS (1)..(396)
atggggggctgtgtgggcaagggtcgtggcattgtggaagaaaagcttgatttcaaaggtggaaatgtgcatgtcataacaaccaaagaggactgggaccagaagattgaagaagcaaacaaggatgggaaaattgttgtagcaaacttcagtgcttcgtggtgtgggccatgccgtgtcattgcacctgtttatgctgagatgtccaagacttatcctcaactcatgttcttgacaattgatgttgatgacctaatggatttcagctcaacatgggacatccgcgcaaccccgacgttcttcttcctcaaaaacggccagcagatcgacaagctcgtcggcgccaacaaacccgagctggagaagaaagtgcaagctcttggtgatggcagttga

SEQ ID NO: 5781 - protein, 131 aa, Hordeum vulgare
MGGCVGKGRGIVEEKLDFKGGNVHVITTKEDWDQKIEEANKDGKIVVANFSASWCGPCRVIAPVYAEMSKTYPQLMFLTIDVDDLMDFSSTWDIRATPTFFFLKNGQQIDKLVGANKPELEKKVQALGDGS

SEQ ID NO: 5782 - DNA, 357 bp, Hordeum vulgare
  CDS (1)..(357)
atggccgccgaggagggagccgttatcgcgtgccacaccaagcaagagttcgatacccacatggccaatggcaaggacaccggcaagctggtgatcattgatttcactgcttcctggtgcggtccatgtcgtgtcatagccccagtctttgctgagtacgccaagaagttccctggggccatcttcctgaaggtggatgttgatgagctgaaggacgtcgctgaagcatacaatgttgaggcaatgccgaccttcctgtttatcaaggacggtgagaaggtggacagtgttgtcggtggcaggaaggatgacatccataccaagatagtggccctcatgggttctgcatccacctaa

SEQ ID NO: 5783 - protein, 118 aa, Hordeum vulgare
MAAEEGAVIACHTKQEFDTHMANGKDTGKLVIIDFTASWCGPCRVIAPVFAEYAKKFPGAIFLKVDVDELKDVAEAYNVEAMPTFLFIKDGEKVDSVVGGRKDDIHTKIVALMGSAST

SEQ ID NO: 5784 - DNA, 369 bp, Hordeum vulgare
  CDS (1)..(369)
atggccgccgaggagggagccgttatcgcgtgccacaccaagcaagagttcgatacccacatggccaatggcaaggacaccggcaagctggtgatcattgatttcactgcttcctggtgcggtccatgtcgtgtcatagccccagtctttgctgagtacgccaagaagttccctggggccatcttcctgaaggtggatgttgatgagctgaaggacgtcgctgaagcatacaatgttgaggcaatgccgaccttcctgtttatcaaggacggtgagaaggtggacagtgttgtcggtggcaggaaggatgacatccataccaaagataggggccctcatgggttctgcatccacctaacggaagagtga

SEQ ID NO: 5785 - protein, 122 aa, Hordeum vulgare
MAAEEGAVIACHTKQEFDTHMANGKDTGKLVIIDFTASWCGPCRVIAPVFAEYAKKFPGAIFLKVDVDELKDVAEAYNVEAMPTFLFIKDGEKVDSVVGGRKDDIHTKDRGPHGFCIHLTEE

SEQ ID NO: 5786 - DNA, 363 bp, Linum usitatissimum
  CDS (1)..(363)
atggcagcggaggaaggattggtatttgcttgccacaccgttgaagagtgggaagctcagctacaaaaggccaacgaatctaagaagctggtggtggttgatttcacagccacatggtgcgggccatgccgcttcattacaccatacttggcagagctggctaagaagatgcctatggtaaccttcctgaaggttgatgtcgatgaaatgaaaaatgttgctcaagattgggctgtggaggcaatgccaacattcatgtttatgaaagagggcaagatcgtgggcaaagtcgttggagccaacaaggaagagctgctgcagactattaacaagaacttggacttggctaccacctctgcttaa

SEQ ID NO: 5787 - protein, 120 aa, Linum usitatissimum
MAAEEGLVFACHTVEEWEAQLQKANESKKLVVVDFTATWCGPCRFITPYLAELAKKMPMVTFLKVDVDEMKNVAQDWAVEAMPTFMFMKEGKIVGKVVGANKEELLQTINKNLDLATTSA

SEQ ID NO: 5788 - DNA, 372 bp, Linum usitatissimum
  CDS (1)..(372)
atggcggaagaaggtcaggtgattagctgcactagcgttgaaatctggaaggagaagtttgatcatgcttccgagtcgaagaaactggctgtggtggatttcactgctacgtggtgcggaccgtgccgcttcatcgctccagtcctcgcagatttggccaagaagatgcctcatgtgattttcatgaaggtcgatgtggatgaattgaggactgttgctgcggagtatgaagtggaagctatgccgacattcatcttcttcaaggaggggaagattgtggacaaggtaattggtgcgaggaaggatgaattgactgctggcgttgagaagcacgcaataacagtaacccccccggttgtttctactgcttga

SEQ ID NO: 5789 - protein, 123 aa, Linum usitatissimum
MAEEGQVISCTSVEIWKEKFDHASESKKLAVVDFTATWCGPCRFIAPVLADLAKKMPHVIFMKVDVDELRTVAAEYEVEAMPTFIFFKEGKIVDKVIGARKDELTAGVEKHAITVTPPVVSTA

SEQ ID NO: 5790 - DNA, 369 bp, Oryza sativa
  CDS (1)..(369)
atggccgccgaggagggagtcgtgatcgcctgccacagcaaggacgagttcgacgcccaaatggccaaggccaaggaggcaggcaaagtggtcatcattgacttcactgcttcctggtgcggtccttgccgcttcatcgcccctgtgtttgctgaatacgccaagaagtaccctggtgctgtcttcctgaaggttgatgttgacgagctgaaggaagttgctgaaaagtacaatgtcgaggcaatgccgaccttcctgttcatcaaggatggtgctgaggctgacaaggtcgtcggcgccaggaaggatgacctccagaacaccatcgtgaagcacgtcagtgccactgctgcatctgcttctgcctaa

SEQ ID NO: 5791 - protein, 122 aa, Oryza sativa
MAAEEGVVIACHSKDEFDAQMAKAKEAGKVVIIDFTASWCGPCRFIAPVFAEYAKKYPGAVFLKVDVDELKEVAEKYNVEAMPTFLFIKDGAEADKVVGARKDDLQNTIVKHVSATAASASA

SEQ ID NO: 5792 - DNA, 357 bp, Zea mays
  CDS (1)..(357)
atggcggaggaggggaaggtgatcgcgatccacagccaggagcagtggagcaccaagatcgaggaggctggcagcagcacgaatctggtggtgatcgacttcactgcaacatggtgcggaccatgccgcttcatttctccaatcttagatgagattgccaagaagcttccaaatgttatgttcctgaaggtggatgttgatgaaatgaagtcaattgccgaggagttcagtgttgaggctatgccgacgtttgtgctcatgaaggaaggaaaggtggtggacaaggttgtgggagctgccaaggaggagctgagcgggaagattgccaagcacagtgcaactgcatgcgctaaataa

SEQ ID NO: 5793 - protein, 118 aa, Zea mays
MAEEGKVIAIHSQEQWSTKIEEAGSSTNLVVIDFTATWCGPCRFISPILDEIAKKLPNVMFLKVDVDEMKSIAEEFSVEAMPTFVLMKEGKVVDKVVGAAKEELSGKIAKHSATACAK

SEQ ID NO: 5794 - DNA, 396 bp, Zea mays
  CDS (1)..(396)
atgggctccttcctgtcgtcgttgtggacccctcccccgctcgccggcgacgaccccgactccgccgtcgtcgccgtccactccaagcccgcctgggacaagcactgggaggaacaccggaacgcgtccaagctgatggtgatcgacttctccgcctcctggtgcgggccctgccgcttcatcgagcccgccttcaaggagatggcctcccgcttcgccgacgcgctcttcgtcaagatcgacgtcgacgagctcgcggaggttgcaaagacattccgcgtagaggcgatgccgacctttgtactggtgaagggcgggcaggaggtgagtcgcgtggtcggggctaagaaggatgagcttgacaggaagatcaagacgttcatctcatctacctga

SEQ ID NO: 5795 - protein, 131 aa, Zea mays
MGSFLSSLWTPPPLAGDDPDSAVVAVHSKPAWDKHWEEHRNASKLMVIDFSASWCGPCRFIEPAFKEMASRFADALFVKIDVDELAEVAKTFRVEAMPTFVLVKGGQEVSRVVGAKKDELDRKIKTFISST

SEQ ID NO: 5796 - DNA, 405 bp, Zea mays
  CDS (1)..(405)
atgggctccttcttctcgaccttagtgacgccccctccgcccgccgccgacgacccgaactgcgccgtggtggccgcgcactccaaggccacctacgacgagcagtgggcggcccacaagagcagcagcaagctgatggtgatcgacttctcggcgtcctggtgcgggccctgccgcttcatcgagccggccttcaaggagctggcctcccgcttcaccgatgccatcttcatcaaggtcgacgtcgacgagctcgcggaggtcgcaaggacatggaaggtagaggcgatgccaacgttcgtgctggtcaaggatgggaaggaggtaggccgtgtgattggggctaagaaggacgagcttgagaggaagatcaggatgttcgtcacgtcatcttcctcgtcctaa

SEQ ID NO: 5797 - protein, 134 aa, Zea mays
MGSFFSTLVTPPPPAADDPNCAVVAAHSKATYDEQWAAHKSSSKLMVIDFSASWCGPCRFIEPAFKELASRFTDAIFIKVDVDELAEVARTWKVEAMPTFVLVKDGKEVGRVIGAKKDELERKIRMFVTSSSSS

SEQ ID NO: 5798 - DNA, 381 bp, Triticum aestivum
  CDS (1)..(381)
atggcggcgtcggcggcgacggcaacggcggcggcggtgggggcgggggaggtgatctccgtccacaccctggagcagtggaccatgcagatcgaggaggccaacgccgccaagaagctggtggtggttgacttcactgcatcatggtgtggaccatgccgcatcatggctccagttttcgctgatctcgccaagaagttcccaaatgctgttttcctcaaggtcgatgtcgatgaactgaagcccattgcggagcaattcagcgttgaggccatgccaaccttcctgttcattaaggaaggagatgtcaaggacagggttgtgggagctatcaaggaggaactgacgaacaaggttgggctacacgcggcggcccagtaa

SEQ ID NO: 5799 - protein, 126 aa, Triticum aestivum
MAASAATATAAAVGAGEVISVHTLEQWTMQIEEANAAKKLVVVDFTASWCGPCRIMAPVFADLAKKFPNAVFLKVDVDELKPIAEQFSVEAMPTFLFIKEGDVKDRVVGAIKEELTNKVGLHAAAQ

SEQ ID NO: 5800 - DNA, 297 bp, Triticum aestivum
  CDS (1)..(297)
atgcagatcgaggaggccaacgccgccaagaagctggtggtggttgacttcactgcatcatggtgtggaccatgccgcatcatggctccagttttcgctgatctcgccaagaagttcccaaatgctgttttcctcaaggtcgatgtcgatgaactgaagcccattgcggagcaattcagcgttgaggccatgccaaccttcctgttcattaaggaaggagatgtcaaggacagggttgtgggagctatcaaggaggaactgacgaacaaggttgggctacacgcggcggcccagtaa

SEQ ID NO: 5801 - protein, 98 aa, Triticum aestivum
MQIEEANAAKKLVVVDFTASWCGPCRIMAPVFADLAKKFPNAVFLKVDVDELKPIAEQFSVEAMPTFLFIKEGDVKDRVVGAIKEELTNKVGLHAAAQ

SEQ ID NO: 5802 - DNA, 357 bp, Triticum aestivum
  CDS (1)..(357)
atggcggaggaggggaaggtgatcgcgatccacagccaggagcagtggagcaccaagatcgaggaggctggcagcagcacgaatctggtggtgatcgacttcactgcaacatggtgcggaccatgccgcttcatttctccaatcttagatgagattgccaagaagcttccaagtgttactttcctgaaggtggatgttgatgaaatgaagtcaattgccgaggagttcagtgttgaggccatgccgacgtttgtgctcatgaaggaaggaaaggtggtggacaaggttgtgggagctgccaaggaggagctgagcgggaagattgccaagcacagtgcaactgcatgcgctaaataa

SEQ ID NO: 5803 - protein, 118 aa, Triticum aestivum
MAEEGKVIAIHSQEQWSTKIEEAGSSTNLVVIDFTATWCGPCRFISPILDEIAKKLPSVTFLKVDVDEMKSIAEEFSVEAMPTFVLMKEGKVVDKVVGAAKEELSGKIAKHSATACAK

SEQ ID NO: 5804 - DNA, 396 bp, Triticum aestivum
  CDS (1)..(396)
atgggctccttcctgtcgtccttgtggacccctcccccgctccccggcgacgaccccgactccgccgtcgtcgccgtccactccaagcccgcctgggacaagcactgggaggaacaccggaacgcgtccaagctgatggtgatcgacttctccgcctcctggtgcgggccctgccgcttcatcgagcccgccttcaaggagatggcctcccgcttcgccgacgcgctcttcgtcaagatcgacgtcgacgagctcgcggaggttgcaaagacattccgcgtagaggcgatgccgacctttgtactggtgaagggcgggcaggaggtgagtcgcgtggtcggggctaagaaggatgagcttgacaggaagatcaagacgttcatctcatctacctga

SEQ ID NO: 5805 - protein, 131 aa, Triticum aestivum
MGSFLSSLWTPPPLPGDDPDSAVVAVHSKPAWDKHWEEHRNASKLMVIDFSASWCGPCRFIEPAFKEMASRFADALFVKIDVDELAEVAKTFRVEAMPTFVLVKGGQEVSRVVGAKKDELDRKIKTFISST

SEQ ID NO: 5806 - DNA, 387 bp, Triticum aestivum
  CDS (1)..(387)
atggcggcgtcggcggcgacggcgacgacgacaacggcggcggcggtgggggcgggggaggtgatctccgtccacagcctggagcagtggaccatgcagatcgaggaggccaacgccgccaagaagctggtggtgattgacttcactgcatcatggtgtggaccatgccgcattatggctccaattttcgctgatctcgccaagaagttcccagctgctgttttcctcaaggtcgatgttgatgaactgaagtccattgctgagcaattcagcgtggaggccatgccaaccttcctgttcatgaaggaaggagatgtcaaggacagggttgtcggagctatcaaggaggaactgacgaacaaggttgggctacacgcggcccagtaa

SEQ ID NO: 5807 - protein, 128 aa, Triticum aestivum
MAASAATATTTTAAAVGAGEVISVHSLEQWTMQIEEANAAKKLVVIDFTASWCGPCRIMAPIFADLAKKFPAAVFLKVDVDELKSIAEQFSVEAMPTFLFMKEGDVKDRVVGAIKEELTNKVGLHAAQ

SEQ ID NO: 5808 - DNA, 381 bp, Triticum aestivum
  CDS (1)..(381)
atggcggcgtcggcggcgacggcaacgccgacggcggtgggggcgggggaggtgatctccgtccacaccctggagcagtggaccatgcagatcgaggaggccaaccccgccaagaagctggtggtggttgacttcactgcatcatggtgtggaccatgccgcatcatggctccagttttcgctgatctcgccaagaagttcccaaatgctgttttcctcaaggtcgatgtcgatgaactgaagcccattgcggagcaattcagcgttgaggccatgccaaccttcctgttcattaaggaaggagatgtcaaggacagggttgtgggagctatcaaggaggaactgacgaacaaggttgggctacacgcggcggcccagtaa

SEQ ID NO: 5809 - protein, 126 aa, Triticum aestivum
MAASAATATPTAVGAGEVISVHTLEQWTMQIEEANPAKKLVVVDFTASWCGPCRIMAPVFADLAKKFPNAVFLKVDVDELKPIAEQFSVEAMPTFLFIKEGDVKDRVVGAIKEELTNKVGLHAAAQ

SEQ ID NO: 5810 - DNA, 357 bp, Triticum aestivum
  CDS (1)..(357)
atggccgccgaggagggagccgtgatagcgtgccacaccaagcaagagttcgacacccacatggctaatggcaaggagaccggcaagctggtgatcattgacttcactgcttcctggtgcggtccttgtcgtgtcatagccccagtctttgctgagtacgccaagaagttccctggcgccattttcctgaaggtggacgccgacgagctgaaggacgtcgctgaagcatacaacgttgaggcaatgccgaccttcctgtttatcaaggatggtgcgaaggtggacactgttgtcggtggcaggaaggatgatatccataccaagatagtggccctcatgggatctgcatctggctaa

SEQ ID NO: 5811 - protein, 118 aa, Triticum aestivum
MAAEEGAVIACHTKQEFDTHMANGKETGKLVIIDFTASWCGPCRVIAPVFAEYAKKFPGAIFLKVDADELKDVAEAYNVEAMPTFLFIKDGAKVDTVVGGRKDDIHTKIVALMGSASG

SEQ ID NO: 5812 - DNA, 402 bp, Zea mays
  CDS (1)..(402)
atgggaggctgtgcgggaaaggtacgtcgtgatgacgaagaaaagcttgattttaaaggtggaaatgttcatattataacaagcaatgagggctgggaccagaagattgcagaagcaaacagagatgggaaaactgttgttgcaaatttcagcgcttcctggtgtgggccatgccgtgtcattgctcctgtctatgctgaaatgtcaaagacttatcctcaactcatgttcttgacaatagacgttgatgacctgatggacttcagctcttcatgggacatccgtgcaaccccgacattcttcttcctcaagaacgggcagcagatcgacaagctcgtgggcgcgaacaaacctgagctcgagaagaaagtgctagcagccgctgatgccagtacgtcctag

SEQ ID NO: 5813 - protein, 133 aa, Zea mays
MGGCAGKVRRDDEEKLDFKGGNVHIITSNEGWDQKIAEANRDGKTVVANFSASWCGPCRVIAPVYAEMSKTYPQLMFLTIDVDDLMDFSSSWDIRATPTFFFLKNGQQIDKLVGANKPELEKKVLAAADASTS

SEQ ID NO: 5814 - DNA, 432 bp, Zea mays
  CDS (1)..(432)
atgggactgaggcgtctgatgagatgctgctgctgcattgcaaagcacgcggacgacggcgacaagatcgatttcggaggtggcaatgttcatgttgtcacaagcaaagaggactgggaccaaagaattgcggaggcaaacaaggatgggaaaaccgtggttgcaaacttcagcgcttcctggtgtgggccgtgccgtgtcatcgcacctgtctacgccgaaatgtcgcagacgtaccctcagctcatgttcctgacgatcgatgttgatgacttgatggagttcagctcgtcgtgggacatccgcgcgaccccgacgttcttcttcctcaagaacgagcagcaggtggacaagctggtcggcgccaacaagcctgagctggagaagaaagtggccgccgtcgccgacgcggccggcagcaagacagtgtag

SEQ ID NO: 5815 - protein, 143 aa, Zea mays
MGLRRLMRCCCCIAKHADDGDKIDFGGGNVHVVTSKEDWDQRIAEANKDGKTVVANFSASWCGPCRVIAPVYAEMSQTYPQLMFLTIDVDDLMEFSSSWDIRATPTFFFLKNEQQVDKLVGANKPELEKKVAAVADAAGSKTV

SEQ ID NO: 5816 - DNA, 369 bp, Zea mays
  CDS (1)..(369)
atggcgtccgagcagggagtcgtgatcgcgtgccacagcaaggctgagtttgacgcccacatgaccaaggcccaggaagccggcaagctggtggtcatcgacttcactgccgcctggtgcggtccatgccgcgccatcgccccactgttcgtcgaacacgccaagaagttcactcaggtcgtcttcctgaaggtggacgtggacgaagtgaaggaagtcaccgcggcctacgaggtcgaggcgatgccgaccttccacttcgtcaagaacggcaagacggtcgcgaccatcgtgggtgccaagaaggacgagctcctggcccagatcgagaagcatgccgcgcctgcgcctgcgtctgcgtctgcctaa

SEQ ID NO: 5817 - protein, 122 aa, Zea mays
MASEQGVVIACHSKAEFDAHMTKAQEAGKLVVIDFTAAWCGPCRAIAPLFVEHAKKFTQVVFLKVDVDEVKEVTAAYEVEAMPTFHFVKNGKTVATIVGAKKDELLAQIEKHAAPAPASASA

SEQ ID NO: 5818 - DNA, 432 bp, Zea mays
  CDS (1)..(432)
atgggactgaggcgtctgatgagatgctgctgctgcattgcaaagcacgcggacgacggcgacaagatcgatttcggaggtggcaatgttcacgttgtcacaagcaaagaggactgggaccaaagaattgcggaggcaaacaaggatgggaaaaccgtggttgcaaacttcagcgcttcctggtgtgggccgtgccgtgtcatcgcacctgtctacgccgaaatgtcgcagacgtacccccagctcatgttcctgacgatcgatgttgatgacttgatggagttcagctcgtcgtgggacatccgcgcgacaccgacgttcttcttcctcaagaacgagcagcaggtggacaagctggtcggcgccaacaagcctgagctggagaagaaagtggccgccgtcgccgacgcggccggcagcaaggcagtgtag

SEQ ID NO: 5819 - protein, 143 aa, Zea mays
MGLRRLMRCCCCIAKHADDGDKIDFGGGNVHVVTSKEDWDQRIAEANKDGKTVVANFSASWCGPCRVIAPVYAEMSQTYPQLMFLTIDVDDLMEFSSSWDIRATPTFFFLKNEQQVDKLVGANKPELEKKVAAVADAAGSKAV

SEQ ID NO: 5820 - DNA, 432 bp, Zea mays
  CDS (1)..(432)
atgggactgaggcgcctgatgagatgctgctgctgcattgcaaagcacgcggacgacggcgacaagatcgatttcggaggtggcaatgttcatgttgtcacaagcaaagaggactgggaccaaagaattgccgaggcaaacaaggatgggaaaaccgtggttgcaaacttcagcgcttcctggtgtgggccgtgccgtgtcatcgcacttgtctacgccgaaatgtcgcagacgtaccctcagctcatgttcctgacgatcgatgttgatgacttgatggagttcagctcgtcgtgggacatccgcgcgaccccgaccttcttcttcctcaagaacgagcagcaggtggacaagctggtcggcgccaacaagcctgagctggagaagaaagtggccgccgtcgccgacgcggccggcagcaagacagtgtag

SEQ ID NO: 5821 - protein, 143 aa, Zea mays
MGLRRLMRCCCCIAKHADDGDKIDFGGGNVHVVTSKEDWDQRIAEANKDGKTVVANFSASWCGPCRVIALVYAEMSQTYPQLMFLTIDVDDLMEFSSSWDIRATPTFFFLKNEQQVDKLVGANKPELEKKVAAVADAAGSKTV

SEQ ID NO: 5822 - DNA, 366 bp, Zea mays
  CDS (1)..(366)
atggcgtccgaggaggagggagtcgtgatcgcctgccacaccaaggccgagttcgacgcccacatggccaaggccaaggaggccggcaagctggtgatcattgacttcacggcctcctggtgcggcccctgccgcttcatcgcgccactgttcgtcgagcacgccaagaagttcacccaggctgtgttcctgaaggtggacgtggacgagctgaaggaagttgccgcggcctacgatgtcgaggcgatgccgaccttccacttcgtcaagaacggggtgacggtggagaccgtcgtcggtgccaggaaggagaacctcctggcccagatcgagaagcactgcgccgcggccgtgcctgctgcgtag

SEQ ID NO: 5823 - protein, 121 aa, Zea mays
MASEEEGVVIACHTKAEFDAHMAKAKEAGKLVIIDFTASWCGPCRFIAPLFVEHAKKFTQAVFLKVDVDELKEVAAAYDVEAMPTFHFVKNGVTVETVVGARKENLLAQIEKHCAAAVPAA

SEQ ID NO: 5824 - DNA, 384 bp, Zea mays
  CDS (1)..(384)
atggcggcttcggcggcagcggcggcggcaacaccggtgacgccgacagaggggacggtgatcgcgatccacagcctggaggagtggagcatccagatcgaggaggccaacagcgccaagaagctggtggtgattgacttcactgcaacatggtgtcctccgtgccgcgccatggctccaatttttgctgatatggccaagaagtccccaaatgttgttttcctgaaagttgatgtggatgaaatgaagaccattgctgagcaattcagcgtagaggccatgccaacattcctgttcatgagggagggcgacgtcaaggacagggtcgttggcgcagcaaaggaagagctagcaaggaagcttgaactacacatggcctcgtag

SEQ ID NO: 5825 - protein, 127 aa, Zea mays
MAASAAAAAATPVTPTEGTVIAIHSLEEWSIQIEEANSAKKLVVIDFTATWCPPCRAMAPIFADMAKKSPNVVFLKVDVDEMKTIAEQFSVEAMPTFLFMREGDVKDRVVGAAKEELARKLELHMAS

SEQ ID NO: 5826 - DNA, 363 bp, Zea mays
  CDS (1)..(363)
atggcgtccgaggagggagtcgtgatcgcctgccacaccaaggccgaatttgacgcccacatggccaaggccaaggaggccggcaagctggtgatcattgacttcacggcctcctggtgcggcccctgccgcttcatcgcgccactgttcgtcgagcacgccaagaagttcacccaggctgtgttcctgaaggtggacgtggacgagctgaaggaagttgccgcggcctacgatgtcgaggcgatgccgaccttccacttcgtcaagaacggggtgacggtggagaccgtcgtcggtgccaggaaggagaacctcctggcccagatcgagaagcactgcgccgcggccgtgcctgctgcgtag

SEQ ID NO: 5827 - protein, 120 aa, Zea mays
MASEEGVVIACHTKAEFDAHMAKAKEAGKLVIIDFTASWCGPCRFIAPLFVEHAKKFTQAVFLKVDVDELKEVAAAYDVEAMPTFHFVKNGVTVETVVGARKENLLAQIEKHCAAAVPAA

SEQ ID NO: 5828 - DNA, 369 bp, Zea mays
  CDS (1)..(369)
atggcgtcgaagcagggagtggtatgcgcgtgccacagcaagactgagttggacgcccacatgaccaaggcccaggaagccggcaagctggtggtcatcggcttcactgccgcctggtgcggtccatgccgcgccatcgccccactgttcgtcgaacacgccaagaagttcactcaggtcgtcttcctgaaggtgaacgtggacgaagtgaaggaagtcaccgcggcctacgaggtcgaggcgatgccgaccttccacttcgtcaagaacggcaagacggtcgcgaccatcgtgggtgccaggaaggacgagctcctggcccagatcgagaagcatgccgcgcctgcgcctgcgtctgcgtctgcctaa

SEQ ID NO: 5829 - protein, 122 aa, Zea mays
MASKQGVVCACHSKTELDAHMTKAQEAGKLVVIGFTAAWCGPCRAIAPLFVEHAKKFTQVVFLKVNVDEVKEVTAAYEVEAMPTFHFVKNGKTVATIVGARKDELLAQIEKHAAPAPASASA

SEQ ID NO: 5830 - DNA, 399 bp, Zea mays
  CDS (1)..(399)
atgggctccttcctctcgagcttagtcacgccccctccggccgccgacgaccccaactgcgccgtggtggccgcccactccaaggccacctacgacgagcagtgggcggcccacaagagcagcagcaagctgatggtgatcgacttctcggcctcctggtgcgggccctgccgcttcatcgagccggccttcaaggagctggcctcccgcttctccgacgccatcttcgtcaaggtcgacgtcgacgagctcgcggaggtcgcaaggacatggaaggtagaggcgatgccaacgttcgtacttgtaaaggatgggaaggaggtaagccgtgtggttggggccaagaaggacgagcttgagaggaagatccggatgttcacgtcatcttcctcatcgtaa

SEQ ID NO: 5831 - protein, 132 aa, Zea mays
MGSFLSSLVTPPPAADDPNCAVVAAHSKATYDEQWAAHKSSSKLMVIDFSASWCGPCRFIEPAFKELASRFSDAIFVKVDVDELAEVARTWKVEAMPTFVLVKDGKEVSRVVGAKKDELERKIRMFTSSSSS

SEQ ID NO: 5832 - DNA, 399 bp, Zea mays
  CDS (1)..(399)
atgggctccttcctctcgagcttagtcacgccccctccggccgccggcgaccccaaatgcaccgtggtggccgcccactccaaggccacctacgacgagcagtgggcggcccacaagagcagcagcaagctgatggtgatcgacttctcggcctcctggtgcgggccctgccgcttcatcgagccggccttcaaggagctggcctcccgcttctccgacgccatcttcgtcaaggtcgacgtcgacgagctcgcggaggtcgcaaggacatggaaggtagaggcgatgccaacgttcgtacttgtaaaggatgggaaggaggtaagccgtgtggttggggccaagaaggacgagcttgagaggaagatccggatgttcacgtcatcttcctcatcgtaa

SEQ ID NO: 5833 - protein, 132 aa, Zea mays
MGSFLSSLVTPPPAAGDPKCTVVAAHSKATYDEQWAAHKSSSKLMVIDFSASWCGPCRFIEPAFKELASRFSDAIFVKVDVDELAEVARTWKVEAMPTFVLVKDGKEVSRVVGAKKDELERKIRMFTSSSSS

SEQ ID NO: 5834 - DNA, 20 bp, Artificial sequence
  primer
atggcggcttcgaaggcggc

SEQ ID NO: 5835 - DNA, 21 bp, Artificial sequence
  primer
ctacgaggccatgtgtagttc

SEQ ID NO: 5836 - protein, 107 aa, Artificial sequence
  consensus sequence
  Variant (2)..(17): Xaa in position 2 to 17 is any amino acid
  Variant (18)..(26): Xaa in position 18 to 26 is any or no amino acid
  Variant (28)..(28): Xaa in position 28 is any amino acid
  Variant (29)..(29): Xaa in position 29 is any or no amino acid
  Variant (31)..(31): Xaa in position 31 is any amino acid
  Variant (34)..(34): Xaa in position 34 is any amino acid
  Variant (36)..(36): Xaa in position 36 is any amino acid
  Variant (39)..(39): Xaa in position 39 is any amino acid
  Variant (42)..(45): Xaa in position 42 to 45 is any amino acid
  Variant (47)..(59): Xaa in position 47 to 59 is any amino acid
  Variant (60)..(61): Xaa in position 60 to 61 is any or no amino acid
  Variant (63)..(63): Xaa in position 63 is any amino acid
  Variant (65)..(65): Xaa in position 65 is any amino acid
  Variant (70)..(78): Xaa in position 70 to 78 is any amino acid
  Variant (79)..(81): Xaa in position 79 to 81 is any or no amino acid
  Variant (87)..(89): Xaa in position 87 to 89 is any amino acid
  Variant (91)..(91): Xaa in position 91 is any amino acid
  Variant (93)..(98): Xaa in position 93 to 98 is any amino acid
  Variant (99)..(99): Xaa in position 99 is any or no amino acid
  Variant (103)..(106): Xaa in position 103 to 106 is any amino acid
VXXXXXXXXXXXXXXXXXXXXXXXXXKXXVXDFXAXWCXPCXXXXPXXXXXXXXXXXXXXXFXKXDVDEXXXXXXXXXXXXAMPTFXXXKXGXXXXXXXVGAXXXXL

SEQ ID NO: 5837 - protein, 27 aa, Artificial sequence
  protein pattern
  Variant (2)..(2): Xaa in position 2 is any amino acid
  Variant (3)..(3): Xaa in position 3 is any or no amino acid
  Variant (5)..(6): Xaa in position 5 to 6 is any amino acid
  Variant (7)..(7): Xaa in position 7 is any or no amino acid
  Variant (9)..(9): Xaa in position 9 is any amino acid
  Variant (11)..(11): Xaa in position 11 is any amino acid
  Variant (14)..(14): Xaa in position 14 is Gly or Pro
  Variant (17)..(17): Xaa in position 17 is Lys or Arg
  Variant (18)..(18): Xaa in position 18 is any amino acid
  Variant (19)..(19): Xaa in position 19 is Phe, Ile, Leu, Met or Val
  Variant (20)..(26): Xaa in position 20 to 26 is any amino acid
  Variant (27)..(27): Xaa in position 27 is Ala, Ser or Val
KXXVXXXFXAXWCXPCXXXXXXXXXXX

SEQ ID NO: 5838 - DNA, 393 bp, Arabidopsis thaliana
  CDS (1)..(393)
atggaagagatcacggaaggagttaacaacatgaacttggctgttgatacccagaagaagaatcggattcaagtttccaacactaagaaaccattgttcttctacgtcaatctcgccaagaggtacatgcagcagtacactgatgtcgaattgtctgcactaggaatggctattgccactgttgttacggtcgctgagatattgaagaacaatggctttgctgttgaaaagaagatcatgacatcgactgtggatatcaaggatgattcaaggggtcgtcctgtgcagaaagctaagattgagatcacgcttgccaagtctgagaagtttgatgaactaatggctgcagctaatgaagagaaggaggctgcagaagcccaagagcaaaactag

SEQ ID NO: 5839 - protein, 130 aa, Arabidopsis thaliana
MEEITEGVNNMNLAVDTQKKNRIQVSNTKKPLFFYVNLAKRYMQQYTDVELSALGMAIATVVTVAEILKNNGFAVEKKIMTSTVDIKDDSRGRPVQKAKIEITLAKSEKFDELMAAANEEKEAAEAQEQN

SEQ ID NO: 5840 - DNA, 393 bp, Arabidopsis thaliana
  CDS (31)..(393)
atggaagagatcaccgatggagtgaacaacatgaacttagccaccgattcgcagaagaaaaaccggattcaggtttccaacactaagaaaccattgttcttctatgtcaatctcgccaagaggtatatgcagcagtacaatgatgttgaattgtctgcccttggcatggccattgcaactgttgttactgttactgaaatactgaagaacaatggttttgctgttgagaagaagatcatgacttcaactgttgatattaaggatgatgcaagaggacgtcctgtgcagaaagctaagattgagattacgcttgtgaagtcagagaagtttgatgaactaatggctgcagccaatgaagaaaaagaagatgcagaagctcaggtgcagaactga

SEQ ID NO: 5841 - protein, 120 aa, Arabidopsis thaliana
MNLATDSQKKNRIQVSNTKKPLFFYVNLAKRYMQQYNDVELSALGMAIATVVTVTEILKNNGFAVEKKIMTSTVDIKDDARGRPVQKAKIEITLVKSEKFDELMAAANEEKEDAEAQVQN

SEQ ID NO: 5842 - DNA, 772 bp, Glycine max
  CDS (158)..(556)
cgccgcggaatcccgatatttatttttcttgcgttccggtccccaggcttcgagttatttccctggtctggtgctcgcgcggcggcggcggcggcggagggtttgcgtcggcgctctcgcgagctagggtttcgggccgaggaggaggaggagcgagatggaggaggtgacggagggggtcaagaacctggccgtcacggagccgcacaagaagaaccggatccaggtctccaacacgaagaagccgctcttcttctatgtcaacctcgccaagaggtacatgcagatgcataacgaggtggaactctccgctctcggcatggctatcgccactgtggtgacagttgccgaaattctgaaaaataatggccttgctgttgaaaagaaaatcatgacatccactgttgatgtcaatgatgaatcaaggggccgcccgatgcagaaggctaagattgaaatagtgctgggcaagacggagaacttcgacgagctgatggccgccgccgcggaggagagggaagtcgcagccgccgaggagggcgaggagcagggctaataaactgtcttgagccggctgttgtagcttttatttagtacttgctgctaggttgtgtgttatcttctcttggccagcaagagataggtacttgtgtaaccaaagagttctttgtatttgtttcgtctccgtggtagtttaatgtcgatggtattctggttcactcaaatgatatgccttgtgttttattcgttttattatttggtgctgtttgtc

SEQ ID NO: 5843 - protein, 132 aa, Glycine max
MEEVTEGVKNLAVTEPHKKNRIQVSNTKKPLFFYVNLAKRYMQMHNEVELSALGMAIATVVTVAEILKNNGLAVEKKIMTSTVDVNDESRGRPMQKAKIEIVLGKTENFDELMAAAAEEREVAAAEEGEEQG

SEQ ID NO: 5844 - DNA, 363 bp, Arabidopsis thaliana
  CDS (1)..(363)
atgaacttggctgttgatacccagaagaagaatcggattcaagtttccaacactaagaaaccattgttcttctacgtcaatctcgccaagaggtacatgcagcagtacactgatgtcgaattgtctgcactaggaatggctattgccactgttgttacggtcgctgagatattgaagaacaatggctttgctgttgaaaagaagatcatgacatcgactgtggatatcaaggatgattcaaggggtcgtcctgtgcagaaagctaagattgagatcacgcttgccaagtctgagaagtttgatgaactaatggctgcagctaatgaagagaaggaggctgcagaagcccaagagcaaaactag

SEQ ID NO: 5845 - protein, 120 aa, Arabidopsis thaliana
MNLAVDTQKKNRIQVSNTKKPLFFYVNLAKRYMQQYTDVELSALGMAIATVVTVAEILKNNGFAVEKKIMTSTVDIKDDSRGRPVQKAKIEITLAKSEKFDELMAAANEEKEAAEAQEQN

SEQ ID NO: 5846 - DNA, 369 bp, Zea mays
  CDS (1)..(369)
atgccgagagttagggttagggtttctgtggttgcagagatggaggagctgacggagggagtgaacaatctggcgattacggagccgcaaatgaagaacaaaatccaggtatccaacaccaagaagccactatttttctatgtcaacctcgccaagaggtacatgcagcagcacgaggaggtggagctctcgacccttggcatgaccattgccactatggtgactgttgccgaaattctaaaaaataataggcttgttgttgaaaagaagatcatgacatccacagctgatgtcaaggatgattcaagggcccaccctattcagaaagccaagatcgaaatagtgttgggcaaagacagagaaatttga

SEQ ID NO: 5847 - protein, 122 aa, Zea mays
MPRVRVRVSVVAEMEELTEGVNNLAITEPQMKNKIQVSNTKKPLFFYVNLAKRYMQQHEEVELSTLGMTIATMVTVAEILKNNRLVVEKKIMTSTADVKDDSRAHPIQKAKIEIVLGKDREI

SEQ ID NO: 5848 - DNA, 441 bp, Zea mays
  CDS (1)..(441)
atggtggaggaggagatcaccgagggcttgaagaacctcaccgtcaccggagacgcggcggcttcgggcggagaagggcagaggaggggcggcggcatcagcagcaaccgcatccaggtgtccaacaccaagaagcccctcttcttctacgtaaacctcgccaagaggtatatgcagcagcacggcgatgtggagttgtccgctcttggaatggccatagcgacagttgtgaccgtggcagaaattctgaagaataatggatttgctgttgaaaagaagatcaggacatctactgttgacataaacgacgaatcacgagggcgtccattccaaaaggccaagattgagataatcttgggaaagagtgacagattcaatgagttgatggctgctgctgccgaagagaggggagaagttgaagaaggcgaagagcaggcttga

SEQ ID NO: 5849 - protein, 146 aa, Zea mays
MVEEEITEGLKNLTVTGDAAASGGEGQRRGGGISSNRIQVSNTKKPLFFYVNLAKRYMQQHGDVELSALGMAIATVVTVAEILKNNGFAVEKKIRTSTVDINDESRGRPFQKAKIEIILGKSDRFNELMAAAAEERGEVEEGEEQA

SEQ ID NO: 5850 - DNA, 525 bp, Zea mays
  CDS (1)..(525)
atgtcgggagacaccgcggcggcggtgcaggcaggaggagacgcgcagcaggccgtcggcaggaaccggattcaggtgtccagctccaagaaacctctattcttctacgtcaatctcgccaagaggtacatgcagcatcacgacgacgacgtcgagctctccgcgctcgggctggccatatcgacggctgtaaccgttgcagagatcctgaagaacaatggtcttgctgtcgagaagaaggttagaacatccacagttgacatcaaaaacgaaataagcacccggtcaatccaaaaggctaagattgagatagtgctgggaaagactaacaagttcgatgaactgatggccgccaatgatggagatggaaccgcaggggatggcgtgggaaagaatgacaagttcgatgaattgatggctgccaatgatggagatggaaccgcagggggtggcaacaaacagagatttgttatagattttcctaccatttttatctcttctcctctccttgatagatctagttaa

SEQ ID NO: 5851 - protein, 174 aa, Zea mays
MSGDTAAAVQAGGDAQQAVGRNRIQVSSSKKPLFFYVNLAKRYMQHHDDDVELSALGLAISTAVTVAEILKNNGLAVEKKVRTSTVDIKNEISTRSIQKAKIEIVLGKTNKFDELMAANDGDGTAGDGVGKNDKFDELMAANDGDGTAGGGNKQRFVIDFPTIFISSPLLDRSS

SEQ ID NO: 5852 - DNA, 441 bp, Zea mays
  CDS (1)..(441)
atggtggtggaggagatcgccgagggggtgaagaacctaaccgtcaccggagatgcggcggcttcaggcggagaggggcagaggaggggcggcggcggcagcagcaaccgcatccaggtgtccaacaccaaaaaacccctcttcttctacgtcaacctcgccaagaggtatatgcaacagcacggcgatgtagagctatccgctcttgggatggccatagcaacagttgtgaccgtggcagaaattctgaagaacaatggatttgctgttgaaaagaaaattaggacctctactgttgaaataaacgacgaatcaagagggcgtccattccaaaaggccaagattgagataatcttgggaaagagcgacaaatttgatgagctgatggccgctgctgcagaagagaggggcgaagtggaagatggtgaagagcaggcttga

SEQ ID NO: 5853 - protein, 146 aa, Zea mays
MVVEEIAEGVKNLTVTGDAAASGGEGQRRGGGGSSNRIQVSNTKKPLFFYVNLAKRYMQQHGDVELSALGMAIATVVTVAEILKNNGFAVEKKIRTSTVEINDESRGRPFQKAKIEIILGKSDKFDELMAAAAEERGEVEDGEEQA

SEQ ID NO: 5854 - DNA, 441 bp, Zea mays
  CDS (1)..(441)
atggtggtggaggagatcgccgagggggtgaagaacctcaccgttaccggagacgcggcggcttcaggcggagaggggcagaggaggggcggcggcggcagcagcaaccgcatccaggtgtccaacaccaagaaacccctcttcttctacgtcaacctcgccaagaggtatatgcaacagcacgaagatgtagagctatccgctcttggaatggccatagcaacagttgtgaccgtggcagaaattctgaagaacaatggatttgctgttgaaaagaaaattaggacctctactgttgaaataaacgacgaatcaagagggcgtccattccaaaaggccaagattgagataatcttgggaaagagcgacaaatttgatgagctgatggccgctgctgcagaagagaggggcgaagtggaagatggtgaagagcaggcttga

SEQ ID NO: 5855 - protein, 146 aa, Zea mays
MVVEEIAEGVKNLTVTGDAAASGGEGQRRGGGGSSNRIQVSNTKKPLFFYVNLAKRYMQQHEDVELSALGMAIATVVTVAEILKNNGFAVEKKIRTSTVEINDESRGRPFQKAKIEIILGKSDKFDELMAAAAEERGEVEDGEEQA

SEQ ID NO: 5856 - DNA, 420 bp, Zea mays
  CDS (1)..(420)
atggatgaggtcaccgaggccgtgaacaacctcaacatctcgggcgtaggggccgcgggcgttgccggggcggaagggcacaagaagaatcgcatccaggtctccaacactaagaagcccctcttcttctatgtcaacctcgccaagaggtacatgcagctgcacaacgaagtagagctgtcggccctcggcatggccattgcgacggtggtgacagtagcagaaattctgaaaaataacgggcttgctgtcgcgaagagtatcatgacatctactgttgatatcaaggacgagactaggacccggcctatccagaaggccaagattgaaatattgcttggcaagacggagaagtttgatgagctgatggcagcggctgccgaggagagggaggctaatggggccgaggaacaaagctga

SEQ ID NO: 5857 - protein, 139 aa, Zea mays
MDEVTEAVNNLNISGVGAAGVAGAEGHKKNRIQVSNTKKPLFFYVNLAKRYMQLHNEVELSALGMAIATVVTVAEILKNNGLAVAKSIMTSTVDIKDETRTRPIQKAKIEILLGKTEKFDELMAAAAEEREANGAEEQS

SEQ ID NO: 5858 - DNA, 597 bp, Zea mays
  CDS (1)..(597)
atgcaggcgatgcgtccggccgcggagggggaggcacaggagcaggcggtgagggcggaggcggacgaggtgaagagggaggtggcgaaggcgcacgaggaggaggaggcggtgcctgaggagaaagacgtggcggttgtaggggaagaggcggaggcggaggcggagacggagactgaaggcgaggcggaggcagaggtcgaggtcgaggccgaggtcgaggtggaggcggaggccggtgcatcgtctgcgaagaagaaccgtatccaggtgtccaccaacaagaagccgctctatttctacgtcaatctcgccaagaggtacatgcagaactacgacgaggttgagctctccgctctggggatggccattggtaccgtggtgaccgtcgctgagatcctcaagaacaatggcctcgccactgaaaagaagatcctcacatcaaccatcggcaccaaggatgaggcgaagggccggcttgtccgtaaagccaagatcgagatcctgctgtgcaaatcagagaacttcaacagcatcatgtcgagcaagaagtccgagcgcccgaagccgcccgccgaggaagagatcaaggtgtga

SEQ ID NO: 5859 - protein, 198 aa, Zea mays
MQAMRPAAEGEAQEQAVRAEADEVKREVAKAHEEEEAVPEEKDVAVVGEEAEAEAETETEGEAEAEVEVEAEVEVEAEAGASSAKKNRIQVSTNKKPLYFYVNLAKRYMQNYDEVELSALGMAIGTVVTVAEILKNNGLATEKKILTSTIGTKDEAKGRLVRKAKIEILLCKSENFNSIMSSKKSERPKPPAEEEIKV

SEQ ID NO: 5860 - DNA, 459 bp, Oryza sativa
  CDS (1)..(459)
atggcggtggaggagatcaccgagggggtgaggaacctggccgtggagggggagcccgcggcggcggcggcggcggcgggaggtggtggtgagggggcgcagaggagggcggccgggagcagcagcaaccgcatccaggtgtccaacaccaagaagccactcttcttctatgtcaacctcgccaagaggtacatgcagcagcacggcgatgtcgagctctccgcgctcgggatggccattgcaacagttgtaactgttgcggagattcttaagaataacgggtttgctgttgaaaagaagattagaacatctacggtggaaataaacgatgaatcgagagttcgcccgctccaaaaggctaagattgagatagtgttagaaaagagcgagaaatttgatgagctgatggctgccgcagcggaagagagggaagctgcggaagctgaggagcaggcctga

SEQ ID NO: 5861 - protein, 152 aa, Oryza sativa
MAVEEITEGVRNLAVEGEPAAAAAAAGGGGEGAQRRAAGSSSNRIQVSNTKKPLFFYVNLAKRYMQQHGDVELSALGMAIATVVTVAEILKNNGFAVEKKIRTSTVEINDESRVRPLQKAKIEIVLEKSEKFDELMAAAAEEREAAEAEEQA

SEQ ID NO: 5862 - DNA, 438 bp, Oryza sativa
  CDS (1)..(438)
atggaggaggtgacggaggcggtcggcaacctcaccatagccgcgggagaagccgccggggcgggcggcggcgcggcggaggcgcacaagaagaaccgcatccaggtctccaacaccaagaagccgctcttcttctacgtcaacctcgccaagaggtacatgcagctgcataacgaagtggagctctcggcactcggcatggctattgcaactgtggtgactgttgctgaaattctgaaaaataatggccttgctgtcgagaagaagattatgacatctactgttgacgtcaaagatgattcgaggagtcgccctatgcagaaagccaagattgaaatagtgctgggcaagacggacaaatttgacgaactgatggcagcagccgcggaagagagggaggccgcggcagcggaggctgaggccgaggagcaaagctaa

SEQ ID NO: 5863 - protein, 145 aa, Oryza sativa
MEEVTEAVGNLTIAAGEAAGAGGGAAEAHKKNRIQVSNTKKPLFFYVNLAKRYMQLHNEVELSALGMAIATVVTVAEILKNNGLAVEKKIMTSTVDVKDDSRSRPMQKAKIEIVLGKTDKFDELMAAAAEEREAAAAEAEAEEQS

SEQ ID NO: 5864 - DNA, 399 bp, Oryza sativa
  CDS (1)..(399)
atggaggaggtgacggaggcggtgagcaacctgtccatcacggagccgcacaagaagaaccggatccaggtctccaacaccaagaagccgctcttcttctacgtcaacctcgccaagagatacatgcagcagcataatgaggtggagctctcggcgctcggcatggccattgccactgtggtgactgttgcggaaattctaaaaaataatggccttgctgttgaaaagaagatcatgacatcaactgttgatgtcaaagacgactcaaggagccgtcctatgcagaaggcgaagattgaaattttgcttgggaagacggagaagtttgatgagctgatggcagctgctgccgaggagagggaagccgcggctgctgctgagggcgaggaacaaggctag

SEQ ID NO: 5865 - protein, 132 aa, Oryza sativa
MEEVTEAVSNLSITEPHKKNRIQVSNTKKPLFFYVNLAKRYMQQHNEVELSALGMAIATVVTVAEILKNNGLAVEKKIMTSTVDVKDDSRSRPMQKAKIEILLGKTEKFDELMAAAAEEREAAAAAEGEEQG

SEQ ID NO: 5866 - DNA, 510 bp, Oryza sativa
  CDS (1)..(510)
atgcaggcggtgagggaggaggaggagcaggtggtggaggaggtggtgagggcgggggcggtggcagaggaggaggaggggccggaggagaaggaggtggcgatggtcggggaggagatggcggaggcagagcacgacgaggaggaggcggaggccggggcgtcggcgaagaagaaccggatccaggtctccaccaacaagaagccactctacttctacgtcaacctcgccaagaggtacatgcagaactatgacgaagttgagctctctgcactgggaatggcaattggcacggtggtgactgttgctgagatcctcaagaacaatggcctggccactgaaaagaagatcctgacatcaaccattggcaccaaggatgaatcgaaggggcggcttgtccgtaaagccaagattgagattcttctttgtaaatcagaaaacttcaacagtataatgtccagcaagaaatcagaccgcccgaaatccgccgaggaagagatcaaggtctga

SEQ ID NO: 5867 - protein, 169 aa, Oryza sativa
MQAVREEEEQVVEEVVRAGAVAEEEEGPEEKEVAMVGEEMAEAEHDEEEAEAGASAKKNRIQVSTNKKPLYFYVNLAKRYMQNYDEVELSALGMAIGTVVTVAEILKNNGLATEKKILTSTIGTKDESKGRLVRKAKIEILLCKSENFNSIMSSKKSDRPKSAEEEIKV

SEQ ID NO: 5868 - DNA, 390 bp, Glycine max
  CDS (1)..(390)
atgctcgcgacggttgctgcctccgtacctcaaaatcaaaacactaaccatgaagttgaatcccccaagaagaacaaaattcaggtttccaacactaagaaaccccttttcttttacgtcaatcttgccaagaggtacatacagcaacgcgatgaggttgtgctttctgctcttggaatgggtataactacggttgtcacaattgccgaaattttgaagaacaatggacttgctactgagaagaaaatttcgacatcttcagttagcctgaaggatgagaacaaaggtcgcctggttcagaaggctaagattgaaattgttatggagaaaactgagaagagcactgaatcagaagcagctgcaacagatgatggcaatgagaagaaatga

SEQ ID NO: 5869 - protein, 129 aa, Glycine max
MLATVAASVPQNQNTNHEVESPKKNKIQVSNTKKPLFFYVNLAKRYIQQRDEVVLSALGMGITTVVTIAEILKNNGLATEKKISTSSVSLKDENKGRLVQKAKIEIVMEKTEKSTESEAAATDDGNEKK

SEQ ID NO: 5870 - DNA, 408 bp, Glycine max
  CDS (1)..(408)
atgcccaccacggttgctgtctccgtacctcaaaatcaaaacactaaccatggagtcgaatcccccaagaagaacaaaattcaggtttctaacaccaagaaaccccttttcttttacgtcaatcttgccaagaggtacatacaacagcgcaatgaggttgtgctttctgctcttggaatgggtataaccacagttgttacaattgcggagattttgaagaacaatggacttgctattgagaagaaagtttcgacatcttcagttacaatgaaggatgagaccaaaggtcgcctggttcaaaaggctaagattgaaattgttctggagaaaactgagaagtttgacagtctgacggctgttgcaaacactgaatcaaaagtacctatccacctctggtctctggattaa

SEQ ID NO: 5871 - protein, 135 aa, Glycine max
MPTTVAVSVPQNQNTNHGVESPKKNKIQVSNTKKPLFFYVNLAKRYIQQRNEVVLSALGMGITTVVTIAEILKNNGLAIEKKVSTSSVTMKDETKGRLVQKAKIEIVLEKTEKFDSLTAVANTESKVPIHLWSLD

SEQ ID NO: 5872 - DNA, 396 bp, Glycine max
  CDS (1)..(396)
atggaagacataacagagggagtgaacaacatcaacatctctgattcgtataagaaaaatcgcattcaggtctctaacaccaagaagcccctcttcttctacgttaatctggccaagagatatatgcaacagcatgatgaggtcgagctctcagctctaggaatggctattgccacagtagtaactgttgctgaaattttgaaaaacaacagacttgctgttgaaaagaaaatcaggacatcaactgttgacataaaggatgactctagaggtcgacctgttcaaaaggccaagattgaaatagtactagggaagacagcaaacttcgatgagttgatggctgctgcagctgctgaagatggtgaaaatggagatgttgaagagcagagtgcatga

SEQ ID NO: 5873 - protein, 131 aa, Glycine max
MEDITEGVNNINISDSYKKNRIQVSNTKKPLFFYVNLAKRYMQQHDEVELSALGMAIATVVTVAEILKNNRLAVEKKIRTSTVDIKDDSRGRPVQKAKIEIVLGKTANFDELMAAAAAEDGENGDVEEQSA

SEQ ID NO: 5874 - DNA, 435 bp, Glycine max
  CDS (1)..(435)
atgctcttgttttctcacagtcacacaacagcaatggaagcaatcacagagggagtgaacaacatcaacatctctgattcttacaagaagaatcgcattcaggtctccaacaccaaaaagcctctcttcttctacgtcaatctcgccaagaggtatatgcaacagcataatgaggttgagctctcagcactaggaatggctattgctacagtggttactgttgctgaaatcttgaaaaacaatgagcttgctattgaaaagaaaatcacgacatcaacagttgacatcaaagatgattctagaggcagacctgtccaaaaggccaagattgaaatattacttgggaagactgaaaaatttgatgagttgatggcggctgctgctgctgctgctgaagatggtgaaaatggagatgttgaagagcacactgcataa

SEQ ID NO: 5875 - protein, 144 aa, Glycine max
MLLFSHSHTTAMEAITEGVNNINISDSYKKNRIQVSNTKKPLFFYVNLAKRYMQQHNEVELSALGMAIATVVTVAEILKNNELAIEKKITTSTVDIKDDSRGRPVQKAKIEILLGKTEKFDELMAAAAAAAEDGENGDVEEHTA

SEQ ID NO: 5876 - DNA, 399 bp, Glycine max
  CDS (1)..(399)
atggcgaccgtagctgctgttcctgctttaactgcaaacgattcccacaagaagaacagaattcaggtttccaacactaagaaacctcttttcttttacgtcaatctcgccaagaggtacatacagcagcacaatgaggttgagctttctgctcttggaatggctatagctaccgttgtcacaattgcagagattttgaagaacaatggacttgccactgagaagaaagtattgacatctacagttggcatgaaagatgagaacaaaggtcgtctggtacagaaggcaaagattgaaattgtgctggggaaatctgacaagtttgacaatctgatgtctcctcctgccccaactgaatcagaagaagcagcagctgatgatgatgacaaaaaagagtga

SEQ ID NO: 5877 - protein, 132 aa, Glycine max
MATVAAVPALTANDSHKKNRIQVSNTKKPLFFYVNLAKRYIQQHNEVELSALGMAIATVVTIAEILKNNGLATEKKVLTSTVGMKDENKGRLVQKAKIEIVLGKSDKFDNLMSPPAPTESEEAAADDDDKKE

SEQ ID NO: 5878 - DNA, 402 bp, Glycine max
  CDS (1)..(402)
atggaaggcataacagagggtgtgaacaacatcaacattaacatctccgattcgtataagaagaatcgcattcaggtctctaacaccaagaagcccctcttcttctacgttaatctcgccaagagatatatgcaacagcatgatgaggtcgagctctcagctctaggaatggctattgccacagtagtaactgttgctgaaattttgaaaaacaacggacttgctgttgaaaagaaaatcacgacatcaactgttgacataaaggatgactctagaggtcgacctgttcaaaaggccaagattgaaatagtactcgggaagacagaaaacttcgatgagttgatggctgctgcggctgctgaagatggtgaaaatagagatgttgaagagcagagtgcatga

SEQ ID NO: 5879 - protein, 133 aa, Glycine max
MEGITEGVNNININISDSYKKNRIQVSNTKKPLFFYVNLAKRYMQQHDEVELSALGMAIATVVTVAEILKNNGLAVEKKITTSTVDIKDDSRGRPVQKAKIEIVLGKTENFDELMAAAAAEDGENRDVEEQSA

SEQ ID NO: 5880 - DNA, 737 bp, Glycine max
  CDS (49)..(447)
cgagcttcttaaaatttgctgcacagaggagagtgagaaggcaaggcaatggagatgacgagggtgaatgctaagagcaataactccaacgccaagactaatggcgtgaaagagaaagccaagaagatagtccgaattcaggtttccaaaaccaagaaacctttcttcttctacctcaatctcgctaagaaatacataaaacagggcaatgacgtcgagctctctgcattgggcatggctattccaactgttgtaatcatctctgagattttgaaaagcaacgggtgggcatttgagaaaaatattacgacatccactgttgctgccaaggaagacaaggaaggtcgagagattccaaaggctaagcttggggttttgctgggaaaggctggggatatggatcaaagtactgttgatgcatcgttggggaagaatgctgatgactgataataaggcatgacagttacagagtagtgccaaataatgaagcattgaagctcttctggttgtagtatatgtaaatgtaaatgaagtcccagtatatgatctatagttccttttcttttactatgtctactgtttagggaggtaatatgcagcgctgatagtccttcgaaatgtggtttgggcataaggctattaggattttatcctgtaaaaagtgttccttgtatagatgtactttctcatatttcgtattactgaagcataatagagattggaatgtgttagaagtt

SEQ ID NO: 5881 - protein, 132 aa, Glycine max
MEMTRVNAKSNNSNAKTNGVKEKAKKIVRIQVSKTKKPFFFYLNLAKKYIKQGNDVELSALGMAIPTVVIISEILKSNGWAFEKNITTSTVAAKEDKEGREIPKAKLGVLLGKAGDMDQSTVDASLGKNADD

SEQ ID NO: 5882 - DNA, 767 bp, Glycine max
  CDS (89)..(523)
tacggctgcgagaagacgacaggaagggaagagaaagagatttggatttgggggaacatttggttgattagggtttcttcgggtgctaatgctcttgttttctcacagtcacacagcaatggaagcaatcacagagggagtgaacaacatcaacatctccgattcttacaagaagaatcgcattcaggtctccaacaccaaaaagcccctcttcttctacgtcaatctcgccaagaggtatatgcaacagcataatgaagttgagctctcagcactaggaatggctattgctacggtggttactgttgctgaaatcttgaaaaacaatgagcttgctgttgaaaagaaaatcacaacatcaacagttgacatcaaagatgattctagaggcagacctgtccaaaaggccaagattgaaatattactggggaagactgaaaaatttgatgagttgatggctgctgctgctgctgctgctgcagaagatggtgaaaacggagatgttgaagagcacgccgcataagttcatcgaagttatacctgtcttgggtgaagatatgcactctttaatgaactgcactgatgttgttagtatgtagcaggactagtaaagcaaagaactcgttatatagactgtcatgcaatattgaactatgcaattccttcatttcttttccctataaatagaggcttttttcgtgtcttaaaaaaaaaaaaaaaaaaaataaaaaaaaaaaacacacagaacccaagaaaaaaaaaaaaaa

SEQ ID NO: 5883 - protein, 144 aa, Glycine max
MLLFSHSHTAMEAITEGVNNINISDSYKKNRIQVSNTKKPLFFYVNLAKRYMQQHNEVELSALGMAIATVVTVAEILKNNELAVEKKITTSTVDIKDDSRGRPVQKAKIEILLGKTEKFDELMAAAAAAAAEDGENGDVEEHAA

SEQ ID NO: 5884 - DNA, 636 bp, Gossypium hirsutum
  CDS (84)..(476)
  misc_feature (98)..(98): n is a, g, c or t
tagaattgattgactactactctgcagatttcgtcccatttgcagagtgaggctgagatttagggtttagcagaagtctgtaaatggaagaaatcacncaaggtgtcaacaacatcaacttggtcgccgattcccacaagaagaatcggattcaagtctcgaataccaagaagcccttgtttttctacgttaatcttgccaagaggtatatgcagcagcacaatgaggtggagttgtctgcccttggcatggctattgcaactgttgtcacaattgcagaaattctgaaaaacaacggtttagctgttgagaagaagatcacaacctcaacagttgacatgaaggaggactcaagagggcgaccagtccaaaaagcaaagattgagatattgttggggaagacagaaaactttgatgaattaatggcagcttctgctgaagaaagagagattgtggatggagaagtgcagggttgaaacttgaagaagtttgtttgttagtttgtggtggtcagttcttattgtcactgtatggttaaatgttaaggcaattttggtttcttacacattgtaggtgttgagttatcttggtttgtttcaaatgttcaatttttttatctgattaatttttggcttc

SEQ ID NO: 5885 - protein, 130 aa, Gossypium hirsutum
MEEITQGVNNINLVADSHKKNRIQVSNTKKPLFFYVNLAKRYMQQHNEVELSALGMAIATVVTIAEILKNNGLAVEKKITTSTVDMKEDSRGRPVQKAKIEILLGKTENFDELMAASAEEREIVDGEVQG

SEQ ID NO: 5886 - DNA, 441 bp, Zea mays
  CDS (1)..(441)
atggtggaggaggagatcaccgaaggcttgaagaacctcaccgtcaccggagacgcggcggcttcgggcggagaagggcagaggaggggcggcggcatcagcagcaaccgcatccaggtgtccaacaccaagaagcccctcttcttctacgtaaacctcgccaagaggtatatgcagcagcacggcgatgtggagctatccgctcttggaatggccatagcgacagttgtgaccgtcgcagaaattctgaagaataatggatttgctgttgaaaagaagatcaggacatctactgttgacataaacgacgaatcacgagggcgtccattccaaaaggccaagattgagataatcttgggaaagagcgacagattcgatgagttgatggctgctgctgccgaagagaggggagaagttgaagaaggcgaagagcaggcttga

SEQ ID NO: 5887 - protein, 146 aa, Zea mays
MVEEEITEGLKNLTVTGDAAASGGEGQRRGGGISSNRIQVSNTKKPLFFYVNLAKRYMQQHGDVELSALGMAIATVVTVAEILKNNGFAVEKKIRTSTVDINDESRGRPFQKAKIEIILGKSDRFDELMAAAAEERGEVEEGEEQA

SEQ ID NO: 5888 - DNA, 495 bp, Arabidopsis thaliana
  CDS (1)..(495)
atggcgatggaagtagcaacaccggctccggcaccaatcccatcggagaggaacatcgttctcgcgcctgcaacaacaacaacaaccgccactgttgagactcacaagaagaacaggatccaagtttccaacaccaagaagccattgttcttctacgttaatctcgccaagaggtacattcagcaacacaacgaggtcgagctttctgcacttggaatggcaatcacaactgtggtaacaatctctgagatcttgaagaacaatggacttgcaacagagaagaaggtgctaacatcgactgtgggaatgaaagatgagacaaaagggaagatggtccagaaggcaaagattgagatagtgttgggcaagtcagacaagtttgactctttggtgccacctgtgaccaacggcaagactccggaggaggaagccagtgcagagacggaagcttccgtggaagcacaagaagaagttgccgctgccaccgaggtctag

SEQ ID NO: 5889 - protein, 164 aa, Arabidopsis thaliana
MAMEVATPAPAPIPSERNIVLAPATTTTTATVETHKKNRIQVSNTKKPLFFYVNLAKRYIQQHNEVELSALGMAITTVVTISEILKNNGLATEKKVLTSTVGMKDETKGKMVQKAKIEIVLGKSDKFDSLVPPVTNGKTPEEEASAETEASVEAQEEVAAATEV

SEQ ID NO: 5890 - DNA, 393 bp, Arabidopsis thaliana; identical to SEQ ID NO: 5840
  CDS (1)..(393)

SEQ ID NO: 5891 - protein, 130 aa, Arabidopsis thaliana
MEEITDGVNNMNLATDSQKKNRIQVSNTKKPLFFYVNLAKRYMQQYNDVELSALGMAIATVVTVTEILKNNGFAVEKKIMTSTVDIKDDARGRPVQKAKIEITLVKSEKFDELMAAANEEKEDAEAQVQN

SEQ ID NO: 5892 - DNA, 396 bp, Physcomitrella patens subsp. patens
  CDS (1)..(396)
atggaggaaataacagaaggggtggctgatatgagcgtgtatgatgcgcacaagaagaaccggattcaagtttcgaacaccaagaaaccattattcttttatgtcaaccttgcgaagagatatatgcaacagcatgaagaagtggaattgtcagccttgggaatggcaattgctacggtggtcacggtggctgagatactaaagaacaacggtttggcaatcgagaagagaattctaacctcaacggtggacatgaaagatgagaccaggggtcggcccattcaaaaagctaaggtcgagattattctgggaaagtcggaacacttcgatgagttgatggccgctgcagcagaagagcgagagttagctcctgaggaggatcaggttggcccctga

SEQ ID NO: 5893 - protein, 131 aa, Physcomitrella patens subsp. patens
MEEITEGVADMSVYDAHKKNRIQVSNTKKPLFFYVNLAKRYMQQHEEVELSALGMAIATVVTVAEILKNNGLAIEKRILTSTVDMKDETRGRPIQKAKVEIILGKSEHFDELMAAAAEERELAPEEDQVGP

SEQ ID NO: 5894 - DNA, 366 bp, Physcomitrella patens subsp. patens
  CDS (1)..(366)
atgagcgtgtatgatgcgcacaagaagaaccggattcaagtttcgaacaccaagaaaccattattcttttatgtcaaccttgcgaagagatatatgcaacagcatgaagaagtggaattgtcagccttgggaatggcaattgctacggtggtcacggtggctgagatactaaagaacaacggtttggcaatcgagaagagaattctaacctcaacggtggacatgaaagatgagaccaggggtcggcccattcaaaaagctaaggtcgagattattctgggaaagtcggaacacttcgatgagttgatggccgctgcagcagaagagcgagagttagctcctgaggaggatcaggttggcccctga

SEQ ID NO: 5895 - protein, 121 aa, Physcomitrella patens subsp. patens
MSVYDAHKKNRIQVSNTKKPLFFYVNLAKRYMQQHEEVELSALGMAIATVVTVAEILKNNGLAIEKRILTSTVDMKDETRGRPIQKAKVEIILGKSEHFDELMAAAAEERELAPEEDQVGP

SEQ ID NO: 5896 - DNA, 402 bp, Vitis vinifera
  CDS (1)..(402)
atgaacattgcagattctcacaagaagaatcagattcaggtctctaacaccaagaagcccttgtttttctatgttaatctcgccaaaaggcacatgcagcagcacaacgaggtggaactctctgccctaggaatggctattgctactgttgttaccattgctgaaattctaaaaaacaatggattggttgtcgagaaaaagatcatgacatctactgttgatatgaaagatgaatcaagaggtcgacctatccaaaaaaccaagatcgagatattgttggggaagactgagaactttgacgaactaatggcagctgcagcagaagagaaatggaggaaaatggccacgatagtggcgatggtagtcattggtggtgggctctggcaagcgccgcctaattag

SEQ ID NO: 5897 - protein, 133 aa, Vitis vinifera
MNIADSHKKNQIQVSNTKKPLFFYVNLAKRHMQQHNEVELSALGMAIATVVTIAEILKNNGLVVEKKIMTSTVDMKDESRGRPIQKTKIEILLGKTENFDELMAAAAEEKWRKMATIVAMVVIGGGLWQAPPN

SEQ ID NO: 5898 - DNA, 390 bp, Vitis vinifera
  CDS (1)..(390)
atggaggagattacagaggccgttaacaacatcaacatctcagatttgcacaagaagaaccgcattcaggtttctaataccaagaagcccctcttcttctatgttaatctcgcaaagaggtatatgcagcaacacaatgaagtggaactttcagctcttggaatggctattgccacagtagttaccattgcagaaattctgaaaaacaatggactggctgttgaaaagaaaatcacaacctctacagtcgatatgaaagatgaatctaggggaagacctgtccaaaaagccaagattgagatattactcggaaagactgcaaactttgatgagctgatggcggctgcagcagaagagagggaagctggagatgttgaggagcagagctga

SEQ ID NO: 5899 - protein, 129 aa, Vitis vinifera
MEEITEAVNNINISDLHKKNRIQVSNTKKPLFFYVNLAKRYMQQHNEVELSALGMAIATVVTIAEILKNNGLAVEKKITTSTVDMKDESRGRPVQKAKIEILLGKTANFDELMAAAAEEREAGDVEEQS

SEQ ID NO: 5900 - DNA, 435 bp, Vitis vinifera
  CDS (1)..(435)
atggaagccattgtagttgcagagaacttggaggaatcaatgaaaaaatcgagtcttggaaatgctactgaaactcagaagaaaaaccgaattcaagtttctaattccaagaaacccctcttcttctacatcaatctcgccaagaggtacataaagcaatacaacgatgtggagctctctgccttgggaatggctattccatctgttgtcactattgctgagattctgaaaaaaaatggggtggcaacccagaaaaagattttgacatcaacagtagacatgaagtgggaaaccaatggaagaacagttcaaaaggctaagattgagattgtgctggggaaacctgaggattccgataatcaggctgcagccaccgctgtggctgctgctgcagcagcaactccagcagaggagaatgctgacaagaaggaatga

SEQ ID NO: 5901 - protein, 144 aa, Vitis vinifera
MEAIVVAENLEESMKKSSLGNATETQKKNRIQVSNSKKPLFFYINLAKRYIKQYNDVELSALGMAIPSVVTIAEILKKNGVATQKKILTSTVDMKWETNGRTVQKAKIEIVLGKPEDSDNQAAATAVAAAAAATPAEENADKKE

SEQ ID NO: 5902 - DNA, 393 bp, Vitis vinifera
  CDS (1)..(393)
atggaaaatttaacagagggagtgaacaagttgaacatctccgattcttccctcaagaaaaatcgaatccaggtctccaataccaaaaaacccctcttcttttacgttaatctcgccaagaggttcatgcaacaatacaatgatgtggaactctctgctcttgggatggctattgccaccgttgtgacaattgctgagattttgaagaacaatggactggctgttgagaagaggatcacaacatcaactgttgacataagggatgaatttggagggcgacctcttcaaaaagcaaagattgaaattttgcttggaaagacggaaaactttgatgagttgatggctgttgcagcggaggaaagggaaattagagactacaaggaacaaagctga

SEQ ID NO: 5903 - protein, 130 aa, Vitis vinifera
MENLTEGVNKLNISDSSLKKNRIQVSNTKKPLFFYVNLAKRFMQQYNDVELSALGMAIATVVTIAEILKNNGLAVEKRITTSTVDIRDEFGGRPLQKAKIEILLGKTENFDELMAVAAEEREIRDYKEQS

SEQ ID NO: 5904 - DNA, 393 bp, Vitis vinifera
  CDS (1)..(393)
atggaagaaatcacagagggagtgaacagcatgaacattgcagattctcacaagaagaatcggattcaggtctctaacaccaagaagcccttgtttttctatgttaatctcgccaagaggtacatgcagcagcacaacgaggtggagctctctgccctgggaatggctattgctactgttgttaccattgctgaaattctgaaaaacaatggattggctgtcgagaaaaagatcatgacatctactgttgatatgaaggatgaatcaagaggtcgacccatccaaaaagccaagatcgagatattgctggggaagactgaaaactttgacgaactgatggcagctgcagcagaagagagggaggctggggatgttgaagagcagcagagttga

SEQ ID NO: 5905 - protein, 130 aa, Vitis vinifera
MEEITEGVNSMNIADSHKKNRIQVSNTKKPLFFYVNLAKRYMQQHNEVELSALGMAIATVVTIAEILKNNGLAVEKKIMTSTVDMKDESRGRPIQKAKIEILLGKTENFDELMAAAAEEREAGDVEEQQS

SEQ ID NO: 5906 - DNA, 411 bp, Populus trichocarpa
  CDS (1)..(411)
atggaagtaatcacagagggtgttaacaacttaaacatagcagcagcagcagcaacaacagattcagccaataacaagaagaaccgaatccaagtttctaacaccaaaaaacctcttttcttctacgttaatctcgccaagaggtacatgcaacagcacaatgaagtggagctctctgctcttgggatggctatagccactgttgttaccattgctgagatcttgaagaacaatggacttgctgttgagaaaaagataatgacttccacagttgacatgagggaagaaacaggagggcgtcctgttccaaaagcaaagattgaaatattgctagggaagacagaaaagtttgatgagttgatggctgctgctgctgcagaggaagccgcggaggcagaggagcagaactga

SEQ ID NO: 5907 - protein, 136 aa, Populus trichocarpa
MEVITEGVNNLNIAAAAATTDSANNKKNRIQVSNTKKPLFFYVNLAKRYMQQHNEVELSALGMAIATVVTIAEILKNNGLAVEKKIMTSTVDMREETGGRPVPKAKIEILLGKTEKFDELMAAAAAEEAAEAEEQN

SEQ ID NO: 5908 - DNA, 402 bp, Populus trichocarpa
  CDS (1)..(402)
atggaaggaatcacagagggtgttaccaacttaaacatcacagcagcagcagattcaggcaataacaagaagaaccgaatccaagtttctaacaccaaaaaacctcttttcttctacgttaatctcgccaagaggtacatgcaacagcacaatgaagtggagctctctgctcttgggatggcaatagccactgttgttaccattgctgagatcttgaagaataatggacttgctgttgagaaaaagatcacgacgtccacagttgacatgagggaagaaacaggagggcgtcctgttccgaaagcaaagattgaaatattgctaggcaagacagaaaagtttgatgagttgatggctgccgctgctgcacaggaagcagcagatgcagaggagcagagctga

SEQ ID NO: 5909 - protein, 133 aa, Populus trichocarpa
MEGITEGVTNLNITAAADSGNNKKNRIQVSNTKKPLFFYVNLAKRYMQQHNEVELSALGMAIATVVTIAEILKNNGLAVEKKITTSTVDMREETGGRPVPKAKIEILLGKTEKFDELMAAAAAQEAADAEEQS

SEQ ID NO: 5910 - DNA, 447 bp, Populus trichocarpa
  CDS (1)..(447)
atgacgatggagacagtagctgtagcaccaactccaacaccaacgccaacaacacatcaaaccatgaacaaagatacaacaacgacgctcgcacagcaaaagaataacaggattcaagtctctaacaccaagaaacctctcttcttttatgtcaatctggctaagagatatatgcagcagtataacgaggttgagctttctgccttgggcatggcaatcaccactgttgttacaattgctgagattttgaagaacaatggattggctactgagaagaaagttctgacatctacagtatgcatgaaagatgagaacaaaggacggcaggttcagaaggctaagattgagattgtgttggggaagtcggagaaatttgacagtctgatgaatgctgccaatgcagctccagaggaggaggcagccaaagagaaggatgatgagaaatag

SEQ ID NO: 5911 - protein, 148 aa, Populus trichocarpa
MTMETVAVAPTPTPTPTTHQTMNKDTTTTLAQQKNNRIQVSNTKKPLFFYVNLAKRYMQQYNEVELSALGMAITTVVTIAEILKNNGLATEKKVLTSTVCMKDENKGRQVQKAKIEIVLGKSEKFDSLMNAANAAPEEEAAKEKDDEK

SEQ ID NO: 5912 - DNA, 390 bp, Sorghum bicolor
  CDS (1)..(390)
atggaggaggtgacggagggagtgaacaatctggcgattacggagccgcacaagaagaacaggatccaggtctccaacaccaagaagccgctattcttttacgtcaacctcgccaagaggtacatgcagcagcacgaggaggtggagctctcggcccttggcatggccattgccactgtggttactgttgctgaaattctgaaaaataatgggctcgctgttgaaaagaagatcatgacatccacagttgatgtcaaggatgatacaagggcccgccctattcagaaagccaagatcgaaatagtgctgggcaagacggataaatttgatgagctgatggcggcagctgatgcggagagggaagctgctgaggcagaggaacagagctaa

SEQ ID NO: 5913 - protein, 129 aa, Sorghum bicolor
MEEVTEGVNNLAITEPHKKNRIQVSNTKKPLFFYVNLAKRYMQQHEEVELSALGMAIATVVTVAEILKNNGLAVEKKIMTSTVDVKDDTRARPIQKAKIEIVLGKTDKFDELMAAADAEREAAEAEEQS

SEQ ID NO: 5914 - DNA, 405 bp, Sorghum bicolor
  CDS (1)..(405)
atgtccggaggagacatggcggcgcaggcgggcggagacgcgcagcagcagcagcagcaggccgtcggcgggaaccggattcaggtgtccagctccaagaagccgctattcttctacgtcaatctcgctaagaagtacatgcagcagcacggcgacgtcgagctttccgcgctcgggctggccatatcaacggttgtaaccattgcagagatactgaagaacaatggtcttgctgtcgagaagaagattagaacatccacggttgaaatcattgacgaaacgaaagcccgaccaatccaaaaggctaagattgagatagtgctgggaaagactgataagtttgaggaattgatggcggccaatgttggagatgcaaacgcaggagatggcgaggaacaaacctag

SEQ ID NO: 5915 - protein, 134 aa, Sorghum bicolor
MSGGDMAAQAGGDAQQQQQQAVGGNRIQVSSSKKPLFFYVNLAKKYMQQHGDVELSALGLAISTVVTIAEILKNNGLAVEKKIRTSTVEIIDETKARPIQKAKIEIVLGKTDKFEELMAANVGDANAGDGEEQT

SEQ ID NO: 5916 - DNA, 426 bp, Sorghum bicolor
  CDS (1)..(426)
atggaggaggtcaccgaggccgtgaacaacctcagcatctccggtggaggagccacggccggtgccggtgccggagcggaggggcacaagaagaaccgcatccaggtctccaacaccaagaagcccctcttcttctatgtcaacctcgccaagaggtacatgcagctgcacaacgaagtggagctgtcggccctcggcatggccattgcaacggtggtgacagtagcagaaattctgaaaaataatggccttgctgtcgagaagaagatcatgacatctactgttgatgtcaaagatgaaactaggccccgacctatccagaaggccaagattgaaatattgcttggcaagacggacaaatttgatgagctgatggcagcggctgcagaagagagggaggccaatgaggccgaggaacaaagctga

SEQ ID NO: 5917 - protein, 141 aa, Sorghum bicolor
MEEVTEAVNNLSISGGGATAGAGAGAEGHKKNRIQVSNTKKPLFFYVNLAKRYMQLHNEVELSALGMAIATVVTVAEILKNNGLAVEKKIMTSTVDVKDETRPRPIQKAKIEILLGKTDKFDELMAAAAEEREANEAEEQS

SEQ ID NO: 5918 - DNA, 444 bp, Sorghum bicolor
  CDS (1)..(444)
atggtggtggaggagatcaccgagggcgtgaagaacctcgccgtcgccggagatgcggcggcggcctcaggcggagaggggcagaggaggggcggcggcggcagcagcaaccgcatccaggtgtctaacaccaagaagcccctcttcttttacgtcaacctcgccaagaggtatatgcaacagcacggcgatgttgagctatccgctcttggaatggccatagcgacagttgtgaccgtggcagaaattctgaagaacaatggatttgctgttgaaaagaagattaggacatctactgttgaaataaacgacgaatcaagagggcgtccattccaaaaggccaagattgagataatcttgggaaagagtgataaatttgatgagttgatggccgctgctgcggaagagaggggagaagtggaagatggtgaagagcaggcttga

SEQ ID NO: 5919 - protein, 147 aa, Sorghum bicolor
MVVEEITEGVKNLAVAGDAAAASGGEGQRRGGGGSSNRIQVSNTKKPLFFYVNLAKRYMQQHGDVELSALGMAIATVVTVAEILKNNGFAVEKKIRTSTVEINDESRGRPFQKAKIEIILGKSDKFDELMAAAAEERGEVEDGEEQA

SEQ ID NO: 5920 - DNA, 387 bp, Ricinus communis
  CDS (1)..(387)
atggaggctgtaacagaaggagtaaacaacatgaacataaatgatgcatccaacaagaaaaaccgcatccaagtctctaatacgaagaagcccctctttttctacgtcaatctcgccaagagatacatgcagcaacacaatgaagttgaactgtctgcacttggaatggctatagcaacagttgtgaccattgccgagatattgaagaataatgggttggctattgaaaagaagatcatgacttcgactgttgacatgagggaggatacaggaggacgccccgtccctaaagctaagattgagatattgctagggaagacggagaagtttgatgagttgatggctgctgctacagaggaaggtactgatagcgaggagcagagctga

SEQ ID NO: 5921 - protein, 128 aa, Ricinus communis
MEAVTEGVNNMNINDASNKKNRIQVSNTKKPLFFYVNLAKRYMQQHNEVELSALGMAIATVVTIAEILKNNGLAIEKKIMTSTVDMREDTGGRPVPKAKIEILLGKTEKFDELMAAATEEGTDSEEQS

SEQ ID NO: 5922 - DNA, 462 bp, Ricinus communis
  CDS (1)..(462)
atggctgtggaaacagtagcaccagcaccagcaccagcaccagaaccagcaccagcaccgacaccagcacccactccgacagcaacagacaatgacatgaccaacaacgctgcacagacacagcagaagaagaacaggattcaagtctctaataccaagaaacccctcttcttttatgtcaatcttgctaagaggtatatacaacagcataacgaggtggagctttctgctttgggaatggcaatcaccacagttgtcacaattgctgagattttgaagaacaatggattagccacagagaagaaagttttgacatctacagtaggcatgaaagatgaaaacaaaggacgactagttcaaaaggccaagattgagatagtgttggggaagtctgagaaatttgacagtctgatggaagctgccaatacagccacagaggcagaaacccaagacaaagaatga

SEQ ID NO: 5923 - protein, 153 aa, Ricinus communis
MAVETVAPAPAPAPEPAPAPTPAPTPTATDNDMTNNAAQTQQKKNRIQVSNTKKPLFFYVNLAKRYIQQHNEVELSALGMAITTVVTIAEILKNNGLATEKKVLTSTVGMKDENKGRLVQKAKIEIVLGKSEKFDSLMEAANTATEAETQDKE

SEQ ID NO: 5924 - DNA, 393 bp, Ricinus communis
  CDS (1)..(393)
atggaagaaattacagagggagttaacaacatcaacttggcaggagatctacacaagaaaaatcgtattcaagtctccaacaccaaaaagcccttgtttttctatgtcaatctcgccaagaggtatatgcagcagcacaatgaggtggagctgtctgctcttggaatggctattgctactgttgtgactgttgctgaaattctgaagaacaatggattggctattgaaaggaaaatcatgacttccactgttgatatgaaagatgaatcaagaggacggcctgtccagaaagctaagattgagatactgctggggaagactgaaaactttgatgaattgatggcagctgctgctgaagagagagatattgtagatggtgaagagcagagttga

SEQ ID NO: 5925 - protein, 130 aa, Ricinus communis
MEEITEGVNNINLAGDLHKKNRIQVSNTKKPLFFYVNLAKRYMQQHNEVELSALGMAIATVVTVAEILKNNGLAIERKIMTSTVDMKDESRGRPVQKAKIEILLGKTENFDELMAAAAEERDIVDGEEQS

SEQ ID NO: 5926 - DNA, 375 bp, Oryza sativa subsp. indica
  CDS (1)..(375)
atggcggtggaggagatcaccgagggggtgaggaacctggccgtggagggggagcccgcggcggcggcggcggcggcgggaggtggtggtgagggggcgcagaggagggcggccgggagcagcagcaaccgcatccaggtgtccaacaccaagaagccactcttcttctatgtcaacctcgccaagaggtacatgcagcagcacggcgatgtcgagctctccgcgctcgggatggccattgcaacagttgtaactgttgcggagattcttaagaataacgggtttgctgttgaaaagaagattagaacatctacggtggaaataaacgatgaatcgagagttcgcccgctccaaaaggctaaggtcaggctttag

SEQ ID NO: 5927 - protein, 124 aa, Oryza sativa subsp. indica
MAVEEITEGVRNLAVEGEPAAAAAAAGGGGEGAQRRAAGSSSNRIQVSNTKKPLFFYVNLAKRYMQQHGDVELSALGMAIATVVTVAEILKNNGFAVEKKIRTSTVEINDESRVRPLQKAKVRL

SEQ ID NO: 5928 - DNA, 399 bp, Picea sitchensis
  CDS (1)..(399)
atggcgatggaagaaatcaccgagcgagtgggaaacatggatctgaatgatgttcacaagaagaacaggattcaagtctccaataccaagaagcctctcttcttctatgtcaacctcgccaagagatatatgcagcaacatgaagaagtggagctatctgctttaggaatggccattgccacagtggttactgttgctgagatattgaagaacaatggtctagctgtagaaaaaaaaatctcaacgtctaccattgacatgagagatgaatcaagaggccgtcccatccagaaagcaaaggttgaaataatactgggaaaatctgagcagtttaatgatttgatggctgctgctgctgaagagagggaagttgcggctgatgtggatgaccacagttag

SEQ ID NO: 5929 - protein, 132 aa, Picea sitchensis
MAMEEITERVGNMDLNDVHKKNRIQVSNTKKPLFFYVNLAKRYMQQHEEVELSALGMAIATVVTVAEILKNNGLAVEKKISTSTIDMRDESRGRPIQKAKVEIILGKSEQFNDLMAAAAEEREVAADVDDHS

SEQ ID NO: 5930 - DNA, 429 bp, Picea sitchensis
  CDS (1)..(429)
atgtttcaaagtgaggaggtgccaaggaaggaagccatggaagagatcagcgagggaatggcgaacgtgaatttgaacgacaacaaccagaagaaaaacaggattcaagtctcaaataccaagcagcccctcttcttctatgtgaatcttgccaagagatatctgaaaaaccatgaagaagtggagctttcaggtttaggaatggctattgcgacagttgtgacagtagccgaaatattgaagaataatgggctggcagtagagaagagaatcttgacttctactgttgacatgaaagatgatacaaggagcaggccaatccaaaaggctaagattgaaataatattgagaaaatcacacaactttgaggagttgatggatgctgctgctgaggaaagagagcacgacgatgcaaacgagaacagttag

SEQ ID NO: 5931 - protein, 142 aa, Picea sitchensis
MFQSEEVPRKEAMEEISEGMANVNLNDNNQKKNRIQVSNTKQPLFFYVNLAKRYLKNHEEVELSGLGMAIATVVTVAEILKNNGLAVEKRILTSTVDMKDDTRSRPIQKAKIEIILRKSHNFEELMDAAAEEREHDDANENS

SEQ ID NO: 5932 - DNA, 465 bp, Picea sitchensis
  CDS (1)..(465)
atgcaggctcaggttgaggttcaggatcaggtccggcccggtgtggaggaagtaaccgaaggcatggagaaattgaaggtggctgccattaacaacaacaacgcggtgtccaacgaaaactacaagaagaacaggattcaagtctccaacactaagaagcccctgttcttctacgtcaatcttgccaagagatatctgcagcaacatgatgaagtggagctgtcggctttgggaatggctattgccacagttgttactgttgcagaaatattaaagaacaatggtctggccattgagaaaaggatcttgacatccactgttgaaatgaaagatgaaacaagggaacggcccatccagaaagccaaggttgaaataatactcacgaaagctgacaagtttgatgagctgatggctgccgcttcggaggagagggaacttggtggcgatgaagatggtcaccattaa

SEQ ID NO: 5933 - protein, 154 aa, Picea sitchensis
MQAQVEVQDQVRPGVEEVTEGMEKLKVAAINNNNAVSNENYKKNRIQVSNTKKPLFFYVNLAKRYLQQHDEVELSALGMAIATVVTVAEILKNNGLAIEKRILTSTVEMKDETRERPIQKAKVEIILTKADKFDELMAAASEERELGGDEDGHH

SEQ ID NO: 5934 - DNA, 402 bp, Populus trichocarpa
  CDS (1)..(402)
atggaaggaatcacagagggtgttaccaacttaaacattacagcagcagcagattcaggcaataacaagaagaaccgaatccaagtttctaacaccaaaaaacctcttttcttctacgttaatctcgccaagaggtacatgcaacagcacaatgaagtggagctctctgctcttgggatggcaatagccactgttgttaccattgctgagatcttgaagaataatggacttgctgttgagaaaaagatcacgacgtccacagttgacatgagggaagaaacaggagggcgtcctgttccgaaagcaaagattgaaatattgctaggcaagacaggaaagtttgatgagttgatggctgccgctgctgcacaggaagcagcagatgcagaggagcagagctga

SEQ ID NO: 5935 - protein, 133 aa, Populus trichocarpa
MEGITEGVTNLNITAAADSGNNKKNRIQVSNTKKPLFFYVNLAKRYMQQHNEVELSALGMAIATVVTIAEILKNNGLAVEKKITTSTVDMREETGGRPVPKAKIEILLGKTGKFDELMAAAAAQEAADAEEQS

SEQ ID NO: 5936 - DNA, 441 bp, Zea mays
  CDS (1)..(441)
atggtggtggaggagatcgccgagggggtgaaaaacctcaccgttaccggagatgcggcggcttcaggcggagaggggcagaggaggggcggcggcggcagcagcaaccgcatccaggtgtccaacaccaagaagcccctcttcttctacgtcaacctcgccaagaggtatatgcaacagcacgacgatgtagagctatccgctcttgggatggccatagcaacagttgtgaccgtggcagaaattctgaagaacaatggatttgccgttgaaaagaaaattaggacctctactgttgaaataaacgacgaatcaagagggcgtccattccaaaaggccaagattgagataatcttgggaaagagcgacaaatttgatgagctgatggccgctgctgcagaagagaggggcgaagtggaagatggtgaagagcaggcttga

SEQ ID NO: 5937 - protein, 146 aa, Zea mays
MVVEEIAEGVKNLTVTGDAAASGGEGQRRGGGGSSNRIQVSNTKKPLFFYVNLAKRYMQQHDDVELSALGMAIATVVTVAEILKNNGFAVEKKIRTSTVEINDESRGRPFQKAKIEIILGKSDKFDELMAAAAEERGEVEDGEEQA

SEQ ID NO: 5938 - DNA, 402 bp, Glycine max
  CDS (1)..(402)
atggaaggcataacagagggtgtgaacaacatcaacattaacatctccgattcgtataagaagaatcgcattcaggtctctaacaccaagaagcccctcttcttctacgttaatctcgccaagagatatatgcaacagcatgatgaggtcgagctctcagctctaggaatggctattgccacagtagtaactgttgctgaaattttgaaaaacaacggacttactgttgaaaagaaaatcacgacatcaactgttgacataaaggatgactctagaggtcgacctgttcaaaaggccaagattgaaatagtactcgggaagacagaaaacttcgatgagttgatggctgctgcggctgctgaagatggtgaaaatagagatgttgaagagcagagtgcatga

SEQ ID NO: 5939 - protein, 133 aa, Glycine max
MEGITEGVNNININISDSYKKNRIQVSNTKKPLFFYVNLAKRYMQQHDEVELSALGMAIATVVTVAEILKNNGLTVEKKITTSTVDIKDDSRGRPVQKAKIEIVLGKTENFDELMAAAAAEDGENRDVEEQSA

SEQ ID NO: 5940 - DNA, 396 bp, Vitis vinifera
  CDS (1)..(396)
atgaaaaaatcgagtcttggaaatgctactgaaactcagaagaaaaaccgaattcaagtttctaattccaagaaacccctcttcttctacatcaatctcgccaagaggtacataaagcaatacaacgatgtggagctctctgccttgggaatggctattccatctgttgtcactattgctgagattctgaaaaaaaatggggtggcaacccagaaaaagattttgacatcaacagtagacatgaagtgggaaaccaatggaagaacagttcaaaaggctaagattgagattgtgctggggaaacctgaggattccgataatcaggctgcagccaccgctgtggctgctgctgcagcagcaactccagcagaggagaatgctgacaagaaggaatga

SEQ ID NO: 5941 - protein, 131 aa, Vitis vinifera
MKKSSLGNATETQKKNRIQVSNSKKPLFFYINLAKRYIKQYNDVELSALGMAIPSVVTIAEILKKNGVATQKKILTSTVDMKWETNGRTVQKAKIEIVLGKPEDSDNQAAATAVAAAAAATPAEENADKKE

SEQ ID NO: 5942 - DNA, 393 bp, Brassica napus
  CDS (1)..(393)
atggaagggatcactgaaggagttaacaacatgagcttggccgttgattcacagaagaagaatcggattcaggtttcaaacactaagaaaccattgttcttctacgtcaatctcgccaagaggtacatgcagcagtacgcagatgtggagttgtctgcacttggaatggccattgctacggttgttaccgttgctgagatattgaagaacagtggctttgctgttgaaaagaagattatgacttcgactgtggatatcaaggacggtgcaaggggtcgtcctgtgcagaaacccaagattgagataacgctcgccaagtctgacaagtttgatgaattaatggctgcggccaacgaagacaaggaggctgcagaagctcaagagcagaactga

SEQ ID NO: 5943 - protein, 130 aa, Brassica napus
MEGITEGVNNMSLAVDSQKKNRIQVSNTKKPLFFYVNLAKRYMQQYADVELSALGMAIATVVTVAEILKNSGFAVEKKIMTSTVDIKDGARGRPVQKPKIEITLAKSDKFDELMAAANEDKEAAEAQEQN

SEQ ID NO: 5944 - DNA, 465 bp, Brassica napus
  CDS (1)..(465)
atggcgatggaaatagcaactccgattcatgcaccggttacatctccggccagcaacctcatcatatcagcaacaacggccgtggaaactcagaagaagaacaggattcaagtttccaacaccaagaaacccttattcttctacgttaacctcgccaagaggtacattcaacagcacaacgaggttgagctttctgcacttggaatggcgatcacaacagtggttactatctcagaaattttgaagaacaatggacttgcaacagagaagagagttctgacatcgacagtgggaatgaaagacgagaacaaagggaagatagttcagaagacaaagattgagattgtgttggcgaaatcagacaaatttgattctctgatgactccagcgccggaggaggaggcggtggcgaatatgggagagaaaccaattgaaactgaagctcgtgaaggcaagaaggagtga

SEQ ID NO: 5945 - protein, 154 aa, Brassica napus
MAMEIATPIHAPVTSPASNLIISATTAVETQKKNRIQVSNTKKPLFFYVNLAKRYIQQHNEVELSALGMAITTVVTISEILKNNGLATEKRVLTSTVGMKDENKGKIVQKTKIEIVLAKSDKFDSLMTPAPEEEAVANMGEKPIETEAREGKKE

SEQ ID NO: 5946 - DNA, 393 bp, Brassica napus
  CDS (1)..(393)
atggaagagattacagacggagtgaacaacatgaacttggccgttgattcccagaagaagaaccggattcaagtttccaacaccaagaaaccattgttcttctacgtcaacctcgccaagaggtatatgcaagagcacaatgatgtcgaattgtctgcccttgggatggccattgcaaccgttgttaccattgctgaaatactcaagaacaatggttttgctgttgaaaagaagatcatgacttcaactgttgatattaaggatggctcaaggggacgtcctgtgcagaaacctaagattgaaattacgcttggcaagtcagagaagtttgatgagctaatggctgcagccaatgaagaaaaagaagctgcagaagctcaggtgcagagctga

SEQ ID NO: 5947 - protein, 130 aa, Brassica napus
MEEITDGVNNMNLAVDSQKKNRIQVSNTKKPLFFYVNLAKRYMQEHNDVELSALGMAIATVVTIAEILKNNGFAVEKKIMTSTVDIKDGSRGRPVQKPKIEITLGKSEKFDELMAAANEEKEAAEAQVQS

SEQ ID NO: 5948 - DNA, 489 bp, Brassica napus
  CDS (1)..(489)
atggcgatggaagtagcaacaccggctccggcaccgctcacggcaccggagagaaacatcgttctcgtgccgtcagtgaaggccaccgccgagagtcacaagaagaacaggatccaagtctccaacacgaagaaaccattgttcttctacgttaatctcgccaagaggtacatgcagcaacacaacgaggtcgaactctctgcacttggaatggcgatcacaactgttgtaacgatctctgagatcttgaagaacaatggattagctatagagaagaaagtgttgacatcgactgtgggaatgaaagacgagactaaaggaaggatggttcagaaggcaaagattgagattgtgctgggcaaatcagacaagtttgactctttggtgccacctgtgaccaacggcaaaactcccgaggaggtagctaaagctgagaccgacgcggctattgaagcacaagaagaagctgctgcagccaccgaggcctag

SEQ ID NO: 5949 - protein, 162 aa, Brassica napus
MAMEVATPAPAPLTAPERNIVLVPSVKATAESHKKNRIQVSNTKKPLFFYVNLAKRYMQQHNEVELSALGMAITTVVTISEILKNNGLAIEKKVLTSTVGMKDETKGRMVQKAKIEIVLGKSDKFDSLVPPVTNGKTPEEVAKAETDAAIEAQEEAAAATEA

SEQ ID NO: 5950 - DNA, 393 bp, Brassica napus
  CDS (1)..(393)
atggaagggatcactgaaggagtgaacaacatgagcttgggcgttgatacccagaagaagaatcggattcaggtttcccacactaagaaaccattgttcttctacgtcaatctcgccaagaggtacatgcagcagtacgcagatgtcgagttgtctgcacttggaatggctattgctactgttgttaccgttgctgagatattgaagaacaatggttttgctgttgaaaagaagatcatgactacgactgtggatatcaaggacgattcaagaagacgtcctgtgcagaaagccaagattgagataacgctcgccaagtctgacaagtttgacgagttaatggctgcggccaatgaggagaaggaggctgcagaagctcaagagcagagctga

SEQ ID NO: 5951 - protein, 130 aa, Brassica napus
MEGITEGVNNMSLGVDTQKKNRIQVSHTKKPLFFYVNLAKRYMQQYADVELSALGMAIATVVTVAEILKNNGFAVEKKIMTTTVDIKDDSRRRPVQKAKIEITLAKSDKFDELMAAANEEKEAAEAQEQS

SEQ ID NO: 5952 - DNA, 474 bp, Brassica napus
  CDS (1)..(474)
atggcgatggaagtagcgacaccggctccggcaccgatcaacgcaccggagagaaacatcatcctcgcgccggcgactgttgagactcacaagaagaacaggatccaagtctccaacacgaagaaacctttgttcttctacgttaatctcgccaagaggtacatgcagcaacacaatgaggtcgaactctctgcgcttggaatggcaatcacaactgtggtgacaatctctgagatcttgaagaacaatggattggctacagagaagaaagtgttgacatctaccgtgggaatgaaggacgagactaaaggaaggatggttcagaaggcaaagattgagattgtgttgggcaaatcagacaagtttgactctttggtaccacctgtgaccaacggcaaaacgccggaggaggtagctaaagcagagacggaggctgctgttgaagtacaagaagctgcagccaccgaggcctag

SEQ ID NO: 5953 - protein, 157 aa, Brassica napus
MAMEVATPAPAPINAPERNIILAPATVETHKKNRIQVSNTKKPLFFYVNLAKRYMQQHNEVELSALGMAITTVVTISEILKNNGLATEKKVLTSTVGMKDETKGRMVQKAKIEIVLGKSDKFDSLVPPVTNGKTPEEVAKAETEAAVEVQEAAATEA

SEQ ID NO: 5954 - DNA, 393 bp, Helianthus annuus
  CDS (1)..(393)
atggaggagataacagaagcagttcagaacattagtatctcaaacgattcacagaagaagaatcgcattcaagtttccaacacgaagaagcctctcttcttctacgttaatctcgccaagaggtacatgcaacagcataatgatgttgagctttctgcgttaggaatggctattgccactgttgtcacaattgcagagattctcaagaacagtggatttgccgttgagaagaagattatgacatctactgttgacataaaagatgaatctagaggacgaactattcaaaaagccaagatcgagatagtattggggaagacggaaaagtttgacgaactgatggctgctgctgaggaggaaagggagcttgcaaacggtgaagagcagagctaa

SEQ ID NO: 5955 - protein, 130 aa, Helianthus annuus
MEEITEAVQNISISNDSQKKNRIQVSNTKKPLFFYVNLAKRYMQQHNDVELSALGMAIATVVTIAEILKNSGFAVEKKIMTSTVDIKDESRGRTIQKAKIEIVLGKTEKFDELMAAAEEERELANGEEQS

SEQ ID NO: 5956 - DNA, 408 bp, Linum usitatissimum
  CDS (1)..(408)
atggaagagattactgagggcgtgaacaacatggaccttgccggagccgatgcgagcaagaagaatcggattcaggtctctaacaccaagaagcccctcttcttctatgttaatctcgctaagaggtatatgcagcaattcaatgaggtggaactatccgctcttggaatggctattgccacagttgtcaccgtggcagaaattctcaagaacaatgggttggccgtggagaagaaaatcatgacctccactgttgacatgagggatgattcgaggggacggcctgtccaaaaagccaagattgagatactactggggaagaccgcaaactttgatgaactgatggcagctgctgcagaagagagggagagggagagggaagcaggagaagaagaggagcagagctga

SEQ ID NO: 5957 - protein, 135 aa, Linum usitatissimum
MEEITEGVNNMDLAGADASKKNRIQVSNTKKPLFFYVNLAKRYMQQFNEVELSALGMAIATVVTVAEILKNNGLAVEKKIMTSTVDMRDDSRGRPVQKAKIEILLGKTANFDELMAAAAEEREREREAGEEEEQS

SEQ ID NO: 5958 - DNA, 393 bp, Linum usitatissimum
  CDS (1)..(393)
atggaggtgattacccaacgagtgaagaacttgaatgtcgccgccgccgattcagctccagcttacctgaagaacagaatccaagtctcgaacaccaagaagcctctctacttctacgtcaatctcgccaagaggtatatgcagcagttcaacgaaggggagctttctgctctggggatggcgatcgccactgttgttactgttgctgagatcttgaagaacaacggatttgcagtcgagaagcggataatgacctctactgttgatctgagggaggattcagctgcacgtccgatgccaaaaccaaagattgagataatgctggggaagtcggagaagttcgatgaattgattgctgctgctgctcctaacgaggaagagaacgatgagtag

SEQ ID NO: 5959 - protein, 130 aa, Linum usitatissimum
MEVITQRVKNLNVAAADSAPAYLKNRIQVSNTKKPLYFYVNLAKRYMQQFNEGELSALGMAIATVVTVAEILKNNGFAVEKRIMTSTVDLREDSAARPMPKPKIEIMLGKSEKFDELIAAAAPNEEENDE

SEQ ID NO: 5960 - DNA, 402 bp, Glycine max
  CDS (1)..(402)
atggaagcaatcacagagggagtgaacaacatcaacatctctgattcttacaagaagaatcgcattcaggtctccaacaccaaaaagcctctcttcttctacgtcaatctcgccaagaggtatatgcaacagcataatgaggttgagctctcagcactaggaatggctattgctacagtggttactgttgctgaaatcttgaaaaacaatgagcttgctattgaaaagaaaatcacgacatcaacagttgacatcaaagatgattctagaggcagacctgtccaaaaggccaagattgaaatattacttgggaagactgaaaaatttgatgagttgatggcggctgctgctgctgctgctgaagatggtgaaaatggagatgttgaagagcacactgcataa

SEQ ID NO: 5961 - protein, 133 aa, Glycine max
MEAITEGVNNINISDSYKKNRIQVSNTKKPLFFYVNLAKRYMQQHNEVELSALGMAIATVVTVAEILKNNELAIEKKITTSTVDIKDDSRGRPVQKAKIEILLGKTEKFDELMAAAAAAAEDGENGDVEEHTA

SEQ ID NO: 5962 - DNA, 405 bp, Glycine max
  CDS (1)..(405)
atggaagcaatcacagagggagtgaacaacatcaacatctccgattcttacaagaagaatcgcattcaggtctccaacaccaaaaagcccctcttcttctacgtcaatctcgccaagaggtatatgcaacagcataatgaagttgagctctcagcactaggaatggctattgctacggtggttactgttgctgaaatcttgaaaaacaatgagcttgctgttgaaaagaaaatcacaacatcaacagttgacatcaaagatgattctagaggcagacctgtccaaaaggccaagattgaaatattactggggaagactgaaaaatttgatgagttgatggctgctgctgctgctgctgctgcagaagatggtgaaaacggagatgttgaagagcacgccgcataa

SEQ ID NO: 5963 - protein, 134 aa, Glycine max
MEAITEGVNNINISDSYKKNRIQVSNTKKPLFFYVNLAKRYMQQHNEVELSALGMAIATVVTVAEILKNNELAVEKKITTSTVDIKDDSRGRPVQKAKIEILLGKTEKFDELMAAAAAAAAEDGENGDVEEHAA

SEQ ID NO: 5964 - DNA, 393 bp, Helianthus annuus
  CDS (1)..(393)
atggaagaggttacagagggattaaacaacataaacatctccaacgattcttaccggaaaaaccgaattcaagtttccaacaccaaaaagcctctattcttttacgtcaatctcgcaaagaggtatatgcagcagcacaatgaagttgagctatcagctcttggaatggcaattgcaactgtcgtcactgtggctgaaatcctgaagaacaacggctttgctgttgaaaagaaaataatgacatcaactgttgaaatgaatggtgaatctaggggcagaccggtccaaaaggccaagatcgaaattgtgctgggaaagactgaaaatttcgacgagttaatggctgctgcacaagaggagagggaattgggatatgccgaggagcaaagctga

SEQ ID NO: 5965 - protein, 130 aa, Helianthus annuus
MEEVTEGLNNINISNDSYRKNRIQVSNTKKPLFFYVNLAKRYMQQHNEVELSALGMAIATVVTVAEILKNNGFAVEKKIMTSTVEMNGESRGRPVQKAKIEIVLGKTENFDELMAAAQEERELGYAEEQS

SEQ ID NO: 5966 - DNA, 393 bp, Helianthus annuus
  CDS (1)..(393)
atggaagaggttacagagggattaaacaacataaacatctccaacgattcttaccggaaaaaccgaattcaagtttcccacacaaaaaagcctcttttcttttacgtcaatctcgcaaagaggtatatgcagcagcacaatgaagttgagctttcagctcttggaatggcaattgcaacggttgtcactgtggctgaaatcctgaagaacaacggctttgctgttgaaaagaaaataatgacatcaactgttgaaatgaatggtgaatctaggggcagaccggtccaaaaggccaagatcgaaattgtgctgggaaagactgaaaatttcgacgagttaatggctgctgcacaagaggagagggaattgggatatgccgaggagcaaagctga

SEQ ID NO: 5967 - protein, 130 aa, Helianthus annuus
MEEVTEGLNNINISNDSYRKNRIQVSHTKKPLFFYVNLAKRYMQQHNEVELSALGMAIATVVTVAEILKNNGFAVEKKIMTSTVEMNGESRGRPVQKAKIEIVLGKTENFDELMAAAQEERELGYAEEQS

SEQ ID NO: 5968 - DNA, 393 bp, Helianthus annuus
  CDS (1)..(393)
atggaggagataacagaagcagttcagaacattagtatctcaaacgattcacagaagaagaatcgcattcaagtttccaacacgaagaagcctctcttcttctacgttaatctcgccaagaggtacatgcaacagcataatgatgttgagctttctgcgttaggaatggctattgccactgttgtcacaattgcagagattctcaagaacagtggatttgccgttgagaagaagattatgacatctactgttgacataaaagatgaatctagaggacgaactattcaaaaagccaagatcgacatagtattggggaagacggaaaagtttgacgaactgatggctgctgctgaggaggaaagggagcttgcaaacggtgaagagcagagctaa

SEQ ID NO: 5969 - protein, 130 aa, Helianthus annuus
MEEITEAVQNISISNDSQKKNRIQVSNTKKPLFFYVNLAKRYMQQHNDVELSALGMAIATVVTIAEILKNSGFAVEKKIMTSTVDIKDESRGRTIQKAKIDIVLGKTEKFDELMAAAEEERELANGEEQS

SEQ ID NO: 5970 - DNA, 399 bp, Hordeum vulgare
  CDS (1)..(399)
atggaggaggtgacggagggagtcaagaacctggccgtgacggagccgcagaagaagaaccggatccaggtctccaacaccaagaagccgctattcttctatgtcaacctcgccaagaggtacatgcagatgcataacgaggtggaactctccgccctcggcatggctatcgccactgtggtgacggttgctgaaattcttaaaaataatggccttgctgttgaaaagaagatcatgacatcaactgttgatgtcaacgatgaatcaaggggccgcccgatgcagaaggctaagattgaaatagtgctcggcaagaccgagaacttcgatgagctgatggctgctgccgcggaggagagggaagtggcagctgccgaggacggcgaggagcaggcctaa

SEQ ID NO: 5971 - protein, 132 aa, Hordeum vulgare
MEEVTEGVKNLAVTEPQKKNRIQVSNTKKPLFFYVNLAKRYMQMHNEVELSALGMAIATVVTVAEILKNNGLAVEKKIMTSTVDVNDESRGRPMQKAKIEIVLGKTENFDELMAAAAEEREVAAAEDGEEQA

SEQ ID NO: 5972 - DNA, 393 bp, Linum usitatissimum
  CDS (1)..(393)
atggaggtgattacccaacgagtgaagaacttgaatgtcgccgccgccgattcagctccagcttacctgaagaacagaatccaagtctcgaacaccaagaagcctctctacttctacgtcaatctcgccaagaggtatatgcagcagttcaacgaagtggagctttctgctctggggatggcgatcgccactgttgttactgttgctgagatcttgaagaacaacggatttgcagtcgagaagcggataatgacctctactgttgatctgagggaggattcagctgcacgtccgatgccaaaaccaaagattgagataatgctggggaagtcggagaagttcgatgaattgattgctgctgctgctcctaacgaggaagagaacgatgagtag

SEQ ID NO: 5973 - protein, 130 aa, Linum usitatissimum
MEVITQRVKNLNVAAADSAPAYLKNRIQVSNTKKPLYFYVNLAKRYMQQFNEVELSALGMAIATVVTVAEILKNNGFAVEKRIMTSTVDLREDSAARPMPKPKIEIMLGKSEKFDELIAAAAPNEEENDE

SEQ ID NO: 5974 - DNA, 399 bp, Triticum aestivum
  CDS (1)..(399)
atggaggaggtgacggagggggtcaagaacctggccgtgacggagccgcacaagaagaaccggatccaggtctccaacacgaagaagccgctcttcttctatgtcaacctcgccaagaggtacatgcagatgcataacgaggtggaactctccgccctcggcatggctatcgccactgtggtgacagttgccgaaattctgaaaaataacggccttgctgttgaaaagaagatcatgacatccactgttgatgtcaacgatgaatcaaggggccgcccgatgcagaaggccaagattgagatagtgctgggcaagactgagaacttcgacgagctgatggctgctgccgcggaggagagggaagtcgcagctgccgaggacggcgaggagcagggctaa

SEQ ID NO: 5975 - protein, 132 aa, Triticum aestivum
MEEVTEGVKNLAVTEPHKKNRIQVSNTKKPLFFYVNLAKRYMQMHNEVELSALGMAIATVVTVAEILKNNGLAVEKKIMTSTVDVNDESRGRPMQKAKIEIVLGKTENFDELMAAAAEEREVAAAEDGEEQG

SEQ ID NO: 5976 - DNA, 20 bp, Artificial sequence
  primer
atggaagagatcacggaagg

SEQ ID NO: 5977 - DNA, 21 bp, Artificial sequence
  primer
ctagttttgctcttgggcttc

SEQ ID NO: 5978 - protein, 98 aa, Artificial sequence
  consensus sequence
  Variant (27)..(29): Xaa in position 27 to 29 is any amino acid
  Variant (30)..(30): Xaa in position 30 is any or no amino acid
  Variant (41)..(41): Xaa in position 41 is any amino acid
  Variant (46)..(46): Xaa in position 46 is any amino acid
  Variant (55)..(55): Xaa in position 55 is any amino acid
  Variant (57)..(57): Xaa in position 57 is any amino acid
  Variant (62)..(62): Xaa in position 62 is any amino acid
  Variant (67)..(69): Xaa in position 67 to 69 is any amino acid
  Variant (71)..(74): Xaa in position 71 to 74 is any amino acid
  Variant (76)..(77): Xaa in position 76 to 77 is any amino acid
  Variant (85)..(85): Xaa in position 85 is any amino acid
  Variant (87)..(87): Xaa in position 87 is any amino acid
  Variant (89)..(91): Xaa in position 89 to 91 is any amino acid
  Variant (94)..(94): Xaa in position 94 is any amino acid
KNRIQVSNTKKPLFFYVNLAKRYMQQXXXXVELSALGMAIXTVVTXAEILKNNGXAXEKKIXTSTVXXXDXXXXRXXQKAKIEIXLXKXXXFDXLMAA

SEQ ID NO: 5979 - protein, 29 aa, Artificial sequence
  protein pattern
  Variant (2)..(2): Xaa in position 2 is any amino acid
  Variant (22)..(22): Xaa in position 22 is Phe or Tyr
  Variant (23)..(23): Xaa in position 23 is Ile, Leu or Met
  Variant (25)..(26): Xaa in position 25 to 26 is any amino acid
  Variant (27)..(27): Xaa in position 27 is Ala, Asp, Glu, Gly, Asn or Thr
  Variant (28)..(28): Xaa in position 28 is Asp or Glu
NXIQVSNTKKPLFFYVNLAKRXXQXXXXV

SEQ ID NO: 5980 - protein, 41 aa, Artificial sequence
  protein pattern
  Variant (10)..(10): Xaa in position 10 is Ala, Gly or Thr
  Variant (15)..(15): Xaa in position 15 is Ile or Val
  Variant (16)..(16): Xaa in position 16 is Ala, Ser or Thr
  Variant (23)..(23): Xaa in position 23 is any amino acid
  Variant (24)..(24): Xaa in position 24 is Phe or Leu
  Variant (25)..(25): Xaa in position 25 is Ala, Thr or Val
  Variant (26)..(26): Xaa in position 26 is any amino acid
  Variant (28)..(28): Xaa in position 28 is any or no amino acid
  Variant (30)..(31): Xaa in position 30 to 31 is any amino acid
  Variant (32)..(32): Xaa in position 32 is any or no amino acid
  Variant (34)..(34): Xaa in position 34 is Ser or Thr
  Variant (36)..(36): Xaa in position 36 is Ile or Val
  Variant (37)..(39): Xaa in position 37 to 39 is any amino acid
  Variant (40)..(41): Xaa in position 40 to 41 is Asp, Glu or Gly
ELSALGMAIXTVVTXXEILKNNXXXXEXKXXXTXTXXXXXX

SEQ ID NO: 5981 - protein, 19 aa, Artificial sequence
  protein pattern
  Variant (2)..(2): Xaa in position 2 is any amino acid
  Variant (3)..(3): Xaa in position 3 is Phe, Ile, Leu, Met or Val
  Variant (4)..(4): Xaa in position 4 is any amino acid
  Variant (6)..(6): Xaa in position 6 is Ala, Pro or Thr
  Variant (11)..(11): Xaa in position 11 is any amino acid
  Variant (13)..(13): Xaa in position 13 is any amino acid
  Variant (15)..(15): Xaa in position 15 is Ser or Thr
  Variant (16)..(17): Xaa in position 16 to 17 is any amino acid
  Variant (19)..(19): Xaa in position 19 is Asp, Glu or Asn
RXXXKXKIEIXLXKXXXFX

SEQ ID NO: 5982 - DNA, 945 bp, Arabidopsis thaliana
  CDS (1)..(945)
atggcaacatgcatagacacatgccgaaccggtaatacccaagacgatgattcccggttctgttgcatcaagaatttctttcgacccggtttctctgtaaaccggaagattcaccacacccaaatcgaagatgacgatgatgtctggatcaagatgcttgaagaagccaaatccgatgttaaacaagaacccattttatcaaactactactacgcttcgatcacatctcatcgatctttagagtctgctttagctcacatcctctccgtaaagctcagcaatttaaacctaccaagcaacacactcttcgaactgttcataagcgttttagaagaaagccctgagatcatcgaatccacgaagcaagatcttatagcagtcaaagaaagagacccagcttgtataagctacgttcattgcttcttgggcttcaaaggcttcctcgcttgtcaagctcatcgaatagctcataccctctggaaacagaacagaaaaatcgtagctttattgatccaaaacagagtatcagaatctttcgccgtcgatattcatcccggagcgaagatcggaaaagggattcttttagaccatgcgacgggcgtggtgatcggagagacggcggtggttggagacaatgtttcgattctacacggagtgaccttgggaggaacagggaaacagagtggtgatcggcatccgaagattggtgatggtgtgttgattggagctgggagttgtatattggggaatataacaatcggtgagggagctaagattggatcagggtcggtggtggttaaggatgtgccggcgcgtacgacggcggttggaaatccggcgaggttgattggtgggaaagagaatccgagaaaacatgataagattccttgtctgactatggaccagacatcgtatttaaccgagtggtctgattatgtgatttaa

SEQ ID NO: 5983 - protein, 314 aa, Arabidopsis thaliana
MATCIDTCRTGNTQDDDSRFCCIKNFFRPGFSVNRKIHHTQIEDDDDVWIKMLEEAKSDVKQEPILSNYYYASITSHRSLESALAHILSVKLSNLNLPSNTLFELFISVLEESPEIIESTKQDLIAVKERDPACISYVHCFLGFKGFLACQAHRIAHTLWKQNRKIVALLIQNRVSESFAVDIHPGAKIGKGILLDHATGVVIGETAVVGDNVSILHGVTLGGTGKQSGDRHPKIGDGVLIGAGSCILGNITIGEGAKIGSGSVVVKDVPARTTAVGNPARLIGGKENPRKHDKIPCLTMDQTSYLTEWSDYVI

SEQ ID NO: 5984 - DNA, 945 bp, Arabidopsis thaliana
  CDS (1)..(945)
atggcaacatgcatccacacatgccgaaccggtaatacccaagacgatgattcccggttctgttgcatcaataaattcttccgacccggtttctctgtcaaccggaagatccaccacacccaaatcgaagatgacgatgatgtctggatcaagatgctcaaagaagccgaatccgatgttaaacaagaacccattttgtcaaactactactacgcttcgatcacatctcatcgatctttagagtctgctttaggtcacatcctctccgtaaagctcagcaatttaaacctaccaagcaacacactcttcgaactgttcataagcgttttagaagaaagccctgagatcatcgaatccacgaagcaagatcttatagcagtcaaagaaagagacccagcttgtataagctacgttcattgcttcttgggcttcaaaggcttcctcgcttgtcaagctcatcgaatagctcataccctctggaaacagaacagaaaaatcgtagctttattgatccaaaacagagtatcagaatctttcgccgtcgatattcatcccggagcgaagatcggaaaagggattcttttagaccatgcgacgggcgtggttatcggagagacggcggtggttggagacaatgtttcgattctacacggagtgaccttgggaggaacagggaaacagagtggtgatcggcatccgaagattggtgatggtgtgttgattggagctgggagttgtatattggggaatataacaatcggtgagggagctaagattggatcagggtcggtggtggttaaggatgtgccggcgcgtacgacggcggttggaaatccggcgaggttgattggtgggaaagagaatccgagaaaacatgataagattccttgtctgactatggaccagacatcgtatttaaccgagtggtctgattatgtgatttaa

SEQ ID NO: 5985 - protein, 314 aa, Arabidopsis thaliana
MATCIHTCRTGNTQDDDSRFCCINKFFRPGFSVNRKIHHTQIEDDDDVWIKMLKEAESDVKQEPILSNYYYASITSHRSLESALGHILSVKLSNLNLPSNTLFELFISVLEESPEIIESTKQDLIAVKERDPACISYVHCFLGFKGFLACQAHRIAHTLWKQNRKIVALLIQNRVSESFAVDIHPGAKIGKGILLDHATGVVIGETAVVGDNVSILHGVTLGGTGKQSGDRHPKIGDGVLIGAGSCILGNITIGEGAKIGSGSVVVKDVPARTTAVGNPARLIGGKENPRKHDKIPCLTMDQTSYLTEWSDYVI

SEQ ID NO: 5986 - DNA, 1176 bp, Arabidopsis thaliana
  CDS (34)..(1176)
atgttgccggtcacaagtcgccgccacttcacaatgtccctatatatgctccgttcatcttctccacacatcaatcatcactctttccttcttccttcttttgtttcctccaaattcaaacaccatactttatctcctcctccttctcctcctcctcctcctcctatggctgcgtgcatcgacacctgccgcactggtaaaccccagatttctcctcgcgattcttctaaacaccacgacgatgaatctggctttcgttacatgaactacttccgttatcctgatcgatcttccttcaatggaacccagaccaaaaccctccatactcgtcctttgcttgaagatctcgatcgcgacgctgaagtcgatgatgtttgggccaaaatccgagaagaggctaaatctgatatcgccaaagaacctattgtttccgcttattatcacgcttcgattgtttctcagcgttcgttggaagctgcgttggcgaatactttatctgttaaactcagcaatttgaatcttccaagcaacacgcttttcgatttgttctctggtgttcttcaaggaaacccagatattgttgaatctgtcaagctagatcttttagctgttaaggagagagatcctgcttgtataagctacgttcattgtttccttcactttaaaggcttcctcgcttgtcaagcgcatcgtattgctcatgagctttggactcaggacagaaaaatcctagctttgttgatccagaacagagtctctgaagccttcgctgttgatttccaccctggagctaaaatcggtaccgggattttgctagaccatgctacggctattgtgatcggtgagacggcggttgtggggaacaatgtttcgattctccataacgttacgcttggaggaacggggaaacagtgtggagataggcacccgaagattggcgatggggttttgattggagctgggacttgtattttggggaatatcacgattggtgaaggagctaagattggtgcggggtcggtggtgttgaaagacgtgccgccgcgtacgacggctgttggaaatccggcgaggttgcttggtggtaaagataatccgaaaacgcatgacaagattcctggtttgactatggaccagacgtcgcatatatccgagtggtcggattatgtaatttga

SEQ ID NO: 5987 - protein, 380 aa, Arabidopsis thaliana
MSLYMLRSSSPHINHHSFLLPSFVSSKFKHHTLSPPPSPPPPPPMAACIDTCRTGKPQISPRDSSKHHDDESGFRYMNYFRYPDRSSFNGTQTKTLHTRPLLEDLDRDAEVDDVWAKIREEAKSDIAKEPIVSAYYHASIVSQRSLEAALANTLSVKLSNLNLPSNTLFDLFSGVLQGNPDIVESVKLDLLAVKERDPACISYVHCFLHFKGFLACQAHRIAHELWTQDRKILALLIQNRVSEAFAVDFHPGAKIGTGILLDHATAIVIGETAVVGNNVSILHNVTLGGTGKQCGDRHPKIGDGVLIGAGTCILGNITIGEGAKIGAGSVVLKDVPPRTTAVGNPARLLGGKDNPKTHDKIPGLTMDQTSHISEWSDYVI

SEQ ID NO: 5988 - DNA, 1011 bp, Arabidopsis thaliana
  CDS (1)..(1011)
atggctgcgtgcatcgacacctgccgcactggtaaaccccagatttctcctcgcgattcttctaaacaccacgacgatgaatctggctttcgttacatgaactacttccgttatcctgatcgatcttccttcaatggaacccagaccaaaaccctccatactcgtcctttgcttgaagatctcgatcgcgacgctgaagtcgatgatgtttgggccaaaatccgagaagaggctaaatctgatatcgccaaagaacctattgtttccgcttattatcacgcttcgattgtttctcagcgttcgttggaagctgcgttggcgaatactttatctgttaaactcagcaatttgaatcttccaagcaacacgcttttcgatttgttctctggtgttcttcaaggaaacccagatattgttgaatctgtcaagctagatcttttagctgttaaggagagagatcctgcttgtataagctacgttcattgtttccttcactttaaaggcttcctcgcttgtcaagcgcatcgtattgctcatgagctttggactcaggacagaaaaatcctagctttgttgatccagaacagagtctctgaagctttcgctgttgatttccaccctggagctaaaatcggtaccgggattttgctagaccatgctacggctattgtgatcggtgagacggcggttgtggggaacaatgtttcgattctccataacgttacgcttggaggaacggggaaacagtgtggagataggcacccgaagattggcgatggggttttgattggagctgggacttgtattttggggaatatcacgattggtgaaggagctaagattggtgcggggtcggtggtgttgaaagacgtgccgccgcgtacgacggctgttggaaatccggcgaggttgcttggtggtaaagataatccgaaaacgcatgacaagattcctggtttgactatggaccagacgtcgcatatatccgagtggtcggattatgtaatttga

SEQ ID NO: 5989 - protein, 336 aa, Arabidopsis thaliana
MAACIDTCRTGKPQISPRDSSKHHDDESGFRYMNYFRYPDRSSFNGTQTKTLHTRPLLEDLDRDAEVDDVWAKIREEAKSDIAKEPIVSAYYHASIVSQRSLEAALANTLSVKLSNLNLPSNTLFDLFSGVLQGNPDIVESVKLDLLAVKERDPACISYVHCFLHFKGFLACQAHRIAHELWTQDRKILALLIQNRVSEAFAVDFHPGAKIGTGILLDHATAIVIGETAVVGNNVSILHNVTLGGTGKQCGDRHPKIGDGVLIGAGTCILGNITIGEGAKIGAGSVVLKDVPPRTTAVGNPARLLGGKDNPKTHDKIPGLTMDQTSHISEWSDYVI

SEQ ID NO: 5990 - DNA, 912 bp, Oryza sativa
  CDS (1)..(912)
atgactgcgggccagcctctccgggacgatccccagccacgccggcacagcccgccggcgctccacccggccgtcgtgccggcgtacccgcccccggagtcggacgccgacgagtcgtgggtctggtcccagatcaaggccgaggcgcgccgcgacgccgacgccgagccggcgctcgcgtcgttcctctacgccaccgtgctctcccacccctccctcgaccgctcgctcgccttccacctcgccaacaagctctgctcctccacgctgctctccacgctcctctacgacctcttcgtcgcctccctcgccgcgcaccccaccctccgcgccgccgtcgtcgccgacctcctcgccgcgcgctccagggaccccgcctgcgtcggcttctcccactgcctcctcaactacaagggcttcctcgccatccaggcccagcgcgtcgcgcacgtgctctgggcgcaggaccgccgcgccctcgcgctcgcgctccagtcccgcgtcgccgaggtgttcgccgtcgacatccaccccgccgccgcgatcggcaagggcgtcctcctcgaccacgccacgggcgtcgtcatcggagagaccgccgtcatcggcgacaacgtctccatcctccaccacgtcacgctgggcgggacaggcaaggccgtgggcgaccggcaccccaagatcggcgacggcgtcctcattggcgccggcgcgacgatcctcggcaatgtcaggatcggcgccggggccaagatcggggccgggtcgctggtgctcatcgacgtgccgccgaggaccacggcggtggggaatccggcgaggctgctcggcgggaagaagggcgacgacatgccgggtgaatccatggaccacacctccttcatccagcaatggtcggactacagcatctga

SEQ ID NO: 5991 - protein, 303 aa, Oryza sativa
MTAGQPLRDDPQPRRHSPPALHPAVVPAYPPPESDADESWVWSQIKAEARRDADAEPALASFLYATVLSHPSLDRSLAFHLANKLCSSTLLSTLLYDLFVASLAAHPTLRAAVVADLLAARSRDPACVGFSHCLLNYKGFLAIQAQRVAHVLWAQDRRALALALQSRVAEVFAVDIHPAAAIGKGVLLDHATGVVIGETAVIGDNVSILHHVTLGGTGKAVGDRHPKIGDGVLIGAGATILGNVRIGAGAKIGAGSLVLIDVPPRTTAVGNPARLLGGKKGDDMPGESMDHTSFIQQWSDYSI

SEQ ID NO: 5992 - DNA, 897 bp, Oryza sativa
  CDS (1)..(897)
atgaccaccgcccagccactccagcacgagcatgacccgtccccgccggagccggacgccgacgccgacgacgaggaggaggagtcgcgggtgtggtcccagatcaaggccgaggcgcgccgcgacgccgacggcgagccggcgctggcgtcgttcgtgtacgccaccgtgctctcccaccccaccctcgccggctccctcgccttccacctcgccaacaagctcgcctcctcctccacgctgctctcctccacgctcctctacgacctcttcgccgccgcccacgccgcgcgccccgacctccgcgccgccgccgccgccgacctcctagccgcgggcgcccgcgacccggcctgcgcgggccgcctctcccactgcctcctcgactacaagggcttcctcgccgtccaggcccaccgcgtcgcgcacgcgctctgggcgcagggccgccgcgccctggcgctcgcgctccagtcccgcgtcgccgaggtcttcgccgtcgacatccacccggccgccgccgtggggagcggcgtcctcctggaccacgccaccggggtggtcatcggcgagaccgccgtcgtcggcgacggcgtgtccatcctccaccacgtcacgctgggcgggaccggcgaggccgtcggcgaccggcaccccaaggtcggcgacggcgtgctcatcggcgccggcgcgaccatcctcgggaacgtcaggatcggcgccggcgccaagatcggggccgggtcgctggtgctcgccgacgtgccgccgggggccacggcggtggggaacccggcgaggctgctgctcggcggggaccagcgcggcggcgcgccggccggtgaatccatggaccatgcctccttcatgctggagtggtcggattacaccatttga

SEQ ID NO: 5993 - protein, 298 aa, Oryza sativa
MTTAQPLQHEHDPSPPEPDADADDEEEESRVWSQIKAEARRDADGEPALASFVYATVLSHPTLAGSLAFHLANKLASSSTLLSSTLLYDLFAAAHAARPDLRAAAAADLLAAGARDPACAGRLSHCLLDYKGFLAVQAHRVAHALWAQGRRALALALQSRVAEVFAVDIHPAAAVGSGVLLDHATGVVIGETAVVGDGVSILHHVTLGGTGEAVGDRHPKVGDGVLIGAGATILGNVRIGAGAKIGAGSLVLADVPPGATAVGNPARLLLGGDQRGGAPAGESMDHASFMLEWSDYTI

SEQ ID NO: 5994 - DNA, 1065 bp, Oryza sativa
  CDS (1)..(1065)
atgacgtcgtgcgggtgcctggtgctcgagaaggtggaggaccacggcggcgaggcggcggggagggggagagggaggctcgcgcagggtggcggcggcggcggcggtggctgcggatcgtgcgcgggggagtggaggagccggtcggagaccatgttccccatctacgtgatggggagctcgcgggccagctccgccgcggcggcgcggggcatagtcgacgccgccggggaccccatatgggaggccgtcaagtcggaggccaagtctgaggcagagaaggaacctattttaagtagcttcttgtacgccagcgtactatctcatgactgtctcgagagggcgttgagtttcgtccttgcaaacaggctcgaagatccaacattgcttgcaactcagttaatagacattttcaatgatgttatgatgaacaacaaagatatacgccgttctattcgccttgatgctcaggcctttaaagacagagatcctgcctgtgcacaatacagttgggcattgttgtacctcaagggttaccattccgtgcaatcctataggatagctcatgtattatggaatcaaggtcgtaaagttctggcattggcactgcagagccgtatcagtgaggtttttgcagtggatatacacccagcggccagaattggagagggaatattgttggatcatggaacgggtctagttattggtgaaactgccattgttggaaactgggtttcattaatgcagggtgttacacttggtggtactggcaaggaaaatggagatagacaccccaagattggtcagggggctcttcttggagctggtgctactatcctcggcaacataaacgtaggcgaaggtgccatgattgctgctggttcccttgttttaaaggatgtacctccccacagtatggcagtaggaaaccctgcaaaggtagttgggtataaagataaggaagacccttctttaactatgaaacatgatgccagaagagattattttgagcatgttgccgttagtttttcagatgacaaagctaatggaagtgttgtgaagtaa

SEQ ID NO: 5995 - protein, 354 aa, Oryza sativa
MTSCGCLVLEKVEDHGGEAAGRGRGRLAQGGGGGGGGCGSCAGEWRSRSETMFPIYVMGSSRASSAAAARGIVDAAGDPIWEAVKSEAKSEAEKEPILSSFLYASVLSHDCLERALSFVLANRLEDPTLLATQLIDIFNDVMMNNKDIRRSIRLDAQAFKDRDPACAQYSWALLYLKGYHSVQSYRIAHVLWNQGRKVLALALQSRISEVFAVDIHPAARIGEGILLDHGTGLVIGETAIVGNWVSLMQGVTLGGTGKENGDRHPKIGQGALLGAGATILGNINVGEGAMIAAGSLVLKDVPPHSMAVGNPAKVVGYKDKEDPSLTMKHDARRDYFEHVAVSFSDDKANGSVVK

SEQ ID NO: 5996 - DNA, 981 bp, Oryza sativa
  CDS (1)..(981)
atgacgtcgtgcgggtgcctggtgctcgagaaggtggaggaccacggcggcgaggcggcggggagggggagagggaggctcgcgcagggtggcggcggcggcggcggtggctgcggatcgtgcgcgggggagtggaggagccggtcggagaccatgttccccatctacgtgatggggagctcgcgggccagctccgccgcggcggcgcggggcatagtcgacgccgccggggaccccatatgggaggccgtcaagtcggaggccaagtctgaggcagagaaggaacctattttaagtagcttcttgtacgccagcgtactatctcatgactgtctcgagagggcgttgagtttcgtccttgcaaacaggctcgaagatccaacattgcttgcaactcagttaatagacattttcaatgatgttatgatgaacaacaaagatatacgccgttctattcgccttgatgctcaggcctttaaagacagagatcctgcctgtgcacaatacagttgggcattgttgtacctcaagggttaccattccgtgcaatcctataggatagctcatgtattatggaatcaaggtcgtaaagttctggcattggcactgcagagccgtatcagtgaggtttttgcagtggatatacacccagcggccagaattggagagggaatattgttggatcatggaacgggtctagttattggtgaaactgccattgttggaaactgggtttcattaatgcagggtgttacacttggtggtactggcaaggaaaatggagatagacaccccaagattggtcagggggctcttcttggagctggtgctactatcctcggcaacataaacgtaggcgaaggtgccatgattgctgctggttcccttgttttaaaggatgtacctccccacagagagcaaaatcaggggaggcgggcaggccggggtgggcggggggataacatgatcatgataaagtaa

SEQ ID NO: 5997 - protein, 326 aa, Oryza sativa
MTSCGCLVLEKVEDHGGEAAGRGRGRLAQGGGGGGGGCGSCAGEWRSRSETMFPIYVMGSSRASSAAAARGIVDAAGDPIWEAVKSEAKSEAEKEPILSSFLYASVLSHDCLERALSFVLANRLEDPTLLATQLIDIFNDVMMNNKDIRRSIRLDAQAFKDRDPACAQYSWALLYLKGYHSVQSYRIAHVLWNQGRKVLALALQSRISEVFAVDIHPAARIGEGILLDHGTGLVIGETAIVGNWVSLMQGVTLGGTGKENGDRHPKIGQGALLGAGATILGNINVGEGAMIAAGSLVLKDVPPHREQNQGRRAGRGGRGDNMIMIK

SEQ ID NO: 5998 - DNA, 906 bp, Oryza sativa
  CDS (1)..(906)
atggcagcctgcgtcgataagtggccggcggcgtacccgtgccgcctgccggataagttctactgcgccttgccggactgcaccaccacggaccgtccggtggcgccggcgccggcggctagcgggagcagcggcgactacgtgtgggacgcgctgcgcgccgaggcgcaggacgacgcggacgacgagccgctcctccgcaagttctaccacgacctcgtcctgtcgcggccgtcgctggagtccgcgctcgcctcgctgctggcggccaagctctgcatccccggcgcgctgccgcaggaccagctccgggacctcctcgccggcgcgctcgccgcgcacccggaggccgggcgcgccgcgcgcgccgacctcgccgcggcgcgcgaccgcgacccggcctgcgccaagatggtccactgcttcctctactacaggggcttcctggcactgcaggcccaccgcgcggcgcacgcgctctggtccgacaaccgcagggcgccggccctccttctccagagccgcgcctccgaggtgttcggcgtcgacatccaccccggggcgcgcattggcggcggcatcctgctcgaccacgccacgggcgtcgtcatcggcgagacggccgtcgtcggctacggcgtgtccatcctgcacgccgtgacgctgggcggcacggggaaggagtccggcgaccggcaccccaaggtcggggacggtgtgctgatcggcgccggggcgagcgtgctcggcaatgtgcacattggcgacggagcggagatcggagccggtgcaatcgtgctacgggacgtggcggacggaaccacggccaagccgatcatcggcaagaaggcggagccgcaacgagagcttcccggggtaaccatggagcagagatggtcggattga

SEQ ID NO: 5999 - protein, 301 aa, Oryza sativa
MAACVDKWPAAYPCRLPDKFYCALPDCTTTDRPVAPAPAASGSSGDYVWDALRAEAQDDADDEPLLRKFYHDLVLSRPSLESALASLLAAKLCIPGALPQDQLRDLLAGALAAHPEAGRAARADLAAARDRDPACAKMVHCFLYYRGFLALQAHRAAHALWSDNRRAPALLLQSRASEVFGVDIHPGARIGGGILLDHATGVVIGETAVVGYGVSILHAVTLGGTGKESGDRHPKVGDGVLIGAGASVLGNVHIGDGAEIGAGAIVLRDVADGTTAKPIIGKKAEPQRELPGVTMEQRWSD

SEQ ID NO: 6000 - DNA, 948 bp, Oryza sativa
  CDS (1)..(948)
atggcagcctgcgtcgacaagtggccgccggcggcgtacctgtgccgcctgccggagaagttctactgcgtcttgccggactgcaccgctacggaccgtccggtggtcaccgcatcggcggcgccggcgccggccgctagcgggagcagcggcgactacgtgtgggacgtgctgcgcgccgaggcgcaggacgacgcggacgacgagccgctcctccgcaagttctaccacgacctcgtcctgtcgcggccgtcgctggagtccgcgctcgcctcgctgctggcggccaagctctgcatccccggcgcgctgccgcaggaccagctccgggacctcctcgccggcgcgctcgccgcgcacccggaggccgggcgcgccgcgcgcgccgacctcgtcgcggcgcgcgaccgcgacccggcctgcgccaagatggtccactgcttcctctactacaagggcttcctggcactgcaggcccaccgcgcggcgcacgcgctctggtccgacaaccgcagggcgccggctctcctcctccagagccgcgcctccgaggtgttcggcgtcgacatccaccccggtgcgcgcattggctgcggcatcctgctcgaccacgccacgggcgtcgtcatcggcgagacggccgtcgtcggctacgacgtgtccatcctgcacggggtgacgctgggcggcacggggaaggagtccggcgaccggcaccccaaggtcggggacggtgtgctgatcggcgccggggcgagcgtgctcggcaatgtgcacattggcgacggagcgaagatcggagccggcgcagtcgtgctacgggacgtggcggacggaaccacggccgtcgggaacccagcgaagccgatcatcggcaagaaggcggcgccgcaacggcggccggaagagcttcccggggtaaccatggagcagagatggtcggattga

SEQ ID NO: 6001 - protein, 315 aa, Oryza sativa
MAACVDKWPPAAYLCRLPEKFYCVLPDCTATDRPVVTASAAPAPAASGSSGDYVWDVLRAEAQDDADDEPLLRKFYHDLVLSRPSLESALASLLAAKLCIPGALPQDQLRDLLAGALAAHPEAGRAARADLVAARDRDPACAKMVHCFLYYKGFLALQAHRAAHALWSDNRRAPALLLQSRASEVFGVDIHPGARIGCGILLDHATGVVIGETAVVGYDVSILHGVTLGGTGKESGDRHPKVGDGVLIGAGASVLGNVHIGDGAKIGAGAVVLRDVADGTTAVGNPAKPIIGKKAAPQRRPEELPGVTMEQRWSD

SEQ ID NO: 6002 - DNA, 945 bp, Oryza sativa
  CDS (1)..(945)
atgccggccggccagccgcacgcgcacgagcccgacggcggcggcgcgagccaccgccggccccagtcgccgccgtcgctccccgcggaggtggtcccggcgttcgcgccgccggagtcggaggacgaggagtcctgggtctggtcccagatcaaggccgaggcgcgccgcgacgccgacgccgagccggcgctcgcgtccttcctctacgccaccgtgctctcccacccctccctcccgcgctccatctccttccacctcgccaacaagctctgctcctccaccctcctctccacgctcctctacgacctcttcctggcttccttcaccgcgcacccctccctccgcgccgccgtcgtcgccgacctcctcgccgcccgctcccgcgacccggcctgcgtcggcttctcccagtgcctcctcaacttcaagggcttcctcgccatccaggcgcaccgcgtgtcgcacgtcctctgggcgcagcagcgacgcccccttgccctcgccctccagtcccgcgtcgccgacgtcttcgccgtcgacatccaccccgcggccgtcgtcggcaagggcatcctcctcgaccacgccaccggcgtcgtcatcggcgagaccgccgtcgtcggcgacaacgtctccatcctccaccacgttacactgggtggcacaggcaaggctgtcggtgaccggcaccccaagattggggatggtgttctgattggcgccggggcgacgattcttggcaacgtcaagattggagccggggccaagattggtgccgggtcagtggtgctgatagatgtgccggcgaggaacacggcggtggggaatccagccaggttgattggcaggaagaacggtgaggttgagaaggatgaggacatgcccggggaatccatggatcacacatccttcattcgacagtggtcggactacaccatttga

SEQ ID NO: 6003 - protein, 314 aa, Oryza sativa
MPAGQPHAHEPDGGGASHRRPQSPPSLPAEVVPAFAPPESEDEESWVWSQIKAEARRDADAEPALASFLYATVLSHPSLPRSISFHLANKLCSSTLLSTLLYDLFLASFTAHPSLRAAVVADLLAARSRDPACVGFSQCLLNFKGFLAIQAHRVSHVLWAQQRRPLALALQSRVADVFAVDIHPAAVVGKGILLDHATGVVIGETAVVGDNVSILHHVTLGGTGKAVGDRHPKIGDGVLIGAGATILGNVKIGAGAKIGAGSVVLIDVPARNTAVGNPARLIGRKNGEVEKDEDMPGESMDHTSFIRQWSDYTI

SEQ ID NO: 6004 - DNA, 1176 bp, Glycine max
  CDS (1)..(1176)
atgaatgttctggctctagggcgcttcctcacttcccccttatataagacttcccctctcactccctccccaatccaattcacacccatttttcttcatcccccaaagtttcaatctttgtattcaattcaccctttctctctctccatggccacttgtgttgatgccccaacccctctttctcggaagcctaacgggtcccaatccgatgatcgttccttcaattacatgaaattctgccgacccactttctctgatcgcgttccctgcatacccatttgcaagaatcgtgacactgccttcacacgcgtggaggagtttgacacatgtgtggaggataatgatgatattgaggttgaggttgtggagggtgttgatctttggttgaagattcaagaggaggcaaggttagatgttgatcaagaaccaattttatccagctactatttcagttccattttgtctcacaaatctttggagagtgccttggccaaccacctctccacaaatttgagcagcttgagccttccaagcagcaccctttttgaccttttcatgggtgttttggttgatgatggagatgatgacatcgtaggtgctgtgaaggatgatttgatagctgttaaggagagggaccctgcttgcataagttatgtgcattgcttgctgaatttcaagggttttttggcatgtcaggctcataggattgctcacaaattgtggcttcaagggaggaaggtcttggcgctgttgattcagaatagggtgtctgaggtttttgctgtggatattcaccctggtgccaaaattggacgtgggattttgctggatcatgcaacaggacttgttgtgggggagactgcagttattgggaataatgtgtcaattttgcataatgtgacattgggagggactggtaaggcaagtggggatagacaccctaagattggtgatggggtgttgataggtgcagggacttgtattttggggaacattaagattggtgatggagctaagattggtgcttgttctgttgtgttgaaggaagtgccaccaaggactactgctgttgggaaccctgctaggttggttggagggaaggataaccctattaaattggataagatgcctagttttaccatggaccatacttcatggtctgattatgttatatag

SEQ ID NO: 6005 - protein, 391 aa, Glycine max
MNVLALGRFLTSPLYKTSPLTPSPIQFTPIFLHPPKFQSLYSIHPFSLSMATCVDAPTPLSRKPNGSQSDDRSFNYMKFCRPTFSDRVPCIPICKNRDTAFTRVEEFDTCVEDNDDIEVEVVEGVDLWLKIQEEARLDVDQEPILSSYYFSSILSHKSLESALANHLSTNLSSLSLPSSTLFDLFMGVLVDDGDDDIVGAVKDDLIAVKERDPACISYVHCLLNFKGFLACQAHRIAHKLWLQGRKVLALLIQNRVSEVFAVDIHPGAKIGRGILLDHATGLVVGETAVIGNNVSILHNVTLGGTGKASGDRHPKIGDGVLIGAGTCILGNIKIGDGAKIGACSVVLKEVPPRTTAVGNPARLVGGKDNPIKLDKMPSFTMDHTSWSDYVI

SEQ ID NO: 6006 - DNA, 810 bp, Glycine max
  CDS (1)..(810)
atgggcgcccccgacccgatttggaaggccgcggagaaggagccgattctgagtagcttcttgtacgctagtattttggcgcatgattgcttggagcaagcattggcgtttgtggtggccaaccgtctccaaaaccctactctcttggccactcagcttatggatatcttctgtcttgtcattttgcatgacaaagctatccagcgatccattcgcctcgatgttcaggcattaaaagatcgtgaccctgcttgtttgtcgtattgctccgcgctttggtatacgaagggttatcatgctctgcaagtacatcgggtagctcatgcattgtggcaccagggacgcaaagtcttggccctggctttgcaaagccgtgttagtgaggtttttggagtggacattcatccagctgcgaaaattggggaggggattttattagatcatgggacaggtgtggttattggtgaaactgctattgttggaaacagagtttcactgatgcatggcgtaacattaggaggcacggggaaggaaataggtgatcgtcatcccaaagtaggtgaaggggcactaattgaagctagtgcaactatacttgggaatataaagattggtgaaggtgccatgatagctgcgggttccctggtgttaaaagatgtccctccccactgcattgcagcaggaataccagctaaagttattagtgctctacaggagcatgacccatctttaaccatgaagcatgatgctagtaaagatcttttcacacatgtagctactaatttcatagatgaaaagcccaatggttag

SEQ ID NO: 6007 - protein, 269 aa, Glycine max
MGAPDPIWKAAEKEPILSSFLYASILAHDCLEQALAFVVANRLQNPTLLATQLMDIFCLVILHDKAIQRSIRLDVQALKDRDPACLSYCSALWYTKGYHALQVHRVAHALWHQGRKVLALALQSRVSEVFGVDIHPAAKIGEGILLDHGTGVVIGETAIVGNRVSLMHGVTLGGTGKEIGDRHPKVGEGALIEASATILGNIKIGEGAMIAAGSLVLKDVPPHCIAAGIPAKVISALQEHDPSLTMKHDASKDLFTHVATNFIDEKPNG

SEQ ID NO: 6008 - DNA, 1071 bp, Glycine max
  CDS (1)..(1071)
atgatgagaaggcactcccttgtgactgcatcaccaaaacaagtgtccctcttctttgttggccacaaaagcaacccaacaacaattcatcctcacactcacacccttctgactccatcacccaaacaagacccacaaaaccataatcagtggtggggccaccccaaaaccatcaaacccagtttcaatcacagtaggatcaggttcaacaccttgcacactggttccaccgaagaacaagttgaaacgggtgaggttgaagtcgatgtgtggacgaagatgcaggaagaagctaaactcgatgtcaccgaggaacccattttgtctaattactacaacacttccattctctctcacaagacacttgaaaccgcgttggccaatcaccttgcaatcaacctcagcagcacaagccttccaagcagcacactttctgatctttttgtgacggttttggagaccgaccaagccatcatggatgctgtgaagtgtgacctgagagcggtgaaggagagagaccctgcttgcataagccacgtgcactgcttcttgaatttcaaaggctttctggcgtgccaggctcacagggtggctcacaagctgtggcttcagggaaggaagattcttgctgtgatgattcagaaccgggtttcggagattttcgcggtggatgttcatccaggggctaggattggaagtgggattttgctggatcatgcaactgggattgtggtgggagagactgctgtcatagggaacaatgtgtcaattctgcatagtgtcactttgggagggactggtaaggtttctggggataggcacccaaagattggtgatggggtgctgataggtgctggaacttgtatcttggggaatattaaggttggtgatggggctaagattggtgctggttctgtggttattaaggatgttcctccaaggactactgttgtggggaacccggctaagttggtaggagggaagaacaaccctgttaagttggataagattcctagcttcaccatggaccatacttcacatattgctgacttttatgattattgtgtttag

SEQ ID NO: 6009 - protein, 356 aa, Glycine max
MMRRHSLVTASPKQVSLFFVGHKSNPTTIHPHTHTLLTPSPKQDPQNHNQWWGHPKTIKPSFNHSRIRFNTLHTGSTEEQVETGEVEVDVWTKMQEEAKLDVTEEPILSNYYNTSILSHKTLETALANHLAINLSSTSLPSSTLSDLFVTVLETDQAIMDAVKCDLRAVKERDPACISHVHCFLNFKGFLACQAHRVAHKLWLQGRKILAVMIQNRVSEIFAVDVHPGARIGSGILLDHATGIVVGETAVIGNNVSILHSVTLGGTGKVSGDRHPKIGDGVLIGAGTCILGNIKVGDGAKIGAGSVVIKDVPPRTTVVGNPAKLVGGKNNPVKLDKIPSFTMDHTSHIADFYDYCV

SEQ ID NO: 6010 - DNA, 861 bp, Glycine max
  CDS (1)..(861)
atgccgacggggttaccgaaggcgaactcctccgtggcgccggacgaccagggatggttgtggacgcagatcaaggcggaggcgcgccgtgacgccgagttggagccggcgctggcgagctacctctactcgacgatcctctcgcactcgtcgctcgtgcgctctctgtcttttcacctcggaaacaagctctgttcctccacgctcctctccactctcctctatgacctgttcctgaacgcgttctccttcgacccctccctctgctccgccgccgtcgccgacctccgcgccgcccgcgaacgcgaccccgcctgcgtttcctactcccactgcctcctcaattacaaaggcttcctcgcttgccaggcgcaccgtgtggcgcatctgttgtggcggcaatcgcggcagccattggctttagcactgcactctcgcatcgctgatgtgttcgcggtggacattcaccctgcggcgaggatcgggaaggggattctgttcgaccatgccaccggggtggtggtgggggagacggcagtgatcgggaacaatgtgtcgatcctgcaccacgttacgctgggtgggactggcaaggttggtggggaccggcatcccaagattggggatggggtgcttattggtgccggtgctaccattctggggaatattaagatcggggaaggtgcaaaggttggtgctggctcggtggttttaatcgatgtgccaccacagacaacagctgttgggaacccagccaggttggttggtgggaaggagaagccctctaagcacgaggatgttcctggggagtccatggaccatacttcctttatctctgagtggtcagattatatcatttga

SEQ ID NO: 6011 - protein, 286 aa, Glycine max
MPTGLPKANSSVAPDDQGWLWTQIKAEARRDAELEPALASYLYSTILSHSSLVRSLSFHLGNKLCSSTLLSTLLYDLFLNAFSFDPSLCSAAVADLRAARERDPACVSYSHCLLNYKGFLACQAHRVAHLLWRQSRQPLALALHSRIADVFAVDIHPAARIGKGILFDHATGVVVGETAVIGNNVSILHHVTLGGTGKVGGDRHPKIGDGVLIGAGATILGNIKIGEGAKVGAGSVVLIDVPPQTTAVGNPARLVGGKEKPSKHEDVPGESMDHTSFISEWSDYII

SEQ ID NO: 6012 - DNA, 861 bp, Glycine max
  CDS (1)..(861)
atgccgacggggttaccggcggcgaattccttagtggcgccggacgaagaggggtgggtgtgggggcagatcaaggcggaggcgcgccgcgacgccgagtcggagcctgctttggcgagctacctctactcgacgatcctctcgcactcgtcgctcgagcgttctctgtcttttcacctcggaaataagctctgttcctccacgcttctctcgacgctcctttacgacctgttcctcaacgccttctcctccgacccctccctccgctccgccgccgtcgccgatctccgcgctgcccgcgaacgcgaccccgcctgcgtctcctactcccactgcctcctcaattacaaaggcttcctcgcttgccaggcgcaccgtgtggcgcatctgttgtggcggcaatcacggcggccgttggctttagcgctgcactctcgcatcgcagatgtgtttgcggtggacattcacccggcggcaaggattgggaaggggattctgttcgaccatgccactggggtggtggtaggggagacagcggtaatcgggaacaatgtgtcgatcctgcaccatgttactctgggtgggactggcaaggttggtggagaccggcatcctaagattggggatggggtgcttattggtgctggtgctaccattctggggaatattaagattggggaaggtgcaaaggttggtgctggttcagtggttttaattgatgtgccaccacggacaacagcagttgggaacccggcgaggttggttggtgggaaggagaagccctctaagcatgaggatgtgcctggggagtctatggaccatacttcctttatctctgagtggtcagattatatcatttga

SEQ ID NO: 6013 - protein, 286 aa, Glycine max
MPTGLPAANSLVAPDEEGWVWGQIKAEARRDAESEPALASYLYSTILSHSSLERSLSFHLGNKLCSSTLLSTLLYDLFLNAFSSDPSLRSAAVADLRAARERDPACVSYSHCLLNYKGFLACQAHRVAHLLWRQSRRPLALALHSRIADVFAVDIHPAARIGKGILFDHATGVVVGETAVIGNNVSILHHVTLGGTGKVGGDRHPKIGDGVLIGAGATILGNIKIGEGAKVGAGSVVLIDVPPRTTAVGNPARLVGGKEKPSKHEDVPGESMDHTSFISEWSDYII

SEQ ID NO: 6014 - DNA, 1164 bp, Glycine max
  CDS (1)..(1164)
atgaatgttctggctctagggcgcttcctcacttcccccttatataagtcttcccctctcactccctccccaatccaattcacacccatttttcttcatcccccaaagtttcaatctttgtattcaattcaccctttctctctctccatggccacttgtgttgatgcctcaacccctctttctcggaaacctaacgggtcccaatccgatgatcattcctttaattacatgaaattctgccgaccctctttctctgatcgcgttccctgcatgcccatttgcaagaatcgcgacaccgccttcacacgtgtggaggagtttgacacacgtgtggagaatcatgttgaggttgacgttgtagagggtgttgatctttggttgaagattcaagaggaagcaaggttagatgttgatcaagaaccaatcttatccagctactatttcagttccattttgtctcacaaatccttggagagtgccttggccaaccacctctccacaaatttgagcagcttgagccttccaagcagcaccctttatgaccttttcatgggtgtttttgccgatgataatgacatcataggtgctgtcaaagatgatttgatagctgttaaggagagggaccctgcttgcataagttatgtgcattgcttgttgaatttcaagggtttcttggcatgccaggctcataggattgctcacaaattgtggctccaagggaggaaggtcttggcactgttgattcagaatagggtttctgatgtttttgctgtggatattcaccctggtgcgaaaattggacgtgggattttgctggatcatgcaacaggacttgttgtgggggagactgcagttattgggaataatgtgtcaattttgcataatgtgacattgggagggactggtaaggctagtggggatagacaccctaagattggtgatggggtgttgataggtgcagggacttgtattttggggaacattaagattggtgatggagctaagattggtgcatgttctgttgtgttgaaggaagtgccaccaagaactactgctgttgggaaccctgctaggttggttggagggaaggataaccctattaaattggataagatgcctagttttaccatggaccatacttcatggtctgattatgttatctag

SEQ ID NO: 6015 - protein, 387 aa, Glycine max
MNVLALGRFLTSPLYKSSPLTPSPIQFTPIFLHPPKFQSLYSIHPFSLSMATCVDASTPLSRKPNGSQSDDHSFNYMKFCRPSFSDRVPCMPICKNRDTAFTRVEEFDTRVENHVEVDVVEGVDLWLKIQEEARLDVDQEPILSSYYFSSILSHKSLESALANHLSTNLSSLSLPSSTLYDLFMGVFADDNDIIGAVKDDLIAVKERDPACISYVHCLLNFKGFLACQAHRIAHKLWLQGRKVLALLIQNRVSDVFAVDIHPGAKIGRGILLDHATGLVVGETAVIGNNVSILHNVTLGGTGKASGDRHPKIGDGVLIGAGTCILGNIKIGDGAKIGACSVVLKEVPPRTTAVGNPARLVGGKDNPIKLDKMPSFTMDHTSWSDYVI

SEQ ID NO: 6016 - DNA, 1457 bp, Brassica napus
  CDS (57)..(1232)
attaaacaaaaaaaaaaactcaattttttttgtttgtgtagccgagaaaatttccaatgttcccggtcacaagtcgccgccacttcacatcctccctatatatcctccgttcatcttctccacacaaccatctacgtcctctactctccctcctcttcctcccttccgtccgctcctccaaatccaaatccaaatcctcctcttcaaccaacaaacacaaccaacaacctcctcctccaatggccgcgtgcatcgacacgtgccgaaccggtaaaccacagatctcacgtgactcaaaccggtcccacgacgacgaatccggttttcgttactccaattactaccgcccctccggttatcatcatccaacaacccagaccaaaaccatccacacccgtcctctcatcgaagacctcccaaacgacgacgtatgggccaagatccgacaagaagccagatccgacatcgagagagaaccaatcgtctccggctactaccacgcctcgatcgtctcgcaacgctccctcgaagccgccttagccaacacgctctccgtcaagctcagcaacctaaacctcccgagcaacacgctcttcgatctcttcaacggcgtcctcgaacagaaccctaagatcgtcgagtccgttaagcaagacctcttagccgtcaaggaacgtgacccggcctgcatcagctacgtccactgcttcctccacttcaaaggctttttagcctgccaggcccatcgaatagcccacgagctttgggcccaaaaccgaaaggttcttgctctgctgatccagaacagagtctccgaagccttcgccgttgatttccaccccggggccaagatcgggacggggattttgctcgaccacgcgacggcgattgtgatcggagagacggcggtggtgggggataatgtttcgattcttcataacgtgacgcttggaggcacggggaagcagtgtggggataggcacccgaagattggggacggggtgttgatcggagctgggacgtgtattcttgggaatattacgattggtgaaggggcgaagattggggctggctcggtggtgttgaaggatgtgccgccgaggacgacggctgtggggaatccggcgaggttgcttggtgggaaagataatccgaagaagcatgataaggatcctggtctgactatggaccaaacctcgcatatatccgagtggtcggattatgttatttaaagtgttttgtgttttgttgtttattccataatcagatcatttgtctttgtaaggtattgtctgatttaaggatttgaaactaaactcggaaactcttaaacgatgtgtagtttgagtttcatgtggttcgtttctgattagcagagactatgtttagtatgtatgtttgttgggaataaactgaaagtttatcatttaaaaaaaaaaaaaaaaaagggcggccgc

SEQ ID NO: 6017 - protein, 391 aa, Brassica napus
MFPVTSRRHFTSSLYILRSSSPHNHLRPLLSLLFLPSVRSSKSKSKSSSSTNKHNQQPPPPMAACIDTCRTGKPQISRDSNRSHDDESGFRYSNYYRPSGYHHPTTQTKTIHTRPLIEDLPNDDVWAKIRQEARSDIEREPIVSGYYHASIVSQRSLEAALANTLSVKLSNLNLPSNTLFDLFNGVLEQNPKIVESVKQDLLAVKERDPACISYVHCFLHFKGFLACQAHRIAHELWAQNRKVLALLIQNRVSEAFAVDFHPGAKIGTGILLDHATAIVIGETAVVGDNVSILHNVTLGGTGKQCGDRHPKIGDGVLIGAGTCILGNITIGEGAKIGAGSVVLKDVPPRTTAVGNPARLLGGKDNPKKHDKDPGLTMDQTSHISEWSDYVI

SEQ ID NO: 6018 - DNA, 1578 bp, Oryza sativa Japonica Group
  CDS (1)..(1578)
atggcagcctgcgtcgacaagtggccgccggcggcgtacctgtgccgcctgccggagaagttctactgcgtcttgccggactgcaccgctacggaccgtccggtggtcaccgcatcggcggcgccggcgccggccgctagcgggagcagcggcgactacgtgtgggacgtgctgcgcgccgaggcgcaggacgacgcggacgacgagccgctcctccgcaagttctaccacgacctcgtcctgtcgcggccgtcgctggagtccgcgctcgcctcgctgctggcggccaagctctgcatccccggcgcgctgccgcaggaccagctccgggacctcctcgccggcgcgctcgccgcgcacccggaggccgggcgcgccgcgcgcgccgacctcgtcgcggcgcgcgaccgcgacccggcctgcgccaagatggtccactgcttcctctactacaagggcttcctggcactgcaggcccaccgcgcggcgcacgcgctctggtccgacaaccgcagggcgccggctctcctcctccagagccgcgcctccgaggtgttcggcgtcgacatccaccccggtgcgcgcattggctgcggcatcctgctcgaccacgccacgggcgtcgtcatcggcgagacggccgtcgtcggctacgacgtgtccatcctgcacggggtgacgctgggcggcacggggaaggagtccggcgaccggcaccccaaggtcggggacggtgtgctgatcggcgccggggcgagcgtgctcggcaatgtgcacattggcgacggagcgaagatcggagccggcgcagtcgtgctacgggacgtggcggacggaaccacggccgtcgggaacccagcgaagccgatcatcggcaagaaggcggcgccgcaacggcggccggaagagcttcccgggcaaaggccaaggtggtcgtcatggccaccaacctccaaccacggccaagccgctcctctagctcggccgtgcagcggcggcagcatcgagctcgacctgtgcgccatcgctggcatccagcgcggctcaaatctggtcgctgtcgatcccgtcgacggcatgcctcgacaggaggacggcgacgcggtcagagtcgttgacttgggcggggacgacgcggaggaggtggagacaggcggtggtgacctcgtcggtgagatagcgaggcgaaaggagctcccggccaccccctcgttggtggcggcaccgagacgtccgccgccagccaccgtcgcccatgccagattcgccgcaccgtcgccggatccacgcgtgtgggcgcggagcggcggccagatccgctcgggaagaaggcggtggagcctccgccccttgcgcccacccgcttggcctcccggccacctcctcattagcagcggcgccgcccgaggccgtcgagccggcgaagccccccgccgccgccgccgctccacggccgcgcccacatcctcaacgcgcgccacagccccgccgcccccacgacatgagaggagaaagaaggaagaagatggagaaggaaggagatggatggaaaacgtgacggtattggcacggttctaa

SEQ ID NO: 6019 - protein, 525 aa, Oryza sativa Japonica Group
MAACVDKWPPAAYLCRLPEKFYCVLPDCTATDRPVVTASAAPAPAASGSSGDYVWDVLRAEAQDDADDEPLLRKFYHDLVLSRPSLESALASLLAAKLCIPGALPQDQLRDLLAGALAAHPEAGRAARADLVAARDRDPACAKMVHCFLYYKGFLALQAHRAAHALWSDNRRAPALLLQSRASEVFGVDIHPGARIGCGILLDHATGVVIGETAVVGYDVSILHGVTLGGTGKESGDRHPKVGDGVLIGAGASVLGNVHIGDGAKIGAGAVVLRDVADGTTAVGNPAKPIIGKKAAPQRRPEELPGQRPRWSSWPPTSNHGQAAPLARPCSGGSIELDLCAIAGIQRGSNLVAVDPVDGMPRQEDGDAVRVVDLGGDDAEEVETGGGDLVGEIARRKELPATPSLVAAPRRPPPATVAHARFAAPSPDPRVWARSGGQIRSGRRRWSLRPLRPPAWPPGHLLISSGAARGRRAGEAPRRRRRSTAAPTSSTRATAPPPPRHERRKKEEDGEGRRWMENVTVLARF

SEQ ID NO: 6020 - DNA, 933 bp, Zea mays
  CDS (1)..(933)
atgacggccgggcagcttctgcgcaccgagccatcagcccagccccagcgggtgcgccacagcaccccgccggcggcactccaagcagacatcgtgccgtcgtacccgccgcccgagtcggacggtgacgagtcgtgggtctggtcccagatcaaggcggaggcgcggcgcgacgcggacgcggagccggcactggcctccttcctctacgcgacggtgctgtcgcacgcgtccctggaccggtccctggccttccacctggccaacaagctgtgctcctccacgctgctgtcgacgctcctctacgacctcttcgtggcgtcgctcgcggacgacccgtccgtccgcgcggcggcggtggccgacctgatcgccgcgcggtcgcgggacccggcctgcgcgggcttcgcgcactgcctcctcaactacaaggggttcctggccgtgcaggcgcaccgcgtggcgcacgtgctgtgggcgcagggccggcgcgcgctggccgtggcgctccagtcccgcgtcgccgaggtcttcgccgtggacatccacccggccgccaccgtcggcaggggcatcctgctcgaccacgccacgggcgtcgtcgtcggggagacggccgtcgtgggcgacaacgtctccatactccaccacgtgacgctgggcggcaccggcaaggcggtgggcgaccggcaccccaagatcggggacggcgtgctcatcggcgccggcgcgaccgtcctcggaaacgtcaggatcggtcgcggcgccaaggtcggcgcggggtccgtcgtcgtcatcgacgtgccgcccaggagcaccgccgtggggaaccccgccaggctgatcgcgcggaagaagggcgaggaggtgatgccgggggagtccatggaccacacctccttcatacagcagtggtcggactacatcatttga

SEQ ID NO: 6021 - protein, 310 aa, Zea mays
MTAGQLLRTEPSAQPQRVRHSTPPAALQADIVPSYPPPESDGDESWVWSQIKAEARRDADAEPALASFLYATVLSHASLDRSLAFHLANKLCSSTLLSTLLYDLFVASLADDPSVRAAAVADLIAARSRDPACAGFAHCLLNYKGFLAVQAHRVAHVLWAQGRRALAVALQSRVAEVFAVDIHPAATVGRGILLDHATGVVVGETAVVGDNVSILHHVTLGGTGKAVGDRHPKIGDGVLIGAGATVLGNVRIGRGAKVGAGSVVVIDVPPRSTAVGNPARLIARKKGEEVMPGESMDHTSFIQQWSDYII

SEQ ID NO: 6022 - DNA, 942 bp, Zea mays
  CDS (1)..(942)
atggctgcctgtgtcgacaagtggcaccccacgcacgccggccgcctcaccggcgccatctaccgctacttgccggacggcgccacggaccgcgcggtggccgccgccgccgccgcgccggcgtccgcgagcggcggcgacgacgacgacgtctgggacgagctgcgcgcggaggccgaggccgacggcgacgccgagcctctgctccgcaagtactacgccgacctcgtcctgtcgcgcccgtcgctggaggccgccctcgccgcgcacctgtcggccaacgtctgcgtccccggcgcgctgccgcaggacgcgctccgggacctcctggccgccgcactggccgcgcgcccggagtccggcccggccgcgcgcgccgacctcccggcggcgcgcgaccgcgacggctgcggccggatggtgcactgcttcctctactacaagggcttcctcgccctgcaggcgcaccgcgccgcgcacgggctgtggtgcgagggcccgtccgcgccggccttcctcctccagagccgcgcgtccgaggtgttcggcgtcgacatccaccccggcgcgcgcattggttcggggatcctgttcgaccacgccacgggcatcgtcatcggcgagacggccgtcgttgggaacgacgtctccatcctgcacggcgtcaccctcggcggcacgggaaaggagtccggcgaccggcacccgaaggtcggggacggggtgctgatcggcgccggcgccagcgtgctcggcaatgtgcgcgttggagccggggcgaagattggagcaggggcggtcgtgctacgggacgtgccggaggggaccacggccgtcgggaaccccgccaaggcggtcgggaagaaggcggcgccgcagcggcggccggaagagcagcctggggtcaccatggagcaagggtggtcggcatacgtgatttga

SEQ ID NO: 6023 - protein, 313 aa, Zea mays
MAACVDKWHPTHAGRLTGAIYRYLPDGATDRAVAAAAAAPASASGGDDDDVWDELRAEAEADGDAEPLLRKYYADLVLSRPSLEAALAAHLSANVCVPGALPQDALRDLLAAALAARPESGPAARADLPAARDRDGCGRMVHCFLYYKGFLALQAHRAAHGLWCEGPSAPAFLLQSRASEVFGVDIHPGARIGSGILFDHATGIVIGETAVVGNDVSILHGVTLGGTGKESGDRHPKVGDGVLIGAGASVLGNVRVGAGAKIGAGAVVLRDVPEGTTAVGNPAKAVGKKAAPQRRPEEQPGVTMEQGWSAYVI

SEQ ID NO: 6024 - DNA, 870 bp, Zea mays
  CDS (1)..(870)
atgccggccggccagccgcacgcgcacgaagccgctgccgccgcctgcgtcggcagcggcgcgaaccactccaaccaccgagtgccggcgcactcgccaccgccgctccccgcggaggtggtgccggcgtacccgcccccggagtcggaggacgacgagacctgggtgtggacgcagatcaaggcggaggcccgccgcgacgcggacgcggagccggcgctcgcctccttcctctacgccaccgtgttgtcccacccgtccctgccccgctccctctccttccacctcgccaacaagctctgctcctccacgctcctctccacgctcctctacgacctcttcctcgccacgctcaccgcgcacccctctctccgcgccgccgtcgtcgccgacctcctcgcggcccactcccgcgaccccgcctgcgtcggcttctcccactgcctcctcaactacaagggcttcctcgccatccaggcccaccgcgtcgcgcacgtgctctgggcgcagcagcgacggcccctcgcgctcgcgctccagtcccgcgtcgccgacgtcttcgccgttgacatccaccccgccgccgtcgtcgggaagggaatcctcctcgaccacgccaccggcgtcgtcatcggtgagacggccgtcgtcggcgacaacgtctccatcctccaccacgtcaccttgggcgggaccgggaaggcggtgggtgaccggcaccccaagattggggatggcgtgctgattggagcaggggccaccattcttggtaacgtgaaaattggtgccggggctaagattggagccggatccgtggtgctgatagatgtgccggcgaggagcacggcggttggaaccctgccaggctga

SEQ ID NO: 6025 - protein, 289 aa, Zea mays
MPAGQPHAHEAAAAACVGSGANHSNHRVPAHSPPPLPAEVVPAYPPPESEDDETWVWTQIKAEARRDADAEPALASFLYATVLSHPSLPRSLSFHLANKLCSSTLLSTLLYDLFLATLTAHPSLRAAVVADLLAAHSRDPACVGFSHCLLNYKGFLAIQAHRVAHVLWAQQRRPLALALQSRVADVFAVDIHPAAVVGKGILLDHATGVVIGETAVVGDNVSILHHVTLGGTGKAVGDRHPKIGDGVLIGAGATILGNVKIGAGAKIGAGSVVLIDVPARSTAVGTLPG

SEQ ID NO: 6026 - DNA, 816 bp, Mesorhizobium loti MAFF303099
  CDS (1)..(816): transl_table=11
ttgcagccggtcgatccgatctggcgttcgatccgcgacgaagcgatggacgcggtcaaccgcgaccccctgctggccgctttcctctattcgacgatcctcaaccaggagagcctggaagaggccgtcatccaccggatcgccgagcggcttgcccatcaggatatcggctccgatctgatccgccagaccttcaagaccatgctggccgacgacaaggaatggccgaccactgtgcgtgtcgacatccaggcctattacgaccgcgacccggcttgcgaccgtttcatcatgccggtgctctatttcaagggctttcacgccatccagacccacaggctggcgcattggctgtggaatcagggccgcaaggatttcgcgctctatctgcaaagccgctcgtcctcggtcttccagaccgacatcaacccggccgcgcggatcggcaagggcatcttcatcgaccacgccaccggcctcgtcgtcggcgagaccgcggtcatcgaggacgatgtgtcgatcctgcatggcgtgacgctgggcggcaccggcaaggctggcggcgaccgccatcccaagatccgccgtggcgtgctgatcggcgccggcgccaagattctcggcaatatcgagattggccattgctccaaggtcgccgccgggtcggtggtgctgtcgcccgtgccgcacaacaagactgtggccggcgtgccggcccgcgtggtcggtgagaccggctgcgaccagccttcgcgccagatggaccagctcctgccgtcgcagtcgatggaccaggtggtcagcttcgatatctga

SEQ ID NO: 6027 - protein, 271 aa, Mesorhizobium loti MAFF303099
MQPVDPIWRSIRDEAMDAVNRDPLLAAFLYSTILNQESLEEAVIHRIAERLAHQDIGSDLIRQTFKTMLADDKEWPTTVRVDIQAYYDRDPACDRFIMPVLYFKGFHAIQTHRLAHWLWNQGRKDFALYLQSRSSSVFQTDINPAARIGKGIFIDHATGLVVGETAVIEDDVSILHGVTLGGTGKAGGDRHPKIRRGVLIGAGAKILGNIEIGHCSKVAAGSVVLSPVPHNKTVAGVPARVVGETGCDQPSRQMDQLLPSQSMDQVVSFDI

SEQ ID NO: 6028 - DNA, 1176 bp, Arabidopsis thaliana; identical to SEQ ID NO: 5986
  CDS (1)..(1176)

SEQ ID NO: 6029 - protein, 391 aa, Arabidopsis thaliana
MLPVTSRRHFTMSLYMLRSSSPHINHHSFLLPSFVSSKFKHHTLSPPPSPPPPPPMAACIDTCRTGKPQISPRDSSKHHDDESGFRYMNYFRYPDRSSFNGTQTKTLHTRPLLEDLDRDAEVDDVWAKIREEAKSDIAKEPIVSAYYHASIVSQRSLEAALANTLSVKLSNLNLPSNTLFDLFSGVLQGNPDIVESVKLDLLAVKERDPACISYVHCFLHFKGFLACQAHRIAHELWTQDRKILALLIQNRVSEAFAVDFHPGAKIGTGILLDHATAIVIGETAVVGNNVSILHNVTLGGTGKQCGDRHPKIGDGVLIGAGTCILGNITIGEGAKIGAGSVVLKDVPPRTTAVGNPARLLGGKDNPKTHDKIPGLTMDQTSHISEWSDYVI

SEQ ID NO: 6030 - DNA, 1068 bp, Arabidopsis thaliana
  CDS (1)..(1068)
atggcttgtataaacggcgagaatcgtgatttttcttcctcgtcatctttgtcttctcttccaatgattgtctcccggaacttttctgccagagacgatggagagaccggtgacgagtttcctttcgagaggattttcccggtttacgctagaggaacccttaatcccgtggccgacccggttttgctggattttaccaattctagttatgacccaatttgggattctataagagaagaagctaagcttgaggcagaagaggagccggttttgagtagcttcttgtatgctagtatcttgtcgcatgactgtttagagcaagcattgagttttgttctagctaaccgtctccaaaaccctaccttgttggcaactcagcttatggatatattttgcaacgttatggtacatgacagaggtattcaaagctcgattcgtcttgatgttcaggcattcaaagacagagatcctgcttgtctatcgtatagttcggctattttacatctgaagggctatcttgcactgcaggcgtatagagtagcacataagttgtggaagcaaggaagaaaactattagcattggcactgcaaagccgagtaagcgaggtttttggaatcgatattcatcccgctgcaagaattgggaaaggaatattgttggatcatggaactggtgtggtcataggtgagactgctgtgataggcgaccgtgtctcaattttgcatggtgtgacattaggaggaactgggaaagaaaccggtgaccgccatccaaatataggcgacggtgctcttcttggagcatgtgtgactatacttggtaacattaagataggcgctggagcaatggtagctgctggttcgcttgtgttaaaggatgttccttcgcatagcatggtggctggaaatccagcaaaactcatcgggtttgttgatgagcaagatccatctatgacaatggagcatgatgctaccagagagttctttcaaaatgtagctgttgcttatagagagacaataccaaatggatcttcagtttcagggagttgcagggaaaggagacattaa

SEQ ID NO: 6031 - protein, 355 aa, Arabidopsis thaliana
MACINGENRDFSSSSSLSSLPMIVSRNFSARDDGETGDEFPFERIFPVYARGTLNPVADPVLLDFTNSSYDPIWDSIREEAKLEAEEEPVLSSFLYASILSHDCLEQALSFVLANRLQNPTLLATQLMDIFCNVMVHDRGIQSSIRLDVQAFKDRDPACLSYSSAILHLKGYLALQAYRVAHKLWKQGRKLLALALQSRVSEVFGIDIHPAARIGKGILLDHGTGVVIGETAVIGDRVSILHGVTLGGTGKETGDRHPNIGDGALLGACVTILGNIKIGAGAMVAAGSLVLKDVPSHSMVAGNPAKLIGFVDEQDPSMTMEHDATREFFQNVAVAYRETIPNGSSVSGSCRERRH

SEQ ID NO: 6032 - DNA, 939 bp, Arabidopsis thaliana
  CDS (1)..(939)
atgccaccggccggagaactccgacatcaatctccatcaaaggagaaactatcttccgttacccaatccgatgaagcagaagcagcgtcagcagcgatatctgcggcagctgcagatgcggaagctgccggattatggacacagatcaaggcggaagctcgccgtgatgctgaggcggagccagctttagctagctatctatattcgacgattctttctcattcgtctcttgaacgatctatctcgtttcatctaggaaacaagctttgttcctcaacgcttttatccacacttttatacgatctgttcttaaacactttttcctccgatccttctcttcgtaacgccaccgtcgcagatctacgcgctgctcgtgttcgtgatcctgcttgtatctcgttctctcattgtctcctcaattacaaaggcttcttagctattcaggcgcatcgtgtatcacacaagctatggacacaatcacggaagccattagcattagctctacactcaagaatctccgatgtattcgctgttgatatccatccagcagcgaagatcggaaaagggatacttctagaccacgcaaccggagttgtagtcggagaaacagcggtgattgggaacaatgtttcaatccttcaccatgtgacactaggtggaacaggtaaagcttgtggagatagacatccgaagatcggtgacggttgtttgattggagctggagcgactattcttggaaatgtgaagattggtgcaggtgctaaagtaggagctggttctgttgtgctgattgacgtgccttgtcgaggtactgcggttgggaatccggcgagacttgtcggagggaaagagaagccaacgattcatgatgaggaatgtcctggagaatcgatggatcatacttcattcatctcggaatggtcagattacatcatataa

SEQ ID NO: 6033 - protein, 312 aa, Arabidopsis thaliana
MPPAGELRHQSPSKEKLSSVTQSDEAEAASAAISAAAADAEAAGLWTQIKAEARRDAEAEPALASYLYSTILSHSSLERSISFHLGNKLCSSTLLSTLLYDLFLNTFSSDPSLRNATVADLRAARVRDPACISFSHCLLNYKGFLAIQAHRVSHKLWTQSRKPLALALHSRISDVFAVDIHPAAKIGKGILLDHATGVVVGETAVIGNNVSILHHVTLGGTGKACGDRHPKIGDGCLIGAGATILGNVKIGAGAKVGAGSVVLIDVPCRGTAVGNPARLVGGKEKPTIHDEECPGESMDHTSFISEWSDYII

SEQ ID NO: 6034 - DNA, 825 bp, Buchnera aphidicola str. APS (Acyrthosiphon pisum)
  CDS (1)..(825): transl_table=11
atgtgtattttgaaaatatcaagaatatggaataaaatactctacgatgtttcttttttattaaaaaaagaaccaattttatcagatttttaccaaagtagtattttacaacaccaaagttttacaagttctttaagttatatattatcaaataaattatctacatctatgatttctgaaaagaaaatacaaggtatatttgatgatgtatatctgaatgatcgttctattttaaattttatagtgcaagatattaaggctgtactaaaacgagatccagcagtaaatgattatttaacacctttactttatttaaaaggtttccatgcactagaagcttatagaataagtcattatctctggaatacagggaaaaaatcattatctctgtatctgcaaagtagaatctcttctgaattttctgtagatattcatccagcagcgtttattggatctggtgtaatgcttgatcatgcaactggcattgtaatcggagaaggtgtgactatagaaaatgatgtatcaattcttcattcggttactttaggaggaactggtaaaaactttagccaaaatagacatcctactattagaaaaggcgttgttataggggcgggtgccaaaattttaggaaatattgaagtaggttcaggcgcgaaaataggtgcgggatcaatagttttaaaaaatgttccttcagatgtaacagttgtaggagtaccagcgaaaattgttagtcaagtatctagtaaaaagtattattctcagaagaaaaaaaatagtttaaaatatataaatatatttcaacacggagatggtatttaa

SEQ ID NO: 6035 - protein, 274 aa, Buchnera aphidicola str. APS (Acyrthosiphon pisum)
MCILKISRIWNKILYDVSFLLKKEPILSDFYQSSILQHQSFTSSLSYILSNKLSTSMISEKKIQGIFDDVYLNDRSILNFIVQDIKAVLKRDPAVNDYLTPLLYLKGFHALEAYRISHYLWNTGKKSLSLYLQSRISSEFSVDIHPAAFIGSGVMLDHATGIVIGEGVTIENDVSILHSVTLGGTGKNFSQNRHPTIRKGVVIGAGAKILGNIEVGSGAKIGAGSIVLKNVPSDVTVVGVPAKIVSQVSSKKYYSQKKKNSLKYINIFQHGDGI

SEQ ID NO: 6036 - DNA, 795 bp, Pasteurella multocida subsp. multocida str. Pm70
  CDS (1)..(795): transl_table=11
atgccattagcggtttggactgacatccgtcaggaagcaaaaaccttagcagaaaatgagccaattttggccagtttttttcacgcaacgattttgaaacatcataatcttggtaatgcattaagctatattttagccaacaaattggcaaatacgattatgcccgccattgctttgcgagaaattattgaggaagcttatcaggcggatcctgacatcattgccagtgctgcctgtgatattcgtgcggtgcgtcaacgcgatcccgcggtggaattatattctacgccactgttatatttaaaaggttttcatgccttgcaaagttatcggattacccattatttatggcaacaagagcggaaagccttagctgtttatttacaaaaccaaatctcggtcgcctttgatgtggatatccatcctgcggctaaaattggttgtggcattatgtttgaccatgcgacaggcatcgtggtgggagaaacctcggtgattgaaaatgatgtgtcgattttacaaggcgtcaccttgggggggacgggtaaagagtgtggcgatcgtcatcctaaagtacgcgaaggtgtaatgattggtgctggggcgaaaatcttgggtaacattgaagtgggacgttatgccaaaattggggcaaactcggttgttttacaacctgtccctgaatataccaccgcagcgggggtaccggcacgtgtgattgctcgcgatcaagcggcgaaacccgcttttgatatgaaccaatattttaatgacgatcatgcctctaaggtgtaa

SEQ ID NO: 6037 - protein, 264 aa, Pasteurella multocida subsp. multocida str. Pm70
MPLAVWTDIRQEAKTLAENEPILASFFHATILKHHNLGNALSYILANKLANTIMPAIALREIIEEAYQADPDIIASAACDIRAVRQRDPAVELYSTPLLYLKGFHALQSYRITHYLWQQERKALAVYLQNQISVAFDVDIHPAAKIGCGIMFDHATGIVVGETSVIENDVSILQGVTLGGTGKECGDRHPKVREGVMIGAGAKILGNIEVGRYAKIGANSVVLQPVPEYTTAAGVPARVIARDQAAKPAFDMNQYFNDDHASKV

SEQ ID NO: 6038 - DNA, 819 bp, Neisseria meningitidis MC58
  CDS (1)..(819): transl_table=11
atgaaaaaagaccatttaaacacaaccggtttcgacctctggcacaccatccgcgaagaaaccgcggccgcggtctccgccgaaccgatgctggcaagttttttgcaccaaaccgtgttgcgccacgagtccctcggctccgtccttgcctaccacctttccagcaaactcggcagcccgattatggacgtgcgcgcgctgtttgaaatctaccagcaggcgttgggcagcgacacccaaatcggcaaatgcgtcgaagcagacttaaaagccatctacgaacgcgatcccgcctgcgacgaatattcgctgccgcttttatatttcaaaggcttccacgcgattcaggcacaccgcatcaaccatcggctgtatctcgacgggcgcaaaacgctggcgtatttcctgcaaaaccgtatgtccgaagtattcggcgtggacatccatcccgccgcccgtttcggatacgggctgatgctcgaccacgccaccggctttgttgccggcgaaaccgccgtgttgggcaacaatatttcgattttgcacggcgtaacgctcggcggttcgggcaaagaaggcggcgaccgccaccctaaaatcggcgacggcgtgatgatcggcgcaaacgcctcgatattgggcaatatccgcatcggcagcaatgccaaaatcggggcgggcagcgtcgtggtttcagacgtgccgccgtccatcacggttgtcggcgtacccgccaaacccgtggcgcgatcgctcaaaacaccgtcggcggatatggatcaaaatatccagtttaccgaaatcgactttatgatttga

SEQ ID NO: 6039 - protein, 272 aa, Neisseria meningitidis MC58
MKKDHLNTTGFDLWHTIREETAAAVSAEPMLASFLHQTVLRHESLGSVLAYHLSSKLGSPIMDVRALFEIYQQALGSDTQIGKCVEADLKAIYERDPACDEYSLPLLYFKGFHAIQAHRINHRLYLDGRKTLAYFLQNRMSEVFGVDIHPAARFGYGLMLDHATGFVAGETAVLGNNISILHGVTLGGSGKEGGDRHPKIGDGVMIGANASILGNIRIGSNAKIGAGSVVVSDVPPSITVVGVPAKPVARSLKTPSADMDQNIQFTEIDFMI

SEQ ID NO: 6040 - DNA, 825 bp, Agrobacterium tumefaciens str. C58
  CDS (1)..(825): transl_table=11
atggtcgcacgtactgaggcccgtcagcctgaacagctggcgatcgttgatccgatctggggcagcctgctgaatgaggcccgaagcgctgcggcgcaggacccgctgctgtcagcctttctctattcgacgatcctcaatcaccgctctctcgaagaatgtgtgatctaccgtatctgcgagctccttgatcatcccgacatgcaggcagttcttctgcgccagaccttccaggacatgctggaggactggccggaatggggaagtgtgctgcgcgtcgatatccaggccgtttacgaccgcgaccccgcctgcacgcgcttcatggagccgctgctttatttcaaggggttccaagctatccagacgcatcgccttgcccactggctgctgcagaagggccgcaaggatttggcgctttatctgcaaagccgctcgtcgagcattttccagacggatatcaatccggccgcgcgcatcggcaagggcatcttcctcgaccatgccaccggactggtggttggtgagaccgccgttatcggcgacaacgtttcgatcctgcatggcgtgacgcttggcggcaccggcaaggagggggcagaccgccatccgaagatcgccaatggggtgatgatcggggcaggcgcaaagattctcggcaatatcgagattggcagctgctcgcgtattgccgccggatcggtggtgctgaaacccgttccgccgaagaccacggttgccggcgtgccggcgcgggtggtgggagaagcagggtgttcggaaccctcgcgtctgatggaccagctcatcggggccgatatctga

SEQ ID NO: 6041 - protein, 274 aa, Agrobacterium tumefaciens str. C58
MVARTEARQPEQLAIVDPIWGSLLNEARSAAAQDPLLSAFLYSTILNHRSLEECVIYRICELLDHPDMQAVLLRQTFQDMLEDWPEWGSVLRVDIQAVYDRDPACTRFMEPLLYFKGFQAIQTHRLAHWLLQKGRKDLALYLQSRSSSIFQTDINPAARIGKGIFLDHATGLVVGETAVIGDNVSILHGVTLGGTGKEGADRHPKIANGVMIGAGAKILGNIEIGSCSRIAAGSVVLKPVPPKTTVAGVPARVVGEAGCSEPSRLMDQLIGADI

SEQ ID NO: 6042 - DNA, 828 bp, Sinorhizobium meliloti 1021
  CDS (1)..(828): transl_table=11
atggtcgccaagacagaacttcgtcatacggaatcgctcgaagcgatcgatccgatctgggatagcctgcgcgaggaggcgcgtctggcggccgagcgcgacccgatgctggcggcctttctctattcgacggtggtcaatcagcattccctggaagattgcgtcatctaccggatctgcgagaggctggaccatcccgacctacaggcgagcctcctgcaccagaccttcgccgaaatgctcgaggactggcccgaatggggcgccgtcctgcgcgtcgatatacaggcggtctacgaccgcgacccggcctgcacgcgcttcatggagcccgtgctttatttcaagggcttccatgccatacagacgcaccgtctggctcactggctgtggaaccgcggccggaaagactttgcgctctatctccagagccgctcctccagtgttttccaaaccgacatcaacccggccgcccgcatcgggcgcggcatcttcctcgatcatgcaacggggctcgtcgtcggcgaaaccgcggtcatcggcgacaacgtatctatcttgcatggcgtgacgcttggcggcaccggcaaggaaggcagcgaccgtcatccgaagatcggcaacggcgtgctgatcggcgccggcgcaaagattctcggcaacatccacatcggccactgctcgcgcgtggccgccggttccgtcgtgctgaaggcggtccctcccaaatcgacggttgccggggtgccggcgaaggtcgtcggcgaggccggctgttccgagccgtcgcgtcaaatggaccagatcctggcgtcgttcgatatctga

SEQ ID NO: 6043 - protein, 275 aa, Sinorhizobium meliloti 1021
MVAKTELRHTESLEAIDPIWDSLREEARLAAERDPMLAAFLYSTVVNQHSLEDCVIYRICERLDHPDLQASLLHQTFAEMLEDWPEWGAVLRVDIQAVYDRDPACTRFMEPVLYFKGFHAIQTHRLAHWLWNRGRKDFALYLQSRSSSVFQTDINPAARIGRGIFLDHATGLVVGETAVIGDNVSILHGVTLGGTGKEGSDRHPKIGNGVLIGAGAKILGNIHIGHCSRVAAGSVVLKAVPPKSTVAGVPAKVVGEAGCSEPSRQMDQILASFDI

SEQ ID NO: 6044 - DNA, 840 bp, Caulobacter crescentus CB15
  CDS (1)..(840): transl_table=11
atgccgaagcatctcgaagtggtgacgtccgacaccgaaacgccggtgtgggtcgcgctgcgcaaccaggccgaacacgccgccaaggccgaaccggcgctggcgtcgctgctgaacgcggtgatcctcagccacgacaacctcgccgacgccctgacgttccagctggcccgaaagctgggcgaccaggaaatgcgggcgatgacggcgcgcgagttcgccgccgacgccttcgaggatgacctctcgatcgtcgaagccgccgaggccgacctcaaggccgtgttcgagcgcgatccggcctgcaagggctatgtccagccgttcctgttcttcaagggctttctggcgctgcagacccaccgcgtgtcgcactggctgtggaaccagggccgcgagaccctggccttctatctgcagagccgctctagcgaggtcttccaggtcgacatcaatcccgccgccaagatcggcaagggcgtgttcatcgaccacggcaccggcatcgtcatcggcgagacggcggtcgtcggcgacgacgtctcgatgctgcatggcgtgaccctgggcggcaccggcgccgagcgcggcgatcgccaccccaagatcggcaagggcgtgctgctgggcgcgggcgccaaggtgctgggtaacatcaccgtcggcgactacgccaaggtggcctcgggctcggtggtcctgcgacccgtgccggcccactgcacggcggccggcgtgcccgcgcgcctggtcaactgcccgacctgcgaagaacccgccaagaccatggaccacaccctggccgaagcggtgtattcgacctccagctacgagatctga

SEQ ID NO: 6045 - protein, 279 aa, Caulobacter crescentus CB15
MPKHLEVVTSDTETPVWVALRNQAEHAAKAEPALASLLNAVILSHDNLADALTFQLARKLGDQEMRAMTAREFAADAFEDDLSIVEAAEADLKAVFERDPACKGYVQPFLFFKGFLALQTHRVSHWLWNQGRETLAFYLQSRSSEVFQVDINPAAKIGKGVFIDHGTGIVIGETAVVGDDVSMLHGVTLGGTGAERGDRHPKIGKGVLLGAGAKVLGNITVGDYAKVASGSVVLRPVPAHCTAAGVPARLVNCPTCEEPAKTMDHTLAEAVYSTSSYEI

SEQ ID NO: 6046 - DNA, 822 bp, Salmonella enterica subsp. enterica serovar Typhimurium str. LT2
  CDS (1)..(822): transl_table=11
atgccgtgtgaagaactggaaatcgtctggaagaatattaaagctgaagcccgcgctttagctgactgtgagcctatgttggccagtttttatcacgccacgctactcaagcatgaaaatctgggcagtgcgctgagctatatgctggcaaataaactggcttcgcccatcatgcccgctatcgctatccgtgaagtagttgaagaagcctatgccgccgacccggaaatgatcgcgtcggcagcctgcgatattcaggccgtgcgcactcgcgatccggcggtggataaatactccacgccgctgttatatctgaaaggctttcatgcgctacaggcctaccgcattggtcactggttgtggaataaaggtcgccgcgcgctggctatcttcctgcaaaatcaggtttcggtctcgtttcaggtggatattcacccggcagcgaaaattggccgcgggattatgctcgaccatgccaccggtattgtggtgggggagacggcggttattgaagatgatgtgtcgatcttgcaatccgtcaccctgggcggtaccgggaaaacgagcggcgatcgtcatcctaaaatccgcgaaggcgtgatgattggcgcgggcgcgaaaattctcggcaatatcgaggtggggcgcggcgcgaaaattggcgcaggttccgtcgttttacagcctgtcccgccgcacactaccgccgcaggcgttccggcgcgtattgtcggcaagccgggcagcgataagccgtcgatggatatggaccagcatttcaacgggatacaccatacgtttgagtatggcgacggcatctga

SEQ ID NO: 6047 - protein, 273 aa, Salmonella enterica subsp. enterica serovar Typhimurium str. LT2
MPCEELEIVWKNIKAEARALADCEPMLASFYHATLLKHENLGSALSYMLANKLASPIMPAIAIREVVEEAYAADPEMIASAACDIQAVRTRDPAVDKYSTPLLYLKGFHALQAYRIGHWLWNKGRRALAIFLQNQVSVSFQVDIHPAAKIGRGIMLDHATGIVVGETAVIEDDVSILQSVTLGGTGKTSGDRHPKIREGVMIGAGAKILGNIEVGRGAKIGAGSVVLQPVPPHTTAAGVPARIVGKPGSDKPSMDMDQHFNGIHHTFEYGDGI

SEQ ID NO: 6048 - DNA, 813 bp, Schizosaccharomyces pombe
  CDS (1)..(813)
atgactgtgcagacagcggagaggacaataacacttgtccaggctatctggccaaaactacgaaaagaggctgaaaagcaatgtgaagttaatccatggttagccaaagaccttgcgagaaaaatcttgagtaaaaaaactttgagggagtctttgagctgtgttttagctcttccacttgaccatgttactgggagttcagaatcaatggaaaactggttctacagtattctagggctcaatgatgaaaagataattcgatcggccatgatagacttggatagattgtatacgacgaatcctgcgtgcccggatctcattagtgcatttctctcatttcgaggatttcatgccttgcaattgtatcgcatagctcacggtctttggagcgaaggagataaaacatccgccgtgcttgttcaaaattggacggccgtggcatatggtgttgacatccatccggctgccagcattggagatggcttgtttcttgaccacgccttgggtatagtgattggtgagacagcgattgtagaggatggtgttagtatttggcacaatgtgacattgggaagcacatttaaggatagtggagctcgtcatcccgtcatacgcaagaatgctatgctttgcactggagccacagtgcttggtagagttgaagtaggtgagaatgctgttgtagcagcaggtgctttagtgacaaaagatgtagcacctaaccgacttgcccttggttctcctgcgcgcgatgtaggacctgtaccgcaatacttcggtgcccttacaaatccaaactgtacaaataaatag

SEQ ID NO: 6049 - protein, 270 aa, Schizosaccharomyces pombe
MTVQTAERTITLVQAIWPKLRKEAEKQCEVNPWLAKDLARKILSKKTLRESLSCVLALPLDHVTGSSESMENWFYSILGLNDEKIIRSAMIDLDRLYTTNPACPDLISAFLSFRGFHALQLYRIAHGLWSEGDKTSAVLVQNWTAVAYGVDIHPAASIGDGLFLDHALGIVIGETAIVEDGVSIWHNVTLGSTFKDSGARHPVIRKNAMLCTGATVLGRVEVGENAVVAAGALVTKDVAPNRLALGSPARDVGPVPQYFGALTNPNCTNK

SEQ ID NO: 6050 - DNA, 822 bp, Chlorobium tepidum TLS
  CDS (1)..(822): transl_table=11
atgagtgtacaggatatctggtcattgattcgtgaagaagcgtgcctcgagtgcgagcgtgagccggagatccggctgtttctggaacagcacattttgcgatatgaggagttcgctccggcgctggcgatgctgctttcggtgaagcttgggtcgaagcactttccgccgccggtgcttgaaggaatcttcgaggatttttatcggcaaagccccgaatctgtccggtgcgcagcctgcgacatggaggctacccgtgagcgtgacccggcagcggtgaactatttcgagatcatgctttttctcaagggctaccaggcgcttcagtcttaccggctggctcactggctgtggcagaatgaccgcaaatcgctggcctatttcctccagaaccgcatgtcggaggttttcgcggtagatattcatcctgcggctaaaatcggcaagggcattctgcttgatcatgccacgagccttgtcatcggcgagaccgccgtggtagaggataatgtttcgcttctgcacgaggtgacgcttggtggcaccggcaaggattcgggtgaccggcatccgaaagtcggtaagtcggtgatgattggcgccggggccaagattctcggaaacatcaaaatcggagaaggtgcgaaggtcggggcgggcagcgtggtgctcgatgatgttccgccgcactacacggttgctggtgtgccagcacatatcgtggggcgcactgaagttcccgaaccctctctcgatatgaaccagcgcctcatttttccggaaaaacaaaagccgaaaggcgagcagcactcgtgcttataa

SEQ ID NO: 6051 - protein, 273 aa, Chlorobium tepidum TLS
MSVQDIWSLIREEACLECEREPEIRLFLEQHILRYEEFAPALAMLLSVKLGSKHFPPPVLEGIFEDFYRQSPESVRCAACDMEATRERDPAAVNYFEIMLFLKGYQALQSYRLAHWLWQNDRKSLAYFLQNRMSEVFAVDIHPAAKIGKGILLDHATSLVIGETAVVEDNVSLLHEVTLGGTGKDSGDRHPKVGKSVMIGAGAKILGNIKIGEGAKVGAGSVVLDDVPPHYTVAGVPAHIVGRTEVPEPSLDMNQRLIFPEKQKPKGEQHSCL

SEQ ID NO: 6052 - DNA, 801 bp, Brucella suis 1330
  CDS (1)..(801): transl_table=11
gtgaatgccggtctcgatcaggtcgatcccatctggcattccatccgtgccgaagcggaggaggcgaccaggaatgacccggttctgggcgcctttctctacgccacgattctcaaccagccgagccttgaagaagcggtgatgcatcgtatcgccgaacgccttggccatcccgatgtgagcgcggatatcctgcgccagaccttcgatacgatgcttgaggcaaacccggaatggtcgcacgtcctgcgtgtggatattcaggctgtttatgaccgcgatccggcctatagccgctttatggatccggttctttacctgaagggcttccatgcgatccaggcacaccgtctggcgcactggctttacaagcaaggtcgcaaggatttcgcctattatcttcagagccgctcgtcatcgatctttcagaccgatattcacccggcggccaggcttggcagcgggctgtttctcgaccatgctacagggcttgtggtgggtgaaacggccgttgtagaagataatgtctcgatcctgcatggggttacgctgggcggaaccggcaaatcgagcggtgatcgccatccgaaaatccgtcagggcgtgctgattggggcaggcgcaaaaatcctcggcaacatccaggtagggcagtgctccaagatcgcggctggttccgttgtgctgaagtccgtgccgcataatgtaaccgtggcgggcgtgcctgcgcgcatcatcggcgaaacgggctgcacggagccatcccgcgtgatggaccagatgctgggtgacggcatctaa

SEQ ID NO: 6053 - protein, 266 aa, Brucella suis 1330
MNAGLDQVDPIWHSIRAEAEEATRNDPVLGAFLYATILNQPSLEEAVMHRIAERLGHPDVSADILRQTFDTMLEANPEWSHVLRVDIQAVYDRDPAYSRFMDPVLYLKGFHAIQAHRLAHWLYKQGRKDFAYYLQSRSSSIFQTDIHPAARLGSGLFLDHATGLVVGETAVVEDNVSILHGVTLGGTGKSSGDRHPKIRQGVLIGAGAKILGNIQVGQCSKIAAGSVVLKSVPHNVTVAGVPARIIGETGCTEPSRVMDQMLGDGI

SEQ ID NO: 6054 - DNA, 822 bp, Vibrio vulnificus CMCP6
  CDS (1)..(822): transl_table=11
atgaaacactgtgaaaaacaaaaagtctggcagagcattgtcaaagaagcccgtgagctatcggagcaagagccgatgcttgccagtttttatcacgccaccatcatcaagcatgaaagcttgtgtgctgcgttgagctacattttagccaataagctgaacacagcctccatgccggcgatggcagtgcgtgaagtggttgaagaagcctttgcggctgaccctaacatcaccgattctgccgcctgcgatatctgtgcgacggtgaatcgtgacccggctgtttctatgtattctatcccactgctttacctaaagggttaccatgccttgcaaggctatcgcgtggcaaattggttgtggaaacaaggccgctacgcgctggcgacctatctgcaaaatcaaatctcggtggcatgccaagtggatattcaccctgcggctcgtatcggcaaaggcatcatgctggatcacgcaacaggtatcgtgatcggggaaaccgctgtcgtcgaaaatgatgtatccatcctgcaagacgtgacgttaggtggtactggtaaagagtgcggcgaccgacatcctaagatccgcgaaggggtgatgatcggagctggggcaaaaatccttggcaatatcgaagttggagaaggtgcaaaaattggctcctgctccgttgtacttcaacccgttccaccgcatactaccgtcgctggtgtacccgcacgaattgtagggagaccgcaatccgacaagccttctctcgatatggatcaaggctttaacgggaaataccctaacttcattgacggtgacggcatctaa

SEQ ID NO: 6055 - protein, 273 aa, Vibrio vulnificus CMCP6
MKHCEKQKVWQSIVKEARELSEQEPMLASFYHATIIKHESLCAALSYILANKLNTASMPAMAVREVVEEAFAADPNITDSAACDICATVNRDPAVSMYSIPLLYLKGYHALQGYRVANWLWKQGRYALATYLQNQISVACQVDIHPAARIGKGIMLDHATGIVIGETAVVENDVSILQDVTLGGTGKECGDRHPKIREGVMIGAGAKILGNIEVGEGAKIGSCSVVLQPVPPHTTVAGVPARIVGRPQSDKPSLDMDQGFNGKYPNFIDGDGI

SEQ ID NO: 6056 - DNA, 954 bp, Bradyrhizobium japonicum USDA 110
  CDS (1)..(954): transl_table=11
gtgtttcaacgcgttggcggctttcgcggggcaaggtgctgttcactctcaggcaagcccgtcaggactttgtcgcctagactgtgctatagaaccaacaaaacgagcccattcgaaagagcagatcccatggcagtgcatcaggtcaatccgggaggaaagctcgcatccctcgatccgatctgggaccggatccggagcgaagcggaggacatcgtccatcgcgagccggagcttgcgaccttcatctattcgacggtgctgcatcacagccgtctcgaggattcggtgatccatcgtctcgccgaccggctcgatcattccgcgctgtcgggcgatctcgtgcgccagacctatgacgaggcgctgcgcgacgatcccgatctcggcaacgccttccgcgccgacctcgtcgccgtctacgatcgcgatcccgcgacctcccgcttcatcgatccgttgctctacttcaagggcttccacgcgatccagacccatcgccttgcgcactggctctggctgaagggccgcaaggatttcgcgtattatctccagagccgcgcctctgcggtgttccagaccgacatcaatcccgccgcgcgcatcggccgcggcatcttcctcgaccatgccaccggcttcgtctgcggcgagacggcggtgatcgaggacgacgtctcgatcctgcacggcgtcacgctcggcggcaccggcaaggagaacgaggaccgtcatccgaagattcgccatggcgtgctgatcggcgcgggcgcgaaaatcctcggcaacatcgagatcggccattgcgcgcgcatcgcggcgggctcggtcgtggtcaagcccgtgccgcacaacgtcacggtcgcgggcgtgcccgccaagatcgtcggcgaggccggctgcgccgagccgtcgcgcaccatggatcagatgatcaacgcgatggggctttga

SEQ ID NO: 6057 - protein, 317 aa, Bradyrhizobium japonicum USDA 110
MFQRVGGFRGARCCSLSGKPVRTLSPRLCYRTNKTSPFERADPMAVHQVNPGGKLASLDPIWDRIRSEAEDIVHREPELATFIYSTVLHHSRLEDSVIHRLADRLDHSALSGDLVRQTYDEALRDDPDLGNAFRADLVAVYDRDPATSRFIDPLLYFKGFHAIQTHRLAHWLWLKGRKDFAYYLQSRASAVFQTDINPAARIGRGIFLDHATGFVCGETAVIEDDVSILHGVTLGGTGKENEDRHPKIRHGVLIGAGAKILGNIEIGHCARIAAGSVVVKPVPHNVTVAGVPAKIVGEAGCAEPSRTMDQMINAMGL

SEQ ID NO: 6058 - DNA, 822 bp, Vibrio parahaemolyticus RIMD 2210633
  CDS (1)..(822): transl_table=11
atgaaacactgcgaaaaacaaaaagtctggaacaaaattgtctcagaagcccgtgaaatgtcagagcaagagcctatgttggcgagcttttaccacgcaaccatcatcaagcatgaaagtttgtgtgcggcactgagttacattttggccaacaaattaaacacggcgtcgatgccagcaatggccgttcgtgaagtggtcgaagaggcatttgccgcagaccctaccatcacggattttgctgcgtgtgacatttgtgcgacggtcaaccgcgaccctgctgtttccatgtactcaatgccattattgtatttgaaaggttaccacgcgctgcaaggctatcgcgtggcaaactggttgtggaaacaaggccgtcatgcccttgcaacgtatttgcaaaaccaaatttctgtggcgtgtcaggtagacattcacccagcagcacgtattggtagcggcatcatgctcgaccatgcgacgggcatcgtgatcggtgaaacagcggtgattgataacgatgtgtcgatcctacaagacgtcaccctaggtggtacaggtaaagagtgcggcgatcgtcacccgaaaatccgtgaaggcgtgatgattggtgcaggtgccaaaattcttggtaatatcgaagtgggcgaaggggcgaaaatcggctcttgctccgtagtattgcaagcggtgccaccgcacacgaccgtagcaggcgtacccgcgaaaatcgttggtcgaccaaaaacagacaaaccgtctctcgatatggaccaaggctttaacggtaaatcacaaagctttatccatggagatggcatttaa

SEQ ID NO: 6059 - protein, 273 aa, Vibrio parahaemolyticus RIMD 2210633
MKHCEKQKVWNKIVSEAREMSEQEPMLASFYHATIIKHESLCAALSYILANKLNTASMPAMAVREVVEEAFAADPTITDFAACDICATVNRDPAVSMYSMPLLYLKGYHALQGYRVANWLWKQGRHALATYLQNQISVACQVDIHPAARIGSGIMLDHATGIVIGETAVIDNDVSILQDVTLGGTGKECGDRHPKIREGVMIGAGAKILGNIEVGEGAKIGSCSVVLQAVPPHTTVAGVPAKIVGRPKTDKPSLDMDQGFNGKSQSFIHGDGI

SEQ ID NO: 6060 - DNA, 822 bp, Salmonella enterica subsp. enterica serovar Typhi str. Ty2
  CDS (1)..(822): transl_table=11
atgccgtgtgaagaactggaaatcgtctggaagaatattaaagctgaagcccgcgctttagctgactgtgagcctatgttggccagtttttatcacgccacgctactcaagcatgaaaatctgggcagtgcgctgagctatatgctggcaaataaactggcttcgcccatcatgcccgctatcgctatccgtgaagtagttgaagaagcctatgccgccgacccggaaatgatcgcgtcggcagcctgcgatattcaggccgtgcgcactcgcgatccggcggtggataaatactccacgccgctgttatatctgaaaggctttcatgcgctacaggcctaccgcattggtcactggttgtggaataaaggtcgccgcgcgctggctatcttcctgcaaaatcaggtttcggtctcgtttcaggtggatattcacccggcagcgaaaattggccgcgggattatgctcgaccatgccaccggtattgtggtgggggagacggcggttattgaggatgatgtgtcgatcctgcaatccgtcaccctgggcggtaccgggaaaacgagcggcgatcgccatcctaaaatccgcgaaggcgtgatgattggcgcgggcgcgaaaattctcggcaatatcgaggtggggcgcggcgcgaaaattggcgcaggctccgtcgttttacagcctgtcccgccgcacactaccgccgcaggcgttccggcgcgtattgtcggcaagccgggcagcgataagccgtcgatggatatggaccagcatttcaacgggctacaccatacgtttgagtatggcgacggcatctga

SEQ ID NO: 6061 - protein, 273 aa, Salmonella enterica subsp. enterica serovar Typhi str. Ty2
MPCEELEIVWKNIKAEARALADCEPMLASFYHATLLKHENLGSALSYMLANKLASPIMPAIAIREVVEEAYAADPEMIASAACDIQAVRTRDPAVDKYSTPLLYLKGFHALQAYRIGHWLWNKGRRALAIFLQNQVSVSFQVDIHPAAKIGRGIMLDHATGIVVGETAVIEDDVSILQSVTLGGTGKTSGDRHPKIREGVMIGAGAKILGNIEVGRGAKIGAGSVVLQPVPPHTTAAGVPARIVGKPGSDKPSMDMDQHFNGLHHTFEYGDGI

SEQ ID NO: 6062 - DNA, 816 bp, Haemophilus ducreyi 35000HP
  CDS (1)..(816): transl_table=11
atgaagcacatcgaacttaatcaaatgtggcaaaaaatccggcaagaagcccaacaattagccgatcaagaaccgatattggccagtttttttcatgctacaatccttactcaccataatttgggtagcgcgcttagctacattttagccaataaactagctaatgcaattatgcccgctattgcattaaaagaaattattgagcaggcttatgaagcagatccccaaattattgaaagtgccgcttatgatattaatgcagtcacaacacgagatcccgccgtagatagatggacaacaccactcctttatttaaaaggtttccacgccttacagagctatcgtgttacccattatctttggcaacaaggacgtcgcgatcttgcagtttatctacaaaatcaaatttccgtcgcgtttgatgtcgatattcaccctgccgcacgcttagggcatagcattatgtttgaccacgcaactgccatcgttattggcgaaaccgctgtcattgaaaatgatgtttctattttacaaggcgtaacattaggtgggacaggcaaagaacacggcgatcgccaccccaaaatccgtgaaggcgtaatgatcggtgcaggcgccaaaatcctaggcaatattgaaattggccgttattctaaaattggggctaactcagtagtcttacaagccgtaccggatcacactaccgcagcaggaatccccgctcgcattataggacgagcgccacaacaaaaacccgcattcgatatgaaccaatattttgaagaaattgaaggtacagatggtgatggcatttaa

SEQ ID NO: 6063 - protein, 271 aa, Haemophilus ducreyi 35000HP
MKHIELNQMWQKIRQEAQQLADQEPILASFFHATILTHHNLGSALSYILANKLANAIMPAIALKEIIEQAYEADPQIIESAAYDINAVTTRDPAVDRWTTPLLYLKGFHALQSYRVTHYLWQQGRRDLAVYLQNQISVAFDVDIHPAARLGHSIMFDHATAIVIGETAVIENDVSILQGVTLGGTGKEHGDRHPKIREGVMIGAGAKILGNIEIGRYSKIGANSVVLQAVPDHTTAAGIPARIIGRAPQQKPAFDMNQYFEEIEGTDGDGI

SEQ ID NO: 6064 - DNA, 735 bp, Candidatus Blochmannia floridanus
  CDS (1)..(735): transl_table=11
atgtcttcgaataaagttgatatagtttggaataatatgataattgaggcaagattgttgattgattcagagcctatattaaaaaaatttttaaatgtaactttattgaatcatgataattttcaagatgctttagtttatttgttatttaaaaagttaaataatttagatatgatgacgattgatttaattgatatattgaaagatatatatagaactaatgatattattgatgcggcagctcaagatatttgtacgatacgtttacgtgatccgtctgtacaaaaatatctcactccttttttgtatttaaaaggatttcatgccttacaagcatatcgtattacgaactggttgtggaatcataattatccaggattggctatgtatttatataatcgtatttctattatttttaatgtagatattcatcctgctgctaaaattggttgtggaattatgttagatcatgcgactggagtggtaattggagaaactgctgtcatagatgataatgtatctattatgcagtctgttacgttaggaagtactggaaaaatagatggtaatcggcatccaaaaataaaaaaaggggttttaattggggcaggatctattattttaggtaatatcgaaataggttgtggatcaaaaattggtgctggatctattgtggtacactcagtaccgccttattcaacggtggttggaaggcctgctagattagtacaataa

SEQ ID NO: 6065 - protein, 244 aa, Candidatus Blochmannia floridanus
MSSNKVDIVWNNMIIEARLLIDSEPILKKFLNVTLLNHDNFQDALVYLLFKKLNNLDMMTIDLIDILKDIYRTNDIIDAAAQDICTIRLRDPSVQKYLTPFLYLKGFHALQAYRITNWLWNHNYPGLAMYLYNRISIIFNVDIHPAAKIGCGIMLDHATGVVIGETAVIDDNVSIMQSVTLGSTGKIDGNRHPKIKKGVLIGAGSIILGNIEIGCGSKIGAGSIVVHSVPPYSTVVGRPARLVQ

SEQ ID NO: 6066 - DNA, 783 bp, Chromobacterium violaceum ATCC 12472
  CDS (1)..(783): transl_table=11
atgagttccaccctggttgatccgctgtggtcggccatccgcgacgaaacgctggcggcggtcaacgacgagccgctgctggccagtttcctgcacatgaccgtattgcgccacgccacgctggaagacgtgctggccttccacctgtccaccaagctcgccagtccggtgatggatccccgcgcgctgcaggagctgttccgcgaggccttccaggccgatccggcgatcagcgccgcgctgcgcgccgacatccgcgcctgtttcgagcgcgatcccgcctgcgaccgctactccacgccgctgctgtacttcaagggcttccacgcgatccagagtcagcgcgtcacccactggctgtggcagcaggggcggaccacgctggcgctgttcctgcagaaccgcatttccgaggtgaccggcgccgacatccaccccgccgcgcgcgtcggccagggcgtgatgctggaccacggcaccggcctggtggtcggcgaaaccgccgtcatcggcaataacgtctccatcctgcacggcgtcaccctgggcggctccggcaaggatcgcggcgaccgccatcccaagataggcgacggcgtgatgctgggcgcgggcgccgcggtgctgggcaacatccgcgtcggcgaatgcgcgaaagtgggcgccggcagcgtggtgctggaagacgtgccgccgcacgcgaccgtggccggcgtgccggcgcgggtggtggcccaggcctgtccgggcaccccggcgctggacatggaccagcgagtgtga

SEQ ID NO: 6067 - protein, 260 aa, Chromobacterium violaceum ATCC 12472
MSSTLVDPLWSAIRDETLAAVNDEPLLASFLHMTVLRHATLEDVLAFHLSTKLASPVMDPRALQELFREAFQADPAISAALRADIRACFERDPACDRYSTPLLYFKGFHAIQSQRVTHWLWQQGRTTLALFLQNRISEVTGADIHPAARVGQGVMLDHGTGLVVGETAVIGNNVSILHGVTLGGSGKDRGDRHPKIGDGVMLGAGAAVLGNIRVGECAKVGAGSVVLEDVPPHATVAGVPARVVAQACPGTPALDMDQRV

SEQ ID NO: 6068 - DNA, 822 bp, Photorhabdus luminescens subsp. laumondii TTO1
  CDS (1)..(822): transl_table=11
atgtcgctagaagaattggacgaagtttggaagaacataaaaacagaagcgagagcactggctgaatgtgaaccgatgttggccagtttttttcatgcaacattactcaagcatgaaaatcttggtagtgctttaagttatatgctggcgaataagctggctacgccgattatgccggctattgctgttagagagatcgtagaagaggcttatggctcggatcaaaaaatgattgtctctgctgcccgcgacatcatagcggtacgtctacgcgatcccgccgtagataaatactcaacacctctgctgtacctcaaagggtttcatgctctccaagcctatcgtattgcccattggatctggggagaagaccgtaaagcattggctatttatctgcaaaaccaaatctcgatgtcttttggcgttgatattcacccggcagcaaagattggttgtggcattatgcttgaccacgccactggcattgtgattggcgaaacggcggtagtggaaaatgacgtttctatcctgcaatccgtcacccttggtggtacgggtaaaaccgggggtgatcgtcatccgaaagtcagggaaggggtgatgattggtgcaggttcgaaaatattgggtaatattgaaattggtcgtggggctaaaattggcgcaggttcagttgtccttcgctctgttccaccgcacacaacagccgctggagtgcctgcccgtattgtcggtaaacctgaaagcgaaaagccatcattggatatgaaccagcattttaatggtatcaaccatggctttgagtatggggatgggatttaa

SEQ ID NO: 6069 - protein, 273 aa, Photorhabdus luminescens subsp. laumondii TTO1
MSLEELDEVWKNIKTEARALAECEPMLASFFHATLLKHENLGSALSYMLANKLATPIMPAIAVREIVEEAYGSDQKMIVSAARDIIAVRLRDPAVDKYSTPLLYLKGFHALQAYRIAHWIWGEDRKALAIYLQNQISMSFGVDIHPAAKIGCGIMLDHATGIVIGETAVVENDVSILQSVTLGGTGKTGGDRHPKVREGVMIGAGSKILGNIEIGRGAKIGAGSVVLRSVPPHTTAAGVPARIVGKPESEKPSLDMNQHFNGINHGFEYGDGI

SEQ ID NO: 6070 - DNA, 840 bp, Apis mellifera
  CDS (1)..(840)
atgatgaaaaaaaaatttggtcaatctcttcatccaattgcacctactcaaaacgcaatgaatgatccgaataacctattagcgagcggccccgacagccacgaaataaaccttcaagccttgtgggaaaaaatggttcaagaaagcaatggatgttgtgatcctttgttatccagtttttttgatacatgcattcacagccatcatgatttcaaaaccgccctgacttgtatgataggacgcaaattagaggatgcctccatcccctatcaggcattaactgatttaatcaaacaagtgtacagaaccaatccgcctctcatttccatagctgcagccgatttgatcgcggttatgatgagagacgcagcatgctccgatttaattacaccatttctatttttcaagggattccactccattcaggcccatcgcatttcccattggctatggcataatcaaagacgctatctggcacttcatttacaaagccgtatttcggaagtgtttggggttgatatacatcctgccgcccgtctgggacagcgaatcatgatagatcacgccacttctgttattattggggaaaccgctgttgtagaagatgacgtttcaatattacaagaagttacccttgggggaacgggcaaagatgaaaaagaccgtcatcccaaaatccgtcggggagtcttaatcggtgcaggtgcaaaagtattaggaaatgtggaaattggagaaggagccaagattggtgcagggtcaattgttttagaagcagtcaaaccttacacaaccgtagttggcaatcctgcccgacaaatcgggtcttccccctattga

SEQ ID NO: 6071 - protein, 279 aa, Apis mellifera
MMKKKFGQSLHPIAPTQNAMNDPNNLLASGPDSHEINLQALWEKMVQESNGCCDPLLSSFFDTCIHSHHDFKTALTCMIGRKLEDASIPYQALTDLIKQVYRTNPPLISIAAADLIAVMMRDAACSDLITPFLFFKGFHSIQAHRISHWLWHNQRRYLALHLQSRISEVFGVDIHPAARLGQRIMIDHATSVIIGETAVVEDDVSILQEVTLGGTGKDEKDRHPKIRRGVLIGAGAKVLGNVEIGEGAKIGAGSIVLEAVKPYTTVVGNPARQIGSSPY

SEQ ID NO: 6072 - DNA, 792 bp, Physcomitrella patens subsp. patens
  CDS (1)..(792)
atgatagaggaagcgcgctgggactccaacaaagaaccagctctagccagctacttatattcgacgatactatctcacaggaccctggagagatcgctcgcattccatttgggaaacaagctttccagtagcacgctattaagcacgcagctttttaaccttctgcatgacacctttatggaggatgccgacatacgacgcgccatccgcgacgatatagaagctgtgaaggagcgtgaccccgcttgtgtgtcatacatccattgtttgctgaacttcaaaggattcttgtcatgccaagctcaaagagtagctcacagactttggaatcaagggcggcactccctggctctcgctattcagagcagagtttcagaggtttttcaggttgacattcatcctgcagccagaattggctcaggcgttcttttcgaccatgccacaggactggttgtaggcgaaacagctgttatagggaataatgtttctattttgcaccatgttacgcttggaggaaccggggctgtaggaggtgatcggcatccgaaaatcggtgatggcgttctgataggagctggggcaaccatactaggcaatatctctattggagctggggcaaaaattggagctggttcgattgtgcttatcgatgtgcccccacacactacagctgtagggaaccctgctcgcttgatcggaggtaaacaaaagcctgccaagttgagcgaaactccaggtgaaaccatggatcacacgttcatcatgaaggattggtctgattatgtaatatag

SEQ ID NO: 6073 - protein, 263 aa, Physcomitrella patens subsp. patens
MIEEARWDSNKEPALASYLYSTILSHRTLERSLAFHLGNKLSSSTLLSTQLFNLLHDTFMEDADIRRAIRDDIEAVKERDPACVSYIHCLLNFKGFLSCQAQRVAHRLWNQGRHSLALAIQSRVSEVFQVDIHPAARIGSGVLFDHATGLVVGETAVIGNNVSILHHVTLGGTGAVGGDRHPKIGDGVLIGAGATILGNISIGAGAKIGAGSIVLIDVPPHTTAVGNPARLIGGKQKPAKLSETPGETMDHTFIMKDWSDYVI

SEQ ID NO: 6074 - DNA, 891 bp, Physcomitrella patens subsp. patens
  CDS (1)..(891)
atggagttgaacggaatatcctcgaacagagtcaccacctcttcggtagttgagaagaccattgtgacagaaaaaaagaacgtggacgttgatgaactttggcttgaaattatagcggaagcccggctggaatcggagaaagagcctgctcttgcctcgtacttctactcatcggtcatatctcacaagtctttggagcgtgctctggcatttcatctcagtaacaagttgagtaaccccactctccttagcacccagctctttggtctcattgtggacatcttcaacagtgatgtggctatacgacgcgccataagagaagatttgagagcagttagggtcaaggatcctgcatgctcctcgtactgtcactgtctcttgtacttcaaaggctttctcgcatgccaagcgtacagggtctcacactggctctggaacaatgatcggccgtctcttgcattcttaatgcaaagccgtgtgtctgaggtgtttcacgtggatattcaccctgctgccacaattggttccggcgtcctcttcgatcatgccacagggctggtcgtgggtgagactgccatcattggaagcaacgtctccattctgcacaacgttactctaggagggacaggcttgctcggtgaccggcacccgaagattggagacggtgttctcattggtgcaggagccattctgcttggtaacattgtgataggagagggcgctaagattggctctggatctcttgtgcttatcgacgtcccacctcatactacagctgtgggaaatcctgcacgcttaattggtggcaaacaaagtcccacaaagttgaaggacatccccagtgagacaatggatcacactatcaaaggctggtccgactatgtcatctga

SEQ ID NO: 6075 - protein, 296 aa, Physcomitrella patens subsp. patens
MELNGISSNRVTTSSVVEKTIVTEKKNVDVDELWLEIIAEARLESEKEPALASYFYSSVISHKSLERALAFHLSNKLSNPTLLSTQLFGLIVDIFNSDVAIRRAIREDLRAVRVKDPACSSYCHCLLYFKGFLACQAYRVSHWLWNNDRPSLAFLMQSRVSEVFHVDIHPAATIGSGVLFDHATGLVVGETAIIGSNVSILHNVTLGGTGLLGDRHPKIGDGVLIGAGAILLGNIVIGEGAKIGSGSLVLIDVPPHTTAVGNPARLIGGKQSPTKLKDIPSETMDHTIKGWSDYVI

SEQ ID NO: 6076 - DNA, 792 bp, Physcomitrella patens subsp. patens
  CDS (1)..(792)
atgagaagggaagcacgctgggattctatcaaagagccagccctagccagttatttatattcgacaatattatcccacaggacactggagagagcgcttgctttccacctggggaacaagctctccagcagcacgctattgagcacacagctctttagccttctgaatgacacattcatggaggatgctgacattagacgcgctatccgcgacgatatagaagctgtgaaggagcgcgaccccgcttgtgtatcttacactcattgtttgctaaatttcaaaggctttttgtcatgtcaagctcatagagtagctcacagactttggaatcaaggccggcactcgctggccctcgctatacagagtagagtttctgaggtttttcaagttgacatacatcctgcagccagaattggctccggcgtacttttcgaccatgccacaggggtggtagttggagaaacagcagttataggaaataatgtttcaattttgcaccacgtcactctcggggggaccggtgctgtaggaggtgatcgtcatccgaaaatcggtgatggcgtcctcattggagctggggctaccatactcggcaatatcacaattggagctggcgcaaagattggggcaggttccattgtgctcattgatgtgcccccacatactacagccgtaggaaatcctgctcgcctaattgggggcaaacaaaagcctaccaagttgaaggaaattcccggtgaaactatggatcataccttcttcatgaaggactggtctgattatgtcatttag

SEQ ID NO: 6077 - protein, 263 aa, Physcomitrella patens subsp. patens
MRREARWDSIKEPALASYLYSTILSHRTLERALAFHLGNKLSSSTLLSTQLFSLLNDTFMEDADIRRAIRDDIEAVKERDPACVSYTHCLLNFKGFLSCQAHRVAHRLWNQGRHSLALAIQSRVSEVFQVDIHPAARIGSGVLFDHATGVVVGETAVIGNNVSILHHVTLGGTGAVGGDRHPKIGDGVLIGAGATILGNITIGAGAKIGAGSIVLIDVPPHTTAVGNPARLIGGKQKPTKLKEIPGETMDHTFFMKDWSDYVI

SEQ ID NO: 6078 - DNA, 1134 bp, Vitis vinifera
  CDS (1)..(1134)
atgaaacttcaggcgacatctggaaccttatctcttattcgatataacccacctcccttctcaccaccgcatcgttgtactacccctttctctctccccaaacaccgccttttcatggctgcttgtattgacacttccagagcagagactgcccaaacgaaccaactttcttgcgagccaaacgggtcccaactcgatgatcatatgtacaagttcgcaaatttctgccgacccagtttctctgatcttgtttcctgcgtgcccatgtcgcagaatggccgcaaaagaattcacacaagtacagtcgaagacgacctctgtggagctgatttgtggctgaaaattcaagacgaagctaggtctgatgttgagcaagaacccatcttgtcaagctactattacagcttaattctgtctcataaatcattggaaagtgccctagccaatcatctttcgatcaaattgagcaattcgagtcttcccagcagtacactctatgatctctttatgggtgtgttggttgaagatggggaaatcatgggagctgttaaagatgatttgagggcagtcaaggagagagacccagcttgcataagctacgtgcagtgtctggtgaatttcaaaggctttttggcatgccaagctcatagagtggcacataggctgtggtcgcaagggagaaaaattctggcattggtaattcagaatagagtgtctgaagcttttgccgtggatatccatcctggggctaagattggaagaggaatattgcttgatcacgcgactggagtcgtcataggggagacagcggtgattggagatgatgtgtcgattttgcataatgtgaccttaggagggactgggaaggtgtctggtgataggcatccgaagcttggcgatggggtgctgattggtgctgggacttgtattttgggaaatgttagaattggggatggggccaaggttggtgctggttcagtggtgttaaaggaagtgcctccgaaaactactgcagttgggaaccccgcaaggttggttggagggaaggagaatccaattaagcttgataagattcccagtttcaccatggaccagacttctcatatctctgagtggtctgattatgttatttaa

SEQ ID NO: 6079 - protein, 377 aa, Vitis vinifera
MKLQATSGTLSLIRYNPPPFSPPHRCTTPFSLPKHRLFMAACIDTSRAETAQTNQLSCEPNGSQLDDHMYKFANFCRPSFSDLVSCVPMSQNGRKRIHTSTVEDDLCGADLWLKIQDEARSDVEQEPILSSYYYSLILSHKSLESALANHLSIKLSNSSLPSSTLYDLFMGVLVEDGEIMGAVKDDLRAVKERDPACISYVQCLVNFKGFLACQAHRVAHRLWSQGRKILALVIQNRVSEAFAVDIHPGAKIGRGILLDHATGVVIGETAVIGDDVSILHNVTLGGTGKVSGDRHPKLGDGVLIGAGTCILGNVRIGDGAKVGAGSVVLKEVPPKTTAVGNPARLVGGKENPIKLDKIPSFTMDQTSHISEWSDYVI

SEQ ID NO: 6080 - DNA, 858 bp, Vitis vinifera
  CDS (1)..(858)
atggcagcttgtatccacaactcaaggactagcactgaagctgcagcttctccattttctcaagactctgcagatcatcaatgccagataagaaattctccatggtttgccaaaaaatgcaaacccagtttccaaaatcttttttcatgcgaccccattaagcgggttcgcctgcaagccgataaagaagatgatgttctgtggctgaagatcagagagcaagctctatgtgatatggagcaagagcccatcttgtccaagtactattgttcttcaatactacagcatgattcactagaaagcgccttgtcgaatcagctagcggctaaactcagcaatacagatcttcccagaagcaccctcatggaggttttcgcaggagtgttggcagaggatgaggaggtcaggagagccattagagctgacctcaaagctgtgaaagagcgagaccctgcctgcataagctatctgtggtcacaaggcaggattgtgatggctctgctgatccaaagccgggtatccgaggtcttcgcggtggatatccatcctggggccaagctgggacatggggtagtactggatcatgccaccggaattgtcatcggagagacggcggtgataggagacaatgtcacaatcttgcataatgtgacactgggtggcacagggaaggtgaatggggacaggcaccctaaggttggtgatggggttttgataggtgcagggactaaagtcttgggcagcattagggttggtgatagggctaagattggagcagggtcagtggttttaaaagaagtgcctacagagactactagtgttgggaacccagctagattggttggccttaaatcctaa

SEQ ID NO: 6081 - protein, 285 aa, Vitis vinifera
MAACIHNSRTSTEAAASPFSQDSADHQCQIRNSPWFAKKCKPSFQNLFSCDPIKRVRLQADKEDDVLWLKIREQALCDMEQEPILSKYYCSSILQHDSLESALSNQLAAKLSNTDLPRSTLMEVFAGVLAEDEEVRRAIRADLKAVKERDPACISYLWSQGRIVMALLIQSRVSEVFAVDIHPGAKLGHGVVLDHATGIVIGETAVIGDNVTILHNVTLGGTGKVNGDRHPKVGDGVLIGAGTKVLGSIRVGDRAKIGAGSVVLKEVPTETTSVGNPARLVGLKS

SEQ ID NO: 6082 - DNA, 921 bp, Vitis vinifera
  CDS (1)..(921)
atgaacggaaacctccatcgtttgtgtaatcaattcgacgtcctcaatatgcctgctggagaacttcggcacccttcgatactgccggccactgagtctggagaagacgaggcctggctttggactcagatcaaagccgaagcgcgtcgagacgctgagtcggaacccgcactcgcgagttacctctactcaacgattctctctcactcgtcgctcgaacgctctctctcatttcacctcggcaacaagctctgctcctcgactctgctctctactctcctctacgatctattcctggacaccttctccaaagatgcggagctgcgatccgccaccgtcgccgatctacgcgccaatcatatgcgtgacccggcctgcgtgtcgttctcgcattgtctcctgaattacaagggttttctggcttgccaggctcacagagtggctcacaggctctggactcagatgaggcggccgctcgcgctcgcgcttcagtcgcggattgctgacgtgttcgcggtggatatccacccggcggcgaggattgggaaggggattctgtttgatcacgccaccggagtggtggtcggagagacggcggtgatcggtaacaatgtatcgattctgcatcacgtgacgctcggcggcacgggcaaggccggcggtgaccgccatccaaaaatcggagatggagttctgattggagcgggagcaacgattctggggaacataaagatcggggagggagcgaagataggagcggggtcggtggtgctgatcgatgtgccggcgaggacaacggcggttgggaatccggcgaggctagtgggagggaaagagaagcctgcgaggcatgaggacgtgcctggtgaatcgatggatcatacatcgttcatttctgagtggtcagattatatcatctga

SEQ ID NO: 6083 - protein, 306 aa, Vitis vinifera
MNGNLHRLCNQFDVLNMPAGELRHPSILPATESGEDEAWLWTQIKAEARRDAESEPALASYLYSTILSHSSLERSLSFHLGNKLCSSTLLSTLLYDLFLDTFSKDAELRSATVADLRANHMRDPACVSFSHCLLNYKGFLACQAHRVAHRLWTQMRRPLALALQSRIADVFAVDIHPAARIGKGILFDHATGVVVGETAVIGNNVSILHHVTLGGTGKAGGDRHPKIGDGVLIGAGATILGNIKIGEGAKIGAGSVVLIDVPARTTAVGNPARLVGGKEKPARHEDVPGESMDHTSFISEWSDYII

SEQ ID NO: 6084 - DNA, 1005 bp, Populus trichocarpa
  CDS (1)..(1005)
atggctgcttgtattgacaccccacggacagacacctctcagctttctcgcaatcctaacaggtctcaatcagatgatcatgcctacaactacgcgaagctttgcaggcctcctcatgtttcttgcacacccttttccaggaatcacacaaaaaccatcaacaagcctgctgtcgtcgatgattttgatgaacagaatagcttatggcttaaaatgaaagaagaagcaaggtttgatgttgaacaagaaccaatactatctagctactacttcacctccattttgtgtcacaagtcattagaaagagcgttggctaatcttctatcaataaagctgagtaattccagtcttcctagcaccactctttttgacctttttgctggggtccttgaagagagccctgaaatcattagagctgtggaggaggatttgagagctgtaaaagagagagaccctgcatgcatgagctatgttcactctttcttgaatttcaaaggctttctagcatgccaagcacacagagtggcacacaagttatggtcacaaggtagacaaattctagctctattgatacaaaatagagcatctgaggttttcgcagttgatatccatcccggggcaaagattggtcaaggaatattatttgatcatgccacaggagtgattgttggagagaccgctgtgatcggaaacaatgtgtcaattttgcataatgtgaccttaggaggcacagggaaggcatgtggagataggcatccaaagattgggaatggggtgttgattggggctggaacttgtattctgggaaatattaagattggtgatggggccaagattggggctggctcagtggtgttacatgaagtgccacctagaactactgctgttgggaatccagctaggctgattggagggaaggcgaatccaattaagcttgataagattcctagtttcaccatggatcatacctcacatatttctgagtggtctgattacgttatttag

SEQ ID NO: 6085 - protein, 334 aa, Populus trichocarpa
MAACIDTPRTDTSQLSRNPNRSQSDDHAYNYAKLCRPPHVSCTPFSRNHTKTINKPAVVDDFDEQNSLWLKMKEEARFDVEQEPILSSYYFTSILCHKSLERALANLLSIKLSNSSLPSTTLFDLFAGVLEESPEIIRAVEEDLRAVKERDPACMSYVHSFLNFKGFLACQAHRVAHKLWSQGRQILALLIQNRASEVFAVDIHPGAKIGQGILFDHATGVIVGETAVIGNNVSILHNVTLGGTGKACGDRHPKIGNGVLIGAGTCILGNIKIGDGAKIGAGSVVLHEVPPRTTAVGNPARLIGGKANPIKLDKIPSFTMDHTSHISEWSDYVI

SEQ ID NO: 6086 - DNA, 882 bp, Populus trichocarpa
  CDS (1)..(882)
atgccaactggagagctccgctacccatcgccgccaccagtaaattccaccaccacggtggacgtcgaggcgggcttggtgtgggcccagataaaagcagaagcgaggcgggacgcggagtcagagccagctttggccagctacctgtattcgacaatcctgtctcactcgtctttggagaggtcgctcgcctttcatttagggaacaagctctgctcttcaacgcttctctcaactctcttgtacgatctcttcctcaacactttcacttcagacccttgtcttcgcgccgctgctgttgctgatcttcgcgcagcacgtgttcgtgaccctgcttgcgtttctttctctcactgcctcctcaattacaaaggtttcttggcttgccaggctcatcgagttgctcacaagttgtggactcagtctcgtaggccattggcgttggctttacactctcgagtctctgatgtttttgccgttgatatacacccagcagcaaagattggcaaaggtatactttttgatcatgcaactggggtggtcattggtgaaacagcagtggttgggaacaatgtctccattttgcatcatgttacgcttggaggaacagggaaagcctctggggatcgccaccccaaaatcggtgacggagtgttgattggagctggtgccaccattttggggaatgtaaagattggggaaggagcaaagatcggagcaggttcagtagtgctaattgatgtgccccctcgaaccactgcagttggaaatcctgcaaggttagtgggaggaaaggaaaaaccagctaagcatgaggaatgccctggagaatccatggatcatacttcatttatctctgactggtcagattatattatttga

SEQ ID NO: 6087 - protein, 293 aa, Populus trichocarpa
MPTGELRYPSPPPVNSTTTVDVEAGLVWAQIKAEARRDAESEPALASYLYSTILSHSSLERSLAFHLGNKLCSSTLLSTLLYDLFLNTFTSDPCLRAAAVADLRAARVRDPACVSFSHCLLNYKGFLACQAHRVAHKLWTQSRRPLALALHSRVSDVFAVDIHPAAKIGKGILFDHATGVVIGETAVVGNNVSILHHVTLGGTGKASGDRHPKIGDGVLIGAGATILGNVKIGEGAKIGAGSVVLIDVPPRTTAVGNPARLVGGKEKPAKHEECPGESMDHTSFISDWSDYII

SEQ ID NO: 6088 - DNA, 885 bp, Populus trichocarpa
  CDS (1)..(885)
atgccgccggaaggggagctccgatacccatcaccgccactaacagattccaccaccacaatagacgacgaggcgggctgggtgtgggcccagataaaagcggaagcgaggcgcgacgccgagtcagagccagctttggcaagctacctatattcgacaattctgtctcactcatcattagagaggtcgctctcctttcatttaggaaacaagctctgctcttcaacgcttctctcaactctcttgtacgatctcttcctcaacactttcacttcagaccctggtcttcgcgtcgctgctgttgctgaccttcgagccgcacgtgctcgtgaccctgcttgcgtttctttctctcactgcctcctcaattacaaaggtttcttggcctgccaggctcatcgagttgctcacaagttgtggaatcagtctcgtaggccactggcgttggctttacactctcgaatctctgatgtttttgccgttgatatacacccagcagccaagattggcaagggtatactttttgatcatgcaactggtgtggtgattggtgaaacagcagtgattggtaataatgtctccattttgcatcatgttacacttggaggaacagggaaagcctctggggatcgccaccccaagattggtgacggagtgttgattggagcaggtgccaccattttggggaatgtaaagattggggaaggagcaaagattggagcaggctcagtagtgctaattgatgtgccccctcgaaccactacagttggaaatcctgcaaggttagtgggagggaaggaaaaaccagctaagcttgaggaatgccctggagagtccatggatcaaacttcatttatctctgactggtcagattatattatttga

SEQ ID NO: 6089 - protein, 294 aa, Populus trichocarpa
MPPEGELRYPSPPLTDSTTTIDDEAGWVWAQIKAEARRDAESEPALASYLYSTILSHSSLERSLSFHLGNKLCSSTLLSTLLYDLFLNTFTSDPGLRVAAVADLRAARARDPACVSFSHCLLNYKGFLACQAHRVAHKLWNQSRRPLALALHSRISDVFAVDIHPAAKIGKGILFDHATGVVIGETAVIGNNVSILHHVTLGGTGKASGDRHPKIGDGVLIGAGATILGNVKIGEGAKIGAGSVVLIDVPPRTTTVGNPARLVGGKEKPAKLEECPGESMDQTSFISDWSDYII

SEQ ID NO: 6090 - DNA, 822 bp, Yersinia enterocolitica subsp. enterocolitica 8081
  CDS (1)..(822): transl_table=11
atgtcgtcagaagagttagagctggtttggagtagcattaaatcagaagcgagagcactggccgagtgtgaacccatgctggcaagtttttttcatgcgacattattgaagcatgagaatttaggcagcgcattgagttatattctggcgaataaactagcaaaccctatcatgcctgctattgccatccgcgaagtggttgaagatgcctatcgtgctgatgcgcaaatgattgtgtctgctgcccgcgatattttggcggtgcggttgcgcgacccggcggttgataaatattccacgccattgctatatctgaaaggtttccatgctttacaggcctaccgtatcggccactggttgtgggcgcaggatcgtaaagcactggcaatttacctacaaaatcaagtttctgtcgcttttggtgtggatatccaccctgcggcaaccattggttgcggcatcatgctggatcacgcgactggcattgtgattggtgagaccgccgtggtcgagaatgatgtttctattctgcaatccgtcactttgggtggtaccggtaaaaccagtggtgaccgtcatccgaagatccgtgaaggtgtgatgattggcgcgggtgcaaaaattttgggaaatatcgaagtcggacgtggtgccaaaattggtgcggggtcagtggtattgcaggctgtacctccccatacgacagccgccggtgtgccagctcgcattgtcggtaaaccagagagtgataaaccctcattggatatggatcagcacttcaatggggtgagccatggatttgagtacggcgacggcatctaa

SEQ ID NO: 6091 - protein, 273 aa, Yersinia enterocolitica subsp. enterocolitica 8081
MSSEELELVWSSIKSEARALAECEPMLASFFHATLLKHENLGSALSYILANKLANPIMPAIAIREVVEDAYRADAQMIVSAARDILAVRLRDPAVDKYSTPLLYLKGFHALQAYRIGHWLWAQDRKALAIYLQNQVSVAFGVDIHPAATIGCGIMLDHATGIVIGETAVVENDVSILQSVTLGGTGKTSGDRHPKIREGVMIGAGAKILGNIEVGRGAKIGAGSVVLQAVPPHTTAAGVPARIVGKPESDKPSLDMDQHFNGVSHGFEYGDGI

SEQ ID NO: 6092 - DNA, 843 bp, Chlorobium phaeovibrioides DSM 265
  CDS (1)..(843): transl_table=11
atggatatagatgtagggaaggtgtgggatagaatagtgtcagaggctgcggttgagtgccgtcgcgatcctgacatcagcatgtttctggagcagcatatcatgcagtttgatgattttgcttcttcgctggcgatgcttcttgctgtgaagctgggctcgaagcattttccgcctcctgtcctgcaggggctgattgaggacttttatcgccagtgtccggacagagttgcctgggctgcgtatgacttggtggcaacccagcagcgcgatccggctgcggtctattattttgaaatcatgctgtttctgaaggggtaccaggcgcttcaggcctatcgtctggcgcactggttgtggaagaatggccgcaagaccatggcgtatttcatccagaacaggatgtcggaggtgtttgcggtcgacatccatccggcagcggtgataggcaaaggcattctgcttgatcatgccacgagccttgtgattggtgaaacggctgttgtggacgataatgtgtcgctgcttcatgaggtgactcttggcggtacgggcaaggagacgggcgaccgtcacccgaaggtgcacaagtcggtgctgataggggcaggggcgaagatacttggtaatgtggtgataggggagggtgcgaaggtcggtgcgggaagcgttgtgctggaggatgtgcctccgcattacacggttgccggtgtgcctgctgagattgttgggcggacggagagtgctgagccttcacttgatatgaaccagcgccttgttggcaggtacaaccaggcggatgaggatcagccggagaaggcagagcgtaccgcttcacggtaa

SEQ ID NO: 6093 - protein, 280 aa, Chlorobium phaeovibrioides DSM 265
MDIDVGKVWDRIVSEAAVECRRDPDISMFLEQHIMQFDDFASSLAMLLAVKLGSKHFPPPVLQGLIEDFYRQCPDRVAWAAYDLVATQQRDPAAVYYFEIMLFLKGYQALQAYRLAHWLWKNGRKTMAYFIQNRMSEVFAVDIHPAAVIGKGILLDHATSLVIGETAVVDDNVSLLHEVTLGGTGKETGDRHPKVHKSVLIGAGAKILGNVVIGEGAKVGAGSVVLEDVPPHYTVAGVPAEIVGRTESAEPSLDMNQRLVGRYNQADEDQPEKAERTASR

SEQ ID NO: 6094 - DNA, 780 bp, Aeromonas salmonicida subsp. salmonicida A449
  CDS (1)..(780): transl_table=11
atggatgatctggttgccagaacctggcaaaaaattgagcgagaagcggcatgcatggcgaccgaagagcccatgctggccagcttctttcactccacgattctcaatcacaagaacctgcgttcggctctcagcttccagctggccaacaagctcgacagcgccaccatgccagccatcgccctgcgtgaggtgatcgagctggccctgcgcagcgagcccgagttgctggcaatggtggcggcagatatctgcgccgtgcaggagcgcgacccggcggtcgatctcttctccaccccgctgctctacctcaagggtttccatgccctgcaggggtatagggttgccaactggctgtggcgccagggtcgtcgctcgctggcgctctacctgcaaaaccagatttcggtggtattcggggtcgacgtgcacccggctgcacggatcggcaagggcatcatgtttgaccatgccaccggtatagtggtcggtgaaaccgctgtgattgaagacgatgtctccatcctgcagagcgtgaccctgggagggaccggcaaggagagcggcgatcgccatcccaagatccgcgaaggggtcatgataggggcgggcgccaaggtgctcggcaatatagaggtggggatgggcgccaagataggtgccggcagcgtggtgatcaaccctgtgccgccgcacaccactgtcgccggcgtaccggccaagatagtgggccgcccggagtgcgacaagccttcgctggatatggatcagtgtctctga

SEQ ID NO: 6095 - protein, 259 aa, Aeromonas salmonicida subsp. salmonicida A449
MDDLVARTWQKIEREAACMATEEPMLASFFHSTILNHKNLRSALSFQLANKLDSATMPAIALREVIELALRSEPELLAMVAADICAVQERDPAVDLFSTPLLYLKGFHALQGYRVANWLWRQGRRSLALYLQNQISVVFGVDVHPAARIGKGIMFDHATGIVVGETAVIEDDVSILQSVTLGGTGKESGDRHPKIREGVMIGAGAKVLGNIEVGMGAKIGAGSVVINPVPPHTTVAGVPAKIVGRPECDKPSLDMDQCL

SEQ ID NO: 6096 - DNA, 894 bp, Pseudomonas stutzeri A1501
  CDS (1)..(894): transl_table=11
atgagcgcgacccgatacgagacgcgccggccgacggcctgttcagactgctacagttcaggcaatggccaacccgtcatcgaccctcaaggaactgccatgtcgaacctttccgtcagcgacctgtggagcgagctgcgcgcacaggcgcaacgtgccttggacaccgagccgaccctggccacgatcgtccgccagaccatcctcgatcagccggacttcggtggcgcgctcgcccaccgcatcggccatgccctggccgacagcatcgaacagagccacaccctgaccgatcgcttcgccgggctgcaccaccagctgcctgcgctggccgagacggcctgctgcgacctgcaggcgatcgtcagccgcgatcccgcattcgacagtgcactggaggtcttcctgttctccaaaggctttctggcgctgcaggcgtaccgcatcgggcatcagctgcacggtcgcggcgagcgcctgctggcgatgtacatccaggcacgctgcaacgaacgcctcggcatcgacatcaatccggccagccgtatcggcagcggcatcatgctcgaccatggcaccggaatcgtcatcggcgagacggccgtggtcggcgacgatgtatcgattctgcagggcgtgaccctgggcgggacgggcaaggaaggtggcgaccgtcatccgaaggttcgcagcggcgtgatgatcggcgcgggcgcgaagattctcggcaacatcgagattggcgagggggccaaggtgggtgccggcagcatcgtcctgcaccccgttgcgccgcataccaccgtggtcggcaacccagcccgccaggtcggcaaaccgcgccacgcacgaccggccctggacatggaccagtcgttcgacggcgacagctga

SEQ ID NO: 6097 - protein, 297 aa, Pseudomonas stutzeri A1501
MSATRYETRRPTACSDCYSSGNGQPVIDPQGTAMSNLSVSDLWSELRAQAQRALDTEPTLATIVRQTILDQPDFGGALAHRIGHALADSIEQSHTLTDRFAGLHHQLPALAETACCDLQAIVSRDPAFDSALEVFLFSKGFLALQAYRIGHQLHGRGERLLAMYIQARCNERLGIDINPASRIGSGIMLDHGTGIVIGETAVVGDDVSILQGVTLGGTGKEGGDRHPKVRSGVMIGAGAKILGNIEIGEGAKVGAGSIVLHPVAPHTTVVGNPARQVGKPRHARPALDMDQSFDGDS

SEQ ID NO: 6098 - DNA, 822 bp, Enterobacter sp. 638
  CDS (1)..(822): transl_table=11
atgccgtgtgaagaactggatatcgtctggaacaatattaaagccgaagcccgggctttagccgactgcgagcctatgctggccagtttttaccacgcgacgttactcaagcatgaagatctcggcagcgccctgagctatatgctcgcgaacaaactcgcttcttcaatcatgcccgccattgccattcgcgaagtcgttgaagaggcgtatgccgccgaccccgaaatgatcgcttctgcggcctgtgatattcaggccgtgcgaacgcgcgacccggcggtggataaatactccacgccgctgctgtacctcaaaggttttcacgccctgcaggcttaccgcatcggccactggctgtggaacgaaggccgtcgtgcgctggctattttcctgcaaaatcaggtttccgtgaccttccaggtggatattcacccggcagcgaaaatcggtcgcggcatcatgctcgaccacgccaccggcattgttgtcggtgagacggcggttatcgaagatgacgtgtccattctgcaatccgtgacccttggcggtacgggcaaaaccagtggcgatcgccatccaaagattcgcgaaggcgtgatgattggcgcgggcgcgaaaattctcggcaatattgaagtcggacgtggcgcgaagattggcgcaggttctgttgtgcttcaacccgttccaccgcacaccaccgccgcaggcgtgccagcgcgaatcgtgggcaaacccgagagtgataaaccggcgatggatatggatcagcatttcaacggcattcaccataccttcgagtatggtgacggtatctag

SEQ ID NO: 6099 - protein, 273 aa, Enterobacter sp. 638
MPCEELDIVWNNIKAEARALADCEPMLASFYHATLLKHEDLGSALSYMLANKLASSIMPAIAIREVVEEAYAADPEMIASAACDIQAVRTRDPAVDKYSTPLLYLKGFHALQAYRIGHWLWNEGRRALAIFLQNQVSVTFQVDIHPAAKIGRGIMLDHATGIVVGETAVIEDDVSILQSVTLGGTGKTSGDRHPKIREGVMIGAGAKILGNIEVGRGAKIGAGSVVLQPVPPHTTAAGVPARIVGKPESDKPAMDMDQHFNGIHHTFEYGDGI

SEQ ID NO: 6100 - DNA, 828 bp, Sinorhizobium medicae WSM419
  CDS (1)..(828): transl_table=11
atggtcgccaaaacagaacttcgtcacacggaatcgctcgacgcgatcgacccgatctgggacagcctgcgtgaagaggcgcgtcttgccgccgagcgcgacccgatgcttgccgcctttctttattccacggtggtcaatcagcattccctggaagactgtgttatctaccggatctgcgagaggctggaccatcccgatctccaggcaagcctcctgcatcaaacctttgccgaaatgctggacgactggcccgaatggggcgccatcctgcgcgtcgatatccaggcggtctacgatcgcgatcccgcctgcacgcgcttcgtggagcccgtgctctatttcaagggcttccatgccatacagacgcaccgtctggcgcactggctgtggaatcgtggtcggcgagactttgcgctctatctccagagccgctcctccagcgtcttccagaccgacatcaatccggccgcccgcattgggcgcggcatcttcctcgaccatgcgacgggcctcgtcgtcggcgagaccgcaatcatcggcgacaatgtttcgatcttgcacggcgtgacgcttggcggcaccggcaaggaaggcagcgaccgccatccgaagatcggcaacggcgtgctgatcggtgccggagccaagattctcggcaatatccatatcggccattgctcgcgcgtggctgccggctcagtcgtgctgaaagccgttcctccgaaatcaacggttgccggggtgccggcgaaggtcgtcggcgaggctggctgttccgagccgtcgcgtcagatggaccagatcctggcgtcgttcgatatctga

SEQ ID NO: 6101 - protein, 275 aa, Sinorhizobium medicae WSM419
MVAKTELRHTESLDAIDPIWDSLREEARLAAERDPMLAAFLYSTVVNQHSLEDCVIYRICERLDHPDLQASLLHQTFAEMLDDWPEWGAILRVDIQAVYDRDPACTRFVEPVLYFKGFHAIQTHRLAHWLWNRGRRDFALYLQSRSSSVFQTDINPAARIGRGIFLDHATGLVVGETAIIGDNVSILHGVTLGGTGKEGSDRHPKIGNGVLIGAGAKILGNIHIGHCSRVAAGSVVLKAVPPKSTVAGVPAKVVGEAGCSEPSRQMDQILASFDI

SEQ ID NO: 6102 - DNA, 819 bp, Marinomonas sp. MWYL1
  CDS (1)..(819): transl_table=11
atgcatcatgccgtgacttctgacaatctatggccatctttacaagcggaagcaaaaaagcttgcacaagatgagcccattttagccagctatttcaataccactatcttacgccatgaatcattgtgttctgctttaagttttttactcgccagtaagctagacagcatatcaattcccgctatggtattacgagaagtattcgaagaagccatggcagatactcactctggcattgtcagatgcatcgagcaagatattttagcaataaaagaaagggatgctgcttgcgatacatttactacgccactgctgttttttaaaggcttccatgccttacaaacgtatcgcgtggcaaattggctctggaaaaataatcgcaagagcttagccctatatttacaaggacaaatgtcgatggtatttagtgtcgacatccatccagcagcaacaataggctgtggagtcatgctagaccacgccacaggccttgtggttggtgaaacctgtgttattgaagacaacgtatctattttgcaatcagtcactctaggcggcacaggtaaagagcacggcgatcgtcatcctaaaatacgttcaggtgtcttgattggcgccggtgctaaaattcttggcaatattgaaatcggcgagggtgcgaaaattggtgcgggtagcgtagtattagaacccgttgaacaccacaccactgtcgcaggcgttcctgccaaagtggtaggtcgtaatctgggtgaagagccatccagagcaatggatcataatatcaatcattgtgttcaggattgtgacgaggcgtaa

SEQ ID NO: 6103 - protein, 272 aa, Marinomonas sp. MWYL1
MHHAVTSDNLWPSLQAEAKKLAQDEPILASYFNTTILRHESLCSALSFLLASKLDSISIPAMVLREVFEEAMADTHSGIVRCIEQDILAIKERDAACDTFTTPLLFFKGFHALQTYRVANWLWKNNRKSLALYLQGQMSMVFSVDIHPAATIGCGVMLDHATGLVVGETCVIEDNVSILQSVTLGGTGKEHGDRHPKIRSGVLIGAGAKILGNIEIGEGAKIGAGSVVLEPVEHHTTVAGVPAKVVGRNLGEEPSRAMDHNINHCVQDCDEA

SEQ ID NO: 6104 - DNA, 798 bp, Actinobacillus succinogenes 130Z
  CDS (1)..(798): transl_table=11
atggcaattaaagtttggaaacaaatccggaaagaggcgcagtgtctggtgaataaagaacctatgctggcaagctttttccattcgaccattttaaagcataagcatttaggcggcgcactgagttatattctggcgaacaaactggcgacgacaaccatgcctgccatcacattacgcgaaattatcgaagacgcctatgcagccaaacccagcattatcgaaagtgccgcctgcgatattaccgcggtacgccagcgcgacccggcggtagatttatggtcgacgccgttgctgtacctgaaaggatttcacgcgttgcaaagttaccgaattacccactatttatggcaggaaaaccgtcgttctctggcgatttatctgcaaaatcagatttccgtagcttttgatgtggatattcacccggcggcgcgtatcggctgcggcattatgttcgaccacgccaccggtatcgtagtaggagaaaccgcagtcatcgaaaacgacgtttctatcctgcagggcgtgacgttgggcggtaccggtaaagaatgcggtgatcgtcatccgaaaatccgcgaaggcgtgatgatcggcgccggtgcgaagattctgggtaatatagaagtaggcaaatatgccaaaatcggcgctaattccgtggtgttacaaccggtgccagaacatgctacggcagccggcgtaccggcgcggattatcggcaaagatcacgattccaaaccggcgtttgaaatgaaccaatattttattgatgacgcggcgatgctgaatatttaa

SEQ ID NO: 6105 - protein, 265 aa, Actinobacillus succinogenes 130Z
MAIKVWKQIRKEAQCLVNKEPMLASFFHSTILKHKHLGGALSYILANKLATTTMPAITLREIIEDAYAAKPSIIESAACDITAVRQRDPAVDLWSTPLLYLKGFHALQSYRITHYLWQENRRSLAIYLQNQISVAFDVDIHPAARIGCGIMFDHATGIVVGETAVIENDVSILQGVTLGGTGKECGDRHPKIREGVMIGAGAKILGNIEVGKYAKIGANSVVLQPVPEHATAAGVPARIIGKDHDSKPAFEMNQYFIDDAAMLNI

SEQ ID NO: 6106 - DNA, 828 bp, Parvibaculum lavamentivorans DS-1
  CDS (1)..(828): transl_table=11
atgtcgaagccggtcgagaagaatcaggggctgtccgtgtgcgatcccgtgtgggagcgcgtgcgcgccgaggccgacgaaatggcactcggcgagccgatccttgccagcttcctctattccaccattctcaatcatcgcagtttcaacgatgcggtcgcgtatcacctggcgcagaagctcggcaatgccgaagtgcattcgatgcagcttcgcgagttgttcgacgaggcgctgacggaggcgcccgatatcggcgaggcgacgcgggcggatatcgtcgcctatttcgaccgtgacccggcctgccactcctatatccagccgctgctttatttcaaaggcttccacgcgctgcagggctaccgcgtggcgcactggctgtggagcaatggccgccgggcgatggcgctttatctgcagagccgcatttccgaacttttcgccgtggatattcatcccgccgcgaagctcgggcgcggcatcttcatcgaccatgcgaccggcatcgtgatcggcgagacggcggtggtggaagacgatgtgtcgatgctgcatggcgtgacgcttggcgggacgggcaaggaaaccggcgaccgccatccgaaggtgcggcgcggtgtactgatttccgtcggctcgaaggtgctcggcaatatcgaggtgggcgagttcagccgcatcggggcaggcagcgtggtgcttcacgaggtgccgccgcattgcacggctgtcggcgtgccggccaagatcgtcggctgcgcgggctgcgacaagccgagccattccatggatcagatgatccgggaagagggcgacggcatctaa

SEQ ID NO: 6107 - protein, 275 aa, Parvibaculum lavamentivorans DS-1
MSKPVEKNQGLSVCDPVWERVRAEADEMALGEPILASFLYSTILNHRSFNDAVAYHLAQKLGNAEVHSMQLRELFDEALTEAPDIGEATRADIVAYFDRDPACHSYIQPLLYFKGFHALQGYRVAHWLWSNGRRAMALYLQSRISELFAVDIHPAAKLGRGIFIDHATGIVIGETAVVEDDVSMLHGVTLGGTGKETGDRHPKVRRGVLISVGSKVLGNIEVGEFSRIGAGSVVLHEVPPHCTAVGVPAKIVGCAGCDKPSHSMDQMIREEGDGI

SEQ ID NO: 6108 - DNA, 897 bp, Xanthobacter autotrophicus Py2
  CDS (1)..(897): transl_table=11
atgccccaatctcccacgcctgcccccatgcccgcgcccgttgccgacgcgttcgctccgaagctcaccaaggcaggcacggaacgctggcacgacgtggtcgatccggtctgggcgcgcctgcgcaacgaggcggaggaagccgccgagcgagagccgctgctcgccgccttcctcatcggcgccgtgctgggccagccgagcttggaggcggtgattggcgaacgcatcgccgcccgcctcgaccatgcggacgttccggccagcgccatccgcgccgcctggcttgaggccgccgcccgcgacaagaccattccccaggccctgcgcgccgacatcatggcggtggtggaccgcgaccctgcagccacccgcacgcttgagccggtgctgtatttcaagggcttccacgccatccagacccaccgcctgtcccacttcctgtgggccagcggccagcgcgacttcgccctctatctccagagccgggcctcctccgtgttcgccgtggacatccacccgcaggtgcccatgggccggggcatcttcctcgaccacgccaccggcgtcgtcatcggcgccacggcggtgatcgaggacgacgtgtccatcctgcagggggtgacgctgggcggcaccggcaaggagaccggcgaccgccatcccaagatccgccggggcgtgctcatcggcgctggcgccaaggtgctcggcaacatcgaggtcggccgctgcgcccgcatcgccgccggctcggtggtgctgaagccggtgccgcgcaataccacggtggcgggcatcccggccaaggtagtgggcgaagccggctgcgccgaaccctcgcgctccatggaccagatgttcgaggacaacatctggtctggcgccgatatctga

SEQ ID NO: 6109 - protein, 298 aa, Xanthobacter autotrophicus Py2
MPQSPTPAPMPAPVADAFAPKLTKAGTERWHDVVDPVWARLRNEAEEAAEREPLLAAFLIGAVLGQPSLEAVIGERIAARLDHADVPASAIRAAWLEAAARDKTIPQALRADIMAVVDRDPAATRTLEPVLYFKGFHAIQTHRLSHFLWASGQRDFALYLQSRASSVFAVDIHPQVPMGRGIFLDHATGVVIGATAVIEDDVSILQGVTLGGTGKETGDRHPKIRRGVLIGAGAKVLGNIEVGRCARIAAGSVVLKPVPRNTTVAGIPAKVVGEAGCAEPSRSMDQMFEDNIWSGADI

SEQ ID NO: 6110 - DNA, 876 bp, Cronobacter sakazakii ATCC BAA-894
  CDS (1)..(876): transl_table=11
atgcgtgccgacaaactgttttgtcggccgctgtttgtttgtctggagaaagcaatgccgtgtgaagaactggatctggtgtggaagaatattaaagccgaagcccgtcagctggccgattgtgagccgatgctggccagtttttaccatgcgacattgcttaagcacgaaaatctgggcagcgcgttaagttacatgctggcgaacaaactggcgtcgccgattatgccggcgatcgccattcgtgaagtggtcgaagaggcgtaccgggcagacccggaaatgatcgcctccgccgcgtgtgacatccaggccgtccgcacccgcgatccggcggtggataaatactccacgccgctgctctatctcaaaggttttcatgccctgcaggcctaccgcatcggccactggctctggaaacaggggcgtcaggcgctggcgattttcctgcaaaatcaggtgtcggtctcttttcaggttgatattcatccggcggcgaccattggccgcgggatcatgctcgatcatgcgaccggcattgtgatcggcgaaaccgccgtggtggaagatgacgtttctattctgcagtcggttacgctgggcggtaccggtaaaaccagcggcgatcgccacccgaaaatccgcgaaggcgtgatgattggcgcgggcgcgaaaattcttggcaatatcgaggtcgggcgcggcgcgaaaatcggcgcgggctcggtggtgcttcagccggtgccgccgcacaccacggcggcgggcgtcccggcgcgtattgtcggtaagcctgagagcgataaaccgtcgatggatatggatcagcatttcaacggcatcaaccacgggtttgagtacggcgatggcatctga

SEQ ID NO: 6111 - protein, 291 aa, Cronobacter sakazakii ATCC BAA-894
MRADKLFCRPLFVCLEKAMPCEELDLVWKNIKAEARQLADCEPMLASFYHATLLKHENLGSALSYMLANKLASPIMPAIAIREVVEEAYRADPEMIASAACDIQAVRTRDPAVDKYSTPLLYLKGFHALQAYRIGHWLWKQGRQALAIFLQNQVSVSFQVDIHPAATIGRGIMLDHATGIVIGETAVVEDDVSILQSVTLGGTGKTSGDRHPKIREGVMIGAGAKILGNIEVGRGAKIGAGSVVLQPVPPHTTAAGVPARIVGKPESDKPSMDMDQHFNGINHGFEYGDGI

SEQ ID NO: 6112 - DNA, 822 bp, Citrobacter koseri ATCC BAA-895
  CDS (1)..(822): transl_table=11
atgtcatgtgaagaactggatatcgtctggaacaatattaaagccgaagcccgggctctggcggactgtgagccgatgctggccagtttctaccacgcgacgctactcaagcatgaaaacctgggcagtgcgctgagctatatgctggcgaacaaactcgcatctccgattatgcctgccatcgccatccgtgaagtggtggaagaggcctacgccgccgacccggaaatgatcgcctctgctgcctgtgatattcaggcggtacgcacccgcgacccggcggtagacaaatactcgacgccgcttctgtatctgaaaggcttccatgctctccaggcctaccgtatcggccactggttatggaatgaaggccgccgcgcgctggcgatattcctgcaaaatcaggtttctgtcaccttccaggtcgatattcacccggcggcgaaaattggacgcggcattatgctcgatcacgcgacggggattgtggtcggtgaaacggcggtaatcgaaaatgatgtctcgatcctgcaatcggtcacgcttggcgggaccgggaaaaccagcggcgatcgtcatcccaaaattcgtgaaggcgtgatgattggcgccggggcgaagatccttggcaatatcgaagtggggcgcggcgcgaagattggcgcgggctccgtggtcttgcagcctgtaccgccacacaccaccgcagcgggcgttccggcgcggattgtcggtaagcccgacagcgataagccgtcaatggatatggatcagcattttaacgggattcaccatacgttcgaatacggcgacggcatctga

SEQ ID NO: 6113 - protein, 273 aa, Citrobacter koseri ATCC BAA-895
MSCEELDIVWNNIKAEARALADCEPMLASFYHATLLKHENLGSALSYMLANKLASPIMPAIAIREVVEEAYAADPEMIASAACDIQAVRTRDPAVDKYSTPLLYLKGFHALQAYRIGHWLWNEGRRALAIFLQNQVSVTFQVDIHPAAKIGRGIMLDHATGIVVGETAVIENDVSILQSVTLGGTGKTSGDRHPKIREGVMIGAGAKILGNIEVGRGAKIGAGSVVLQPVPPHTTAAGVPARIVGKPDSDKPSMDMDQHFNGIHHTFEYGDGI

SEQ ID NO: 6114 - DNA, 822 bp, Escherichia coli E24377A
  CDS (1)..(822): transl_table=11
atgtcgtgtgaagaactggaaattgtctggaacaatattaaagccgaagccagaacgctggcggactgtgagccaatgctggccagtttttaccacgcgacgctactcaagcacgaaaaccttggtagtgcactgagctacatgctggcgaacaagctgtcatcgccaattatgcctgctattgctatccgtgaagtggtggaagaagcctacgccgctgacccggaaatgatcgcctctgcggcctgtgatattcaggcggtgcgtacccgcgacccggcagtcgataaatactcaaccccgttgttatacctgaagggttttcatgccttgcaggcctatcgcatcggtcactggttgtggaatcaggggcgtcgcgcattggcaatctttctgcaaaaccaggtttctgtgacgttccaggtcgatattcacccggcagcaaaaattggccgtggcattatgctcgaccacgccacgggcatcgttgtgggtgaaacggcggtaattgaaaacgacgtatcgattctgcaatctgtgacgcttggcggtacgggtaaatctggtggtgaccgtcacccgaaaattcgtgaaggtgtgatgattggcgcgggcgcgaaaatcctcggcaatattgaagttggtcgcggcgcgaagattggcgcaggttccgtggtgctgcaaccggtgccgccgcatacaaccgccgctggcgttccggctcgtattgtcggtaaaccagacagcgataagccatcaatggatatggaccagcatttcaacggtattaaccatacatttgagtatggggatgggatctga

SEQ ID NO: 6115 - protein, 273 aa, Escherichia coli E24377A
MSCEELEIVWNNIKAEARTLADCEPMLASFYHATLLKHENLGSALSYMLANKLSSPIMPAIAIREVVEEAYAADPEMIASAACDIQAVRTRDPAVDKYSTPLLYLKGFHALQAYRIGHWLWNQGRRALAIFLQNQVSVTFQVDIHPAAKIGRGIMLDHATGIVVGETAVIENDVSILQSVTLGGTGKSGGDRHPKIREGVMIGAGAKILGNIEVGRGAKIGAGSVVLQPVPPHTTAAGVPARIVGKPDSDKPSMDMDQHFNGINHTFEYGDGI

SEQ ID NO: 6116 - DNA, 792 bp, Shewanella sediminis HAW-EB3
  CDS (1)..(792): transl_table=11
atgcgttatgaagtttgggagcagctcagggtagaggcagaggctctggttaaacaagaacctctactggccagtcatgtttatacttcgatactcaaccatgagtgtctgggctctgcattaagctttgttgttgccaataaactctccgatggtgtggtgtcgccttttaccttccgcgaactcttcgataaagcctttattcattgtgacgagatgctgacgaacgtggcgaccgatattaaggcggtaaaagatcgtgatcctgcggtgagcagttatctgaccgtgatgctcaacctaaaaggctttcaggcgatacaggttcaccgtttagcgcactgcctgtggcaacaggacaggagagagttagctcaatttattcagagccgaaactctgaggtgttcggggtggatattcatccggcctgtaagataggcacgggtatcatgtttgaccatgcgaccggtatcgtcatcggcgaaacggccgtgatagaagataatgtttccttgctgcagtcggtcacacttggtggtacgggtaatcagcagggcgatcgtcaccccaagatcaggcaaggtgtcatgattggcgccggggctaaggtgttgggcaatatcgaagtgggtcaaggtgcgaaagtgggggctggctcggtggtattaaccgatgtagctccccatacgacggttgttggagtaccggcaaaggctgtcggtacaccggtatctgactgcccggccgagacgatggagcagaacttcttcgactcaagcgccatagcttaa

SEQ ID NO: 6117 - protein, 263 aa, Shewanella sediminis HAW-EB3
MRYEVWEQLRVEAEALVKQEPLLASHVYTSILNHECLGSALSFVVANKLSDGVVSPFTFRELFDKAFIHCDEMLTNVATDIKAVKDRDPAVSSYLTVMLNLKGFQAIQVHRLAHCLWQQDRRELAQFIQSRNSEVFGVDIHPACKIGTGIMFDHATGIVIGETAVIEDNVSLLQSVTLGGTGNQQGDRHPKIRQGVMIGAGAKVLGNIEVGQGAKVGAGSVVLTDVAPHTTVVGVPAKAVGTPVSDCPAETMEQNFFDSSAIA

SEQ ID NO: 6118 - DNA, 822 bp, Serratia proteamaculans 568
  CDS (1)..(822): transl_table=11
atgtcgtcagaagagttagagcaggtctggaatagcatcaaatcagaggcgagagagctggctgagtgtgaaccgatgctggctagcttttatcatgcgacgttgctcaagcacgacaacctgggtggtgcgctcagctatattctggcaaacaagttggccaacccgattatgcccgctattgcggtgcgtgaagtggtggaagacgcttacctggccgatcagcaaatgatcgtttcggcggctcgcgacatcctggcggtgcgcttgcgtgacccggcagtagacaagtactcgacgccgctgttgtacctgaaaggcttccacgcgctgcaggcataccgtatcggccactggctgtggttgcaggggcgacaggcgctggcgatttatctgcaaaaccagatttcggtcgcttttggcgtggatatccatccggctgcgaccattggctgcggcatcatgctcgaccacgctaccggcattgtgatcggtgaaaccgcggtggtagaaaataatgtctctattctgcaatcggtcacccttggtggtaccgggaagaccagcggcgatcgccacccgaagatccgcgaaggcgtaatgattggcgccggggctaaaattctcggcaatatcgaagtgggtaaaggcgcgaaaatcggtgccggttcggtggtgctgcaatcggtgccaccgcatactacggctgccggtgtgccggcgcgcattgtcggtcgaccggaaagcgatacgccatcgatggatatggatcagtacttcaacggtaccaaccacggttttgagtacggcgacggtatttaa

SEQ ID NO: 6119 - protein, 273 aa, Serratia proteamaculans 568
MSSEELEQVWNSIKSEARELAECEPMLASFYHATLLKHDNLGGALSYILANKLANPIMPAIAVREVVEDAYLADQQMIVSAARDILAVRLRDPAVDKYSTPLLYLKGFHALQAYRIGHWLWLQGRQALAIYLQNQISVAFGVDIHPAATIGCGIMLDHATGIVIGETAVVENNVSILQSVTLGGTGKTSGDRHPKIREGVMIGAGAKILGNIEVGKGAKIGAGSVVLQSVPPHTTAAGVPARIVGRPESDTPSMDMDQYFNGTNHGFEYGDGI

SEQ ID NO: 6120 - DNA, 894 bp, Azorhizobium caulinodans ORS 571
  CDS (1)..(894): transl_table=11
gtgctagaaggaaggtcactgaccttcagggaggcagcgatgctgcagcatggtttccaggcgaccaagcccgcgaacgaccggcgtcccgaactcgtggacccggtgtgggcacgcctctgtcgtgaggcagaggaagcggccgcgcgcgagcccatgctggcgggcttcctcaagggtgccatcgtgagccatgagacgctggaaggcgtgatcgccgagcgcatcgccgcccggctcgatcacccggacctgcccggctatgccatccgcggcgcctaccgcgaggcggtggcggcggacccgtccctctcgcaggccttgcgcgccgacatcatggcggtggtggaccgcgacccggccaccacgcgggtgctggagccggtgctctatttcaagggcttccacgccctccagacccaccgcctcgcccactggctgtgggagaacggccagcgcgacgccgcgctctatctccagagccgtgtctccgccgtgctgcaggtggacatccatcccgccgtgcccatgggccggggcatcttcctcgaccacgccaccgggctggtggtgggcgccaccgccgtcatcgaggatgacgtctccatccttcagggcgtgacgctgggcggcaccggcaaggagcggggcgatcgccatcccaagatccggcgcggcgtgctcatcggcgccggcgccaaggtgctcggcaatatcgaggtgggccattgcgcccgcatcgccgccggctccgtcgttctgcatccggtgccgccggcgaccaccgttgcgggcgtgccggccaaggtggtgggcagcgccggctgcgccgagccgagccgtgccatggaccagatgttcgatgtcgagatttacgccggcgcggacatctga

SEQ ID NO: 6121 - protein, 297 aa, Azorhizobium caulinodans ORS 571
MLEGRSLTFREAAMLQHGFQATKPANDRRPELVDPVWARLCREAEEAAAREPMLAGFLKGAIVSHETLEGVIAERIAARLDHPDLPGYAIRGAYREAVAADPSLSQALRADIMAVVDRDPATTRVLEPVLYFKGFHALQTHRLAHWLWENGQRDAALYLQSRVSAVLQVDIHPAVPMGRGIFLDHATGLVVGATAVIEDDVSILQGVTLGGTGKERGDRHPKIRRGVLIGAGAKVLGNIEVGHCARIAAGSVVLHPVPPATTVAGVPAKVVGSAGCAEPSRAMDQMFDVEIYAGADI

SEQ ID NO: 6122 - DNA, 810 bp, Dinoroseobacter shibae DFL 12
  CDS (1)..(810): transl_table=11
atgggcaaagcgtcgaaatcgctgaaagcagttgatccggtctggcaccggatcggtgaagaagcccgtctggccgtggcggacgagcaactgctgggagggcttgtccattcaagcatcttgcatcatgcaacgtttgaggcggctctggcctacaggattacactgaagctttcgtcgccggagatgtctgcccaaacgctgcgccaactcgtcgatgacgcgtttgcatcggatgcaacacttggggttgcggcgcgtgctgacctggttgctgtttacgagcgggatccggcgtgccatcgcttgatgcaacctttgttgtacttcaagggtttccaggcggttcaagcttatcgcgtggggcattggctttacagccaagggcggcatgaccttgcgtatttcgtgcagatgcgggtcagcgaagtgttcggtgtcgatatccatcccgctgcgaagatcgggcaggggatcatgatcgaccatgcccattcgatcgtgataggggagacggccgtggtgggagacaatgtctccatgctgcattccgtgaccctgggcgggaccggcaaggaagatgatgatcgtcacccgaaaatcggcgatggcgttctgatcggggccggcgcgcatgtgttgggcaatatcacgatcggtcactgttcccgcatcgcggcgggctctgtggttctgagtgacgtgccgccctgcaagactgttgcgggcgttccggccaagatcgttggggaggctggttgcgcgcagccctcggtcaccatggatcagcttctgtcagaatccatctga

SEQ ID NO: 6123 - protein, 269 aa, Dinoroseobacter shibae DFL 12
MGKASKSLKAVDPVWHRIGEEARLAVADEQLLGGLVHSSILHHATFEAALAYRITLKLSSPEMSAQTLRQLVDDAFASDATLGVAARADLVAVYERDPACHRLMQPLLYFKGFQAVQAYRVGHWLYSQGRHDLAYFVQMRVSEVFGVDIHPAAKIGQGIMIDHAHSIVIGETAVVGDNVSMLHSVTLGGTGKEDDDRHPKIGDGVLIGAGAHVLGNITIGHCSRIAAGSVVLSDVPPCKTVAGVPAKIVGEAGCAQPSVTMDQLLSESI

SEQ ID NO: 6124 - DNA, 822 bp, Salmonella enterica subsp. arizonae serovar 62:z4,z23:--
  CDS (1)..(822): transl_table=11
atgccgtgtgaagaactggaaatcgtctggaagaatattaaagctgaagcccgcgctttagctgactgtgagcctatgttggccagtttttatcacgccacgctactcaagcatgaaaatctgggcagtgcgctgagctatatgctggcaaataaactggcttcgcccatcatgcccgctatcgctatccgtgaagtggttgaagaagcctatgccgccgacccggaaatgatcgcgtcggcagcctgcgatattcaggcagtgcgcactcgcgatccggcggtggataaatactccacgccgctgttatatctgaaaggctttcatgcgctacaggcctatcgcatcggccactggctgtggaataaaggtcgccgcgcgctggctatcttcctgcaaaatcagatttcggtctcgtttcaggtggatattcacccggcagcgaaaattggccgcgggattatgctcgaccatgccaccggtattgtggtgggggagacggcggttattgaggatgatgtgtcgatcctgcaatccgtcaccctgggcggtaccgggaaaaccagcggcgatcgccatcctaaaatccgcgaaggcgtgatgattggcgccggcgcgaaaattctcggcaatatcgaggtggggcgcggcgcgaaaattggcgcaggttccgttgttttacagcctgtcccgccgcacactaccgccgcaggcgttccagcgcgtattgtcggcaagccgggcagcgataagccgtcaatggatatggaccagcatttcaacgggatacaccatacgtttgagtatggcgacggcatctga

SEQ ID NO: 6125 - protein, 273 aa, Salmonella enterica subsp. arizonae serovar 62:z4,z23:--
MPCEELEIVWKNIKAEARALADCEPMLASFYHATLLKHENLGSALSYMLANKLASPIMPAIAIREVVEEAYAADPEMIASAACDIQAVRTRDPAVDKYSTPLLYLKGFHALQAYRIGHWLWNKGRRALAIFLQNQISVSFQVDIHPAAKIGRGIMLDHATGIVVGETAVIEDDVSILQSVTLGGTGKTSGDRHPKIREGVMIGAGAKILGNIEVGRGAKIGAGSVVLQPVPPHTTAAGVPARIVGKPGSDKPSMDMDQHFNGIHHTFEYGDGI

SEQ ID NO: 6126 - DNA, 852 bp, Gluconacetobacter diazotrophicus PAl 5
  CDS (1)..(852): transl_table=11
atgcccgatacgtccctgatctcgctgaccgaggcccgcaaggccgatcctgcgctgctggccgccgattatcgccggctgtgggacgaaattgcccgtgggtgcgagggctgcggcgacccgctggtgcgcgggctgctggcgaccggcattcgcaaccatgccagtttcgccaacgggctggcggcgctgatcgggcgcaagctgggcgaccggtcggtggccgacgacgcgctgtccaacctggtgaccgaggtcttcgagtccgatcccgaaatcgtcgccgccgccgccgccgacctggtggcgatccgcgagcgcgatccggcgacggcgaactacgcgacgccgtttctgttcttcaagggctatcacgcggtgcagagccaccgcgtggcgcactggctgtggaacaacgggcggcgctacctggcgctgcacctgcaaagccgggcatcggaactgttcgccgtcgatatccatccggcggcgcggctgggtcggcgcatcctgttcgatcacggcactggaatcgtgatcggcgagacctcggtgctggaagacgacgtgtcgctgctgcagggcgtgaccctgggcggtaccggcaagaatgtcggcgaccggcaccccaaggtgcggcgcggcgtgctgatcggcgccggggccaagatcctgggcaatatcgagctgggcgagggggcgaaggtcggggcgggctcgatcgtgctggaatcggttgcgccgtttaccaccgtcgtcggcaaccccgcgcggccggtcggcacgcgccattcctcgctgcccgccttcaccatggaccagacgctcccccccatagactacatgatctga

SEQ ID NO: 6127 - protein, 283 aa, Gluconacetobacter diazotrophicus PAl 5
MPDTSLISLTEARKADPALLAADYRRLWDEIARGCEGCGDPLVRGLLATGIRNHASFANGLAALIGRKLGDRSVADDALSNLVTEVFESDPEIVAAAAADLVAIRERDPATANYATPFLFFKGYHAVQSHRVAHWLWNNGRRYLALHLQSRASELFAVDIHPAARLGRRILFDHGTGIVIGETSVLEDDVSLLQGVTLGGTGKNVGDRHPKVRRGVLIGAGAKILGNIELGEGAKVGAGSIVLESVAPFTTVVGNPARPVGTRHSSLPAFTMDQTLPPIDYMI

SEQ ID NO: 6128 - DNA, 876 bp, Gluconacetobacter diazotrophicus PAl 5
  CDS (1)..(876): transl_table=11
atgccaggacacgtcacgagtttacgcgcctatctcgaccagggccgcgcggtgccgctgaccgcgcgggtcaggcagcacgcgccgtcctcgacggccgcgctgtggcaggccatgcgggcggaggtgcgtggatgtcgcgacgtggtcctgaaggatcttctgcgcccgtccattctcgaccagccggatttcgcgacggcactggctttcctgctgtcacggaagctcgacagcgacctgctccgcaaggccacccttttcgggctggtccgcgatttccagcgggcgcggccccagtccgtcgatgcggcggcggccgacctgcatgccatctgcgaccgggaccctgccgcgacggattccgtgacgccgttcctgttcttcaagggattccatgccatccagtgccaccgcgtggcgcactggctgtggcaggaaaaccgccggacgctcgcgcattatatccagagccgggcttccgaactgttcgcggtggacattcatcccgcggcgcgcctggggcagcggattctgttcgatcacggcacgggcatcgtcgtcggggaaaccgccgtgatcgaggatgacgtcgccctgctgcagaacgtgaccctgggcggcaccggcaaggaagccggcgaccggcatccgaaagtccggcgtggggccctgatcggtaccggcgccaaggtcctgggcaatatcgagatcggcgaaggggcgaaggtcggggcgggtgccatcgtactgcgccctgtcgcccccttcaccacggtcgtgggcaatccggcgcgtccggtgggcgagaggcatgagggcctgccgtcgctgaccatggaccagagcctgccgccggtggattacgtgatctga

SEQ ID NO: 6129 - protein, 291 aa, Gluconacetobacter diazotrophicus PAl 5
MPGHVTSLRAYLDQGRAVPLTARVRQHAPSSTAALWQAMRAEVRGCRDVVLKDLLRPSILDQPDFATALAFLLSRKLDSDLLRKATLFGLVRDFQRARPQSVDAAAADLHAICDRDPAATDSVTPFLFFKGFHAIQCHRVAHWLWQENRRTLAHYIQSRASELFAVDIHPAARLGQRILFDHGTGIVVGETAVIEDDVALLQNVTLGGTGKEAGDRHPKVRRGALIGTGAKVLGNIEIGEGAKVGAGAIVLRPVAPFTTVVGNPARPVGERHEGLPSLTMDQSLPPVDYVI

SEQ ID NO: 6130 - DNA, 846 bp, Methylobacterium extorquens PA1
  CDS (1)..(846): transl_table=11
gtgaccgcagccctggcgatcgtcccgcccctgcgggcgacgagccgcagcatggcggagggggatgtctgggcggcgatgcggagcgaagccgaggcggcgctgatcgaggagccgctctatgcgggcctgatccaggcgacggtgctcgaccagcggagcctgtcggaggctctggcctaccgcctcgcccaccggctcggcgacggcgacctgtcgcggctcaccatgcgcgatctctgcttctccgccttcgaggccgacccgcatgcggggctgcacgccgtgcgcgatctcatcgccatccgcgagcgcgacccgacctgccggcgctatctcgatccgttcctgttctacaagggtttcgccgcgctcgaaggctaccgggtggcgcactggctctggcatcaggggcgggcgacgctcgccctgcacgtgcagagccgcatctctgaggtgttcggctgcgacattcacccggcggcgcggatcggctccggggttttcatcgatcacgccaccggcgtcgtcatcggcgagaccacggtcgtggccgacgacgtctcgatcctccagtcggtgacgctcggcggcaacggcaaggagagtggcgaccggcatccgaagattgcccgcggggtgctgctcagcgtcggcgccaaggtgctcggcaacatccgggtcggcgaaggcgccaaagtcgccgccgccgcggtggtgctgcacgaggtgcccgcccataccaccgtcgcgggcgtgccggcgcgggtcgtctcgcgcctgcggagcgacgaggagcccgcccagaccatggatcagtccttcggtttcggcgacgggatctga

SEQ ID NO: 6131 - protein, 281 aa, Methylobacterium extorquens PA1
MTAALAIVPPLRATSRSMAEGDVWAAMRSEAEAALIEEPLYAGLIQATVLDQRSLSEALAYRLAHRLGDGDLSRLTMRDLCFSAFEADPHAGLHAVRDLIAIRERDPTCRRYLDPFLFYKGFAALEGYRVAHWLWHQGRATLALHVQSRISEVFGCDIHPAARIGSGVFIDHATGVVIGETTVVADDVSILQSVTLGGNGKESGDRHPKIARGVLLSVGAKVLGNIRVGEGAKVAAAAVVLHEVPAHTTVAGVPARVVSRLRSDEEPAQTMDQSFGFGDGI

SEQ ID NO: 6132 - DNA, 867 bp, Caulobacter sp. K31
  CDS (1)..(867): transl_table=11
atgctctatggaccgcgaggcgagagggagatcccggtggccaagcatctcgaagtcgtgacgcacgacgccacgccccccgtctgggcggcgctgcgcaaccaggccgaacacgccgccaaggccgagccggccctggcctcgttgctcaacgctgtgatcctcagccacgacaacctggccgacgccctgaccttccaactggcgcgcaagctgggcgaccaggagatgcgggccatgaccgcccgcgagttcgcggccgaggccttcgacagcgatccgtcgctggtggccgccgccgaggccgacctgatggcggtgttcgagcgcgacccggccaccaagggctacgtccagccgttcctgttcttcaagggtttcctggccctgcagacccatcgcgtgtcgcactggctgtggagccagggccgcgagaccctggccttctacctgcaaagccgagccagcgaggtcttccaggtcgacatcaatccggccgcccgcatcggccagggcgtgtttatcgaccatggcaccggcatcgtcatcggcgagaccgcggtggtcggcgacgacgtctcgatgctgcacggcgtgaccctgggcggcaccggcgccgagcgcggcgaccgccaccccaagatcggcaagggcgtgctgctgggcgccggcgccaaggtgctgggcaatatcatgatcggcgactacgccaagatcgcctcgggctcggtggtgctcaagcccgtgccgccgcactgcacggccgccggcgtccccgcccggatcgtcaactgcccgacctgcgacgagccggcccggacgatggaccatacgctggccgacgtggtctacgactacgtgatctag

SEQ ID NO: 6133 - protein, 288 aa, Caulobacter sp. K31
MLYGPRGEREIPVAKHLEVVTHDATPPVWAALRNQAEHAAKAEPALASLLNAVILSHDNLADALTFQLARKLGDQEMRAMTAREFAAEAFDSDPSLVAAAEADLMAVFERDPATKGYVQPFLFFKGFLALQTHRVSHWLWSQGRETLAFYLQSRASEVFQVDINPAARIGQGVFIDHGTGIVIGETAVVGDDVSMLHGVTLGGTGAERGDRHPKIGKGVLLGAGAKVLGNIMIGDYAKIASGSVVLKPVPPHCTAAGVPARIVNCPTCDEPARTMDHTLADVVYDYVI

SEQ ID NO: 6134 - DNA, 825 bp, Yersinia pseudotuberculosis YPIII
  CDS (1)..(825): transl_table=11
atgatgtcgtcagaagagttagaacaggtctggagcaacataaaatcagaagcaagggcactggctgaatgtgaaccgatgctggctagcttttttcatgcaacactcttgaagcatgagaatttgggcagtgcgctgagttatattctcgcgaataagttggctaatcctatcatgccagcgattgctatccgtgaagtggttgaagatgcctatcgttcagatgcgcatatgatcgtttccgctgcccgcgatattctggccgtccggttacgcgatccagccgttgataaatactccacaccgttactgtatctcaaaggttttcatgctttgcaggcttatcgtattggccattggttgtgggcgcaggatcgtaaagcgctggcgatttatctgcaaaatcaagtctctgtcgcatttggtgtggatatccaccctgcggcaaccattggttgtggcatcatgctggaccacgctaccggtatcgttattggtgaaacggctgtggttgagaatgacgtgtctattctgcaatctgtcacgcttggggggacgggcaaaaccagtggcgaccgccatccaaaaatccgtgaaggtgtcatgattggcgcaggcgcgaaaattctcggcaatatcgaggtgggccgtggtgcgaagattggtgccggttcagttgtactacaatcggtacccgctcacacgacggctgccggtgtacctgcccgtatcgttggtaaaccagagagtgataaaccctcgttggatatggatcagcatttcaatggcagcattcagggctttgaatatggcgatggtatttaa

SEQ ID NO: 6135 - protein, 274 aa, Yersinia pseudotuberculosis YPIII
MMSSEELEQVWSNIKSEARALAECEPMLASFFHATLLKHENLGSALSYILANKLANPIMPAIAIREVVEDAYRSDAHMIVSAARDILAVRLRDPAVDKYSTPLLYLKGFHALQAYRIGHWLWAQDRKALAIYLQNQVSVAFGVDIHPAATIGCGIMLDHATGIVIGETAVVENDVSILQSVTLGGTGKTSGDRHPKIREGVMIGAGAKILGNIEVGRGAKIGAGSVVLQSVPAHTTAAGVPARIVGKPESDKPSLDMDQHFNGSIQGFEYGDGI

SEQ ID NO: 6136 - DNA, 852 bp, Methylobacterium radiotolerans JCM 2831
  CDS (1)..(852): transl_table=11
atgagcgccagtcctgccttcaatcacccctcgcatgacctcgcggtcgtcgacccggtctggtcgcggctgcgggacgaggcggaggacgtcctgcggaccgagccgcagctcgcctccttcatcgtcgcgacgatcctgaaccacgccaccctggaaggcgcggtctcccaccgggtcgcggcccggctcgggcacccgtcgctgccggccgaactcgtcgcccacgccttccacgaggcgatcacggcggatccggggatcgggcaggcgttccgcgccgatatcggcgcggtgatcgaccgggatccggcgacgctccgggcactggagccggtcctgtacttcaagggcttccacgcgctgcaggcctaccgcctcgcccaccatgtctggaaccgcggccggcgcgacctcgccctctacctccagagccgggtctcggaggtgttccagtgcgacatccatccggccgcgcggatcggccggggcgtcttcctcgaccacgccaccggcctcgtggtcggctcgaccgcggtgatcgaggacgacgtgtcgatcctccacgccgtgaccttgggcggtaccggcaagcagcgcggcgaccgccaccccaagatccgccgcggcgtgatgatcggcgccggcgccaagatcctgggcaacatcgaggtcggggcctgcgcccgggtggcggcgggctctgtggtgctgcggccggtgccgccgaacacgacggtcgtcggtgtgccggcgcgcgtggtcggtaccgccggctgcgacgatccggcccgggcgatggaccagctcgtcgccctcgaccagttcatccacctgggcgacgggatctga

SEQ ID NO: 6137 - protein, 283 aa, Methylobacterium radiotolerans JCM 2831
MSASPAFNHPSHDLAVVDPVWSRLRDEAEDVLRTEPQLASFIVATILNHATLEGAVSHRVAARLGHPSLPAELVAHAFHEAITADPGIGQAFRADIGAVIDRDPATLRALEPVLYFKGFHALQAYRLAHHVWNRGRRDLALYLQSRVSEVFQCDIHPAARIGRGVFLDHATGLVVGSTAVIEDDVSILHAVTLGGTGKQRGDRHPKIRRGVMIGAGAKILGNIEVGACARVAAGSVVLRPVPPNTTVVGVPARVVGTAGCDDPARAMDQLVALDQFIHLGDGI

SEQ ID NO: 6138 - DNA, 801 bp, Shewanella woodyi ATCC 51908
  CDS (1)..(801): transl_table=11
atgcgctatgaagtttgggaacagttgagagttgaagctgaaactttggttcagaaggaaccactattggccagtcacgtatattcatctgtattaaaccatgagtgtttgggttcagcgttaagttttattgtggcgaataagctctctgatggcgtggtttctccttttacttttcgtgagctgttcgacaaggcatttattcattgcgaacagatgctaactaatgtcgcaacagatattaaggcggtgaaagagcgagatcctgcggttgaaagctacctaaccgttttgctaaatcttaaagggtttcaggctattcaagttcaccgtttggcaagttgcttatggcaccaaggccgaactgagctggcacagtttattcaaagccgaaattcagaggtatttggtgttgatatccatcccgcctgtaagatggggacgggtatcatgtttgaccatgcgaccggaattgttatcggtgaaacagctgtgattgaaaataatgtttcactgcttcagggcgtaacgttaggtggtactggtaaccagcagggagatcgtcatccgaaaatccgtgcaggtgttttaattggtgcaggcgctaaggttttgggcaatatcgaagtcggtgagggagcgaaagttggcgcgggctcagtcgtgttagctgatgtagatgctcatacgactgtagttggtgttccggctaaagttgtcggcaaacctgtatctgcttgcccagctgaaacaatggatcaaactttttatgagtctgacgattgccagcgtcagtcatag

SEQ ID NO: 6139 - protein, 266 aa, Shewanella woodyi ATCC 51908
MRYEVWEQLRVEAETLVQKEPLLASHVYSSVLNHECLGSALSFIVANKLSDGVVSPFTFRELFDKAFIHCEQMLTNVATDIKAVKERDPAVESYLTVLLNLKGFQAIQVHRLASCLWHQGRTELAQFIQSRNSEVFGVDIHPACKMGTGIMFDHATGIVIGETAVIENNVSLLQGVTLGGTGNQQGDRHPKIRAGVLIGAGAKVLGNIEVGEGAKVGAGSVVLADVDAHTTVVGVPAKVVGKPVSACPAETMDQTFYESDDCQRQS

SEQ ID NO: 6140 - DNA, 798 bp, Haemophilus somnus 2336
  CDS (1)..(798): transl_table=11
atgtcaatagaagtatggagtcttattcgtgctgaagcagcaaaactcgctgaaaatgaaccaatgctagccagtttctttcatgcaactatcttaaaacataacaatctaggcagtgcattaagctatattcttgcgaacaaattagctaatccaattatgcccgctattgcattgcgagaaattattgaagaagcacatcaaaatcaaccgcaaattatcgaaagtgcggcttgcgatatccgagccgtgcgtcatcgagatcctgccgtagaacaatactctacaccgttactttatttgaaaggcttccacgcattgcaaagttatcgtattacccattatttatggcaacaaggacgaaaagcattggcgatctatttacaaaaccaaatatccgttgcctttgatgtagatatccatcccgcggcaagaatcggttgtggcattatgttcgatcatgccacaggtattgtgataggagaaacatctgtcattgaaaatgatgtatctattttgcaaggtgtaactttagggggaacgggtaaagaaagcggcgatcgtcatcctaaaattcgagaaggtgtgatgattgggtccggagctaaagtgttaggaaatatcgaaattgggcgttacgctaaaattggtgcaaactccgtagtgttacaattcgtttcagaatacactactgtcgctggtgtgccttctcaaatagtaggcaaaaataaaggggcgaaacctgcatttgatatggaccaatactttattgatgatgcaattaacttaaatatctaa

SEQ ID NO: 6141 - protein, 265 aa, Haemophilus somnus 2336
MSIEVWSLIRAEAAKLAENEPMLASFFHATILKHNNLGSALSYILANKLANPIMPAIALREIIEEAHQNQPQIIESAACDIRAVRHRDPAVEQYSTPLLYLKGFHALQSYRITHYLWQQGRKALAIYLQNQISVAFDVDIHPAARIGCGIMFDHATGIVIGETSVIENDVSILQGVTLGGTGKESGDRHPKIREGVMIGSGAKVLGNIEIGRYAKIGANSVVLQFVSEYTTVAGVPSQIVGKNKGAKPAFDMDQYFIDDAINLNI

SEQ ID NO: 6142 - DNA, 939 bp, Beijerinckia indica subsp. indica ATCC 9039
  CDS (1)..(939): transl_table=11
atgcacccatgcctgggccagccttggcgacagggcttttcctggggcaagatcatgaatcgccagaccatgaaccacatgactctcatctccgactcaggcgtccctgcggggcattccgatcgccccggtctttatgatccgctctggaatcgtctgcggcaggaggccgaagaagctttcgcgcgtgaaagggctctggcgccgctgttcgtcagttcgattctcaaccggacgagtttcgaaagtgctgtggcgcatcgcattgcggcgcggctcggcaatgagacggtgcccgcttatctcatcgcggaaatttttgcccaggcgaccgatgatgatccgacgatcggagaggctttccgagccgatattctcgccgtgctcgatcgtgatccggcctgcgcgcgcctgatcgagcccttcctttatttcaaggggttccacgcgatccagacgcatcgcctcgcgcattggctctggaaccatcagcgtcaggatttcgcgctctatatccagagccgatcatccgatgtctttcagaccgacatcaatccggcggcgcgtttcggcaaggggattttcctcgatcacgcgacgggtctcgtcgtcggcgcgacggcctcgatcgatgatgatgtctcgatcctgcagaatgtcacgctcggcggtaccggcaaggaacgcggcgatcgccatcccaagatccggcgcggcgtgatgatcggtgccggcgccaaaattctcggcaatatcgagataggctcctgctcgcgcattgccgcgggctcagtcgttttgcggcccgtcgagcccaataccacggtggctggcgttcccgcccgccaggtgggcacggccggctgttctgaaccggcgcgcagcatggaccagattctcagccaattgtcctatgattctttcgattacacgatctga

SEQ ID NO: 6143 - protein, 312 aa, Beijerinckia indica subsp. indica ATCC 9039
MHPCLGQPWRQGFSWGKIMNRQTMNHMTLISDSGVPAGHSDRPGLYDPLWNRLRQEAEEAFARERALAPLFVSSILNRTSFESAVAHRIAARLGNETVPAYLIAEIFAQATDDDPTIGEAFRADILAVLDRDPACARLIEPFLYFKGFHAIQTHRLAHWLWNHQRQDFALYIQSRSSDVFQTDINPAARFGKGIFLDHATGLVVGATASIDDDVSILQNVTLGGTGKERGDRHPKIRRGVMIGAGAKILGNIEIGSCSRIAAGSVVLRPVEPNTTVAGVPARQVGTAGCSEPARSMDQILSQLSYDSFDYTI

SEQ ID NO: 6144 - DNA, 867 bp, Akkermansia muciniphila ATCC BAA-835
  CDS (1)..(867): transl_table=11
atggaaaggctttcttttgcctcgttaaccctttccgccatgaccagccataaacgcttaaaactccggcagtgcaccaactgcgaatgcgtcattaacggagtatgggaatgggtggaggaatgcgcccgcagcgcagcggcggaagaacccgccatgcgcggtattctggatgacgtctgcctgtcccgcaattccctggccacttccatctcggcgcggctggcccgcaagctctcccgccgtgacatgccgcgggagctgattgagccccttatccgggaagcattgacggaagaccagaacatcctcagccaaatcgcccaggacctgattgccatcgtggaccgggatcccgcctgccgtacgccgctggaacccctgcttttttacaagggattccacgccatcaccacgtaccgcatctcccactggctgtggcagcatgaccggacaatcatggcccttcagttccagagcttggccagtgaagtatttgcggtggacatccatccggcggccaccatcggctgcggcatcctgctggaccacgccaccagtttcgtggtaggggaaaccgccatcatccgggacaacgtctccatcctgcatgaagtcacgctgggcggcacgggcaaggaagaaggggaccgccatcccatcgtggaatccggagttcttatcggcgcgggggctaaaatactggggcgcgtcaccattggcgcctgcgccaaaatcgcagccagctccgtcgttctggaaaatgtccccccccataccacggtagcgggcgtacccgccgttatcgtcaacgattccattccggacaatcccgcgctggacatgaaccagtgcctttgcgactga

SEQ ID NO: 6145 - protein, 288 aa, Akkermansia muciniphila ATCC BAA-835
MERLSFASLTLSAMTSHKRLKLRQCTNCECVINGVWEWVEECARSAAAEEPAMRGILDDVCLSRNSLATSISARLARKLSRRDMPRELIEPLIREALTEDQNILSQIAQDLIAIVDRDPACRTPLEPLLFYKGFHAITTYRISHWLWQHDRTIMALQFQSLASEVFAVDIHPAATIGCGILLDHATSFVVGETAIIRDNVSILHEVTLGGTGKEEGDRHPIVESGVLIGAGAKILGRVTIGACAKIAASSVVLENVPPHTTVAGVPAVIVNDSIPDNPALDMNQCLCD

SEQ ID NO: 6146 - DNA, 822 bp, Erwinia tasmaniensis Et1/99
  CDS (1)..(822): transl_table=11
atgtcgtgcgtagaacctgaacagatctgggaagacattaaaacagaagcgcgcgcgctggctgagtgtgagccgatgctggccagtttttaccacgccacgttattaaaacatgacgacctgggaagcgcattgagctatatgctggcgaataagttggccaaccccattatgccggcgattgccgtgcgtgaagtgattcaggacgcctaccgacaagatccgtcgatgatcatctccgctgcctgcgatatccaggcggtgcgtcagcgcgacccggcggtggacaagtactccacgccgctactgtatttaaaaggcttccacgccttacaggcttatcgtatcggccactggctgtggaacgaaggccggcaggcgctcgcggtttatttgcagaacgagatttccgtttcttttgccgtggatattcaccctgcggcgaaaattggtcgtggcatcatgttggaccatgccaccggcatcgtgataggcgagacggcaatcattgaagatgacgtttcgattctgcaatccgtcacgcttggcggtacgggtaaaaccagcggcgatcgtcatcccaaaatccgcgaaggtgttatgatcggggcgggtgccaagatcctcggtaatatcgaagtggggcgcggcgcgaaaatcggtgcgggttcggtggtgttacagcctgtgcctgcgcacactaccgctgcgggcgttccggcgcgtatcgtcggcaagcctgacagcgacaagccatcgatggaaatggatcaacatttcaatgggatggtgccaggttttgaatttggtgacgggatctga

SEQ ID NO: 6147 - protein, 273 aa, Erwinia tasmaniensis Et1/99
MSCVEPEQIWEDIKTEARALAECEPMLASFYHATLLKHDDLGSALSYMLANKLANPIMPAIAVREVIQDAYRQDPSMIISAACDIQAVRQRDPAVDKYSTPLLYLKGFHALQAYRIGHWLWNEGRQALAVYLQNEISVSFAVDIHPAAKIGRGIMLDHATGIVIGETAIIEDDVSILQSVTLGGTGKTSGDRHPKIREGVMIGAGAKILGNIEVGRGAKIGAGSVVLQPVPAHTTAAGVPARIVGKPDSDKPSMEMDQHFNGMVPGFEFGDGI

SEQ ID NO: 6148 - DNA, 882 bp, Methylobacterium populi BJ001
  CDS (1)..(882): transl_table=11
atgaccgcacacatcacggcgcagcaggccacgcagggggcgacacacgcggcgatcccgccgcccctgcgcactacgagccgcagcacgcgcgaagccgacgtctggacggaactccgggccgaggccgaggcggcgctgatcgaggagccgctctatgccgggatcgtccaggcgacggtgctcgaccagcgcagcctcgcccaggccctggcctaccgccttgcccaccgcctcggcgacggcgacctctcgcggctcgccatgcgcgacctctgcctctcggccttcgaggcggatccccatgccggcgcgcatgcggtgcgcgacctgatcgccatccgcgagcgcgacccgacctgccggcgctatctcgacccgttcctgttctacaagggctttgccgcgctcgaagcctaccgggtcgcgcattggctctggcatcagggccgggcgacgctcgccctccacgtgcagagccgcatctcggaggtcttcggctgcgacatccaccccgccgcccggatcggctccggcgtgttcatcgaccacgccaccggcgtggtgatcggcgagaccacggtgatcgccgacgaggtctcgatcctgcaatccgtgacgctgggcggcaacggcaaggagagcggcgaccgtcacccgaagatcgcgcgcggcgtgctgctcagcgtcggggcgaaggtgctcggcaacatccgcgtgggcgagggggccaaggtcgccgccgccgcggtggtgctgcacgaggtgccgccgcacaccaccgtggccggcgtgccggcccgggtggtctcgcgcgtcgtcccggacgtggcgcccgcgctgagcatggatcagtccttcggcttcggcgacggcatctga

SEQ ID NO: 6149 - protein, 293 aa, Methylobacterium populi BJ001
MTAHITAQQATQGATHAAIPPPLRTTSRSTREADVWTELRAEAEAALIEEPLYAGIVQATVLDQRSLAQALAYRLAHRLGDGDLSRLAMRDLCLSAFEADPHAGAHAVRDLIAIRERDPTCRRYLDPFLFYKGFAALEAYRVAHWLWHQGRATLALHVQSRISEVFGCDIHPAARIGSGVFIDHATGVVIGETTVIADEVSILQSVTLGGNGKESGDRHPKIARGVLLSVGAKVLGNIRVGEGAKVAAAAVVLHEVPPHTTVAGVPARVVSRVVPDVAPALSMDQSFGFGDGI

SEQ ID NO: 6150 - DNA, 861 bp, Methylobacterium populi BJ001
  CDS (1)..(861): transl_table=11
atgtccgccagtccgtcgctgagcccggcttccgggcgcgaagggatcgccggaatcgtcgatccgctctggacgcgcgtgcgcaccgaggcggaaacggtggtgcgcgacgagccgcagctcgcctcgttcttcgtggcgaccatcctgaaccatccgagcctcgaagcggcggtggcccaccgcgtcgccacccgcctcggccacgcctcgctttcgaccgaactcgtcgcccacggcttccatgaggcgctccaggacgatgcccgcatcggccagagcatgcgcgccgacatcgtagcggtgatggaccgcgacccggcaaccacccgagcgatcgagccgctgctctatttcaagggtttccacgcgatccaggcgcaccggctggcccactggtactggggccagggccggcgcgacctcgccctctacctccagagccgatcttcggaggtgttccagaccgacatccaccccgctgcccggatcgggcgcggcgtgttcttcgaccacgccaccggcctcgtggtcggctccaccgcggtgatcgaggacgacgtctccatcctgcacgcggtgacgctcggcggcacgggcaagcatggcggggaccgccacccgaagatccgccgcggcgtgatgatcggcgcgggcgccaagatcctcggcaacatcgaagtcggggcctgcgcccgggtcgcggcgggctccgtcgtgctccgctcggtgccgccccacaccacggtcgtcggcgtgccggcccgcgtcgtgggtgcggccggctgcgccgagcccgcccgctcgatggaccagctcgtggcgatgagcgagttcatcgatatcgccggcgggatctga

SEQ ID NO: 6151 - protein, 286 aa, Methylobacterium populi BJ001
MSASPSLSPASGREGIAGIVDPLWTRVRTEAETVVRDEPQLASFFVATILNHPSLEAAVAHRVATRLGHASLSTELVAHGFHEALQDDARIGQSMRADIVAVMDRDPATTRAIEPLLYFKGFHAIQAHRLAHWYWGQGRRDLALYLQSRSSEVFQTDIHPAARIGRGVFFDHATGLVVGSTAVIEDDVSILHAVTLGGTGKHGGDRHPKIRRGVMIGAGAKILGNIEVGACARVAAGSVVLRSVPPHTTVVGVPARVVGAAGCAEPARSMDQLVAMSEFIDIAGGI

SEQ ID NO: 6152 - DNA, 795 bp, Chlorobium limicola DSM 245
  CDS (1)..(795): transl_table=11
atgggaatagagtttaccagtatatggaaggcgatcgttgccgaagcagccaatgagtgcaggcgtgatcctgaaatcagcatttttctcgaacagcacattcttcgttttaacgatttcggatcctcgcttgccatgctgctttcggtcaagctgggttcgaaacattttcctccgcttgtgctgcaggggttgttcgacgatttttaccggcagagtcctgagcaggtggagtatgcgctttatgatcttgttgccacccagcaaagggatccggcggcagtgcattactttgagatcatgctgtttcttaaaggttatcaggctcttcaggcttaccgtcttgcgcactggctctggaagaacggccgtaaaacgatggcatatttcatccagaaccggatatcggaggtttttgccgtcgatattcacccggcagcagtgatcggcaagggtatcctgctcgatcatgcgaccagtcttgttataggcgaaaccgctgtggtcgatgacaatgtatcccttcttcacgaagtgactcttggcggcaccggcaaggagaccggggaccgccatccgaaggtgcataagtcggtattgatcggtgcaggagccaaaattctcggcaatgtcgtgatcggcgaaggcgccaaggttggcgccggcagtgttgtgctcgatgatgtgccgcctcattataccgttgccggtgttcctgcccagattgtcggcagaaccgaggttgcagagccttccagggagatgaaccagaaactggtcaacagagaaagataa

SEQ ID NO: 6153 - protein, 264 aa, Chlorobium limicola DSM 245
MGIEFTSIWKAIVAEAANECRRDPEISIFLEQHILRFNDFGSSLAMLLSVKLGSKHFPPLVLQGLFDDFYRQSPEQVEYALYDLVATQQRDPAAVHYFEIMLFLKGYQALQAYRLAHWLWKNGRKTMAYFIQNRISEVFAVDIHPAAVIGKGILLDHATSLVIGETAVVDDNVSLLHEVTLGGTGKETGDRHPKVHKSVLIGAGAKILGNVVIGEGAKVGAGSVVLDDVPPHYTVAGVPAQIVGRTEVAEPSREMNQKLVNRER

SEQ ID NO: 6154 - DNA, 795 bp, Chlorobium phaeobacteroides BS1
  CDS (1)..(795): transl_table=11
atgaccgcagagcagatatggcccattatacgtctggaggttgagcgggagagtgagcgcgaaccatgcatgaagcactttctggagcagcatattcttggttttgaaaggttcgcttcagcgctttcaatgctgctttcagtcaagcttgcctcgaaacattttcctcctcaggtgctgcagactcttttcgaagaattttatgaagagagccctggttctgtggagatggctgtggtcgatctttcggcaacccttgaaagggacccggcggcggttaactatttcgaggtaatgctttttctgaaaggctatcaggcgcttcaggcatatcgtttatctcattggctgtggaaaaacgggcgcaggccgatggcctatctgctgcagaacagaatgtcggaggttttcgctgtcgatattcatcccgccgcgaaaatcggaaaggggattctgctcgatcacgcgaccagcctggtgatcggagagaccgcagtggttgaggacaatgtgtctatactgcatgaggtgacgcttggcggtacgggcaaggaaaccggagacaggcatcccaaggtcagacgctcggtgctgatcggagccggagcgaaaatcctcggaaatgttgaaatcggggaaggagcaaaggtcggggccggtagtgtcgtgctggacaatgtcccgccgcattacaccgtcgcgggtgttcccgcgcagattgtcggcaggacagaggtggaagagccctctcttgatatgaaccagcgcctgaatgaaaagcctcgacaggactga

SEQ ID NO: 6155 - protein, 264 aa, Chlorobium phaeobacteroides BS1
MTAEQIWPIIRLEVERESEREPCMKHFLEQHILGFERFASALSMLLSVKLASKHFPPQVLQTLFEEFYEESPGSVEMAVVDLSATLERDPAAVNYFEVMLFLKGYQALQAYRLSHWLWKNGRRPMAYLLQNRMSEVFAVDIHPAAKIGKGILLDHATSLVIGETAVVEDNVSILHEVTLGGTGKETGDRHPKVRRSVLIGAGAKILGNVEIGEGAKVGAGSVVLDNVPPHYTVAGVPAQIVGRTEVEEPSLDMNQRLNEKPRQD

SEQ ID NO: 6156 - DNA, 819 bp, Rhizobium etli CIAT 652
  CDS (1)..(819): transl_table=11
atgccgaaatcgaccggcctcggttttgccgagcaacagccgccgcctttgggcgatgcatccgtctggaccgccatccgcgccgaggcggcggagcttgcggcgcgcgagccgatcttgcggcggctgctgaccacagaggtcacggatgccaccggcgataatgagatcctcgcccgggtgctcgccgcgcgactttccgtgacgcaggtggaaaccggcaatctgttcgatctcatcctgtccaccctcaccgacgacatcatgcgcaagatcgaggccgatctcgcagcggtgcgcgagcgcgacccggcctgcacgacgttcctgcacgcgctcctgaacctcaagggttttcatgcgctgcagacgcatcgcatcgcccatgcgctttggaacgccggccggccggagatcgccacctggctcgccaatcttgcctcgctggtcttcggcccggatatccatccggccgcacggatcggcgcctccatcatgctcgaccacggatcgggcatcgtcgtcggcgaaacggcggtgatcgaggatgaagtgtcgatcctgcagggcgtcacgctcggcggcaccggcaaggaaaccggcgaccgccacccgaagatccgccgcggcgtcatgatcggcgccggcgccaagatcctcggcaatatcgaaatcggcgccttcagcaagatcgccgccggcagcgtcgtgctgaaagcggttccggaacactgcacggtcgccggcgtgccggccaccgtcgtgcgcatccaccgcgccgacgaaatcccggccgagacgatggatcagaatatctaa

SEQ ID NO: 6157 - protein, 272 aa, Rhizobium etli CIAT 652
MPKSTGLGFAEQQPPPLGDASVWTAIRAEAAELAAREPILRRLLTTEVTDATGDNEILARVLAARLSVTQVETGNLFDLILSTLTDDIMRKIEADLAAVRERDPACTTFLHALLNLKGFHALQTHRIAHALWNAGRPEIATWLANLASLVFGPDIHPAARIGASIMLDHGSGIVVGETAVIEDEVSILQGVTLGGTGKETGDRHPKIRRGVMIGAGAKILGNIEIGAFSKIAAGSVVLKAVPEHCTVAGVPATVVRIHRADEIPAETMDQNI

SEQ ID NO: 6158 - DNA, 804 bp, Cellvibrio japonicus Ueda107
  CDS (1)..(804): transl_table=11
atgacgcttcccgccgccgccctggttgtcgacagcctgtgggaaaatatccgcagccaaacccgcaaacaggcggaatgcgagccggtgctggccagtttcctctacgccaccatactcaaccacgagacgctggaagctgccctcagctttcacttggccaacaaactcgatagcccggcactacccgcgatgctgattcgcgaagttattgaggaggccctggcggcagatgtgactatcggtgaggccctgcgcgccgacctgctggccgtgagtgaacgcgattctgcctgctgctcgctggttaccccgctactctacttcaagggtttccatgcgctccaggcctaccgtattgcgcactggctctggcagcaggggcgcgactccctggcgctgttcctgcaaaaccgtatctcctcagtcttcgctgtagatatccacccggcggcgcgcattggcaaaggcattatgtttgaccacgccaccggtattgtaatcggtgagactgccgtggttgaggacatggtatctatcatgcaatcggtaaccctcgggggaaccgggaaagaagccggggatcgacatcccaaagtcgggcgcggtgttcttattggtgcaggcgccaagatcctgggcaatatccgcattggcgattgtgccaagatcggcgcaggcagcgttgtgatcaaagatgtacctgcgcgcgctgttgttgccggggttcccgcgaagatcatcggtgagaacctctgtggccaacccgcccaggagatggatcaccagatccgccccgcgtga

SEQ ID NO: 6159 - protein, 267 aa, Cellvibrio japonicus Ueda107
MTLPAAALVVDSLWENIRSQTRKQAECEPVLASFLYATILNHETLEAALSFHLANKLDSPALPAMLIREVIEEALAADVTIGEALRADLLAVSERDSACCSLVTPLLYFKGFHALQAYRIAHWLWQQGRDSLALFLQNRISSVFAVDIHPAARIGKGIMFDHATGIVIGETAVVEDMVSIMQSVTLGGTGKEAGDRHPKVGRGVLIGAGAKILGNIRIGDCAKIGAGSVVIKDVPARAVVAGVPAKIIGENLCGQPAQEMDHQIRPA

SEQ ID NO: 6160 - DNA, 813 bp, Cellvibrio japonicus Ueda107
  CDS (1)..(813): transl_table=11
atgatccttgatgtatccctgaatacttccccggaccttgatgtctgggccgagatacgggctgaggcgcaaatatccagtgccgaagagccggtattggccagcttttatcacacgaccatcctcaaccatggcagctttgcggcggccatcagctttcacctggccaatcaactggatagccaggcaataccggcgatgatgattcgcgaggtctttgaggaggcgatgcaggctgatccgaccatcgaaattgccatgcgcgctgatatccgcgcccaccgtgaacgcgatccggcatgcagccgctactgcctgcccttcctgttcttcaagggctatcacgccctgcaatcctggcgcgttgcccattggttatggcagcaggggcgcaattccctggcgctgtatttccagaaccagatttcgcaaaccttcgatgtggatatacatccgggcgcccgtatcggctgcggcattatgatcgaccatgccaccggggtggtgatcggtgagacggcggtcatcgaggacaatgtatccatgttgcacagtgtcaccctgggcgggagcggctgtgccaaaaccgatcggcaccccaaaattcgccagggcgtcctgatcggtgtcggggccaagatcctgggcaatatcgacattggtgaaggagccaagataggtgcaggcagtgttgtactggaatccgtggcacctcacacaacggtagcgggggtgccggccaagcccgtcggtcggcccaaaggcgatgcaccggcgcgcgatatggatcacctgctgggcgacgatggctga

SEQ ID NO: 6161 - protein, 270 aa, Cellvibrio japonicus Ueda107
MILDVSLNTSPDLDVWAEIRAEAQISSAEEPVLASFYHTTILNHGSFAAAISFHLANQLDSQAIPAMMIREVFEEAMQADPTIEIAMRADIRAHRERDPACSRYCLPFLFFKGYHALQSWRVAHWLWQQGRNSLALYFQNQISQTFDVDIHPGARIGCGIMIDHATGVVIGETAVIEDNVSMLHSVTLGGSGCAKTDRHPKIRQGVLIGVGAKILGNIDIGEGAKIGAGSVVLESVAPHTTVAGVPAKPVGRPKGDAPARDMDHLLGDDG

SEQ ID NO: 6162 - DNA, 834 bp, Chloroherpeton thalassium ATCC 35110
  CDS (1)..(834): transl_table=11
atggcaaccgccgcctcaacgccgatttgggatattatccgccgggaagtagaagaagaagttaaaaacgagccgttgcttgccaaatttcttgaagaagctgttttaaagcacgcctcgttagtcgatgcactgcgttttcatttggcgcaaaagctttcctgccaaattctttccgctgcacattttgaatccattgtcacagaggcttattctcaaattggtgaaattgagtgcattatccgttcagatattgaagccattgtcgagcgcgatccggcgacggtttattactacgaaccgttgcttttctttaaagggtttcatgcgttggaagcctatcgtgtggcgcattggctgtggctggctggccgaaaatcaattgcgtattttttgcaaaatcgaatttccgaagcgtttgccgtggatattcatccagcggctaccattggaaaaggtgttttcatcgatcacgcaacaggtgtcgtcatcggtgaaacggcggttattgaggataatgtttccttgcttcacagcgttacgcttggcggcacgggcaaagaaaccggcgatcgccatccgaaagtgcggcatggcgtgctgattggcgctggggcaaaaattttaggcaatgtagaaattggcgccggtgcaaaaattggtgcgggcagcgtggttttggaaaatattccgccgcacaccacagccgctggcgttccggcgcgagttctgggcaaggtggaagtgccagagcccgcgttggaaatgaatcatcgcctgaccgagtctgaatgccctgaaaaaaaacgtttgcgcaaaaaacgagcaagctga

SEQ ID NO: 6163 - protein, 277 aa, Chloroherpeton thalassium ATCC 35110
MATAASTPIWDIIRREVEEEVKNEPLLAKFLEEAVLKHASLVDALRFHLAQKLSCQILSAAHFESIVTEAYSQIGEIECIIRSDIEAIVERDPATVYYYEPLLFFKGFHALEAYRVAHWLWLAGRKSIAYFLQNRISEAFAVDIHPAATIGKGVFIDHATGVVIGETAVIEDNVSLLHSVTLGGTGKETGDRHPKVRHGVLIGAGAKILGNVEIGAGAKIGAGSVVLENIPPHTTAAGVPARVLGKVEVPEPALEMNHRLTESECPEKKRLRKKRAS

SEQ ID NO: 6164 - DNA, 822 bp, Chlorobaculum parvum NCIB 8327
  CDS (1)..(822): transl_table=11
atgagtgtacaggatatctggtcgttgatccgggaagaggcgcgtcttgagtgcgagcgtgagccggagatacggctgtttcttgaacagcacattctgcggtacgacgagtttgctccagcgctggcgatgttgctttccgtgaagctcggctcgaagcactttcctccgccggtactggaggggattttcgaggatttttaccgtcagaatccggagtctgtccggtgcgctgcctgtgacatggtggccacgcaggagcgcgacccggcagcggtgaactatttcgagatcatgctttttctcaaaggctatcaggcgctccagtcttaccggttggcgcactggctgtggcagaacggccgcaaatcgctggcctatttcctgcagaatcgcatgtcggaggtgttcgctgtcgatattcacccggcggcaaagatcggcaaaggcattttgctcgaccacgccaccagcctcgtcatcggcgagaccgccgttgttgaagataacgtgtcgattctgcacgaagtgacgctcggcggcaccggcaaggagggcggcgaccgccatcccaaggtcggaaagtcggtgatgattggtgctggcgccaagattctcggcaacatcaaaatcggtgaaggcgctaaaatcggtgccggcagcgtggtgctcgacgatgtgccgccgcactacacggtcgccggcgtgcctgcgcacatcgtgggccgcactgaagtgcctgaaccgtcactcgatatgaaccaacgcctcgtgtttccggaaaaacacaagcagacaggcacccatcactcgtgcttgtga

SEQ ID NO: 6165 - protein, 273 aa, Chlorobaculum parvum NCIB 8327
MSVQDIWSLIREEARLECEREPEIRLFLEQHILRYDEFAPALAMLLSVKLGSKHFPPPVLEGIFEDFYRQNPESVRCAACDMVATQERDPAAVNYFEIMLFLKGYQALQSYRLAHWLWQNGRKSLAYFLQNRMSEVFAVDIHPAAKIGKGILLDHATSLVIGETAVVEDNVSILHEVTLGGTGKEGGDRHPKVGKSVMIGAGAKILGNIKIGEGAKIGAGSVVLDDVPPHYTVAGVPAHIVGRTEVPEPSLDMNQRLVFPEKHKQTGTHHSCL

SEQ ID NO: 6166 - DNA, 795 bp, Prosthecochloris aestuarii DSM 271
  CDS (1)..(795): transl_table=11
atggcagcagaggaaatttgggatagaatatgtgctgaggctttgcgcgaggggcagcgggagccttatatgcgaaattttctggagcagcatatcctgcgcttcgatcgctttgtggatgctctttcgatgcttctgtctgtcaagctggcatctaaacattttcctccccaggtcctgcaggagctgttcgatgatttctattcccgcagccctgaggatctcgacaatgccgtagccgatcttacagcaacgcttcagcgagatcctgcggcggtgaattatttcgagattatgctttttctgaagggctatcaggcgttgcagtcttatcggttgtcgcactggctgtggaaccatgatcgcaaatcgatggcgtatctcctgcagaacaggatgtctgaagtctatgctgtcgatatccatcctgcagcgcggatcggcaagggtattctgcttgatcatgcgaccagtctggtgatcggtgaaaccgctgttgtcgaggataatgtatcgatcctgcatgaagtgacgcttggcggtacgggtaaggagagcggtgatcgtcatccgaaagtgaggaaatcggttctgatcggggcaggagcgaagattctcggtaatgtggagatcggggagggggcaaaggtcggcgctggcagtgtggtgcttgagaatgtgccacctcattacacggttgccggtgttccggcccagattgtcggtcgtaccgaggttgccgagccgtcgctcgatatgaaccagcgactgcagaacagtcgccggctcgaatga

SEQ ID NO: 6167 - protein, 264 aa, Prosthecochloris aestuarii DSM 271
MAAEEIWDRICAEALREGQREPYMRNFLEQHILRFDRFVDALSMLLSVKLASKHFPPQVLQELFDDFYSRSPEDLDNAVADLTATLQRDPAAVNYFEIMLFLKGYQALQSYRLSHWLWNHDRKSMAYLLQNRMSEVYAVDIHPAARIGKGILLDHATSLVIGETAVVEDNVSILHEVTLGGTGKESGDRHPKVRKSVLIGAGAKILGNVEIGEGAKVGAGSVVLENVPPHYTVAGVPAQIVGRTEVAEPSLDMNQRLQNSRRLE

SEQ ID NO: 6168 - DNA, 819 bp, Pelodictyon phaeoclathratiforme BU-1
  CDS (1)..(819): transl_table=11
atgggaatagatatcaggaatatctggtcaacgattgtcactgaggcggcaaatgagtgcggtcgtgatctccagatcagggtttttttagagcagcatattctgcgttttgatgattttggctcttcactggcgatgcttttgtcggtgaagcttggatcgaagcattttcctcctcttgtgctgcaagggctttttgaggatttttatctgcaatgtcctgaagctgttgaacatgcagcctatgatcttgttgcaacgaagcagcgtgatccggcagcggtacactacttcgagattatgctttttctgaaaggatatcaggccttgcaggcttaccgtcttggtcactggctctggaaaaatggacgtaaaaccatggcctattttatccagaaccgtatctctgagatctttgccgtagatattcatcccgcagcgcttatcggtaagggcattttctttgaccatgccaccagtcttgtgattggtgagactgcagtggttgaagataatgtgtcgattttgcatgaggttacgcttggcggcacgggtaaggagagtggcgatcgtcatccgaaagtgaaaaagtcggtgatgattggagcgggagccaagatcctgggtaatgtggtgattggtgagggcgccaaggtcggggcggggagcgtggtgcttgatgatgtgccgccccacttcacggttgtcggtgttcctgcccagattgtgggtagaaccgaggtttcggaaccctctcgcgatatgaaccagagggtggttaatacgggcaaagaggctcctttaacggatcaggaatga

SEQ ID NO: 6169 - protein, 272 aa, Pelodictyon phaeoclathratiforme BU-1
MGIDIRNIWSTIVTEAANECGRDLQIRVFLEQHILRFDDFGSSLAMLLSVKLGSKHFPPLVLQGLFEDFYLQCPEAVEHAAYDLVATKQRDPAAVHYFEIMLFLKGYQALQAYRLGHWLWKNGRKTMAYFIQNRISEIFAVDIHPAALIGKGIFFDHATSLVIGETAVVEDNVSILHEVTLGGTGKESGDRHPKVKKSVMIGAGAKILGNVVIGEGAKVGAGSVVLDDVPPHFTVVGVPAQIVGRTEVSEPSRDMNQRVVNTGKEAPLTDQE

SEQ ID NO: 6170 - DNA, 822 bp, Vibrio sp. Ex25
  CDS (1)..(822): transl_table=11
atgaaacactgcgaaaaacaaaaagtctggaacagaattgtctcagaagcccgcgaaatgtcagagcaagagccaatgctggccagcttttaccatgccaccatcatcaagcatgaaagtttctgtgccgcgctcagctacattttggcaaacaagttaaacacggcatcgatgccagcaatggcagtacgtgaagtggtagaagaagcgttctctgccgacccaaccattaccgattgtgccgcttgtgacatttgtgccacggttaatcgcgacccagcagtttcgatgtactctatgccgctgctgtacttaaagggctaccacgctctgcaaggctaccgcgtggcaaactggctatggaaacaagggcgccatgcactggcaacctacctacaaaaccaaatttcggttgcgtgtcaggtagacattcacccggcagcacgcattggtagcggcatcatgctcgaccacgcaacggggatcgtcatcggtgaaactgcggttatcgataatgacgtctcaattctacaagacgttaccttaggcggtacgggtaaagagtgcggcgatcgtcacccgaaaatccgtgaaggtgtgatgattggtgcaggtgcaaaaattcttggcaatatcgaagtgggcgaaggcgcgaaaatcggctcttgctctgtggtattgcaagcagtgccaccacacacaaccgtggcgggggttcctgcgaaaatcgtcggtcgtccaaaaacggacaaaccttctctcgatatggatcaaggctttaatggtaaatcacaaagctttatccatggagatggtatttaa

SEQ ID NO: 6171 - protein, 273 aa, Vibrio sp. Ex25
MKHCEKQKVWNRIVSEAREMSEQEPMLASFYHATIIKHESFCAALSYILANKLNTASMPAMAVREVVEEAFSADPTITDCAACDICATVNRDPAVSMYSMPLLYLKGYHALQGYRVANWLWKQGRHALATYLQNQISVACQVDIHPAARIGSGIMLDHATGIVIGETAVIDNDVSILQDVTLGGTGKECGDRHPKIREGVMIGAGAKILGNIEVGEGAKIGSCSVVLQAVPPHTTVAGVPAKIVGRPKTDKPSLDMDQGFNGKSQSFIHGDGI

SEQ ID NO: 6172 - DNA, 807 bp, Alteromonas macleodii 'Deep ecotype'
  CDS (1)..(807): transl_table=11
atgaccgcactatctacgcccatcgatttttggtcgacgttaaaacaagaagcgcaagttgttgcagacaaagagccgttgctgtcgagttatgttcatgccagtgtactggcgcaccacaactttgagtcgtctttaagctttattttgtcaaataaaatggctgatgacgttatgcctgcgctggcaattcgcgaagtgttcgacgaagcttacctgcttgagcccggtatcagcgaagcggccagtgcggatatactggcgatcaaagcgcgcgacgccgcagtgaatgattttttaacgccgctactgcactttaaaggctttcacgctgttcaagttcaccgcatggcccattacctttggcttcacggtcgacatcaactggccttgtttctacaaagccgtaattcagcaagctttggggtggatattcacccggcggcccgcataggtaaaggggtgatgtttgaccatgctaccggcattgttgtgggtgaaacggcggtagttgaagataacgtgtctattttgcaaagcgttaccttaggcggtacgggtaatgagtctggtgatcgtcatcctaaaattcgccaaggtgtgctgattggcgcaggggctaaaatcttgggcaatatcgaaataggcgaaggttcaaaagtcggcgcaggaagtgttgtccttaacaatgtacctgcccatgtaactgtggtgggcgtacctgcgaaagttgttgggagacctgtttgtgaaagcccttgtgaatctatgcgccaaaacgtattagaggacaactcccacgtttga

SEQ ID NO: 6173 - protein, 268 aa, Alteromonas macleodii 'Deep ecotype'
MTALSTPIDFWSTLKQEAQVVADKEPLLSSYVHASVLAHHNFESSLSFILSNKMADDVMPALAIREVFDEAYLLEPGISEAASADILAIKARDAAVNDFLTPLLHFKGFHAVQVHRMAHYLWLHGRHQLALFLQSRNSASFGVDIHPAARIGKGVMFDHATGIVVGETAVVEDNVSILQSVTLGGTGNESGDRHPKIRQGVLIGAGAKILGNIEIGEGSKVGAGSVVLNNVPAHVTVVGVPAKVVGRPVCESPCESMRQNVLEDNSHV

SEQ ID NO: 6174 - DNA, 849 bp, Phenylobacterium zucineum HLK1
  CDS (1)..(849): transl_table=11
atgggtcgggaggaaccgatgagccaacgcctggaagtggtggaccccgccacgccgccccccgtgtgggccgcgctgcgcaacgaagcctacgccgccgccaagagcgaggcggccctggccagcctgctggccgccgtgatcctgaaccacgagacgctcggcgacgccctgtcctaccagctggcgcgcaagctgggcgaccaggagctgcgggcgatgacgctccgcgacatcctcgaggaagcctacgagagcgatccgtccttggtggagatcgccgaggccgacctgaaggcggtgttcgagcgcgatccggcctgccgcggctatgtccagccgttcctgttcttcaagggcttccaggcgctgcagacgcaccgggtggcccactggctgtggaaggccgggcgcgagaccctggcgttctacctgcagagccgctcgagcgagctgttccaggtggacatcaaccccgccacccgcatcggccgcggcgtgttcatcgaccacggcaccggcatcgtcatcggcgagaccgcggtgatcggcgacgacgtctcgatgctgcagggcgtgaccctgggcggcacgggcgccgagcgcggcgaccgccaccccaaggtcggcaacggcgtgctgctgggcgcgggggccaaggtgctgggcaacatcaccatcggcgatcacgccaaggtggcctcgggctcggtggtgctgaagccggtgccgccgcactgcaccgcggcgggcgtgccggcgcggctggtcaactgccccacctgcgacgagccggccaagagcatggaccacacgctggccgatgctgtgtacgactacgtgatctga

SEQ ID NO: 6175 - protein, 282 aa, Phenylobacterium zucineum HLK1
MGREEPMSQRLEVVDPATPPPVWAALRNEAYAAAKSEAALASLLAAVILNHETLGDALSYQLARKLGDQELRAMTLRDILEEAYESDPSLVEIAEADLKAVFERDPACRGYVQPFLFFKGFQALQTHRVAHWLWKAGRETLAFYLQSRSSELFQVDINPATRIGRGVFIDHGTGIVIGETAVIGDDVSMLQGVTLGGTGAERGDRHPKVGNGVLLGAGAKVLGNITIGDHAKVASGSVVLKPVPPHCTAAGVPARLVNCPTCDEPAKSMDHTLADAVYDYVI

SEQ ID NO: 6176 - DNA, 837 bp, Proteus mirabilis HI4320
  CDS (16)..(837): transl_table=11
aaaatgagagtgagtatgtcgctagaagaactaacaagagtctgggatcatattaaaagcgaagcgcgtgcattggcagattgtgagccaatgttagccagtttctttcatgcgacacttctcaaacacgaaaatttaggtagtgcattaagctatatgctggccaataagctggcaactcagactatgccagccattgcagttcgcgaaattgttgaagaggcttatagtcacgatagctcaatgattgagtcggccgcttgtgatctctccgcggtacgcctacgtgatcccgcggtggataaatattctaccccactgctctatttaaaagggtttcatgcactacaagcctaccgtattgcccattggctatggcaacaaaatcgccaagcgctagctatttatctacaaaaccaaatatcagtcacctttggggtggatatccacccagcggcacgtattggacacggtattatgctcgaccatgcgacaggtattgtgattggtgaaacggcggtggttgaaaatgatgtctctattttacaatctgtgaccttagggggaacaggtaaaacaggaggtgatcgtcacccgaaagtgcgtgaaggggtaatgattggcgcaggagctaaaatccttggtaatatcgaaattggtcgtggtgctaaaattggtgctggctcggtagtattacatgaagtaccagctcatactacggtggccggggtgcctgcccgcattgtcggtcgtcctgatagtgaaaaaccgtcattcgatatggatcaacactttaatggtgttgtacccggctttgagtgtggtgatggtatttaa

SEQ ID NO: 6177 - protein, 273 aa, Proteus mirabilis HI4320
MSLEELTRVWDHIKSEARALADCEPMLASFFHATLLKHENLGSALSYMLANKLATQTMPAIAVREIVEEAYSHDSSMIESAACDLSAVRLRDPAVDKYSTPLLYLKGFHALQAYRIAHWLWQQNRQALAIYLQNQISVTFGVDIHPAARIGHGIMLDHATGIVIGETAVVENDVSILQSVTLGGTGKTGGDRHPKVREGVMIGAGAKILGNIEIGRGAKIGAGSVVLHEVPAHTTVAGVPARIVGRPDSEKPSFDMDQHFNGVVPGFECGDGI

SEQ ID NO: 6178 - DNA, 816 bp, Mannheimia haemolytica PHL213
  CDS (1)..(816): transl_table=11
atgcagcagagtgaaattaatcagatttggcaagcaattcgagatgaagccaaagagctggcgaattgtgaacctatgttagcaagttttttccacgctaccattttaaaacaccataatctaggcgatgcgttaagttatattttggcgaataagttagaaaacccgattatgccggcaatcgccttaaaagaaattattgaggaagcttatcgagcagagccacaaattattgctagtgcagcttgtgatattaatgcggtcagaactagagatcctgcggtggacaaatggagtacacctctgctgtacttaaaaggcttccacgctttacaaagctatcgggtgacgcattatctttggaatcaaggcaggaaagcattagcggtttatttacaaaatgaaatttctgttgcctttgatgtggatattcatcctgcggcaaaggtcggttgcggaattatgtttgaccacgccaccggtattgtggtgggtgaaacctctgtgatcgaaaatgatgtctcgattttacaaggtgtaacactaggcggtacagggaaagaaaatggcgaccgccacccgaaaatccgtgaaggcgtgatgattggagccggtgcaaaaattctcggtaatattgaaatcggacgctattctaaaatcggggcaaattcagtggtgctacaacctgtgcctgatcacgccacagcagcaggtgtaccggctcgcattatcggcaaatcctctgaacaaaaaccggcttttgatatgaatcaatactttgaagatgagcaaggtttgtttggtgatgggatttag

SEQ ID NO: 6179 - protein, 271 aa, Mannheimia haemolytica PHL213
MQQSEINQIWQAIRDEAKELANCEPMLASFFHATILKHHNLGDALSYILANKLENPIMPAIALKEIIEEAYRAEPQIIASAACDINAVRTRDPAVDKWSTPLLYLKGFHALQSYRVTHYLWNQGRKALAVYLQNEISVAFDVDIHPAAKVGCGIMFDHATGIVVGETSVIENDVSILQGVTLGGTGKENGDRHPKIREGVMIGAGAKILGNIEIGRYSKIGANSVVLQPVPDHATAAGVPARIIGKSSEQKPAFDMNQYFEDEQGLFGDGI

SEQ ID NO: 6180 - DNA, 822 bp, Vibrio cholerae AM-19226
  CDS (1)..(822): transl_table=11
atgaaacagtgcgcccacaccaaggtttggcaaaccattgtcgctgaagctcgcgagcaagccgagcaagagccgatgctcgccagtttttaccatgccaccattattaagcatgacagtttaaaagcggccttgagctatattctggccaaccgtttgaacactgcctccatgcctgcgatggcagtacgagaagtgattgaagaagcgtttgctgccgatccgagtatctcagaagcggcggcgtgtgatatttgcgcgacagtcaaccgcgatccggcagtgtcgatgtactcaatgccgctactttacctaaaaggttatcacgctttacaaggctatcgggtggctaactggttatggcgacaagggcgtaaggcgctcgcgacctatttccaaaatcagatatcagtggcgtgtcaggtggatattcaccctgcagcgcgtattggtcgcggcatcatgctcgatcacgcgacggggatcgtgattggtgaaaccgccgtggtagaagatgatgtatcgatcttgcaggacgttacgcttggcggtaccggtaaagagtgcggcgatcgccacccgaaaattcgggaaggggtgatgattggtgcgggcgcgaaaatattaggcaacatcgaagttggagaaggggcgaaaattggctcgggatcggtcgtgttgcaagctgtaccgccccataccacagtcgctggagtacctgctcgtattgtggggcggccacaatcggataagccttctttggatatggatcagcagtttaatggtcgttcgcagacgtttatcggcggtgatggtatctag

SEQ ID NO: 6181 - protein, 273 aa, Vibrio cholerae AM-19226
MKQCAHTKVWQTIVAEAREQAEQEPMLASFYHATIIKHDSLKAALSYILANRLNTASMPAMAVREVIEEAFAADPSISEAAACDICATVNRDPAVSMYSMPLLYLKGYHALQGYRVANWLWRQGRKALATYFQNQISVACQVDIHPAARIGRGIMLDHATGIVIGETAVVEDDVSILQDVTLGGTGKECGDRHPKIREGVMIGAGAKILGNIEVGEGAKIGSGSVVLQAVPPHTTVAGVPARIVGRPQSDKPSLDMDQQFNGRSQTFIGGDGI

SEQ ID NO: 6182 - DNA, 822 bp, Klebsiella pneumoniae 342
  CDS (1)..(822): transl_table=11
atgccgtgtgaagaactggatatcgtctggaataatattaaagccgaagcccgggctctggctgactgtgagccgatgctcgccagtttttaccacgctacgctactcaagcatgaaaatctgggcagtgcgctgagctatatgctggccaacaagctggcttcgccgattatgccggcgatcgccattcgcgaagtggtggaagaggcctatgccgcggatccggaaatgatcgcctccgccgcctgcgatattcaggcggtgcgcacgcgcgacccggcggtggataaatactccacgccgctgctctacctgaagggtttccatgcgctgcaggcctaccgtatcggccactggctgtggactcagggccgacgtgcgctggcgattttcctgcaaaatcaggtctccgtctccttccaggtggatatccacccggcggcgaaaatcggccgcgggatcatgctcgaccacgccaccggcattgtggtcggcgaaacggcggtgattgaagatgacgtctctatcctgcagtcggtcaccctcggcggtaccggtaaaaccagcggcgaccgtcacccgaaaattcgcgaaggcgtgatgattggtgccggggcgaagatcctcggtaatatcgaagtgggacgtggggcgaagattggcgccggttcggtggtattgcagccggttccgccgcacaccaccgcggcgggcgtaccggcgcgcatcgttggcaagccggagagcgacaagccggcgatggacatggatcagcatttcaacggcatccaccacaccttcgagtacggcgacgggatttga

SEQ ID NO: 6183 - protein, 273 aa, Klebsiella pneumoniae 342
MPCEELDIVWNNIKAEARALADCEPMLASFYHATLLKHENLGSALSYMLANKLASPIMPAIAIREVVEEAYAADPEMIASAACDIQAVRTRDPAVDKYSTPLLYLKGFHALQAYRIGHWLWTQGRRALAIFLQNQVSVSFQVDIHPAAKIGRGIMLDHATGIVVGETAVIEDDVSILQSVTLGGTGKTSGDRHPKIREGVMIGAGAKILGNIEVGRGAKIGAGSVVLQPVPPHTTAAGVPARIVGKPESDKPAMDMDQHFNGIHHTFEYGDGI

SEQ ID NO: 6184 - DNA, 822 bp, Aliivibrio salmonicida LFI1238
  CDS (1)..(822): transl_table=11
atgaatgaatgtaagaaacacaaagtatgggaaaaaattgttcaggaagcgcgcgagcaatctgagcaagaacccatacttgcaagcttttatcatgccaccatcattaaacatgaaaatttagcggcgtcgttaagttacattcttgcgaataaattagccacggcttcaatgcctgcgatggcggttcgtgaagtggtggaagaggcgttcgcctccgacccaagtattacggatgcggccgcgtgcgatatttgtgcgacggtaactcgagatcctgcggtttcaatgtactcaatgcctttattgtacttaaaagggtatcacgcgctgcaaggttatcgtgtttcaaactggctatggaaacaaggacgaatagcgttagcaacctacttacagaatgaaatttctgttgcatgccaagtggatgttcaccctgcggctaccattggtaaagggatcatgtttgaccatgctacgggcattgttatcggcgaaacggctgtggttgagaacgatgtttctatccttcaagacgtaacgctaggtggtactggcaaagagtgtggtgatcgtcatcctaagatccgtcaaggggttatgattggtgcaggcgctaagattttaggtaatattgaagttggtgtcggtgcgaagattggttcgtgttctgttgtgcttcaagcggttccacctcatacgacagtggcaggggttccggccaaaattgtgggtcgccctagttcagagatgccgtctctagatatggatcaacaatttaatggtaagtctcagacgtttatgtctggtgatggtatttaa

SEQ ID NO: 6185 - protein, 273 aa, Aliivibrio salmonicida LFI1238
MNECKKHKVWEKIVQEAREQSEQEPILASFYHATIIKHENLAASLSYILANKLATASMPAMAVREVVEEAFASDPSITDAAACDICATVTRDPAVSMYSMPLLYLKGYHALQGYRVSNWLWKQGRIALATYLQNEISVACQVDVHPAATIGKGIMFDHATGIVIGETAVVENDVSILQDVTLGGTGKECGDRHPKIRQGVMIGAGAKILGNIEVGVGAKIGSCSVVLQAVPPHTTVAGVPAKIVGRPSSEMPSLDMDQQFNGKSQTFMSGDGI

SEQ ID NO: 6186 - DNA, 825 bp, Gluconacetobacter diazotrophicus PAl 5
  CDS (1)..(825): transl_table=11
gtgccgctgaccgcgcgggtcaggcagcacgcgccgtcctcgacggccgcgctgtggcaggccatgcgggcggaggtgcgtggatgtcgcgacgtggtcctgaaggatcttctgcgcccgtccattctcgaccagccggatttcgcgacggcactggctttcctgctgtcacggaagctcgacagcgacctgctccgcaaggccacccttttcgggctggtccgcgatttccagcgggcgcggccccagtccgtcgatgcggcggcggccgacctgcatgccatctgcgaccgggaccctgccgcgacggattccgtgacgccgttcctgttcttcaagggattccatgccatccagtgccaccgcgtggcgcactggctgtggcaggaaaaccgccggacgctcgcgcattatatccagagccgggcttccgaactgttcgcggtggacattcatcccgcggcgcgcctggggcagcggattctgttcgatcacggcacgggcatcgtcgtcggggaaaccgccgtgatcgaggatgacgtcgccctgctgcagaacgtgaccctgggcggcaccggcaaggaagccggcgaccggcatccgaaagtccggcgtggggccctgatcggtaccggcgccaaggtcctgggcaatatcgagatcggcgaaggggcgaaggtcggggcgggtgccatcgtactgcgccctgtcgcccccttcaccacggtcgtgggcaatccggcgcgtccggtgggcgagaggcatgagggcctgccgtcgctgaccatggaccagagcctgccgccggtggattacgtgatctga

SEQ ID NO: 6187 - protein, 274 aa, Gluconacetobacter diazotrophicus PAl 5
MPLTARVRQHAPSSTAALWQAMRAEVRGCRDVVLKDLLRPSILDQPDFATALAFLLSRKLDSDLLRKATLFGLVRDFQRARPQSVDAAAADLHAICDRDPAATDSVTPFLFFKGFHAIQCHRVAHWLWQENRRTLAHYIQSRASELFAVDIHPAARLGQRILFDHGTGIVVGETAVIEDDVALLQNVTLGGTGKEAGDRHPKVRRGALIGTGAKVLGNIEIGEGAKVGAGAIVLRPVAPFTTVVGNPARPVGERHEGLPSLTMDQSLPPVDYVI

SEQ ID NO: 6188 - DNA, 819 bp, Rhizobium leguminosarum bv. trifolii WSM2304
  CDS (1)..(819): transl_table=11
atgccgaaatccaccggtcttggtctggccgagcaacagccgcagtccccggacaatgcattcgtctgggcggtgatctgcgccgaggcactcgagcttgccgcgcgcgaaccgatcctgcagcacctgctcgccgctcagataacggccacctccggcaacagggagatcatcgcccgcgtgctcgccgcgcggcttgccgcgacgcaggtggaaaccggtgatctgttcgatctgatcctgtccacacttaacgacgatatcatgcgggcgatcgaggccgatctcgtcgccgtgcgccagcgcgacccggcctgcacgacgtttcttcacgcgctcctgaacctcaaggggtttcatgcgctgcagacgcaccgcatcgcccacgcgatctggaacgccggccgcccggaaatcgccacctggctcgccaatctcgcctcgctggtcttcggcccggatatccatccggccgcacggatcggcgcttccatcatgctcgaccacggctcgggcatcgtcatcggcgaaacggcggtgatcgaggatgaagtctcgatcctgcagaatgtcacgctcggcggcaccggcaaggaaaccggcgaccgccatccgaaaatccgccatggcgtgatgatcggggccggcgccaagatcctcggcaatatcgaaatcggcgccttcagcaagattgccgccggcagcgtcgtgctgaagccggttcccgaacattgcacggtcgccggcgtgccggcaacgttggtgcgcgtccaccgcgccgacgaaatccccgccgagacgatggaccagaatatttaa

SEQ ID NO: 6189 - protein, 272 aa, Rhizobium leguminosarum bv. trifolii WSM2304
MPKSTGLGLAEQQPQSPDNAFVWAVICAEALELAAREPILQHLLAAQITATSGNREIIARVLAARLAATQVETGDLFDLILSTLNDDIMRAIEADLVAVRQRDPACTTFLHALLNLKGFHALQTHRIAHAIWNAGRPEIATWLANLASLVFGPDIHPAARIGASIMLDHGSGIVIGETAVIEDEVSILQNVTLGGTGKETGDRHPKIRHGVMIGAGAKILGNIEIGAFSKIAAGSVVLKPVPEHCTVAGVPATLVRVHRADEIPAETMDQNI

SEQ ID NO: 6190 - DNA, 834 bp, Rhodospirillum centenum SW
  CDS (1)..(834): transl_table=11
atggactccgcccgccgggagcggccgggcgccgccgcgaccgtgtgggacgcgctgcggcgggaggctgcctgtctggtgggggccgagccctccatggcgcggccgctggaccgctcggtgctgcgccacgcggacatggcgggggcactggccgcactgctctccggcaagctggccggggagatggaggtggcgaccctggccgacctgatcgaccgggcgctggcggacgaccccgacatcgtggaggcggcggccgaggacctggtcgccgtgcgcgaccgcgacccggccgcggcggggcttgcgcaccccttcctgcacttcaagggctatcaggcgctgcaggcgcaccgggtggcgcggcactactggcatgccggccgcaggctggtcgccttccatatccagtccgtcgtgtccgaacggttcggggtggacatccatcccaacgcccgcatcggccgacgcgtgctgatcgaccacggcacgggcgtcgtgatcggggagacggcggtggtgggggacgatgtctccatcctccagggcgtcaccctgggcggcaccggcaaggaggccggggaccggcatccgaaggtgcgcaacggcgtgctgatcggtgccggggcgaagatcctgggcaacatccaggtcggcatgtgcgcgcgcatcggcgccggcagcgtcgtgctgcatccggtcccggccttcgccacggtggcaggcgtgccggcccgcctggtcgggcgccggtcggacgaggtgccggcccggaccatggaccattcgctgccggagtcggtgttcgtggagcagggcgccgggatctga

SEQ ID NO: 6191 - protein, 277 aa, Rhodospirillum centenum SW
MDSARRERPGAAATVWDALRREAACLVGAEPSMARPLDRSVLRHADMAGALAALLSGKLAGEMEVATLADLIDRALADDPDIVEAAAEDLVAVRDRDPAAAGLAHPFLHFKGYQALQAHRVARHYWHAGRRLVAFHIQSVVSERFGVDIHPNARIGRRVLIDHGTGVVIGETAVVGDDVSILQGVTLGGTGKEAGDRHPKVRNGVLIGAGAKILGNIQVGMCARIGAGSVVLHPVPAFATVAGVPARLVGRRSDEVPARTMDHSLPESVFVEQGAGI

SEQ ID NO: 6192 - DNA, 834 bp, Vibrio splendidus LGP32
  CDS (1)..(834): transl_table=11
atggatggaaaaatgaaacactgtgaacagcaaaaagtttggcaatgcatagtgaaggaagctcgacagcagtctgagcaagaacctatgcttgcgagtttttatcatgccacgatcatcaaccatgaaagtttaggcgcagcccttagctacatcctagcaaacaagctaaagacggcttcaatgccagcaatggcagtacgtgaagtggttgaacaagcatttaagcaggatcaatcgattattgatgcggcagcttgtgatatttgcgcgacggtaaatcgagatcctgcggtcgagatgtactcgatgcctctactttatctgaaaggctaccacgctctgcaaggttaccgagtagctaattggttgtggaaacaagggcgcattgctcttgccacttacctacaaaaccaaatttcagtcgcttgccaagttgatatccaccctgccgcgcgtatcggtaaagcaatcatgctcgatcacgctactggtattgtgattggtgaaacagcagtagtcgaaaatgatgtatcgatccttcaagacgtgacccttggtggtaccggtaaagaaggcggcgatcgtcaccctaagattcgcgaaggtgtgatgattggggctggtgctaaaatactcggcaacattgaagtaggtgaaggcgcgaagattggttcatgctctgtggtactacaagcagtgccacctcatacaacagtcgcaggcgttcctgcaaaaattgtcggaaaaccgaaaacagataaaccatctttagatatggaccaaggcttcaatggtcgctcgcaaaatttcattcatggtgatggaatataa

SEQ ID NO: 6193 - protein, 277 aa, Vibrio splendidus LGP32
MDGKMKHCEQQKVWQCIVKEARQQSEQEPMLASFYHATIINHESLGAALSYILANKLKTASMPAMAVREVVEQAFKQDQSIIDAAACDICATVNRDPAVEMYSMPLLYLKGYHALQGYRVANWLWKQGRIALATYLQNQISVACQVDIHPAARIGKAIMLDHATGIVIGETAVVENDVSILQDVTLGGTGKEGGDRHPKIREGVMIGAGAKILGNIEVGEGAKIGSCSVVLQAVPPHTTVAGVPAKIVGKPKTDKPSLDMDQGFNGRSQNFIHGDGI

SEQ ID NO: 6194 - DNA, 846 bp, Methylobacterium chloromethanicum CM4
  CDS (1)..(846): transl_table=11
gtgaccgcagccctggcgatcgtcccgcccctgcgggcgacgagccgcagcacggcggagggggatgtctgggcggcgatgcggagcgaagccgaggcggcgctgatcgaggagccgctctatgcgggcctgatccaggcgacggtgctcgaccagcgcagcctgtcggaggctctggcctaccgcctcgcccaccggctcggcgacggcgacctgtcgcggctcaccatgcgcgatctctgcttctccgcattcgaggccgacccgcatgcggggctgcacgccgtgcgcgatctcattgccatccgcgagcgcgacccgacctgccggcgctatctcgatccgttcctgttctacaagggtttcgccgcgctcgaaggctaccgggtggcgcactggctctggcatcagggccgggcgacgctcgccctgcacgtgcagagccgcatctccgaggtgttcggctgcgacattcacccggcggcgcggatcggctccggggttttcatcgatcacgccaccggcgtcgtcatcggcgagactacggtcgtggccgacgacgtctcgatcctccagtcggtgacgctcggcggcaacggcaaggagagcggcgaccggcatccgaagatcgcccgcggcgtgctcctcagcgtcggcgccaaggtgctcggcaacatccgggtcggggaaggcgccaaggtcgccgccgccgcagtggtgctgcacgaggtgcccgcccataccaccgtcgcgggcgtgccggcgcgggtcgtctctcgcctgcggagcgacgaggagcccgcccagaccatggatcagtccttcggtttcggcgacgggatctga

SEQ ID NO: 6195 - protein, 281 aa, Methylobacterium chloromethanicum CM4
MTAALAIVPPLRATSRSTAEGDVWAAMRSEAEAALIEEPLYAGLIQATVLDQRSLSEALAYRLAHRLGDGDLSRLTMRDLCFSAFEADPHAGLHAVRDLIAIRERDPTCRRYLDPFLFYKGFAALEGYRVAHWLWHQGRATLALHVQSRISEVFGCDIHPAARIGSGVFIDHATGVVIGETTVVADDVSILQSVTLGGNGKESGDRHPKIARGVLLSVGAKVLGNIRVGEGAKVAAAAVVLHEVPAHTTVAGVPARVVSRLRSDEEPAQTMDQSFGFGDGI

SEQ ID NO: 6196 - DNA, 861 bp, Methylobacterium chloromethanicum CM4
  CDS (1)..(861): transl_table=11
atgtccgccagtccgtcgctcagcccggcttccgggcgcgaaggcatcgccggaatcgtcgatccgctctggacgcgcgtgcgaaccgaggcggaaacggtggtgcgcgacgagccgcagctcgcctcgttcttcgtggcgaccatcctcaaccatccgagcctggaagcggcggtggcgcaccgcgtcgccacccgcctcggccacgcctcgctctcgagcgaactcgtcgcccacggtttccacgaagcgcttcaggacgacgttcgcatcggccagagcatgcgcgccgacatcctcgcggtgatggaccgcgacccggcgacgacccgggcgctcgagccgctgctctacttcaagggcttccacgcgatccaggcgcaccgcctcgcccactggtactggggccagggccggcgcgacctcgcgctctacctgcagagccgatcgtcggaggtgttccagaccgacatccacccggccgcccggatcgggcgcggggtgttcttcgaccatgcgaccggggtcgtgatcggctccaccgcggtgatcgaggacgacgtgtcgatcctgcacgcggtgacgctcggcggcacgggcaagcatggcggcgaccgccaccccaagatccgccgcggcgtgatgatcggcgcgggcgccaagattctcggcaacatcgaggtcggggcctgcgcccgggtcgcggccggctcggtcgtgctccggtcggtgccggcccacaccaccgttgtcggcgtgccggcgcgggtcgtcggtgcggccggctgcgccgagcccgcccgctcgatggaccagctcgtggcgatgagcgagttcatcgatatcgccggcggaatctga

SEQ ID NO: 6197 - protein, 286 aa, Methylobacterium chloromethanicum CM4
MSASPSLSPASGREGIAGIVDPLWTRVRTEAETVVRDEPQLASFFVATILNHPSLEAAVAHRVATRLGHASLSSELVAHGFHEALQDDVRIGQSMRADILAVMDRDPATTRALEPLLYFKGFHAIQAHRLAHWYWGQGRRDLALYLQSRSSEVFQTDIHPAARIGRGVFFDHATGVVIGSTAVIEDDVSILHAVTLGGTGKHGGDRHPKIRRGVMIGAGAKILGNIEVGACARVAAGSVVLRSVPAHTTVVGVPARVVGAAGCAEPARSMDQLVAMSEFIDIAGGI

SEQ ID NO: 6198 - DNA, 807 bp, Haemophilus parasuis SH0165
  CDS (1)..(807): transl_table=11
atgacaaaccaaccgcttgatcttatttggcagaatattcgtaatgaagcacaagagcttgtaaatagtgagccgatgcttgccagtttttttcacgcaaccattctgaaacatcatcatttaggcgatgcgttaagctatattttggcaaacaaactggcaaatgcgattatgccggcaattgcattaaaagagatcattgaagaagcctatcaagcagatccgcaaattattgccagtgctgcctgcgatattgaagctgttcgtactcgagatcctgcggtcgataaatggagtacgcctttgctttatctcaaaggttatcacgctttgcaaagctatagagtcacccattatttgtggcaacaagggcgaaaagctttggctatttatctgcaaaatgagatttccgttgcttttgatgtggatattcaccctgcggctcgtgttggttgtggcattatgttagaccacgccacggggattgtggtgggagaaacggcagtgatcgaaaacgatgtgtctattttgcaaggtgtaacgctaggtggtacaggtaaagaacacggagatcgccacccgaaaattcgtgaaggcgtgatgattggggctggggctaaaattttaggtaatattgagattggtcgttactcaaaaattggggcaaattcggttgtattacaagcggtgcctgaatatgccactgcagctggtgtccctgctcgaattattgggcattctcaacaacaaaaacccgcttttgaaatgaatcaatattttgatgataccaataaagagatcaattga

SEQ ID NO: 6199 - protein, 268 aa, Haemophilus parasuis SH0165
MTNQPLDLIWQNIRNEAQELVNSEPMLASFFHATILKHHHLGDALSYILANKLANAIMPAIALKEIIEEAYQADPQIIASAACDIEAVRTRDPAVDKWSTPLLYLKGYHALQSYRVTHYLWQQGRKALAIYLQNEISVAFDVDIHPAARVGCGIMLDHATGIVVGETAVIENDVSILQGVTLGGTGKEHGDRHPKIREGVMIGAGAKILGNIEIGRYSKIGANSVVLQAVPEYATAAGVPARIIGHSQQQKPAFEMNQYFDDTNKEIN

SEQ ID NO: 6200 - DNA, 873 bp, Caulobacter crescentus NA1000
  CDS (1)..(873): transl_table=11
atgctggcctcgcgcctgggaagggagatcccgatgccgaagcatctcgaagtggtgacgtccgacaccgaaacgccggtgtgggtcgcgctgcgcaaccaggccgaacacgccgccaaggccgaaccggcgctggcgtcgctgctgaacgcggtgatcctcagccacgacaacctcgccgacgccctgacgttccagctggcccgaaagctgggcgaccaggaaatgcgggcgatgacggcgcgcgagttcgccgccgacgccttcgaggatgacctctcgatcgtcgaagccgccgaggccgacctcaaggccgtgttcgagcgcgatccggcctgcaagggctatgtccagccgttcctgttcttcaagggctttctggcgctgcagacccaccgcgtgtcgcactggctgtggaaccagggccgcgagaccctggccttctatctgcagagccgctctagcgaggtcttccaggtcgacatcaatcccgccgccaagatcggcaagggcgtgttcatcgaccacggcaccggcatcgtcatcggcgagacggcggtcgtcggcgacgacgtctcgatgctgcatggcgtgaccctgggcggcaccggcgccgagcgcggcgatcgccaccccaagatcggcaagggcgtgctgctgggcgcgggcgccaaggtgctgggtaacatcaccgtcggcgactacgccaaggtggcctcgggctcggtggtcctgcgacccgtgccggcccactgcacggcggccggcgtgcccgcgcgcctggtcaactgcccgacctgcgaagaacccgccaagaccatggaccacaccctggccgaagcggtgtattcgacctccagctacgagatctga

SEQ ID NO: 6201 - protein, 290 aa, Caulobacter crescentus NA1000
MLASRLGREIPMPKHLEVVTSDTETPVWVALRNQAEHAAKAEPALASLLNAVILSHDNLADALTFQLARKLGDQEMRAMTAREFAADAFEDDLSIVEAAEADLKAVFERDPACKGYVQPFLFFKGFLALQTHRVSHWLWNQGRETLAFYLQSRSSEVFQVDINPAAKIGKGVFIDHGTGIVIGETAVVGDDVSMLHGVTLGGTGAERGDRHPKIGKGVLLGAGAKVLGNITVGDYAKVASGSVVLRPVPAHCTAAGVPARLVNCPTCEEPAKTMDHTLAEAVYSTSSYEI

SEQ ID NO: 6202 - DNA, 816 bp, Agrobacterium radiobacter K84
  CDS (1)..(816): transl_table=11
atgtcccagacaggtacggcaattgccggacattcccctgccacaccaggcagcgtctgggacgtgattcgccatgaggccatcgacctcgccggccgcgaaccgacgcttcgcccattgctgacgacgcagatcgtcgcgacgcggtcggatgcagaaagcctcgccaatgtcctggtcgcccggctctccactgccgggatagagacccgcgacctcttcgccctcttccaggatgtgctgacgcgccatcccgagatcctgccggcgacggaagccgaccttgtggccgtccgcactcgcgatcccgcctgcacgacctatctgcatgcgctgctcaatctcaagggctttcacgccctgcagacccaccgcatcgcccatgcgctctggatggagggccggccggaaatcgccagctggctgtccaacctcgcttcgctcgtcttcggcccggatatccatccggcagctaagatcggcgcgtccatcatgctcgaccacggctccggcattgtcatcggcgaaaccgccgttatcgaggacgaagtctcgatcctgcagaacgtcacgctcggcggcaccggcaagcaaaccggcgaccggcatccgaagatccgccatggcgtgatgatcggcgccggcgcgaagatcctcggcaatatcgaagtcggcgccttcagcaaggtggcggcgggcagcgtcgttgtgaaacccgtgccaccccactgcaccgtcgccggcgtcccggccgtggtcgtccgcatccaccccgccgacgagatccctgcggagacgatggatcagaatatctag

SEQ ID NO: 6203 - protein, 271 aa, Agrobacterium radiobacter K84
MSQTGTAIAGHSPATPGSVWDVIRHEAIDLAGREPTLRPLLTTQIVATRSDAESLANVLVARLSTAGIETRDLFALFQDVLTRHPEILPATEADLVAVRTRDPACTTYLHALLNLKGFHALQTHRIAHALWMEGRPEIASWLSNLASLVFGPDIHPAAKIGASIMLDHGSGIVIGETAVIEDEVSILQNVTLGGTGKQTGDRHPKIRHGVMIGAGAKILGNIEVGAFSKVAAGSVVVKPVPPHCTVAGVPAVVVRIHPADEIPAETMDQNI

SEQ ID NO: 6204 - DNA, 885 bp, Agrobacterium radiobacter K84
  CDS (1)..(885): transl_table=11
atgacaactcaaacagcactgccgggcccgttcggaagagaatcggcgctggccaagacaataattggagagggcgcaatcgtcggtcatttccccagcgaggtcctatggaccaccctctgcgtggaggctcggacggtggcggacaacgatccacggcttgcccaggccatgaattcgaacatcctcgttcacccgaccttcgcccgtggtctggcctatcgcttttcagaaacactcgcgaacagggatgttgatgccggcgtactgacgtcattgtcgctggacgtttttcaatcttctcctgaaataataacgtccgcagttttggatctccaagcggtgtatgaccgggatccgagtacatccgagctactcatcccgtttctctacttcaaaggttttctggcgttacaagggcatcgaatagcacactggctttggcgggttaataagaagcatatggctcgccacatccaaagtcgcacgtgcgaagtgctgtctatcgatattcatccagccgcccatatggggagtgggattatgcttgatcatggaaatgggctcgtcattggcgaaacggccatcgttgatgacgacgtctccattctccaggatgtaaccttaggcgggacgggcaaagaaacgggagaccgccatccgaaaattcgccggggtgccctcattggtgctggggcgaaaatccttgggaatatcgaaatcggcgtcggtgccaaagtaggtgctggcagtgtcgtcgtgtcggcagtgtcggctcatacctctgtagccggcgtaccggcgcgggtggttggaaggccgaagtccgatctgccgggagtaaccatggaacaaccaactgcagatcctgactacgcaatctag

SEQ ID NO: 6205 - protein, 294 aa, Agrobacterium radiobacter K84
MTTQTALPGPFGRESALAKTIIGEGAIVGHFPSEVLWTTLCVEARTVADNDPRLAQAMNSNILVHPTFARGLAYRFSETLANRDVDAGVLTSLSLDVFQSSPEIITSAVLDLQAVYDRDPSTSELLIPFLYFKGFLALQGHRIAHWLWRVNKKHMARHIQSRTCEVLSIDIHPAAHMGSGIMLDHGNGLVIGETAIVDDDVSILQDVTLGGTGKETGDRHPKIRRGALIGAGAKILGNIEIGVGAKVGAGSVVVSAVSAHTSVAGVPARVVGRPKSDLPGVTMEQPTADPDYAI

SEQ ID NO: 6206 - DNA, 846 bp, Brevundimonas sp. BAL3
  CDS (1)..(846): transl_table=11
atgatgtcgccgaaggagcccggcatggccaagcttgaagtcgttgcggaaaccgacagcgtgtggcgccagctgcgcgcctcggccgaggccgccgcgcgcgaggagccccagctgggctcgcagatgaatgcggtcatcctgtcgcacgacgacctggccggcgcgctcagcttccagatcgcgcgcaagctggccgacggggaaatgagcgccatgtcggtgcgcgaggtctgcctgtcggccttcgtcgccgatccggccatggtcgcggcggcggaagccgatctgcaggcggtggccgagcgcgacccggcgatccgcaacctgttgcagcccttcctgtatttcaaaggcttccaggcgctgcaggggtggcgcgtggcccattggctgtgggggcaggggcgcgagaccctggccttccatttccagagccgaatctccgaactgttccagctggacatccatccggccgcgcggctgggcaaggggctgttcctggaccacggcaccggcatcgtcatcggcgagacggcggtggtcggcgacgatgtgtccatgctgcacaatgtcaccctgggcggcacgggggccgaacgcggcgaccgccatcccaagatcggcaagggggtgctgctgggcgccggggccaaggtgctgggcaatatccacgtcggcgactacgccaaggtggcctcgggctcggtggtgctgaaggatgtgccgtcgggctgcaccgtggccggggtgccggcgcggctggtcaactgccccaccggggccgagccggcgcggaccatggaccatacgctggcggacgtggtgtacgacttcgtgatctga

SEQ ID NO: 6207 - protein, 281 aa, Brevundimonas sp. BAL3
MMSPKEPGMAKLEVVAETDSVWRQLRASAEAAAREEPQLGSQMNAVILSHDDLAGALSFQIARKLADGEMSAMSVREVCLSAFVADPAMVAAAEADLQAVAERDPAIRNLLQPFLYFKGFQALQGWRVAHWLWGQGRETLAFHFQSRISELFQLDIHPAARLGKGLFLDHGTGIVIGETAVVGDDVSMLHNVTLGGTGAERGDRHPKIGKGVLLGAGAKVLGNIHVGDYAKVASGSVVLKDVPSGCTVAGVPARLVNCPTGAEPARTMDHTLADVVYDFVI

SEQ ID NO: 6208 - DNA, 810 bp, Octadecabacter antarcticus 238
  CDS (1)..(810): transl_table=11
atggcccagacaaatccaaaactcgcgcagatcgatccggtttggcagcgaatttgcaacgaagccgaagacgcgatccgcaatgagccgctgatcggtggcttcgtgcatacgtccgttttgcaccacaaatcgcttgagcatgcgctggcgtaccgtatttcgatgaagctcgcatcctctgagatgtcggaccaaatgctgcgcgagattgctgatcttgcatatgctgctgatccctatctggccgaggctgcgcgcgccgatatcgtggcgatctatgaccgcgatcctgcaagtcatcgattcttgcagccgctgttgttctttaagggttttcaagctgttcaagcttaccgcattggtaattcgttgtggaaacaaggccgtaaagatttggcctattatgtgcagatgcggatttctgagatttttggcgtggatattcaccccggtgcaaccatcggcaaggggttgatgattgatcacgcccattcgatagtgatcggtgagacggctgtggttggcgacaatgtgtcgatgctgcattccgtgacgctgggtggtaccggcaaagaagaagaagaccgtcaccccaaaatcggtgatggcgtgttgatcggtgccggagcaaagattttaggcaatatcactgtcggccattgcagccgcatcgcggcgggttctgtggtgttggaagatgtggcaccaatgaagacggtggcgggggttccggccaaggttgtcggcgaggcgggctgttcgcagccgtcgcgcacaatggatcagttgttgcgcacccacgggtag

SEQ ID NO: 6209 - protein, 269 aa, Octadecabacter antarcticus 238
MAQTNPKLAQIDPVWQRICNEAEDAIRNEPLIGGFVHTSVLHHKSLEHALAYRISMKLASSEMSDQMLREIADLAYAADPYLAEAARADIVAIYDRDPASHRFLQPLLFFKGFQAVQAYRIGNSLWKQGRKDLAYYVQMRISEIFGVDIHPGATIGKGLMIDHAHSIVIGETAVVGDNVSMLHSVTLGGTGKEEEDRHPKIGDGVLIGAGAKILGNITVGHCSRIAAGSVVLEDVAPMKTVAGVPAKVVGEAGCSQPSRTMDQLLRTHG

SEQ ID NO: 6210 - DNA, 822 bp, Salmonella enterica subsp. enterica serovar Paratyphi C strain RKS4594
  CDS (1)..(822): transl_table=11
atgccgtgtgaagaactggaaatcgtctggaagaatattaaagctgaagcccgcgctttagctgactgtgagcctatattggccagtttttatcacgccacgctactcaagcatgaaaatctgggcagtgcgctgagctatatgctggcaaataaactggcttcgcccatcatgcccgctatcgctatccgtgaagtagttgaagaagcctatgccgccgacccggaaatgatcgcgtcggcagcctgcgatattcaggccgtgcgcactcgcgatccggcggtggataaatactccacgccgctgttatatctgaaaggctttcatgcgctacaggcctaccgcattggtcactggttgtggaataaaggtcgccgcgcgctggctatcttcctgcaaaatcaggtttcggtctcgtttcaggtggatattcacccggcagcgaaaattggccgcgggattatgctcgaccatgccaccggtattgtggtgggggagacggcggttattgaagatgatgtgtcgatcctgcaatccgtcaccctgggcggtaccgggaaaacgagcggcgatcgccatcctaaaatccgcgaaggcgtgatgattggcgcgggcgcgaaaattctcggcaatatcgaggtggggcgcggcgcgaaaattggcgcaggttccgtcgttttacagcctgtcccgccgcacactaccgccgcaggcgttccggcgcgtattgtcggcaagccgggcagcgataagccgtcgatggatatggaccagcatttcaacgggatacaccatacgtttgagtatggcgacggcatctga

SEQ ID NO: 6211 - protein, 273 aa, Salmonella enterica subsp. enterica serovar Paratyphi C strain RKS4594
MPCEELEIVWKNIKAEARALADCEPILASFYHATLLKHENLGSALSYMLANKLASPIMPAIAIREVVEEAYAADPEMIASAACDIQAVRTRDPAVDKYSTPLLYLKGFHALQAYRIGHWLWNKGRRALAIFLQNQVSVSFQVDIHPAAKIGRGIMLDHATGIVVGETAVIEDDVSILQSVTLGGTGKTSGDRHPKIREGVMIGAGAKILGNIEVGRGAKIGAGSVVLQPVPPHTTAAGVPARIVGKPGSDKPSMDMDQHFNGIHHTFEYGDGI

SEQ ID NO: 6212 - DNA, 810 bp, marine gamma proteobacterium HTCC2148
  CDS (1)..(810): transl_table=11
atgtctgcaactaagcctgacctggtctgggaccggattcgtacagagactcagaagcacgcgcaggaagaacctgtgctggcgagttttctgcattcaacaattctcaaccatgattccctggaatgcgccctgagcttccatctcgccagccagctggatagccccaccgtaacctcactgttattgcgcgaggtcatgctgcaggccatgcgagccgacgatgcaatcggcgaagccattcgcgccgacctgttagcggtagtagaacgcgattcggccagccacgaattgtatattccattcctctacttcaaaggctttcatgcattacaaagccaccgcattgcgcactggctgtggcacaacaatcgaaagtctatgggcctgtttttccagaatcgaatctctgtagaatttggtgtcgacattcacccggccgcaaaaatgggccagggcatcatgctggaccacgccacagggttggtcataggggaaactgctgtcgttggtaataacgtttccatcctgcaatcggtcacactcggaggaacggggaagcaggacggtgaccggcaccccaagattggtgatggcgtactcatcagcgccggagcgaaaattctagggaatatttgtgttggcgatggcgccaaggttggagccggcagcgtagttctggaagacgtacccccacatactacggttgcaggtgttccggcaaaagtagtaggccgccccgcgaccaatgctcccgccctggacatgaatcacgatttcttctgtgacagcggcgatgtagagggttag

SEQ ID NO: 6213 - protein, 269 aa, marine gamma proteobacterium HTCC2148
MSATKPDLVWDRIRTETQKHAQEEPVLASFLHSTILNHDSLECALSFHLASQLDSPTVTSLLLREVMLQAMRADDAIGEAIRADLLAVVERDSASHELYIPFLYFKGFHALQSHRIAHWLWHNNRKSMGLFFQNRISVEFGVDIHPAAKMGQGIMLDHATGLVIGETAVVGNNVSILQSVTLGGTGKQDGDRHPKIGDGVLISAGAKILGNICVGDGAKVGAGSVVLEDVPPHTTVAGVPAKVVGRPATNAPALDMNHDFFCDSGDVEG

SEQ ID NO: 6214 - DNA, 819 bp, gamma proteobacterium NOR51-B
  CDS (1)..(819): transl_table=11
atgcctgctattcacgccgctatcggagcgcccgccaccagggattcgatctgggaacggatccgtgaggaaactcgggccgccgccgccgaagagcctattcttgcaagctttctgcacgccaccattttgcatcacgatgaactcgagtgcgcgctcagcttccatttggccaaccagctcgggagcaccatggcgtcatcgatgacgctgcgggaaatcattctccaggcgtttcgggatgacgagcacatcagggcggcgatccgcgctgacctgaatgcggtgctcgagcgcgactccgcctgcaatgaactgtatctgccgtttttgtatttcaagggctttcaggcgctgcaaacccatcgggtggcgcactggctatggggtcacgaccgacagtcgctggcggcatttctacagagccaggtatccgccaaattgggggtcgatatccatcccgcggcgcgctttggtagcggcatcatgctcgatcacgccacggggctggtggttggagaaaccgcagtggtgggcaacgatgtctcgattttgcaatcggtcaccctcggtggtaccggcaaagaaaccggcgatcgccacccgaaaattggcgatggcgtactgattagcgcgggggcaaagattctcggcaatattcgcgtcggcgagggcgccaaggtaggtgccggatcggtggtgctgcaggaagtgccgccgcacacgacggtagccggggttcccgccaaagtggtggggcgacccagctccgaatcacccggtcttgatatggatcacgcgctacccgacgattactga

SEQ ID NO: 6215 - protein, 272 aa, gamma proteobacterium NOR51-B
MPAIHAAIGAPATRDSIWERIREETRAAAAEEPILASFLHATILHHDELECALSFHLANQLGSTMASSMTLREIILQAFRDDEHIRAAIRADLNAVLERDSACNELYLPFLYFKGFQALQTHRVAHWLWGHDRQSLAAFLQSQVSAKLGVDIHPAARFGSGIMLDHATGLVVGETAVVGNDVSILQSVTLGGTGKETGDRHPKIGDGVLISAGAKILGNIRVGEGAKVGAGSVVLQEVPPHTTVAGVPAKVVGRPSSESPGLDMDHALPDDY

SEQ ID NO: 6216 - DNA, 798 bp, gamma proteobacterium NOR5-3
  CDS (1)..(798): transl_table=11
atgatgcccggaatcgacgacccgatctggcagagaatctgtgaagaaacacggaaacactcgcaggacgagcccattctcgccagctaccttcacgcgaccattttgaatcacaagcgaatcgaacgttcgctgagctttctgctggccaaccaattagacagccctgcggcatcatctttgctgctacgcgaagttatgctcgaggcatttgaagcggaccccaagatactcgatgcggtgcgcgccgacttactggctgtgctggaccgagactcggcaacgcatgagatgtacattccctttttgtactacaaagggttccacgcactgcaggctcaccgagtcgcccattggctgtggaagcagggccgccagcctctggcgctgttttttcagaaccgtgtaagcacaaagtttgccgtagacattcatccggcggcccacatcggcaagggcatcatgctcgatcacgccacgggcctggtgatcggcgaaaccgctcgcgttggcaacaatgtctccatactgcagtcggtcaccctcggcggcaccggcaaggaagatggcgaccgtcatcccaaaatttgcgacggtgtactcatcagtgcaggcgccaaaattctgggcaatatctgcgtcggtgaaggtgcgaaggtcggcgcgggaagcgtcgttctcgagaatgtagcagcgcacaccacagtggctggcgtgcccgccaaagtggtcggcaaacccgctaccgatcagcccgcgctggacatggatcactgctggccctgctgcgacgactaa

SEQ ID NO: 6217 - protein, 265 aa, gamma proteobacterium NOR5-3
MMPGIDDPIWQRICEETRKHSQDEPILASYLHATILNHKRIERSLSFLLANQLDSPAASSLLLREVMLEAFEADPKILDAVRADLLAVLDRDSATHEMYIPFLYYKGFHALQAHRVAHWLWKQGRQPLALFFQNRVSTKFAVDIHPAAHIGKGIMLDHATGLVIGETARVGNNVSILQSVTLGGTGKEDGDRHPKICDGVLISAGAKILGNICVGEGAKVGAGSVVLENVAAHTTVAGVPAKVVGKPATDQPALDMDHCWPCCDD

SEQ ID NO: 6218 - DNA, 822 bp, Vibrio parahaemolyticus 16
  CDS (1)..(822): transl_table=11
atgaaacattgcgaaaaaaagaacgtttggcaagcgattgttcgtgaagcaagagagctctcggagcaagagcctatgcttgcgagcttttatcatgccacgatcattaaacacgacagcttagcgtcggcgttgagctacattcttgccaacaagctcaatactgcttcaatgccggctatggcggtacgtgaagtcgttgaagaggcgtttaatgccgatccaaagattaccgaagccgcagcgtgtgacatttgcgcgacggtaaatcgagatccagcggtcgcaatgtactcaatgccattactctatttgaaagggtatcacgcgctgcaagggtatcgcgttgctaactggctttggaagcaaggtcgagtcgctcttgcgacgtatcttcaaaaccaaatctctgtggcttgtcaggtggatattcacccagctgcccgcattggccgtggcatcatgttagaccatgcaacgggtattgtgattggtgaaaccgcggtggtggagaatgatgtctccatccttcaagatgtgacacttggcggtacaggtaaagagtgcggggatcgtcacccgaaaattcgcgaaggcgtgatgattggtgctggggcaaaaattctcggcaacatcgaggtcggcgaaggcgctaagattggttcttgctccgtagtgctgcaacccgtgcctgctcatacgaccgtggcgggggtgcctgccaagattgtcggtagaccgaaaaccgataagccgtcattggatatggaccaacaattcaatggtaaatcccaaagctttattggtggcgacgggatatag

SEQ ID NO: 6219 - protein, 273 aa, Vibrio parahaemolyticus 16
MKHCEKKNVWQAIVREARELSEQEPMLASFYHATIIKHDSLASALSYILANKLNTASMPAMAVREVVEEAFNADPKITEAAACDICATVNRDPAVAMYSMPLLYLKGYHALQGYRVANWLWKQGRVALATYLQNQISVACQVDIHPAARIGRGIMLDHATGIVIGETAVVENDVSILQDVTLGGTGKECGDRHPKIREGVMIGAGAKILGNIEVGEGAKIGSCSVVLQPVPAHTTVAGVPAKIVGRPKTDKPSLDMDQQFNGKSQSFIGGDGI

SEQ ID NO: 6220 - DNA, 810 bp, Octadecabacter antarcticus 307
  CDS (1)..(810): transl_table=11
atggcccagacaaatcctaaaatcgccgagattgatccggtttggcagcgcatttgcaatgaggccgaggatgcgatccgcaacgagccgctgattggtggctttgtgcatacgtctgttttgcaccacaaatcgcttgaacgtgcgctggcgtaccgtatttcgatgaagctggcatcgtccgaaatgtcggatcaaatgctgcgcgagattgccgatcttgcctatgcgtccgatccgtatttggccgaggccgcacgcgcggatattgttgcgatctatgaccgcgatcccgcaagtcatcggtttttgcagccgctgttgttcttcaagggctttcaagctgttcaagcctatcgaattggtaacgcgttgtggaaacagggtcgtaaagatcttgcctattacgtgcagatgcggatttctgagattttcggtgtggatattcatcccggtgcgaccatcggcaaggggctgatgatcgaccacgcccactcaatcgtgatcggtgagacggctgtggtcggggacaacgtgtcgatgctgcattcggtcactttagggggcaccggcaaagaagaagaggaccgtcaccccaaaatcggcgatggcgtattgattggggctggagcgaagattcttggcaatatcactgttggccattgcagccggattgcggcagggtccgtggtgttggaagatgtcgcgcctatgaagaccgtggctggtgttccggccaaagttgtgggcgaagcgggctgttcgcagccgtcgcgcacgatggatcagttgttgcgcacgcacggataa

SEQ ID NO: 6221 - protein, 269 aa, Octadecabacter antarcticus 307
MAQTNPKIAEIDPVWQRICNEAEDAIRNEPLIGGFVHTSVLHHKSLERALAYRISMKLASSEMSDQMLREIADLAYASDPYLAEAARADIVAIYDRDPASHRFLQPLLFFKGFQAVQAYRIGNALWKQGRKDLAYYVQMRISEIFGVDIHPGATIGKGLMIDHAHSIVIGETAVVGDNVSMLHSVTLGGTGKEEEDRHPKIGDGVLIGAGAKILGNITVGHCSRIAAGSVVLEDVAPMKTVAGVPAKVVGEAGCSQPSRTMDQLLRTHG

SEQ ID NO: 6222 - DNA, 849 bp, Pseudovibrio sp. JE062
  CDS (1)..(849): transl_table=11
atggtgcaaatttcttcaagtagccccaaggagctggcctctcatgatcctgtttgggatcgcgtgaaagcagaagctcaagccatggccagctctgagccagcgcttgcgtcttttgtgtatgagacggtgctgaatcactcttctttggaggaagcgattgttcatcgtgtggcggaccgtctgggccacgtggttgtttcttcttctctcattcgtcagacctatctggatgcgctggatcaggcgccggagatcgcgcagtctttccgcgttgatctttcagctgtttttgatcgcgatcctgcctgcgaccgttttcttgagccactcctttacttcaaaggcttccacgcgctgcaaacccatcgcctggcgaactggctttgggctcagggccgcgaagattttgcgctttatttgcagagccgtagttctgaagtgttccagatggacattcatccgcaggttccaatcgggcgcggcgtgttcttcgatcacggtacaggcattgtggttggcggtactgctgttattgaagatgatgtttccatccttcagggtgttacccttggcgggacaggtaaggtttccggcgatcgtcatccgaagatccgtcagggtgttctgattggtgccggtgccaaagttcttggcaatctggagattggccattgctcacgtgtggcggctggttctgttgttctgaaagacgttgagccatgcaccacagtggcgggtgttcctgcaaaggttgtgggcgaagctggttgcgaccaaccagcccgggccatggatcaaatgttgggccaaggtcaaggactttcctcgcaaaacaaacaaggataa

SEQ ID NO: 6223 - protein, 282 aa, Pseudovibrio sp. JE062
MVQISSSSPKELASHDPVWDRVKAEAQAMASSEPALASFVYETVLNHSSLEEAIVHRVADRLGHVVVSSSLIRQTYLDALDQAPEIAQSFRVDLSAVFDRDPACDRFLEPLLYFKGFHALQTHRLANWLWAQGREDFALYLQSRSSEVFQMDIHPQVPIGRGVFFDHGTGIVVGGTAVIEDDVSILQGVTLGGTGKVSGDRHPKIRQGVLIGAGAKVLGNLEIGHCSRVAAGSVVLKDVEPCTTVAGVPAKVVGEAGCDQPARAMDQMLGQGQGLSSQNKQG

SEQ ID NO: 6224 - DNA, 813 bp, Rhodobacterales bacterium Y4I
  CDS (1)..(813): transl_table=11
atgttcaaaacgcagcacgccgtcgcctcgctggatcccgtctgggaccggatcaccaaggaagctcaggacgctgtcgactcgcagccgctgatgggcgggctgattcatgcctgtatcctgcaccacaaatcgctgcagaaggcgctgtcctaccggatttccgccaagctgtgctccaacgagatgtcgatgaccatcctgcgggagatcgtcgatgctgcctatgaggccgaccccggcatcgttgaggccgcgcgcgctgacctgatggcggtttatgagcgcgatccggcctgccaccggctgctgcagccgatcctctatttcaaggggtatcaggcggtgcaggcctaccggatcggccattggctgtggcagcagggcgactgggatctggcctatttcttccagatgcggatttccgagattttcggcgtcgatatccatccggcggcggtgatcggcaaggggatcatgatcgaccatgcccattccatcgtcatcggcgaaaccgcggtggtgggcgacaacgtgtcgatgctgcattcggtgacgctgggcggcaccggcaaggaggaagaggaccggcatccgaagatcggcgacggggttctgatcggtgccggcgccaaggtcctgggcaacatcaaggtcggccattgcagccggattgctgccgggtcggtggtgctggcggaggtgccgccgtgcaagaccgtcgcgggcatcccggcgcgcatcgtgggcgaagcgggctgcgatcagccctcggtcagcatggaccagcggtttccgaacggttccgactga

SEQ ID NO: 6225 - protein, 270 aa, Rhodobacterales bacterium Y4I
MFKTQHAVASLDPVWDRITKEAQDAVDSQPLMGGLIHACILHHKSLQKALSYRISAKLCSNEMSMTILREIVDAAYEADPGIVEAARADLMAVYERDPACHRLLQPILYFKGYQAVQAYRIGHWLWQQGDWDLAYFFQMRISEIFGVDIHPAAVIGKGIMIDHAHSIVIGETAVVGDNVSMLHSVTLGGTGKEEEDRHPKIGDGVLIGAGAKVLGNIKVGHCSRIAAGSVVLAEVPPCKTVAGIPARIVGEAGCDQPSVSMDQRFPNGSD

SEQ ID NO: 6226 - DNA, 837 bp, Roseobacter sp. GAI101
  CDS (1)..(837): transl_table=11
atgatttcaaagaaggatgttgtcatggcagagccccgcagaaatatcgcctcagttgatccggtttgggatcaaattctgatcgacgcccaaaaagcagtgcaagatgaaccgctgatggggggattcattcacacctgtatcctgcaccacaagtcgatagaaaaggcgttgtcctaccggattgcagccaagttatcgtcaaacgagatgtcgatgatggtgttgcgtgaaatggttcaggaggcttatgccaatgatcccagcctgataaaggccgcgcgcgcagatctggtcgcaattttcgaacgggatccagcctgccaccgccttctgcaaccgatcctgtatttcaaggggtatcaggccgttcaggcgtaccgcgttgggcatcatctttggatgaaagggcagcgcgatctagcctatttcgtacagatgcgggtaagcgagattttcggcgtcgacattcatccagcggccaagatcggcaaggggatcatgattgaccatgctcattccgtggtgatcggtgaaacggctgtggtcggggataacgtgtcaatgctgcattctgtgacccttggcgggacgggcaaggaagaacaggaccgtcatcccaagatcgaagatggcgttctgatcggtgcgggggccaaggtgttgggcaatatcacgatcggccattgcagccgtatcgctgcgggatcggtcgttctgcaagcggttccgccttgcaagactgttgccggtatccctgctcgggtcgtcggtgaggccggttgtgaacagccatctgttttgatggaccacatgttggggccgcagggcgactga

SEQ ID NO: 6227 - protein, 278 aa, Roseobacter sp. GAI101
MISKKDVVMAEPRRNIASVDPVWDQILIDAQKAVQDEPLMGGFIHTCILHHKSIEKALSYRIAAKLSSNEMSMMVLREMVQEAYANDPSLIKAARADLVAIFERDPACHRLLQPILYFKGYQAVQAYRVGHHLWMKGQRDLAYFVQMRVSEIFGVDIHPAAKIGKGIMIDHAHSVVIGETAVVGDNVSMLHSVTLGGTGKEEQDRHPKIEDGVLIGAGAKVLGNITIGHCSRIAAGSVVLQAVPPCKTVAGIPARVVGEAGCEQPSVLMDHMLGPQGD

SEQ ID NO: 6228 - DNA, 825 bp, Verrucomicrobiae bacterium DG1235
  CDS (1)..(825): transl_table=11
atgacagaacaacttgaatctatttggaattcgttgcgcgaggaggcggaagctgctgctgactcggagcgcttgctggtggcctacctgcaggagacgatattggggcaaaaatctctggaggcggcattgagctacacgctagcctcgaagttaaaggacgagattttgccgagcatcaccttgcgggatctttttctggagattttcgagggcgaagaacgcttgcgcgagacggttcgaatcgatctgcaggcggtgaaggatcgtgatccggcggccaacggctacctttcgccgtttttgtttttcaagggattcagcgctttgtccgcctatcggtttgcgaatcacctctggtatgacgaccggcgacccttggctctctatttgcagtcgcttatttcgaagacctttggggtggacatccacccggcggcgacgattggcaaaggcatattgatcgaccatgcgactggcgtggtaattggcgaaacggcggtagtgggagacaatgtttctctgttgcacaacgtgacgcttggcggcacgggcaagcagcgtggggatcgtcatccgaaggtaggaaacggcgtacttattgccgctggcgcgaaggtgttgggcaacattactataggagagggcgcgaagatcggagcaggcagcgtggtgctgcgttcggtgaagccgcattgcacggttgtcggcgtgccggccaagtcgattgggacttgtttcgaaagcgctccggctcttggcatgaaccagcaggtcgaccaggacgtttccgggacgagcgagcaaatcgattatcaagtttag

SEQ ID NO: 6229 - protein, 274 aa, Verrucomicrobiae bacterium DG1235
MTEQLESIWNSLREEAEAAADSERLLVAYLQETILGQKSLEAALSYTLASKLKDEILPSITLRDLFLEIFEGEERLRETVRIDLQAVKDRDPAANGYLSPFLFFKGFSALSAYRFANHLWYDDRRPLALYLQSLISKTFGVDIHPAATIGKGILIDHATGVVIGETAVVGDNVSLLHNVTLGGTGKQRGDRHPKVGNGVLIAAGAKVLGNITIGEGAKIGAGSVVLRSVKPHCTVVGVPAKSIGTCFESAPALGMNQQVDQDVSGTSEQIDYQV

SEQ ID NO: 6230 - DNA, 786 bp, Laribacter hongkongensis HLHK9
  CDS (1)..(786): transl_table=11
gtgttgaccaccgaccccctttggcaggcgatccgcgacgaagtcgtgcgatcggccgagcgcgaacccctgcttgccagcttcctgcacatgaccgtgctgcggcacgcctcgtttgaggacatgctggccttccacctgtccagcaagctggtctgcaacgtgatggacggccgcgcactggtcgagctgctgcacgaggcctttaccgaagacccgcacatcgtcgaagccgcgcgcgccgacctgaccgcctgctacgaccgcgacccggcctgcgaggcctactcgacgccgctgctgtactacaagggctaccacgccctgcagtgctaccgcgtcacccactggctgtggggcgccgggcgcgatgcgctggcgctgttcctgcaaaaccgcatttccgaatccatgggcgtcgacatccatccggccgcccggttcggcgaaggcatcctgctcgaccatgccaccggctttgtcgccggcgaaaccgcggtggtcggcgacaacgtgtcgatcctgcaaggcgtgacgctgggcggcaccggcaagcagtcgggcgaccgccatccgaagatcggtgccggcgtgctgctgggcgccggtgccaagatcctcggcaacatcagcctcggcgaaggcgtcaaggtcggtgccggcagcgtggtgctgagtgacgtgccgccgcacgtgaccgtggccggcgtaccggcgcgcatcgtcggccagacggccgaatcgatgcccgccctggaaatgaaccaccgcatcgattacccgtga

SEQ ID NO: 6231 - protein, 261 aa, Laribacter hongkongensis HLHK9
MLTTDPLWQAIRDEVVRSAEREPLLASFLHMTVLRHASFEDMLAFHLSSKLVCNVMDGRALVELLHEAFTEDPHIVEAARADLTACYDRDPACEAYSTPLLYYKGYHALQCYRVTHWLWGAGRDALALFLQNRISESMGVDIHPAARFGEGILLDHATGFVAGETAVVGDNVSILQGVTLGGTGKQSGDRHPKIGAGVLLGAGAKILGNISLGEGVKVGAGSVVLSDVPPHVTVAGVPARIVGQTAESMPALEMNHRIDYP

SEQ ID NO: 6232 - DNA, 828 bp, Rhizobium sp. NGR234
  CDS (1)..(828): transl_table=11
atggtcgccaagaccgaacttcgccacacggaaccgctgaaagcggtcgaccccatctgggacagcctgcgcgaagaggcgcgcctggcagccgagcgcgatccgatgcttgccgcctttctttattcgacggtggtcaaccagcattcgctggaagagagcgtggtctaccggatctgcgagcggctcgaccatcccgacctgcaggccaatctgctccaccagaccttcctggaaatgctcgaggattggcctgaatggagcacgatcctgcgcgtcgacatccaggccgtctacgaccgcgacccggcctgcacgcggttcctcgagcccgtgctctatttcaagggcttccacgcgatccagacgcaccggctcgcccactggctctggacccgcgggaggaaggatttcgccctctatctccagagccgctcctcgagcgtcttccagaccgacatcaacccggccgcgcgcgtcgggcgcggcatcttcctcgaccacgcgacgggtctcgtcgttggcgaaacggcggtcatcggcgacaatgtatcgatcctgcacggcgtgacccttggcggcaccggcaaggagggcagcgatcggcacccgaagatcggcgacggcgtgctgatcggcgccggggcgaaaatcctcggcaatatccatatcggccattgctcgcgggtggcggccggatcggtcgtgctgaaggcggttccgccgaagacgacggtggccggcgttcccgccaaggtggtcggcgaggctggatgctccgagccctcgcggcagatggaccagatcctggcgagcttcgatatctga

SEQ ID NO: 6233 - protein, 275 aa, Rhizobium sp. NGR234
MVAKTELRHTEPLKAVDPIWDSLREEARLAAERDPMLAAFLYSTVVNQHSLEESVVYRICERLDHPDLQANLLHQTFLEMLEDWPEWSTILRVDIQAVYDRDPACTRFLEPVLYFKGFHAIQTHRLAHWLWTRGRKDFALYLQSRSSSVFQTDINPAARVGRGIFLDHATGLVVGETAVIGDNVSILHGVTLGGTGKEGSDRHPKIGDGVLIGAGAKILGNIHIGHCSRVAAGSVVLKAVPPKTTVAGVPAKVVGEAGCSEPSRQMDQILASFDI

SEQ ID NO: 6234 - DNA, 822 bp, Citrobacter sp. 30_2
  CDS (1)..(822): transl_table=11
atgccgtgtgaagaactggatatcgtctggaaaaacattaaagcggaagcccgggcgctggcggaatgtgagcccatgctggccagtttttaccacgcaacgctgctcaagcatgaaaatctcggtagcgcgctgagctatatgctggcgaacaagcttgcttccccgatcatgcctgccattgcgattcgcgaagttgtggaagaggcctacgcggccgatcctgaaatgattgcttcagcggcctgtgatatccaggcggtacgcacacgtgacccggctgtcgataaatattccaccccacttctgtatctgaagggctttcatgcgcttcaggcataccgtatcggccactggctgtggcatcaggggcgtcaggcgctggcgattttcctgcaaaatcaggtctctgttaccttccaggttgatattcacccggcggcaaaaattggtcgtgggatcatgctcgatcacgccaccggtattgtggtcggtgaaaccgctgtgattgaaaacgatgtctctattttgcaatccgtcacgctgggcgggaccggtaaagcgggcggcgatcgtcatccaaaaattcgtgaaggggtgatgattggcgcgggggcgaaaattctcggcaacattgaagtcggacgcggcgcgaagattggcgcgggttccgtcgttttacagcccgtcccgccacacaccaccgccgcaggcgttccggcgcgcatcgtcggcaaacctgacagcgataagccgtccatggatatggatcagcatttcaatgggatacatcatacgttcgagtacggcgacggtatttga

SEQ ID NO: 6235 - protein, 273 aa, Citrobacter sp. 30_2
MPCEELDIVWKNIKAEARALAECEPMLASFYHATLLKHENLGSALSYMLANKLASPIMPAIAIREVVEEAYAADPEMIASAACDIQAVRTRDPAVDKYSTPLLYLKGFHALQAYRIGHWLWHQGRQALAIFLQNQVSVTFQVDIHPAAKIGRGIMLDHATGIVVGETAVIENDVSILQSVTLGGTGKAGGDRHPKIREGVMIGAGAKILGNIEVGRGAKIGAGSVVLQPVPPHTTAAGVPARIVGKPDSDKPSMDMDQHFNGIHHTFEYGDGI

SEQ ID NO: 6236 - DNA, 792 bp, Tolumonas auensis DSM 9187
  CDS (1)..(792): transl_table=11
atggcctgcaaaaaatgcgttaaaaaagacaaagcttggcagactatccgggatgaagccgtgcaaatggcagccgaagaaccgatgctggccagctttttccattccacgattattaatcacgatagtctgggggctgcactcagttttcagctggccaataaactaggcagcgtgaccatgccaccgatagtgctgcgcgaagtcattgaacaagcgctccgtaccgatccagaaattctgaatgcagttgcctgtgatatttgtgcggtcacggaacgtgatccggctgtgaacttcctttctacgcctctgctttatctgaaggggtttcaggctttacaggcttatcgtgtatcgcattggttatggctgcagggaagacagtcgctggcgttatttctgcagcatcagatttctgttgtttacggtgtggatattcatccggccgcgcagataggcttcggtatcatgctcgatcatgcgacgggcattgtcatcggggaaaccgccgttgtggggaatgatgtttctattctgcaaaatgtgacgctgggtggtacaggtaaagaacacggcgaccgtcatcctaagatccgtgaaggggtgatgattggtgctggtgccaaagtgctgggtaatattgaagtcggtgagggcgccaagattggtgcggggagtgtggtactggctccggtaccgccacacacgacagttgcgggcgtaccggcaaaagaagtcggacgaccatctacattaaaaccatcactgagtatggaacaggatatctga

SEQ ID NO: 6237 - protein, 263 aa, Tolumonas auensis DSM 9187
MACKKCVKKDKAWQTIRDEAVQMAAEEPMLASFFHSTIINHDSLGAALSFQLANKLGSVTMPPIVLREVIEQALRTDPEILNAVACDICAVTERDPAVNFLSTPLLYLKGFQALQAYRVSHWLWLQGRQSLALFLQHQISVVYGVDIHPAAQIGFGIMLDHATGIVIGETAVVGNDVSILQNVTLGGTGKEHGDRHPKIREGVMIGAGAKVLGNIEVGEGAKIGAGSVVLAPVPPHTTVAGVPAKEVGRPSTLKPSLSMEQDI

SEQ ID NO: 6238 - DNA, 822 bp, Pectobacterium atrosepticum SCRI1043
  CDS (1)..(822): transl_table=11
atgtcgacagaagaactggcactggtctggaccaatatcaaagcagaagcgcgcagtctcgcagactgtgaaccgatgctggccagcttttttcacgccacattgctgaagcatgagaatctgggtagcgccctgagctacatgttggcgaataagttagccaattcgattatgcctgcgattgctattcgtgaggtggtggaagaagcttacagcgccgatccgcatatgatcgtttctgctgcgcgcgatattcaggccgtctgcctgcgcgatcctgcggtggataaatactctacgccgctgctctacctgaaagggtttcatgcgttgcaggcttatcgcattggtcactggctttggtcgcaggatcgtaaagcactggcggtctatttccagaatcagatctcagtttcttttggtgtcgatattcacccagcggcgagaatcggttgtgggatcatgctcgatcacgcaacaggtattgtgatcggtgaaacggccgtggttgaaaacgatgtctccattctacaatccgttacgcttggcggtacgggcaaaaccagcggcgatcgtcaccctaaaattcgtgaaggtgtgatgattggcgcaggcgctaaaattttggggaacattgaagttggctgtggcgcgaaaattggtgctggttctgtcgtgctgcaatccgttcctccacatacgacggcggcaggggttccggcccgtatcgtcggtcgaccagaaagcgataagcccgccatggatatggatcagtatttcaacggtatcaaccgcggctttgaatacggcgacggcatctaa

SEQ ID NO: 6239 - protein, 273 aa, Pectobacterium atrosepticum SCRI1043
MSTEELALVWTNIKAEARSLADCEPMLASFFHATLLKHENLGSALSYMLANKLANSIMPAIAIREVVEEAYSADPHMIVSAARDIQAVCLRDPAVDKYSTPLLYLKGFHALQAYRIGHWLWSQDRKALAVYFQNQISVSFGVDIHPAARIGCGIMLDHATGIVIGETAVVENDVSILQSVTLGGTGKTSGDRHPKIREGVMIGAGAKILGNIEVGCGAKIGAGSVVLQSVPPHTTAAGVPARIVGRPESDKPAMDMDQYFNGINRGFEYGDGI

SEQ ID NO: 6240 - DNA, 822 bp, Yersinia pseudotuberculosis IP 32953
  CDS (1)..(822): transl_table=11
atgtcgtcagaagagttagaacaggtctggagcaacataaaatcagaagcaagggcactggctgaatgtgaaccgatgctggctagcttttttcatgcaacactcttgaagcatgagaatttgggcagtgcgctgagttatattctcgcgaataagttggctaatcctatcatgccagcgattgctatccgtgaagtggttgaagaagcttatcgttcagatgcgcatatgatcgtttccgctgcccgcgatattctggccgtccggttacgcgatccagccgttgataaatactccacaccgttactgtatctcaaaggttttcatgctttgcaggcttatcgtattggccattggttgtgggcgcaggatcgtaaagcgctggcgatttatctgcaaaatcaagtctctgtcgcatttggtgtggatatccaccctgcggcaaccattggttgtggcatcatgctggaccacgctaccggtatcgttattggtgaaacggctgtggttgagaatgacgtgtctattctgcaatctgtcacgcttggggggacgggcaaaaccagtggcgaccgccatccaaaaatccgtgaaggtgtcatgattggcgcaggcgcgaaaattctcggcaatatcgaggtgggccgtggtgcgaagattggtgccggttcagttgtactacaatcggtacccgctcacacgacggctgccggtgtacctgcccgtatcgttggtaaaccagagagtgataaaccctcgttggatatggatcagcatttcaatggcagcattcagggctttgaatatggcgatggtatttaa

SEQ ID NO: 6241 - protein, 273 aa, Yersinia pseudotuberculosis IP 32953
MSSEELEQVWSNIKSEARALAECEPMLASFFHATLLKHENLGSALSYILANKLANPIMPAIAIREVVEEAYRSDAHMIVSAARDILAVRLRDPAVDKYSTPLLYLKGFHALQAYRIGHWLWAQDRKALAIYLQNQVSVAFGVDIHPAATIGCGIMLDHATGIVIGETAVVENDVSILQSVTLGGTGKTSGDRHPKIREGVMIGAGAKILGNIEVGRGAKIGAGSVVLQSVPAHTTAAGVPARIVGKPESDKPSLDMDQHFNGSIQGFEYGDGI

SEQ ID NO: 6242 - DNA, 822 bp, Photobacterium profundum SS9
  CDS (1)..(822): transl_table=11
gtgagggagtgccaacagaaagagatctggcaagcaattaagctagaagcgagagcgcagtcagaacaagagcctatgttagccagtttttatcatgcgacgattattaagcatgataacttagccgccgcgttaagttatattttggcgaataaattggcgacaccatcgatgcctgcaatggctgtacgtgaagtggttgaagaagcttttgccgcagattgtatgatcaccgagtctgctgcttgtgatattcgagcggttgttgagcgcgatcctgcggtagaaatgtactctatccctctgttgtatctaaaaggttatcatgctttacaaggctaccgtgttgcgaactggctgtggaagcaaaagcgcgttgcattagcggtatacctgcagaatcaaatttccgtgacatgccaagtcgatgtccatcctgctgcggttattgggcaaggtattatgtttgaccatgcgacaggtattgttattggtgaaacggccgtgattgaaaatgatgtatcgattttacaagatgttaccttaggtggtaccggtaaagttggcggcgatcgtcaccctaaaatccgtgaaggtgtcatgattggggcgggtgcgaaagtactgggtaatattgaagtgggtgtgggggctaaaattggttcttgttccgtggtattaaaccccgttccccctcataccacagtggctggtgtacccgctaaagtggttggtcggcctagcagtgatatgccgtcaatggatatggatcagcaatttaacgggagtacgcaaacctttattgctggtgatggtatttaa

SEQ ID NO: 6243 - protein, 273 aa, Photobacterium profundum SS9
MRECQQKEIWQAIKLEARAQSEQEPMLASFYHATIIKHDNLAAALSYILANKLATPSMPAMAVREVVEEAFAADCMITESAACDIRAVVERDPAVEMYSIPLLYLKGYHALQGYRVANWLWKQKRVALAVYLQNQISVTCQVDVHPAAVIGQGIMFDHATGIVIGETAVIENDVSILQDVTLGGTGKVGGDRHPKIREGVMIGAGAKVLGNIEVGVGAKIGSCSVVLNPVPPHTTVAGVPAKVVGRPSSDMPSMDMDQQFNGSTQTFIAGDGI

SEQ ID NO: 6244 - DNA, 822 bp, Salmonella enterica subsp. enterica serovar Paratyphi A str. ATCC 9150
  CDS (1)..(822): transl_table=11
atgccgtgtgaagaactggaaatcgtctggaagaatattaaagctgaagcccgcgctttagctgactgtgagcctatgttggccagtttttatcacgccacgctactcaagcatgaaaatctgggcagtgcgctgagctatatgctggcaaataaactggcatcgcccatcatgcccgctatcgctatccgtgaagtagttgaagaagcctatgccgccgacccggaaatgatcgcgtcggcagcctgcgatattcaggccgtgcgcactcgcgatccggcggtggataaatactccacgccgctgttatatctgaaaggctttcatgcgctacaggcctaccgcattggtcactggttgtggaatgaaggtcgccgcgcgctggccatcttcctgcaaaatcaggtttcggtctcgtttcaggtggatattcacccggcagcgaaaattggccgtgggattatgctcgaccatgccaccggtattgtggtgggggagacggcggttattgaggatgatgtgtcgatcctgcaatccgtcaccctgggcggtaccgggaaaacgagcggcgatcgccatcctaaaatccgcgaaggcgtgatgattggcgcgggcgcgaaaattctcggcaatatcgaggtggggcgcggcgcgaaaattggcgcaggttccgtcgttttacagcctgtcccgccgcacactaccgccgcaggcgttccggcgcgtattgtcggcaagccgggcagcgataagccgtcgatggatatggaccagcatttcaacgggatacaccatacgtttgagtatggcgacggcatctga

SEQ ID NO: 6245 - protein, 273 aa, Salmonella enterica subsp. enterica serovar Paratyphi A str. ATCC 9150
MPCEELEIVWKNIKAEARALADCEPMLASFYHATLLKHENLGSALSYMLANKLASPIMPAIAIREVVEEAYAADPEMIASAACDIQAVRTRDPAVDKYSTPLLYLKGFHALQAYRIGHWLWNEGRRALAIFLQNQVSVSFQVDIHPAAKIGRGIMLDHATGIVVGETAVIEDDVSILQSVTLGGTGKTSGDRHPKIREGVMIGAGAKILGNIEVGRGAKIGAGSVVLQPVPPHTTAAGVPARIVGKPGSDKPSMDMDQHFNGIHHTFEYGDGI

SEQ ID NO: 6246 - DNA, 813 bp, Ruegeria pomeroyi DSS-3
  CDS (1)..(813): transl_table=11
atgatggaaacgcgcaagaaacttgcccccgtggacccggtctgggaccggattaccgccgaagcacaggacgctgtggacagagagcccctgatgggtgggctggtgcatgcctgtatcctgcaccacaagaatctcgaccgggcgctgtcctatcgcatttccgccaagctgtgctcgaacgaaatgtcgatgatggtgctgcgcgagatcgtcgatgacgcctatgacagtgcgcccgagctgatcgaggctgcgcgtgccgatctgatggccgtttacgagcgtgatccggcctgccaccggctgttgcagccgatcctctatttcaaggggtaccaggcgatgcaggcctatcgcgtggcgcattggctgtggacgcgcaagcgctatgatctggcctatttcttccagatgcgggtttccgagattttcggcgtcgatatccacccggcggcccggatcggcaaggggatcatgatcgaccatgcccattccatcgtgatcggcgaaacggcagtggtcggcgacaatgtctcgatgctgcattcggtgacgctgggcggcaccggcaaggaggaagaggatcgccaccccaagatcggcgatggtgtgctgatcggagcaggcgccaaggtgctgggcaatatcaaggtcggtcattgcagccgtatcgccgccggttcggtggtgctgagcgaagtgcccccctgcaagaccgtggcaggtatcccggccaagatcgtgggcgaggcgggctgcgatcagccctcggtcagtatggaccagaggttcccgaacggctcggactag

SEQ ID NO: 6247 - protein, 270 aa, Ruegeria pomeroyi DSS-3
MMETRKKLAPVDPVWDRITAEAQDAVDREPLMGGLVHACILHHKNLDRALSYRISAKLCSNEMSMMVLREIVDDAYDSAPELIEAARADLMAVYERDPACHRLLQPILYFKGYQAMQAYRVAHWLWTRKRYDLAYFFQMRVSEIFGVDIHPAARIGKGIMIDHAHSIVIGETAVVGDNVSMLHSVTLGGTGKEEEDRHPKIGDGVLIGAGAKVLGNIKVGHCSRIAAGSVVLSEVPPCKTVAGIPAKIVGEAGCDQPSVSMDQRFPNGSD

SEQ ID NO: 6248 - DNA, 822 bp, Vibrio fischeri ES114
  CDS (1)..(822): transl_table=11
atgaatgaatgtaagaaacacaaagtatgggaatgtattgttcgagaagcgcgtgagcaatcagaacaagaacccatgcttgcaagcttttatcatgcaaccatcattaaacatgaaaatttagcggcagcattaagttatattttagcgaataaattggctacggcttcaatgccagcgatggcggttcgcgaagtcgttgaggaagcgtttgcttcagatccaacgattactgatgctgcggcatgcgatatttgtgcaaccgtgactcgagaccctgcggtttctatgtactcaatgcctttgttgtatttaaaaggctaccacgcattgcaaggctaccgtgtatcaaactggctatggaaacagggccgtgttgcattggcaacgtacctacaaaatgaaatttctgttgcttgtcaggtggatgttcacccagctgccaccatcggtaaagggatcatgtttgaccatgctacaggtatcgttattggtgaaactgcggtagttgaaaacgacgtttctattttgcaggacgtgacacttggtggtacaggtaaagagtgtggtgatcgtcatcctaagatccgtgaaggcgttatgatcggtgctggtgcaaagattttaggcaacattgaagtaggtgttggcgctaagattggttcatgttctgtagtattgcaggctgttcctcctcatacgacggttgcgggtgttcctgcaaaaatcgttgggcgtccgagctctgaaatgccttctcttgatatggaccaacagtttaacggtaaatctcaaacctttgttgctggtgatgggatttaa

SEQ ID NO: 6249 - protein, 273 aa, Vibrio fischeri ES114
MNECKKHKVWECIVREAREQSEQEPMLASFYHATIIKHENLAAALSYILANKLATASMPAMAVREVVEEAFASDPTITDAAACDICATVTRDPAVSMYSMPLLYLKGYHALQGYRVSNWLWKQGRVALATYLQNEISVACQVDVHPAATIGKGIMFDHATGIVIGETAVVENDVSILQDVTLGGTGKECGDRHPKIREGVMIGAGAKILGNIEVGVGAKIGSCSVVLQAVPPHTTVAGVPAKIVGRPSSEMPSLDMDQQFNGKSQTFVAGDGI

SEQ ID NO: 6250 - DNA, 819 bp, Neisseria gonorrhoeae FA 1090
  CDS (1)..(819): transl_table=11
atgaaaaaaaaccatttgaacacaaccggtttcgacctctggcacaccatccgcgaagaaaccgcggccgctgccgccgccgaaccgatgctggcaagttttttgcaccaaaccgtgttgcgccacgagtccctcggctccgtccttgcctaccacctttccagcaaactcggcagcccgattatggacgtgcgcgcgctgtttgaaatttaccagcaggcattgggcagcgacacccaaatcagcaaatgtgtcgaagcagacttaaaagccatctacgaacgcgatcccgcctgcgacgaatattcgctgccgcttttatatttcaaaggcttccacgcgattcaggcacaccgcatcaaccaccggctgtatctcgacggacgcaaaacgctggcgtatttcctacaaaaccgtatgtccgaagtattcggcgtggacatccatcccgccgcccgtttaggatacgggctgatgctcgaccacgccaccggctttgttgccggagaaaccgccgtgttgggcaacaatatttcgattttgcacggcgtaacgctcggcggttcgggcaaagaaggcggcgaccgccaccccaaaatcggcgacggcgtgatgatcggcgcaaacgcctcgatattgggcaatatccgcatcggcagcaatgccaaaatcggcgcgggcagcgtcgtggtttcagacgtgccgccgtccatcacggttgtcggcgtacccgccaaacccgtggcgcgatcgctcaaaaccccgtcggcggatatggatcaaaatatccagtttgccgaaatcgactttatgatttga

SEQ ID NO: 6251 - protein, 272 aa, Neisseria gonorrhoeae FA 1090
MKKNHLNTTGFDLWHTIREETAAAAAAEPMLASFLHQTVLRHESLGSVLAYHLSSKLGSPIMDVRALFEIYQQALGSDTQISKCVEADLKAIYERDPACDEYSLPLLYFKGFHAIQAHRINHRLYLDGRKTLAYFLQNRMSEVFGVDIHPAARLGYGLMLDHATGFVAGETAVLGNNISILHGVTLGGSGKEGGDRHPKIGDGVMIGANASILGNIRIGSNAKIGAGSVVVSDVPPSITVVGVPAKPVARSLKTPSADMDQNIQFAEIDFMI

SEQ ID NO: 6252 - DNA, 819 bp, Pseudoalteromonas haloplanktis TAC125
  CDS (1)..(819): transl_table=11
atgcgacatgaaatttggcaacagcttcgcagcgaagcaaatgaagtagtaaaacgcgaacctcttttagcgagccatgtttattcgtgtattttgaaccatgaatgtttaggggcggcgctgagttttattgttgctaataaattggcagatgcggtggtgtcggcatttactattcgtgagctatttgatcagtcatttgtaaggtgtgagcgtatgctaacgcacgttgctcacgatattaaagcggtaaaagatcgtgaccctgcagccgaaacttaccttacggtaatattaaatttaaaaggtttccatgctattcaggcgcatcgtttagctaattgtttgtggacgcaaaaccgtaaagagttggcgcgctttattcaaagccgtagctcagaagtatttggcgttgatattcatcctgcttgtaaagtgggtaaaggaataatgtttgaccatgcaaccggtattgttattggtgaaacggcggtaattgaagataacgtatcaatactgcagtcggttactttaggtggcacgggcaatgagcaaggcgatcgtcaccctaaaattagagccggggtacttattggtgctggggctaaaatattaggcaatattgaagtgggcgcgggcgcgcgtattggcgcaggctctgttgtgctaagtaatgtaccgccacacactacagcggtaggtgtaccggcaaaaattattggtcgcccagattgcgaatgccctgcaaaaagtatgaaccaaaactttttagctaaacctgagcctgaaaatgaatcgcatactagctctatgctttaa

SEQ ID NO: 6253 - protein, 272 aa, Pseudoalteromonas haloplanktis TAC125
MRHEIWQQLRSEANEVVKREPLLASHVYSCILNHECLGAALSFIVANKLADAVVSAFTIRELFDQSFVRCERMLTHVAHDIKAVKDRDPAAETYLTVILNLKGFHAIQAHRLANCLWTQNRKELARFIQSRSSEVFGVDIHPACKVGKGIMFDHATGIVIGETAVIEDNVSILQSVTLGGTGNEQGDRHPKIRAGVLIGAGAKILGNIEVGAGARIGAGSVVLSNVPPHTTAVGVPAKIIGRPDCECPAKSMNQNFLAKPEPENESHTSSML

SEQ ID NO: 6254 - DNA, 807 bp, Rhodobacter sphaeroides 2.4.1
  CDS (1)..(807): transl_table=11
atggctgaggcaagaccccgtgttgcgacagtggacccggtctggcaacggatcgtggaagagggccatgccgccatccttgccgagcctcttctcggcggactcgttcattcgagcctcctgcaccatccgtccatggaacgggcgctcgcctaccgcttttcgctgaagctcgcttcgggcgagatgagcgagcagatcctgcgcgagatcgcggacgaggcctatgcgtcggatccggagctcgggcagatggcgcgggccgacatggtcgccgtctacgagcgcgaccccgcctgccatcgcttcctgcagccgatcctcttcttcaagggctatcaggcggttcaggcctatcgcgtgggccactggctctggacgaacggacggcaggacctggcctatttcgtgcagatgcgcgtgtcggaagccttcggcgtcgatgtccacccagccgcccggatcgggcgcggcatcatgatcgaccatgcgcattccatcgtcatcggcgagacggccgtcgtgggcgacaatgtctcgatgctccattcggtcacgctcggcggcaccggcaaggaggatggcgaccgccatccgaagatcggcaacggggtgctgattggggcaggggccaaggtgctcggcaacatccatgtgggccattgcagccggatcgcggccggctcggtcgtgctgcaggacgtgccgccctgcacgacggtggcgggcgtgccagcccgcgtggtgggggaagcgggctgcgcacagcccgccgtcacgatggaccatctgctcagcgacgggtga

SEQ ID NO: 6255 - protein, 268 aa, Rhodobacter sphaeroides 2.4.1
MAEARPRVATVDPVWQRIVEEGHAAILAEPLLGGLVHSSLLHHPSMERALAYRFSLKLASGEMSEQILREIADEAYASDPELGQMARADMVAVYERDPACHRFLQPILFFKGYQAVQAYRVGHWLWTNGRQDLAYFVQMRVSEAFGVDVHPAARIGRGIMIDHAHSIVIGETAVVGDNVSMLHSVTLGGTGKEDGDRHPKIGNGVLIGAGAKVLGNIHVGHCSRIAAGSVVLQDVPPCTTVAGVPARVVGEAGCAQPAVTMDHLLSDG

SEQ ID NO: 6256 - DNA, 843 bp, Pelodictyon luteolum DSM 273
  CDS (1)..(843): transl_table=11
atgcagtcagatgctgacaaaatctggaaaatcatcgtttcggaagcctccgctgaatgcaggcgcgatcctgacatcagcatgtttcttgagcagcatatccttcagttcagcgatttcgcctcatcgctggcgatgctgcttgccgtgaagctgggttccaagcactttcctcctccggtcctgcagggactgttcgaggatttctacagggattgccccgacagggtggattatgcggtgtgcgatcttgttgcaacccaggaccgtgaccctgcggctgtctactatttcgaaaccatgctgttcctgaaaggctatcaggcacttcaggcctaccgtttttcacactggctgtggaaaaacggccgcaagaccatgtcctacttcatccagaaccgcatttcagaggtctttgccgtcgatatccaccctgcggcggtaatcggcaaggggatactgcttgaccatgccacaagtcttgttatcggcgaaacggctgtcgttgacgacaacgtgtcgctgctgcatgaggtgaccctcggcggtaccggcaaggagacgggcgaccgccatccgaaggtgcataaatcggtgctgatcggtgccggtgcgaagatcctcggcaacgtggtcatcggcgagggggcaaaggtcggtgcgggcagcgtggtgctggacgatgttccgccgcattacacggtagccggcgtgccggcccagatagtgggccgtacggaggtgcaggagccttcactggacatgaaccagcgcctggtcggccgctataacgagagtgatggcaatcagccggtaaaagcagaccgcaaggcttcgcggtag

SEQ ID NO: 6257 - protein, 280 aa, Pelodictyon luteolum DSM 273
MQSDADKIWKIIVSEASAECRRDPDISMFLEQHILQFSDFASSLAMLLAVKLGSKHFPPPVLQGLFEDFYRDCPDRVDYAVCDLVATQDRDPAAVYYFETMLFLKGYQALQAYRFSHWLWKNGRKTMSYFIQNRISEVFAVDIHPAAVIGKGILLDHATSLVIGETAVVDDNVSLLHEVTLGGTGKETGDRHPKVHKSVLIGAGAKILGNVVIGEGAKVGAGSVVLDDVPPHYTVAGVPAQIVGRTEVQEPSLDMNQRLVGRYNESDGNQPVKADRKASR

SEQ ID NO: 6258 - DNA, 822 bp, Shigella dysenteriae Sd197
  CDS (1)..(822): transl_table=11
atgtcgtgtgaagaactggaaattgtctggaacaatattaaagccgaagccagaacgctggcggactgtgagccaatgctggccagtttttaccacgcgacgctactcaagcacgaaaaccttggcagtgcactgagctacatgctggcgaacaagctgtcatcgccaattatgcctgctattgctatccgtgaagtggtggaagaagcctacgccgctgacccggaaatgatcgcctctgcggcctgtgatattcaggcggtgcgtacccgcgacccggcagtcgataaatactcaaccccgttgttatacctgaagggttttcatgccttgcaggcctatcgcatcggtcactggttgtggaatcaggggcgtcgcgcactggcaatctttctgcaaaaccaggtttctgtgacgttccaggtcgatattcacccggcagcaaaaattggtcgcggtatcatgcttgaccacgccacgggtatcgttgtgggtgaaacggcggtgattgaaaacgacgtgtcgattctgcaatccgtcacccttggcggtactgggaaaactagcggcgaccgtcacccgaaaattcgtgaaggcgtgatgattggcgcgggcgcgaagattctcggcaatattgaagttgggcgcggcgcgaagattggcgcaggttccgtggtgctgcaaccggtgccgccgcataccaccgccgctggcgttccggcacgcattgtcggtaaaccagacagtgataagccatcaatggatatggaccagcattttaacggcattaaccatacgtttgagtatggggatgggatctga

SEQ ID NO: 6259 - protein, 273 aa, Shigella dysenteriae Sd197
MSCEELEIVWNNIKAEARTLADCEPMLASFYHATLLKHENLGSALSYMLANKLSSPIMPAIAIREVVEEAYAADPEMIASAACDIQAVRTRDPAVDKYSTPLLYLKGFHALQAYRIGHWLWNQGRRALAIFLQNQVSVTFQVDIHPAAKIGRGIMLDHATGIVVGETAVIENDVSILQSVTLGGTGKTSGDRHPKIREGVMIGAGAKILGNIEVGRGAKIGAGSVVLQPVPPHTTAAGVPARIVGKPDSDKPSMDMDQHFNGINHTFEYGDGI

SEQ ID NO: 6260 - DNA, 816 bp, Sodalis glossinidius str. 'morsitans'
  CDS (1)..(816): transl_table=11
atgtcgacagaagaattggaacttgtatggaacaacattaaaactgaagcgcgattgctggccgattgtgaacccatgctggccagttttttccatgcaactctgctcaagcacgaaaacctgggcagcgcattgagctatatgctggccaataaactcagcaaccccattatgcccgccattgccatccgtgaagtggtggaggaagcctacggcgccgatcccggcatgattttctccgccgcgcgcgatattcacgcggtgcgattgcgcgatccggcggtggataaatattccaccccgctgctgtatctcaaggggttccacgccctgcaggcataccggatcggccactggttgtggtatcaaaaccgtcaggcgctggcgatttatttccagaatgaaatatccgtctctttcggggtggatattcatccggcggcgcgcatcggctgcggtatcatgctcgaccacgccacgggtatcgtgattggcgaaacagcggtggtggaagatgacgtttccatcctgcaatccgtcacgctcggcggtaccggcaagaccagcggcgatcggcatcccaaaatccgcgaaggggtgatgattggcgccggcgccaccattctcggcaatatcgaggtgggcagaggggcgaaaatcggcgccggttcggtcgtcttgcgctcggtgccggtccataccaccgccgccggcgtaccggcacgggtcgtggggaaaccggacagcgaccggccatcggaagagatggatcagtcttttagcagccccggttttgaatttggcgatggtatctga

SEQ ID NO: 6261 - protein, 271 aa, Sodalis glossinidius str. 'morsitans'
MSTEELELVWNNIKTEARLLADCEPMLASFFHATLLKHENLGSALSYMLANKLSNPIMPAIAIREVVEEAYGADPGMIFSAARDIHAVRLRDPAVDKYSTPLLYLKGFHALQAYRIGHWLWYQNRQALAIYFQNEISVSFGVDIHPAARIGCGIMLDHATGIVIGETAVVEDDVSILQSVTLGGTGKTSGDRHPKIREGVMIGAGATILGNIEVGRGAKIGAGSVVLRSVPVHTTAAGVPARVVGKPDSDRPSEEMDQSFSSPGFEFGDGI

SEQ ID NO: 6262 - DNA, 822 bp, Rhizobium etli CFN 42
  CDS (1)..(822): transl_table=11
atgccgaaatcgaccggcctcggtttggccgggccacaggctcagtccctcgatagcgtattcgccgtctgggcggtgatccgcgccgaagcgaacgaccttgcgacgcgcgagccgatattgcggcagctgcttgccgagcaggtgacggacaccgccggcagccatgaaatcctcgctcgtgtgctggccgcgcggctctcagtggcgcaagttgaaacgggcgatttgttcgatctcatcctgtccacgctcgatgacgatatcatgcggaaagtcgaggcagatctcgccgccgtgcgcgagcgtgatccggcctgcacgacgtttctgcacgcgcttctgaacctcaaaggctttcatgcgctccagacccatcgcatagcccacgtgctctggaacgccggccgcccggaaatcgccacctggctcgccaatctcgcctcactggtcttcggcccggacatccatccggcagcgcagatcggcgctgccatcatgctcgaccatggctcgggcatcgtgatcggcgaaacggcggtgatcgaagacgaagtgtcgatcctccagaacgtcacgctcggcggcaccggcaaggagacgggcgaccgtcatccgaagatccgccacggcgtcatgattggcgcgggcgccaagatcctcggcaatatcgaaatcggcgccttcagcaaaatcgccgccggcagtgtcgtactgaagccggtccccgaacattgcacggtcgccggcgtgccggccgccgtcgttcgtatccatcgtgtcgacgaaatcccggccgacacgatggatcagaatatttag

SEQ ID NO: 6263 - protein, 273 aa, Rhizobium etli CFN 42
MPKSTGLGLAGPQAQSLDSVFAVWAVIRAEANDLATREPILRQLLAEQVTDTAGSHEILARVLAARLSVAQVETGDLFDLILSTLDDDIMRKVEADLAAVRERDPACTTFLHALLNLKGFHALQTHRIAHVLWNAGRPEIATWLANLASLVFGPDIHPAAQIGAAIMLDHGSGIVIGETAVIEDEVSILQNVTLGGTGKETGDRHPKIRHGVMIGAGAKILGNIEIGAFSKIAAGSVVLKPVPEHCTVAGVPAAVVRIHRVDEIPADTMDQNI

SEQ ID NO: 6264 - DNA, 819 bp, Jannaschia sp. CCS1
  CDS (1)..(819): transl_table=11
atggcgcgcactcaaacccatgtcaccgaaatcgatccggtctggagccggatcaccgacgaagcctcgaccgccatcgcctctgagcctttgctcggcgggctggtccatgcttgcgtcctccaccacccctcccttgagaaagcgctggcctaccgtgtcgcgcagaagctggcgtcctccgagatgtccgaacaattgctgcgcgaaatcgccgacgaggcgtttgcgtctgacccgacgttgggcgcgcgggcgcgggctgatatcgttgcggtgttcgaccgtgatccggcctgccaccgtttccttcaacctttgttgtttttcaaagggttccaggcggtgacggcctaccgcgttggccattggttgtgggggcagggccgccgtgacctgtcgtatttcgtccagatgcgtgtgtcagaggtctttggcgtcgatatccatccagccgcccgtgtggggcaggggatcatgatcgaccacgcccattccatcgtcattggtgagaccgcggtggtgggtgacaacgtgtccatgctacattccgtgacgcttggcggaacgggcaaggaggaagaggatcgccatccaaagatcggcaatggtgtgttgatcggggcgggggccaaggtgcttggcaacattgaaatcggccattgttcccgcatcgctgcgggctctgtcgtgttggccgacgtgccaccgatgaagaccgtcgcgggcattcccgccaagatcgtgggcgaggcaggctgcgcgcaaccgtcactgacgatggatcacctgtttggcgggcctgctgtcgcgggctga

SEQ ID NO: 6265 - protein, 272 aa, Jannaschia sp. CCS1
MARTQTHVTEIDPVWSRITDEASTAIASEPLLGGLVHACVLHHPSLEKALAYRVAQKLASSEMSEQLLREIADEAFASDPTLGARARADIVAVFDRDPACHRFLQPLLFFKGFQAVTAYRVGHWLWGQGRRDLSYFVQMRVSEVFGVDIHPAARVGQGIMIDHAHSIVIGETAVVGDNVSMLHSVTLGGTGKEEEDRHPKIGNGVLIGAGAKVLGNIEIGHCSRIAAGSVVLADVPPMKTVAGIPAKIVGEAGCAQPSLTMDHLFGGPAVAG

SEQ ID NO: 6266 - DNA, 834 bp, Saccharophagus degradans 2-40
  CDS (1)..(834): transl_table=11
atgcacaaaacaacacccatttcgacccttgcggaccaaaagtctcaggagttggacccagtttggcaaaccatccgccaagaaactcgggaacaagtggaagaagaacccgcattggcgagtttcttacacgcaactattttaaatcacgatacactagaaagcgccttgagctttcacttggcccacaaactggcaaaccctgcgatatcggccctgcaaattcgtgagattattgaagagtcgatgagccacgacagctgcattagcgaagccgtgcgcgcagatattcgcgccgttttcgatcgcgattcggcctgcaattcgtatgcattgccctttttatactttaaaggttttcacgcgttgcaagcattccgcgtggcccactgcctgtacaaacgcggtcgtaaatctttggcctatttcttacaaagccatattgcgcttacctttggggtagacattcaccctgctgcgcgcataggtaaaggcattatgatggaccacgccacaggaatagtaattggtgaaactaccgtcgtcgaagatgatgtatcgctaatgcaaggcgtcacccttggcggaaccggcaaagaagccagcgatcgtcaccccaaagtacgcaagggcgtgttggtgggcgccggcgctaaaattcttggcaatatagaaattggcgaaggggcaaaggtaggcgctggcagtgtggtgcttgaagctgtgcctccacacactacggttgttggtgtgcctgcacgcgtcgtcggtgtaccacagtcgcaaagcccagcactagatatgaaccacggtattcagtgcgattgcgagtaa

SEQ ID NO: 6267 - protein, 277 aa, Saccharophagus degradans 2-40
MHKTTPISTLADQKSQELDPVWQTIRQETREQVEEEPALASFLHATILNHDTLESALSFHLAHKLANPAISALQIREIIEESMSHDSCISEAVRADIRAVFDRDSACNSYALPFLYFKGFHALQAFRVAHCLYKRGRKSLAYFLQSHIALTFGVDIHPAARIGKGIMMDHATGIVIGETTVVEDDVSLMQGVTLGGTGKEASDRHPKVRKGVLVGAGAKILGNIEIGEGAKVGAGSVVLEAVPPHTTVVGVPARVVGVPQSQSPALDMNHGIQCDCE

SEQ ID NO: 6268 - DNA, 816 bp, Baumannia cicadellinicola str. Hc (Homalodisca coagulata)
  CDS (1)..(816): transl_table=11
atgtctattgaacagttaaaattagtatggaatagcattaaagctgaagcacgattgctagcggactgtgaaccgatgctagcaagtttttttcatgcaactttgctaaaacacgagaatttaggtagcgctttgagttatatgcttgcgaataagctatctaatcctattatgccagctattgctattagagaagtagttgaggaagcttatcgtgctgatcctgacatgattttggcagctgcgcgtgatatacatgcggttcttttgcgtgatccagcagtagagaaatattctactccactgctatatcttaagggagtccatgcactacaagcatatcgtattggtcactggctatggtaccaaaatcgccaggcattagctgtttattttcaaaaccaaatttcagtgtccttcggcgtagatatccatccagctgcgcacattggctgtggtatcatgcttgatcatgctacaagcatcgttattggtgaaactgcagtcgtagaaaatgatgtatcaatactacaatctgtaactttaggtggaacgggcaaaactagtggagatcgtcatcctaaaattcgcgaaggtgtgatgattggagcaggtgcgactatattaggtaatattgaggtgggaaaaggtgctaaaattggtgcaggttctgttgtcttgcgttctgtgccacctcatactactgcagctggagttccggctagaatagttggtaaaccagatagcgatcgaccatcagaagaaatggatcaattttttactagtcctggttttcaattcggtgatgggatataa

SEQ ID NO: 6269 - protein, 271 aa, Baumannia cicadellinicola str. Hc (Homalodisca coagulata)
MSIEQLKLVWNSIKAEARLLADCEPMLASFFHATLLKHENLGSALSYMLANKLSNPIMPAIAIREVVEEAYRADPDMILAAARDIHAVLLRDPAVEKYSTPLLYLKGVHALQAYRIGHWLWYQNRQALAVYFQNQISVSFGVDIHPAAHIGCGIMLDHATSIVIGETAVVENDVSILQSVTLGGTGKTSGDRHPKIREGVMIGAGATILGNIEVGKGAKIGAGSVVLRSVPPHTTAAGVPARIVGKPDSDRPSEEMDQFFTSPGFQFGDGI

SEQ ID NO: 6270 - DNA, 780 bp, Pseudoalteromonas atlantica T6c
  CDS (1)..(780): transl_table=11
gtggacaataatttttggcaaacgcttcgtaatgaagcacaggtgatgactgaaaaagaacccttgcttgccacttatgtagatgaatgcattttaaagcaagatgactttgcaggtgcgctgagctttattttgtccaataagttatccgacaaagtgatgtcggctaaggctttacgcaccatgcttgaccaagcttatcgcgaccagcccttgttagtagaggcgactgtgtttgatattgaagcaacctttgagcgcgaccctgcggtgaaatcgtatttaaccgtgctgctttactttaaagggtttcatgccattcaggtgcatcgttttgcgcatatgttgtggttaatgggccgccatgaattggcgttgtttattcaaagccgcagctctgaagtgttgtcagtggatattcatcctgcggcatatataggccaaggcgtgatgtttgatcatgccacgggtatcgttgtcggtgaaacggcggtgattgaagataacgtatcgattatgcaatctgtgacccttggcggtacagggaatgaagttggcgacaggcatcctaaagtgcgccatggggtgatgataggcgcgggtgccaaaatattaggtaatattgaaattggcccaggtgctaaggtcggcgctggtagtgtggtattagcggatgtgccatcacacgttacggttgcgggtgtgccagctaaaattgtgggcaagccaagttgccaaaacccctgtcaaactatgcgccagaacgttttagaagattaa

SEQ ID NO: 6271 - protein, 259 aa, Pseudoalteromonas atlantica T6c
MDNNFWQTLRNEAQVMTEKEPLLATYVDECILKQDDFAGALSFILSNKLSDKVMSAKALRTMLDQAYRDQPLLVEATVFDIEATFERDPAVKSYLTVLLYFKGFHAIQVHRFAHMLWLMGRHELALFIQSRSSEVLSVDIHPAAYIGQGVMFDHATGIVVGETAVIEDNVSIMQSVTLGGTGNEVGDRHPKVRHGVMIGAGAKILGNIEIGPGAKVGAGSVVLADVPSHVTVAGVPAKIVGKPSCQNPCQTMRQNVLED

SEQ ID NO: 6272 - DNA, 798 bp, Haemophilus somnus 129PT
  CDS (1)..(798): transl_table=11
atgtcaatagaagtatggagtcttattcgtgctgaagcagcaaaactcgctgaaaatgaaccaatgctagccagtttctttcatgcaactatcttaaaacataacaatctaggcagtgcattaagctatattcttgcgaacaaattagctaatccaattatgcccgctattgcattgcgagaaattattgaagaagcacatcaaaatcaaccgcaaattatcgaaagtgcggcttgcgatatccgggccgtgcgtcagcgagatcctgccgtagaacaatactctacaccgttactttatttgaaaggcttccacgcattgcaaagttatcgtattacccattatttatggcaacaaggacgaaaagcattggcgatctatttacaaaaccaaatatccgttgcctttgatgtagatatccatcccgcagcaagaatcggttgtggcattatgttcgatcatgccacaggtattgtgataggagaaacatctgtcattgaaaatgatgtatctattttgcaaggtgtaactttagggggaacgggtaaagaaagcggcgatcgtcatcctaaaattcgagaaggtgtgatgattgggtccggagctaaagtgttaggaaatatcgaaattgggcgttacgctaaaattggtgcaaactccgtagtgttacaatccgtttcagaatacactactgtcgctggtgtgccttctcaaatagtaggcaaaaataaaggggcgaaacctgcatttgatatggaccaatactttattgatgatgcaattaacttaaatatctaa

SEQ ID NO: 6273 - protein, 265 aa, Haemophilus somnus 129PT
MSIEVWSLIRAEAAKLAENEPMLASFFHATILKHNNLGSALSYILANKLANPIMPAIALREIIEEAHQNQPQIIESAACDIRAVRQRDPAVEQYSTPLLYLKGFHALQSYRITHYLWQQGRKALAIYLQNQISVAFDVDIHPAARIGCGIMFDHATGIVIGETSVIENDVSILQGVTLGGTGKESGDRHPKIREGVMIGSGAKVLGNIEIGRYAKIGANSVVLQSVSEYTTVAGVPSQIVGKNKGAKPAFDMDQYFIDDAINLNI

SEQ ID NO: 6274 - DNA, 843 bp, Granulibacter bethesdensis CGDNIH1
  CDS (1)..(843): transl_table=11
atgtccccagccactgctgccttatgccgccggatttccgccggttcgatccatgtcgaggatgtgtggttcaacctgtgccgtgaagcgcgggagatcgccctgaccgatccggccatggcggccgggctggaacgtgccttactggtgcatggatgtttcccggcggccctcggcgcattgatcgcccataagctgggcaatgcgtggataccggcggaccagttgctggggccgattggcgatgcgtatgagaccgatccgtctctggtagaaagcgcgatcatcgacctgacagcgatccgggaccgcgatcccgcctgcccggaccttctgaccccgttcatgtttttcaaggggttccaggccctgcaggcgtatcgcatcagccatcatctctggacccatggccgtgagcatatggcgcgggtgtttcaaagccgtatgtcggaatgcttcgcggtggatatccatcccgcggcccggctgggtcatggtatcctgatcgaccatgcgaccggtctggtgatcggtgagactgccgtggtggaggatgatgtttccatcctgcaggaggtcacgctgggcggcacggggaaagaaaccggtgaccgtcaccctaaagtgcggcgtggcgtgctgatcggggctggcgccaagatactggggaatgtgacgatcggtgaaggtgccaagatcggcgccggcagtatcgtgctcgattcggtgcttccctataccactgtcgtgggtgtgcccgcgcatccggttgggccccgtaaccagggcatgccggcactgactatggatcaaactctgccgccgcccgaatacgccatctga

SEQ ID NO: 6275 - protein, 280 aa, Granulibacter bethesdensis CGDNIH1
MSPATAALCRRISAGSIHVEDVWFNLCREAREIALTDPAMAAGLERALLVHGCFPAALGALIAHKLGNAWIPADQLLGPIGDAYETDPSLVESAIIDLTAIRDRDPACPDLLTPFMFFKGFQALQAYRISHHLWTHGREHMARVFQSRMSECFAVDIHPAARLGHGILIDHATGLVIGETAVVEDDVSILQEVTLGGTGKETGDRHPKVRRGVLIGAGAKILGNVTIGEGAKIGAGSIVLDSVLPYTTVVGVPAHPVGPRNQGMPALTMDQTLPPPEYAI

SEQ ID NO: 6276 - DNA, 825 bp, Maricaulis maris MCS10
  CDS (1)..(825): transl_table=11
atgtcactcagccaagtcgaagaacctgtcgaagcccggaccggcatcgagtccatctgggcacggctgcgtgtcgaagctgcgtcggcggccgccgaggaaccgatcctcgcaagtttcctgaacgcggccattctgcgtcacgacaagttttcgggagccctggcctatcgcattgctgcaaagctggcggatgcccagctcgactccatgctggccagggatgtggccgaagaagcgctcgccggtgatccggatattgtacagcaggccgccgccgacatgattgcgatcgacgagcgggacccggcctgcctgtccctgttgcagccctttctgtacttcaagggctatcacgccctgcaggcgcaccgggtcgcgcactggctgtggaatgaaggccgtcagacattggcctttcatctgcaaagccgtgtaggcgaacgcttcggccttgatatccacccggccgcccggatcgggcggggcgttatgctcgatcatgccacctcggtggtaatcggtgagactgctgttgtgggcgacaattgttcgatcctgcatgaagtgaccctgggcggtacgggtgctgcacacgaagaccgtcacccgaagatcggcaagggcgtcctcatcggggctggtgcccgggtgctgggaaatatcaccgtcggggatggtgcccgcatcgcggccggatcggtcgtgctgcatccggtccctgccggctgcaccgttgccggtgtgcccgccaagatcgtcggcaattgctgtgatgaaccggcaaagagcatggaccagagccttccccaaggctccggctga

SEQ ID NO: 6277 - protein, 274 aa, Maricaulis maris MCS10
MSLSQVEEPVEARTGIESIWARLRVEAASAAAEEPILASFLNAAILRHDKFSGALAYRIAAKLADAQLDSMLARDVAEEALAGDPDIVQQAAADMIAIDERDPACLSLLQPFLYFKGYHALQAHRVAHWLWNEGRQTLAFHLQSRVGERFGLDIHPAARIGRGVMLDHATSVVIGETAVVGDNCSILHEVTLGGTGAAHEDRHPKIGKGVLIGAGARVLGNITVGDGARIAAGSVVLHPVPAGCTVAGVPAKIVGNCCDEPAKSMDQSLPQGSG

SEQ ID NO: 6278 - DNA, 810 bp, Hyphomonas neptunium ATCC 15444
  CDS (1)..(810): transl_table=11
atggaaaatcctgacatcggcgccccccctccgccctggaaaaggctgcgttttgaggcgcaggcggctgcggccgaggagccaacgctggcgagctatctcaacgccgcgatcctttcgcatgccactttggggcaagcattgtcctttcatctggcggagaagctctccgggccgggcatgggcccccagcaggtgcggcacattctttcggccgtttatgacagcgcgccgggcctgatcgagtttgccgaaagcgatatgcaggccgttctggagcgtgacccggcagcacgcgggatgttgcagcctttcctgtttttcaagggcttcctggcgcttcagacgcaccggattgcacacgagctgtggcggcagggcagggagacgctggcgtttcatttccagagccgggcgtcggagcttttcgatgtggatattcacccggcagcgcggatcgggcgcgcggtaatgctggatcatgcctccggcatcacgatcggtgagacggcgattgttggcgatggctgctcgttgcttcatggggttacgctcggcggaaccggcaaggaagtgggtgatcgccaccccaagatcgggcgcggtgtgctgctttcggtgggcgcgaagatcctcggcaatatctccattggcgacgaggccaaggtggcagccggcagtgtggtgctcaaagatgttccggcgcggtgcaccgttgccggtgtgccagcaaagattgttgcgggaccggcgtgctgccagcctgcgcagagcatggatcaggcaatccccgaaacttcggcagaataa

SEQ ID NO: 6279 - protein, 269 aa, Hyphomonas neptunium ATCC 15444
MENPDIGAPPPPWKRLRFEAQAAAAEEPTLASYLNAAILSHATLGQALSFHLAEKLSGPGMGPQQVRHILSAVYDSAPGLIEFAESDMQAVLERDPAARGMLQPFLFFKGFLALQTHRIAHELWRQGRETLAFHFQSRASELFDVDIHPAARIGRAVMLDHASGITIGETAIVGDGCSLLHGVTLGGTGKEVGDRHPKIGRGVLLSVGAKILGNISIGDEAKVAAGSVVLKDVPARCTVAGVPAKIVAGPACCQPAQSMDQAIPETSAE

SEQ ID NO: 6280 - DNA, 819 bp, Rhizobium leguminosarum bv. viciae 3841
  CDS (1)..(819): transl_table=11
atgtcgaaatcgaccggcctcggtttagccgggcaacagccgcagcctttgggtgatgcatccgtctggaccgtgatccgcgccgaggcgaccgagcttgccgcgcgcgagccgatattgcggcagctgcttgccgctgacgtaaccgacactgccggcaacgatgagatcatcgcccgcgtgctggccgcgcggctctccgtagcgcaggtggaaacgagtgatctgttcgatctcatcctgtccgcacttgatgacgatatcatgcgcaaggtcgaggcggatctcatcgccgtgcgcgagcgcgatccggcctgcacgacatttctgcacgcgcttctcaatctgaagggctttcatgcccttgagacgcatcgcatcgcccatgcgctctggatcgccggccgtccggagatcgccagttggctcgccaatctcgtttcgctggtcttcggccctgatatccatccggcggcacggatcggcgcatccatcatgctcgaccacggttcgggcatcgtcatcggcgaaacggctgtcatcgaggatgaagtgtctatcctgcagaacgtcacgctcggcggcaccggcaaggagaccggcgaccgccacccgaagatccgccacggcgtgatgatcggcgccggcgccaagatcctcggcaatatcgaaatcggcgccttcagcaaggtcgccgccggcagcgtcgtgctcaagtcggttcccacgcattgcacggtcgccggcgtgccggcaacggtcgtgcgcatccaccgcgccgacgaaatcccggccgagacgatggatcagaatatctag

SEQ ID NO: 6281 - protein, 272 aa, Rhizobium leguminosarum bv. viciae 3841
MSKSTGLGLAGQQPQPLGDASVWTVIRAEATELAAREPILRQLLAADVTDTAGNDEIIARVLAARLSVAQVETSDLFDLILSALDDDIMRKVEADLIAVRERDPACTTFLHALLNLKGFHALETHRIAHALWIAGRPEIASWLANLVSLVFGPDIHPAARIGASIMLDHGSGIVIGETAVIEDEVSILQNVTLGGTGKETGDRHPKIRHGVMIGAGAKILGNIEIGAFSKVAAGSVVLKSVPTHCTVAGVPATVVRIHRADEIPAETMDQNI

SEQ ID NO: 6282 - DNA, 879 bp, Pseudomonas aeruginosa UCBPP-PA14
  CDS (1)..(879): transl_table=11
ctggcaggcaggaccatcaggaaccgccagaatcatgctgaaaaccccgttatcgtccgaccggcagcctgccgaacagcagcaaagggtatctgtatgaggaacagtcccgcagaggcgctggccgcggcttgcaccccgacagcgtcagtcaggtgcgtctggcaacagcttcaggcggaggccaggcgcgcgccgcaggaagactctgtattggggccgctcatcgatagatccattctctgccgcagctcattctggcaggcgctgtcctccctgctgagcgctaagctgtccatccaaacggtgtccatggacatatggctggagtgctttgccgatgctcatggaccggaggccgaggaggcggcgaaagacgacttggccgcgaccctccttcgggatccggcagcggagaacctgttggtgccctttctctgctacaagggcttccacgcactgcagtgccaccgggttgcccaccagctatggaacgcccgcagaaggacactcgcgcgtctgttgcagagccgggtttctgaagtcttcggtgtggatatccatcctgccgttccggtggggcggcgcgtcttcatagatcacgcaacaggaatcgtcatcggcgagactgccagcatcggtaacgacgtctcgattctccagaaagttactctgggtggaaccggcaaggagtatggggaccgccatccgaagatacgggaccgagccttcattgcagcaggcgcgacgatactgggcaacattgaaatcggctttgcctccaccgtcggcgctggaagcgtcgtgcttgagccggttccgccttactccacggtcgttggcgtacctgctcgcattctttgcacgaatggactttga

SEQ ID NO: 6283 - protein, 292 aa, Pseudomonas aeruginosa UCBPP-PA14
MAGRTIRNRQNHAENPVIVRPAACRTAAKGICMRNSPAEALAAACTPTASVRCVWQQLQAEARRAPQEDSVLGPLIDRSILCRSSFWQALSSLLSAKLSIQTVSMDIWLECFADAHGPEAEEAAKDDLAATLLRDPAAENLLVPFLCYKGFHALQCHRVAHQLWNARRRTLARLLQSRVSEVFGVDIHPAVPVGRRVFIDHATGIVIGETASIGNDVSILQKVTLGGTGKEYGDRHPKIRDRAFIAAGATILGNIEIGFASTVGAGSVVLEPVPPYSTVVGVPARILCTNGL

SEQ ID NO: 6284 - DNA, 780 bp, Aeromonas hydrophila subsp. hydrophila ATCC 7966
  CDS (1)..(780): transl_table=11
atggatgatctggttgccagaacctggcaaaaaattcagcaagaagcggcgagcatggcgaccgaagagcccatgctggccagcttcttccactccaccattctcaatcacaaaaacctgcgttcggccctcagcttccagctggccaacaagctcgacagcgccaccatgcccgccatcgccctgcgcgaggtgatcgagctggccctgcgcagcgagcccgagctgctggcggtcgtggcggccgacatctgtgcggtgcaggagcgcgacccggcggtcgatctcttctccaccccgctgctctacctcaagggattccatgccctgcaaggctaccgggtcgccaactggctgtggcgccaggggcgtcgttcgctggcgctctacctgcagaaccagatctcggtggtattcggggtggacgtgcacccggccgcccgcatcggcaagggcatcatgtttgaccatgccaccggcatcgtggtcggcgagacggcggtgatcgaggacgatgtctccatcctgcagagcgttaccctgggtggtaccggcaaggagagcggcgatcgccaccccaagatccgggaaggggtgatgataggggcgggcgccaaggtgctcggcaacatcgaggtgggcatgggggccaagatcggcgccggcagcgtggtgatcaacccggtgccgccacacaccacggtggcgggcgtacccgccaagatcgtgggtcgtccggagtgcgacaagccttcgctggacatggatcagtgtctctga

SEQ ID NO: 6285 - protein, 259 aa, Aeromonas hydrophila subsp. hydrophila ATCC 7966
MDDLVARTWQKIQQEAASMATEEPMLASFFHSTILNHKNLRSALSFQLANKLDSATMPAIALREVIELALRSEPELLAVVAADICAVQERDPAVDLFSTPLLYLKGFHALQGYRVANWLWRQGRRSLALYLQNQISVVFGVDVHPAARIGKGIMFDHATGIVVGETAVIEDDVSILQSVTLGGTGKESGDRHPKIREGVMIGAGAKVLGNIEVGMGAKIGAGSVVINPVPPHTTVAGVPAKIVGRPECDKPSLDMDQCL

SEQ ID NO: 6286 - DNA, 810 bp, Chlorobium phaeobacteroides DSM 266
  CDS (1)..(810): transl_table=11
atgatgagagatatacctattgagagtatctggtcaacgattgttgccgaggctgcggctgagtgtctgcgagatcccgagatcagtatttttcttgaacagcatattattcgttacgataattttggcgcgtcgctggcaatgctgctttcggtgaagctcggatcaaagcattttcctcccctggtacttcagggtctttttgaggatttttaccggcactgtccggagcaggtggagaatgcgatatatgatcttcttgcaacacagcagcgtgaccctgctgcggtccattattttgagatcatgctgtttcttaaaggctatcaggcattacaggcttatcgtctttctcattggctctggaagaacgggcgcagaaccatggcttattttatccagaaccgcatgtccgaagtgtttgccgttgatattcatcctgccgcagtgattggcaaggggattcttctcgatcatgccaccagtcttgtgattggcgaaaccgcggttgttgatgacaatgtttcgctgttgcatgaggtgacgctcggcggtaccggaaaagagtcaggcgacaggcatccgaaggtgcataaatcagtgctgattggtgccggggcaaaaattctcggtaatgtcatcataggcgagggatcgaaagtcggcgctggcagcgtggtgctggatgatgtgccgccgcattatactgtggccggtgttcccgctcaaattgtcggcaagaccgaggtgccggagccttcccgtgacatgaaccagagacttgtcggttctccgtcagaaggctcctga

SEQ ID NO: 6287 - protein, 269 aa, Chlorobium phaeobacteroides DSM 266
MMRDIPIESIWSTIVAEAAAECLRDPEISIFLEQHIIRYDNFGASLAMLLSVKLGSKHFPPLVLQGLFEDFYRHCPEQVENAIYDLLATQQRDPAAVHYFEIMLFLKGYQALQAYRLSHWLWKNGRRTMAYFIQNRMSEVFAVDIHPAAVIGKGILLDHATSLVIGETAVVDDNVSLLHEVTLGGTGKESGDRHPKVHKSVLIGAGAKILGNVIIGEGSKVGAGSVVLDDVPPHYTVAGVPAQIVGKTEVPEPSRDMNQRLVGSPSEGS

SEQ ID NO: 6288 - DNA, 840 bp, Paracoccus denitrificans PD1222
  CDS (1)..(840): transl_table=11
atgaacctgcagaaagacatgatcgagccgctttccgacgctcgggacgccccgcgcgattcggtctgggggcgcatccagcgcgaggcgcgggtcgccgtgcgcgacgagccgctgctgggcgcgctgatccatgccgggctgctgcatcatgccaccttcgaggcggccttggcctatcgcttttcgctgaagctggcctcgcgcgagatgagcgagcagatcctgcgcgagatcgccgacgacgcctttgcccgcgcgccggaactgtcggcggcggcgcaggccgacctgctggcggtctatgagcgcgatccggcgacgcatcggctgatgcagccgatcctgttcttcaagggctaccaggcgctgcaagcctatcgcatcgggcattggctgtggcagcagggccgccgcgacatggcctatttcgtgcagatgcgctgctcggaagtgttcggcgtggacatccatccggcggcgaagatcggcacgggcgtgatgatcgaccatgcccattccatcgtcatcggcgagacggcggtggtgggcaacgacgtgtcgatgctgcattcggtgacgctgggcggcaccggcaaggaggatggcgaccgccatcccaagatcggcaacggcgtgatgatcggcgccggcgccaaggtgctgggcaatatccgcgtggggcaccattcgcgcatcgccgccggctcggtcgtgctggccgaggtgccgccctgcaagaccgtggccggggtgccggcgcggatcgtgggcgatgccggctgctcggatccctcgaacaccatgaaccagcttctgggtcacgaggacctgttctag

SEQ ID NO: 6289 - protein, 279 aa, Paracoccus denitrificans PD1222
MNLQKDMIEPLSDARDAPRDSVWGRIQREARVAVRDEPLLGALIHAGLLHHATFEAALAYRFSLKLASREMSEQILREIADDAFARAPELSAAAQADLLAVYERDPATHRLMQPILFFKGYQALQAYRIGHWLWQQGRRDMAYFVQMRCSEVFGVDIHPAAKIGTGVMIDHAHSIVIGETAVVGNDVSMLHSVTLGGTGKEDGDRHPKIGNGVMIGAGAKVLGNIRVGHHSRIAAGSVVLAEVPPCKTVAGVPARIVGDAGCSDPSNTMNQLLGHEDLF

SEQ ID NO: 6290 - DNA, 783 bp, Psychromonas ingrahamii 37
  CDS (1)..(783): transl_table=11
atggacgcgactcagaaaaaattatggaaaaaaattagggaagaagcgctgcattattctgctagtgaacccattttggcgagctttttttattcaacaatattaaatcatcatagtttaaagtcggcattaagttatcagctggctaatcgtttggatcacccgactatgccgggcattctgttgcgtgaagttattgaagaagcatttactgaatcaccagaaattatgactgccgttatggctgacattattgccgttcaggacagagatcctgcggttaatgattattcaacacctttgctttaccttaaaggttttcaagcaattcaagttcaccgtgttgctcattggctgtggaaaaaaaatcgcataacattagcgttatatttacaaaatcgtagttctgagctgttttctgtagatgttcatccagcagcaactatcggtaaaggtattatgtttgaccacgcgacaggtgttgttattggtgaaacagccgttattgaagatgatgtctctttattacaaggtgtgacattaggtggaacgggtaaaacttgtggtgatcgccaccctaaaattcgtcagggggtgatgatcggggccggcgcaacagtgcttggtaatattgaaattggcaagggtgcgaaaattggtgccggcagtgttgtattatacgcagtacctgctcataccacagtcgcaggggttccagccaaagttgtaggtgttccttcctgtgagatgccgtctttatcaatggatcaatatctttcataa

SEQ ID NO: 6291 - protein, 260 aa, Psychromonas ingrahamii 37
MDATQKKLWKKIREEALHYSASEPILASFFYSTILNHHSLKSALSYQLANRLDHPTMPGILLREVIEEAFTESPEIMTAVMADIIAVQDRDPAVNDYSTPLLYLKGFQAIQVHRVAHWLWKKNRITLALYLQNRSSELFSVDVHPAATIGKGIMFDHATGVVIGETAVIEDDVSLLQGVTLGGTGKTCGDRHPKIRQGVMIGAGATVLGNIEIGKGAKIGAGSVVLYAVPAHTTVAGVPAKVVGVPSCEMPSLSMDQYLS

SEQ ID NO: 6292 - DNA, 861 bp, Magnetospirillum magnetotacticum MS-1
  CDS (1)..(861): transl_table=11
atgtccgccagcccgtcgctcagcccggcctccgggcgcgaggtgatcgccggcatcgtcgacccgctctggacgcgcgtgcgcaccgaggcggaaacggtgctgcgcgacgagccgcaactcgcctcgttcttcgtcgctacgatcctcaaccatccgactctggaagcggcggtatcccaccgggtcgccgcccgcctcgggcacggatcgctgccgacggaactcgtcgcccacggctttcacgaggcgttgcaggacgatccccgcatcggccagagcatgcgcgccgacatcctggcggtgatggaccgcgacccggcgacgacgcgggcgatcgaaccgctgctctatttcaagggcttccacgccctccaggcacaccgtctggcccattggtactggggccagggccggcgtgacctcgccctctacctccagagccggtcctcggaagtgttccagaccgacatccatccggcggcccggatcgggcgcggcgtgttcctcgatcacgccaccggtgtcgtggtcggctccactgcggtgatcgaggacgacgtctcgatcctgcaagcggtgacgctcggcggcaccggcaagcatggcggcgaccgccatcccaagatccgccgcggcgtgatgatcggtgcgggcgccaagatcctcggcaatatcgaggtcggggcctgcgcccgggtcgcggcgggctctgtcgtgcttcggccggtgccgccgcacaccaccgtcgtcggggtgccggcccgcgtcgtcggcgctgccggctgcgccgagcccgcccgctcgatggatcaactcgtggcgatgagcgagttcgtcgacatcgccggcggcatctga

SEQ ID NO: 6293 - protein, 286 aa, Magnetospirillum magnetotacticum MS-1
MSASPSLSPASGREVIAGIVDPLWTRVRTEAETVLRDEPQLASFFVATILNHPTLEAAVSHRVAARLGHGSLPTELVAHGFHEALQDDPRIGQSMRADILAVMDRDPATTRAIEPLLYFKGFHALQAHRLAHWYWGQGRRDLALYLQSRSSEVFQTDIHPAARIGRGVFLDHATGVVVGSTAVIEDDVSILQAVTLGGTGKHGGDRHPKIRRGVMIGAGAKILGNIEVGACARVAAGSVVLRPVPPHTTVVGVPARVVGAAGCAEPARSMDQLVAMSEFVDIAGGI

SEQ ID NO: 6294 - DNA, 822 bp, Sulfitobacter sp. EE-36
  CDS (1)..(822): transl_table=11
atggcaaatgcacgcacgaatatcgccacggtggatccggtttgggatcagatccagacggaagcacagaatgctgtccgcgatgagccgctgattggcggttttgtccacgccacaattctgcaccataaatccatcgagaaagcgctatcctaccgtatcgcggcgaagctggcctcgaatgaaatgtcgatgatggtggtccatgagatggtggaggaggcctttgccagtgatcccgacctgatcaaggcggcacgggccgatctggtggcgatttacgagcgtgaccccgcctgccaccggctgttgcaaccgatcctgtatttcaaaggctatcaggccgtgcaggcctaccgtgtgggccatcacctgtggaaacaaggtaaacgggatctggcctatttcgtgcagatgcgcgtgagcgagatttttggcgtcgatatccaccctgccgcgacgatcggcaagggaatcatgatcgaccatgcccattccgtcgtgattggcgaaaccgcggtcgtgggcgacaacgtgtcgatgctgcactcggtcactttgggcgggacgggcaaggaagagcaggaccgtcacccgaagattggcaacggcgtgttgatcggcgcgggggcgaaagtgttgggcaatatctctatcgggcattgctcgcgcattgcggcggggtctgtcgtgctggaatccgtgccgccctgcaagaccgtcgcgggcatccctgcgcgggtcgtgggggaggcgggttgcgatcagccgtcggtcctgatggaccacatgctggggccgcagggcgatattaacatgtaa

SEQ ID NO: 6295 - protein, 273 aa, Sulfitobacter sp. EE-36
MANARTNIATVDPVWDQIQTEAQNAVRDEPLIGGFVHATILHHKSIEKALSYRIAAKLASNEMSMMVVHEMVEEAFASDPDLIKAARADLVAIYERDPACHRLLQPILYFKGYQAVQAYRVGHHLWKQGKRDLAYFVQMRVSEIFGVDIHPAATIGKGIMIDHAHSVVIGETAVVGDNVSMLHSVTLGGTGKEEQDRHPKIGNGVLIGAGAKVLGNISIGHCSRIAAGSVVLESVPPCKTVAGIPARVVGEAGCDQPSVLMDHMLGPQGDINM

SEQ ID NO: 6296 - DNA, 831 bp, Oceanicaulis alexandrii HTCC2633
  CDS (1)..(831): transl_table=11
atgaccctcgcgcaaacccaggtcttcgatgaaacgccgccgcttgcgggatccgtctggaaccgcctgcgtctggacgccgcctccgcggcggccgaagagcccatgctggcgagcttcctgaacgcggccatcctgcgtcatgacggtctgaccgaggcgttcgcgcaccgtgtggccgccaagatgagcgattcccagctcgacgccctgcaggtccatgatgtcgccaaggcggcgctggaatccgatcgcgatctcgtcgaacaggccgccgccgacatgctggcggtggatgagcgggatccggcctgccgctccttgctgcagcccttcctctatttcaagggcttccacgccctgctgtgctaccggatcgcccaccgtctgtggcgcgatggccgcgacagtctggcgttccacatgcagagccggatgtccgaacgctttggcgtcgacattcaccctgccgcccagctgggccggggcatcatgatcgaccacgccacctccgtggtgataggcgagaccgcggtcgtgggggacaatgtctccatcctgcatgaggtgaccctgggcggcacgggcgcggatggcggggaccgtcatcccaagatcggtaacggcgtgctgatcggcgcgggcgcgaaagtgctgggcaatatcaccgtcggggccgaggcgcggatcgcggcaggctctgtggtgctggccgatgtgccgtcgcggtgcacggtggccggtgtgccggccaagcccgtcggcgggcggtgcgccgaaccttcccgcaccatggatcagaccttcgcctccaatggcgaggacagctag

SEQ ID NO: 6297 - protein, 276 aa, Oceanicaulis alexandrii HTCC2633
MTLAQTQVFDETPPLAGSVWNRLRLDAASAAAEEPMLASFLNAAILRHDGLTEAFAHRVAAKMSDSQLDALQVHDVAKAALESDRDLVEQAAADMLAVDERDPACRSLLQPFLYFKGFHALLCYRIAHRLWRDGRDSLAFHMQSRMSERFGVDIHPAAQLGRGIMIDHATSVVIGETAVVGDNVSILHEVTLGGTGADGGDRHPKIGNGVLIGAGAKVLGNITVGAEARIAAGSVVLADVPSRCTVAGVPAKPVGGRCAEPSRTMDQTFASNGEDS

SEQ ID NO: 6298 - DNA, 807 bp, Roseovarius nubinhibens ISM
  CDS (1)..(807): transl_table=11
atggccaaagcacatgcaaaactctcggaactcgacccggtctggaagcagatcaccgaggaagccaaggacacgatcgcccaggagccgctcatgggcgggctggttcatagttcgatcctgcaccacaaaaccatcgaatcggcgctcgcctatcggatctctctgaaactcgcctcgagcgagatgcccgagcagatcctgcgcgaaatctgtgattgggcgctggccgcagatcccaatatttcgctggcctcgcgcgccgatatcgtcgccgtgaacgaccgtgacccggcctgtgaccggttcatcctgccgatgcttttcttcaaggggtttcaggcggtgcaggcgcatcgcgtggcgcattggctctggcataacgaacgcaaggatatggcgcggttcttccagatgcgctgttccgaggtgtttggcatcgacattcaccccgccgcccggatgggcaagggcatcatgatcgatcatgcgcattccatcgtgatcggggaaaccgccgtggtcggcgacaatgtctcgatgctgcattctgtgacgctcggcggcaccggcaaggaagaagaagaccgccatcccaagatcggcgacggtgttctgatcggcgcgggggccaaggttctcggcaatatcaaggttggccattgctcgcgcatcgcggcgggctcggtcgtgctatccgaagtgccgccctgcaagacggtggcgggtgttccggccaagatcgtcggcgaagcgggctgtgatcagccctcggtggcgatggatcagctgctcggcgtgcgctaa

SEQ ID NO: 6299 - protein, 268 aa, Roseovarius nubinhibens ISM
MAKAHAKLSELDPVWKQITEEAKDTIAQEPLMGGLVHSSILHHKTIESALAYRISLKLASSEMPEQILREICDWALAADPNISLASRADIVAVNDRDPACDRFILPMLFFKGFQAVQAHRVAHWLWHNERKDMARFFQMRCSEVFGIDIHPAARMGKGIMIDHAHSIVIGETAVVGDNVSMLHSVTLGGTGKEEEDRHPKIGDGVLIGAGAKVLGNIKVGHCSRIAAGSVVLSEVPPCKTVAGVPAKIVGEAGCDQPSVAMDQLLGVR

SEQ ID NO: 6300 - DNA, 867 bp, Sulfitobacter sp. NAS-14.1
  CDS (1)..(867): transl_table=11
ttgggcggaacctgctatatcgtggggacaaagaaggatggtcttatggcaaatgcacgcacgaatatcgccacggtggatccggtttgggatcagatccatacggaagcacagaatgctgtccgcgatgagccgctgattggcggttttgtccacgccacgattctgcaccataaatccatcgagaaagcgctatcctaccgtatcgcggcgaagctggcctcgaatgaaatgtcgatgatggtggtccatgagatggtggaggaggcctttgccagtgatcccgacctgatcaaggcggcacgtgccgatctggtggcgatttacgagcgtgaccccgcctgccaccggctgttgcaaccgatcctgtatttcaaaggctatcaggccgtgcaggcctaccgtgtgggtcatcacctgtggaaacaaggtaaacgggatctggcctatttcgtgcagatgcgcgtgagcgagatttttggcgtcgatatccaccccgccgcgacgatcggcaagggaatcatgatcgaccacgcccattccgtcgtgattggcgaaaccgcggtcgtgggcgacaacgtgtcgatgctgcactcggtcactttgggcgggacgggcaaggaagagcaggaccgtcacccgaaaattggcaacggcgtgctgatcggcgcgggggcgaaagtgttgggtaatatctctatcgggcattgctcgcgcattgcggcggggtctgtcgtgctggaatccgtgccgccctgcaagaccgtcgcgggcattcctgcgcgggtcgtgggtgaggcgggttgcgatcagccatcggtcctcatggatcacatgctggggccgcagggcgatattaatatgtaa

SEQ ID NO: 6301 - protein, 288 aa, Sulfitobacter sp. NAS-14.1
MGGTCYIVGTKKDGLMANARTNIATVDPVWDQIHTEAQNAVRDEPLIGGFVHATILHHKSIEKALSYRIAAKLASNEMSMMVVHEMVEEAFASDPDLIKAARADLVAIYERDPACHRLLQPILYFKGYQAVQAYRVGHHLWKQGKRDLAYFVQMRVSEIFGVDIHPAATIGKGIMIDHAHSVVIGETAVVGDNVSMLHSVTLGGTGKEEQDRHPKIGNGVLIGAGAKVLGNISIGHCSRIAAGSVVLESVPPCKTVAGIPARVVGEAGCDQPSVLMDHMLGPQGDINM

SEQ ID NO: 6302 - DNA, 822 bp, Vibrio splendidus 12B01
  CDS (1)..(822): transl_table=11
atgaaacactgtgaacaacaaaaagtttggcaatgcattgtgaaggaagctcgacagcagtcggagcaagagcctatgcttgcgagtttttatcatgccacgatcatcaaccatgaaagtttaggcgcagcccttagctacatcctagcaaacaagctaaaaacagcttcaatgccagcaatggcggtgcgtgaagtggttgaacaagcatttaaacaggaccaatcgattattgatgcggcagcttgtgatatttgcgcgacggtaaatcgagatcctgcagtcgagatgtactcgatgcctctactttatctgaaaggctatcacgctctgcaaggttaccgagtggctaactggttgtggaagcaaggccgtatcgcacttgccacttacctacaaaaccaaatctctgttgcttgccaagtggatattcacccagcagctcgtattggtaaagctatcatgctcgaccacgcgacaggaattgtgattggtgaaacagccgtcgtcgagaatgatgtatcgattcttcaagacgtcaccttaggtggtaccggtaaagaaggcggcgatcgtcaccctaagatccgcgaaggcgtgatgattggtgccggcgctaaaattctcggtaatattgaagtgggtgaaggcgcgaaaattggttcttgctctgtggttctacaagccgtaccgtctcatacaacagtcgctggtgttcctgcaaaaattgttggaaagccgaaaactgacaagccctctttagatatggaccaagggttcaatggtcgctctcagaacttcatccatggtgatgggatttaa

SEQ ID NO: 6303 - protein, 273 aa, Vibrio splendidus 12B01
MKHCEQQKVWQCIVKEARQQSEQEPMLASFYHATIINHESLGAALSYILANKLKTASMPAMAVREVVEQAFKQDQSIIDAAACDICATVNRDPAVEMYSMPLLYLKGYHALQGYRVANWLWKQGRIALATYLQNQISVACQVDIHPAARIGKAIMLDHATGIVIGETAVVENDVSILQDVTLGGTGKEGGDRHPKIREGVMIGAGAKILGNIEVGEGAKIGSCSVVLQAVPSHTTVAGVPAKIVGKPKTDKPSLDMDQGFNGRSQNFIHGDGI

SEQ ID NO: 6304 - DNA, 804 bp, Oceanicola batsensis HTCC2597
  CDS (1)..(804): transl_table=11
atggcccatacgcaaccctcggtcaccgcggtcgaccccgtctgggatcgcatgacgcaggaagccgaagacgccatctcggaggaaccgctcctgggcgggcagatccattccgccctgctgcatcatccgtcgatcgagaacgcgctggcctatcgcatcgcgatgaagctgaccaattccgagatgtccgagcagcttttgcgggagatctgcgacgaggcctatcgcgcggatcccgatctggcggcctcggcccgggcggatatcgtggcgacctacgaccgcgacccggcctgtcaccggttcatccagccgttgctgtatttcaagggcttccaggcggtgcaggcctatcgcgtggcgcattggctgtggcgggagggccggcaggacctggcctatttcttccagatgcgctgttccgaggtctacgggatcgacatccacccggcggcccggatcgggcaggggatcatgatcgaccacgcccattccatcgtcatcggcgagacggcggtggtcggcaacaacgtgtcgatgctgcattcggtgacactcggcgggaccggcaaggaagaggaggaccggcaccccaagatcggcgacggagtcctgatcggtgcgggggccaaggtgctgggcaacatccgcatcggccactgttcgcggatcgcggcgggatcggtcgttctgcacgacgtggactcctgcaagacggtggccggcgttcccgcgaaggtggtgggcgaggcgggctgcgaccagccctcgctgacgatggatcacctgttcggggggtga

SEQ ID NO: 6305 - protein, 267 aa, Oceanicola batsensis HTCC2597
MAHTQPSVTAVDPVWDRMTQEAEDAISEEPLLGGQIHSALLHHPSIENALAYRIAMKLTNSEMSEQLLREICDEAYRADPDLAASARADIVATYDRDPACHRFIQPLLYFKGFQAVQAYRVAHWLWREGRQDLAYFFQMRCSEVYGIDIHPAARIGQGIMIDHAHSIVIGETAVVGNNVSMLHSVTLGGTGKEEEDRHPKIGDGVLIGAGAKVLGNIRIGHCSRIAAGSVVLHDVDSCKTVAGVPAKVVGEAGCDQPSLTMDHLFGG

SEQ ID NO: 6306 - DNA, 861 bp, Loktanella vestfoldensis SKA53
  CDS (1)..(861): transl_table=11
atggcaccctatctgggttacacaggacatcttgaaaacaggatcgatgccatgcgccagccaaaacccgccctgaccgaaattgacccagtctggcaccgcatccggcaagaagccgaagacgccatcgtctctgagccgctgatcggcgggctggtccatgcgggcgtgttgcatcatacgacattcgcggcggcgcttggctaccggatttcgctgaaactggcctcggcggagatgtcggaacagattttgcgcgaaaccgccaatgccgcctatgccgctgatcccgcgctggcgctggccgcgcgtgccgatctggttgcgatctatgaccgcgatccggcctgccaccggctgatccagcctttgctgttcttcaaggggtttcaggcggtccaggcgtaccggctggggcattacctgtggacccaagggcggcgcgacatggcttatttcatccagatgcgggtgagcgaggtattcggcgtcgatatccaccctgccgcccgtatgggcaaggggatcatgattgatcatgctcattccgtggtgatcggggaaacggctgtggtcggtgataatgtgtcgatgctgcattcggtcactttgggcggcaccggcaaggaagatgacgaccgccaccccaagatcggcaatggcgtgctgatcggggcgggggccaaggtgttgggcaatatcaaggtcggccattgcagccggatcgcggcggggtccgtcgtgctggacgatgtgccgccgatgaagaccgtggcgggcgtgcctgcgcgcatcgtgggcgaggcaggctgttcacagccttcggtgacgatggatcatctgttcgatcacgaccactga

SEQ ID NO: 6307 - protein, 286 aa, Loktanella vestfoldensis SKA53
MAPYLGYTGHLENRIDAMRQPKPALTEIDPVWHRIRQEAEDAIVSEPLIGGLVHAGVLHHTTFAAALGYRISLKLASAEMSEQILRETANAAYAADPALALAARADLVAIYDRDPACHRLIQPLLFFKGFQAVQAYRLGHYLWTQGRRDMAYFIQMRVSEVFGVDIHPAARMGKGIMIDHAHSVVIGETAVVGDNVSMLHSVTLGGTGKEDDDRHPKIGNGVLIGAGAKVLGNIKVGHCSRIAAGSVVLDDVPPMKTVAGVPARIVGEAGCSQPSVTMDHLFDHDH

SEQ ID NO: 6308 - DNA, 816 bp, Parvularcula bermudensis HTCC2503
  CDS (1)..(816): transl_table=11
atggcgccccatcctcatccccccgtgcccgcgaccctttacacgatcgaccggaatacggtctggtcacgcatgcggctggaggccgccacggcggcggcccaggaaccggcgatcgcctctttcctcaatgcctctcttcttcaccacgacacgattgaggcggcgttgagctatcggttggctgagaaactctcggacggagagatgaaggcgatgctctggcgcgaagtggccatggatgcctatcaggataagccgcaaattgtcgccgcggcgctgtcggatcttttggcctatttcgaccgcgaccctgcttgccggcaatattcccatccgtttttgtatctgaaagggtttcacgccctgcagagctaccggattgccaactggctgtggggacaggggcgggaagcgttggcccattatctccagtcgcggatcagtgagctctacaatatcgacatccacccggctgcaagattgggggagagcctgttcttcgaccatgccagcggcatcgtgatcggtgagaccgccgtcatcgccgacgaggtcagtgtcctgcacaatgtcacccttggcgggaccggcaaggagaccggtgaccggcatccgaagattggccgcggtgtgctgatctccgccggggcaaaaatactcggcaatatcgaggtgggagagggcgcgaagatcgccgccggttccgtcgtgctgcattcggtgaaacccttttgcacggtggccggggttcccgccgtccccgttggggcctgtgccaaggcagcgggcggcgagatggatcagcatatttga

SEQ ID NO: 6309 - protein, 271 aa, Parvularcula bermudensis HTCC2503
MAPHPHPPVPATLYTIDRNTVWSRMRLEAATAAAQEPAIASFLNASLLHHDTIEAALSYRLAEKLSDGEMKAMLWREVAMDAYQDKPQIVAAALSDLLAYFDRDPACRQYSHPFLYLKGFHALQSYRIANWLWGQGREALAHYLQSRISELYNIDIHPAARLGESLFFDHASGIVIGETAVIADEVSVLHNVTLGGTGKETGDRHPKIGRGVLISAGAKILGNIEVGEGAKIAAGSVVLHSVKPFCTVAGVPAVPVGACAKAAGGEMDQHI

SEQ ID NO: 6310 - DNA, 831 bp, Roseovarius sp. 217
  CDS (1)..(831): transl_table=11
atggcgcatacaagacgaaagctggccgaacttgatccggtctggggacagatcgcccaagaggccaaggctgcaatcgccgatgagccgcttttgggcgggctgatccattcaagtgtcctgcaccatgggaccttcgaatcagcgctggcctatcggatttcgctcaagctgacctcgaacgagatgccagagcagatccttcgcgagatttgcgacaaggcgcttgcctccgacccggaaatcggcctcgccgcgcgcgccgacatcgtcgccgtcaatgaccgtgatccggcctgcgacaggtttctcctgccgcttctcttcttcaaggggtttcaggcgatccaagcctatcgcatcgcgcattggctctggaccacgggccgccgcgatctcgcgcgctttttccagatgcgcgcctcagaggtgttcggcgtcgatatccacccggccgcacggatcggcaagggcatcatgatcgaccacgcccattccatagtgatcggtgaaacggcggtggtgggcgacaatgtctcgatgctgcattccgtcacgcttggcggcaccggcaaggaagaagaggaccgccaccccaagatcggcaatggcgttctgatcggggccggggccaaggttctgggcaatatccgcgtgggcaactgctcgcgcatcgccgcaggttcggtggtgctgcaagaggtgccgccgtgcaaaaccgtggcgggtgtgcccgcgcgcatcgtcggtgaggcgggttgcgatcagccctcggtcaagatggatcaactcctgggcgtccgcggcactgacgacgacgcgagcgactga

SEQ ID NO: 6311 - protein, 276 aa, Roseovarius sp. 217
MAHTRRKLAELDPVWGQIAQEAKAAIADEPLLGGLIHSSVLHHGTFESALAYRISLKLTSNEMPEQILREICDKALASDPEIGLAARADIVAVNDRDPACDRFLLPLLFFKGFQAIQAYRIAHWLWTTGRRDLARFFQMRASEVFGVDIHPAARIGKGIMIDHAHSIVIGETAVVGDNVSMLHSVTLGGTGKEEEDRHPKIGNGVLIGAGAKVLGNIRVGNCSRIAAGSVVLQEVPPCKTVAGVPARIVGEAGCDQPSVKMDQLLGVRGTDDDASD

SEQ ID NO: 6312 - DNA, 819 bp, Roseobacter sp. MED193
  CDS (1)..(819): transl_table=11
atgatcaaaacgcgtacagctgtaacccccctggacccggtctgggaacaaatctctactgaggcgcaggaagccgttgcaaaacagccgcttatgggcgggttgatacatgcctgcatcctacatcacccgacgctggaaaaagcgctgtcctaccggatcgcagccaaactctgttccaacgaaatgtcgatggtgatcctgcgcgaaattgttgataccgcttttgcctcggatccctccctgattgcggcggcgcgggccgatttgatggcggtctatgatcgcgatccggcctgccaccgcctgttgcaacctatcctttacttcaaggggtatcaggccgtgcaggcctatcgtattgcgcattggctgtggcggcagggagatcaagatctggcgttctttttccaaatgcgaatttcggagatctttggtgttgatattcacccaggagcccgcattggccggggcattatgatcgaccacgctcattccatcgtcatcggtgaaaccgccgtggtgggggacaatgtctcgatgctgcattcggtgaccctcggcggaaccggcaaagaagaagaggatcgccatcccaagatcgaagatggggtactgattggcgctggtgctaaggtgttgggcaatattcgtgtgggccattgtagtcgcatcgcagccggatcggttgtgctgtccgaagttcccccctgcaaaactgttgcaggtgtccccgcaaagattgttggggaggcaggttgcgatcagccttcgatcagcatggatcaggtgctgacggaacatagcacccccaaatag

SEQ ID NO: 6313 - protein, 272 aa, Roseobacter sp. MED193
MIKTRTAVTPLDPVWEQISTEAQEAVAKQPLMGGLIHACILHHPTLEKALSYRIAAKLCSNEMSMVILREIVDTAFASDPSLIAAARADLMAVYDRDPACHRLLQPILYFKGYQAVQAYRIAHWLWRQGDQDLAFFFQMRISEIFGVDIHPGARIGRGIMIDHAHSIVIGETAVVGDNVSMLHSVTLGGTGKEEEDRHPKIEDGVLIGAGAKVLGNIRVGHCSRIAAGSVVLSEVPPCKTVAGVPAKIVGEAGCDQPSISMDQVLTEHSTPK

SEQ ID NO: 6314 - DNA, 822 bp, Vibrio sp. MED222
  CDS (1)..(822): transl_table=11
atgaaacactgtgaacagcaaaaagtttggcaatgcatagtgaaggaagctcgacagcagtcagagcaagaacctatgcttgcgagtttttatcatgccacgatcatcaaccatgaaagtttaggcgcagcccttagctacatcctagcaaacaagctaaagacggcttcaatgccagcaatggcagtacgtgaagtggttgaacaagcatttaagcaggatcaatcgattattgatgcggcagcttgtgatatttgcgcgacggtaaatcgagatcctgcggtcgagatgtactcgatgcctctactttatctgaaaggctaccacgctctgcaaggttaccgagtagctaactggttgtggaaacaagggcgtatcgcacttgctacttacctacaaaaccaaatttcagttgcttgccaagttgatattcacccagcggctcgtatcggtaaagctatcatgctcgaccacgccactggtatcgtgattggtgaaactgctgtcgtcgaaaatgatgtatcgatccttcaagacgttacccttggtggtactggtaaagaaggcggcgaccgtcaccccaaaatccgcgaaggcgtaatgattggggccggagctaaaatactcggcaacattgaagtaggtgaaggcgcgaagattggttcatgctctgtggtactacaagccgtgccacctcatacaacagtcgcaggcgttcctgcaaaaattgtcggaaaaccgaaaacagataaaccatctttagatatggaccaaggcttcaatggtcgctcgcaaaatttcattcatggtgatggaatataa

SEQ ID NO: 6315 - protein, 273 aa, Vibrio sp. MED222
MKHCEQQKVWQCIVKEARQQSEQEPMLASFYHATIINHESLGAALSYILANKLKTASMPAMAVREVVEQAFKQDQSIIDAAACDICATVNRDPAVEMYSMPLLYLKGYHALQGYRVANWLWKQGRIALATYLQNQISVACQVDIHPAARIGKAIMLDHATGIVIGETAVVENDVSILQDVTLGGTGKEGGDRHPKIREGVMIGAGAKILGNIEVGEGAKIGSCSVVLQAVPPHTTVAGVPAKIVGKPKTDKPSLDMDQGFNGRSQNFIHGDGI

SEQ ID NO: 6316 - DNA, 813 bp, Marinomonas sp. MED121
  CDS (1)..(813): transl_table=11
gtgacatcaagcaatttatggtcatctttacaagatgaagccaaacatttagctcagggtgaacctatcctaacgagcttattcaacactaccatacttcgtcatgattcattaagttgcgcgttgagttttttattagctagtaagttagacagtatttcagttcctgcactggtattgcgtgaagtcattcaagaatccatgtcagacccgaactctggcatagtaacagatattgaaaacgatatattagcaattcgtgaaagagacgccgcatgcgaatctctgacaacgcctttgctattctttaaaggctttcatgcgctacaaacctatcgtgttgcccattggctttggaacaacggcagagaaagtttagcactttatttacaggggcaaatgtctattgcctttagtgttgatatacacccggcagctaaaattggttcaggcattatgttagatcacgcaagcggactggtcgttggtgaaacctgtgtcattgaagacaatgtttctattttacaatccgtcactctaggcggtaccggcaagcaacatggtgatcgccaccctaaaattcgaagcggtgtattaattggcgcgggggctaaaattttaggtaatatcgaagtgggtgaaggcgctaaaattggcgcaggtagtgttgtacttgaagccgttagagcccacaccacggtggcaggtgtgccggctaaagaagtgggacgcaataccgaagctgaacccgcattagggatggatcacaacatcaatcactgtgtccgcacgcaaaatggcgactgcaaataa

SEQ ID NO: 6317 - protein, 270 aa, Marinomonas sp. MED121
MTSSNLWSSLQDEAKHLAQGEPILTSLFNTTILRHDSLSCALSFLLASKLDSISVPALVLREVIQESMSDPNSGIVTDIENDILAIRERDAACESLTTPLLFFKGFHALQTYRVAHWLWNNGRESLALYLQGQMSIAFSVDIHPAAKIGSGIMLDHASGLVVGETCVIEDNVSILQSVTLGGTGKQHGDRHPKIRSGVLIGAGAKILGNIEVGEGAKIGAGSVVLEAVRAHTTVAGVPAKEVGRNTEAEPALGMDHNINHCVRTQNGDCK

SEQ ID NO: 6318 - DNA, 801 bp, Congregibacter litoralis KT71
  CDS (1)..(801): transl_table=11
atgatgatgcccgcaatcgacgacccgatctggcaacgaatactcgaagagacgcgccaacactcccaggaggagcctatgcttgcaagttacttgcacgcaacgatcctcaaccataagaagatcgagcgctctttaagctttttgcttgccaatcaactggacagccccgccgcgtcctccctgctcctgcgagaggtcatgctcgaagcctttgaggcggatccgaccattctcgatgcagtccgcgcggatttgctggcggtacttgaccgggattccgcgacccatgaactctacataccctttctgtactacaagggttttcatgcactgcaagctcaccgcgtgtcacactggctgtggaccgagggtcgacagtccctggcgctgttttttcaaaaccgcgtcagcaccaagtttgccgtcgatattcaccccgccgcgcgcatcggccggggcatcatgctggatcacgctacgggcctggtgattggagaaacggcgcgcgtgggcaacaacgtgtccatactccagtctgtgaccctgggcggtaccggcaaggaagatggcaatcgccaccccaagatctgcgacggcgtgttgatcagcgccggcgcgaagattctggggaatatctgtgtgggtgaaggggcaaaggtaggtgccggcagcgtcgtgctggaaccggtgccaccgcatacgaccgtcgccggcgtaccggccaaggtggtcggcaagcccaactcagatcaaccagccctcgatatggatcacagctggccttgctgcgacgattaa

SEQ ID NO: 6319 - protein, 266 aa, Congregibacter litoralis KT71
MMMPAIDDPIWQRILEETRQHSQEEPMLASYLHATILNHKKIERSLSFLLANQLDSPAASSLLLREVMLEAFEADPTILDAVRADLLAVLDRDSATHELYIPFLYYKGFHALQAHRVSHWLWTEGRQSLALFFQNRVSTKFAVDIHPAARIGRGIMLDHATGLVIGETARVGNNVSILQSVTLGGTGKEDGNRHPKICDGVLISAGAKILGNICVGEGAKVGAGSVVLEPVPPHTTVAGVPAKVVGKPNSDQPALDMDHSWPCCDD

SEQ ID NO: 6320 - DNA, 816 bp, Pseudoalteromonas tunicata D2
  CDS (1)..(816): transl_table=11
atggtattgatgcgacatcaaatttggcagcaactaaaagtagaagcgactgagctagtaaaaaaagaacctttactcgcaagtcacgtttattcatgtattttgaatcatgaatgtttaggatctgcgcttagttttattgtcgctaataagctctcggatgcggtggtttcaccttttacttttcgtgaattatttgatcaggcttttgttgattgtgaccgcatgcttacccatgtttcacacgatattaaagcagtaaaagaccgcgatcctgctgctgatagttacttaagtattttgttaaatttaaagggctttcaagcaatccaagttcaccgacttgctcattgtttatggcgccaagaccgtaaagagcttgctcgttttatccaatcacgtaattcagaagtgtttggtgttgacattcatccagcctgtaaaatcggccatggcattatgtttgaccatgcaacaggcattgttattggtgaaacagcagtgattgaagataatgtatcgattctacaaggtgtaaccttaggtggtacaggcaatgagcaaggtgatcgtcatcctaaaattcgcgaaggcgtgatgataggtgctggcgccaaggttttaggtaatatagaagttggccaaggcgctcgaataggtgcgggctctgttgttttaagcgctgttgcaccccataccacggttgtaggtgtgcctgcaaaagttgtgggcaggccctgtaatcgtccagctgaaaccatggatcaaaatgtacttgagcaatccgatgactctttgaccagcgcactgctttaa

SEQ ID NO: 6321 - protein, 271 aa, Pseudoalteromonas tunicata D2
MVLMRHQIWQQLKVEATELVKKEPLLASHVYSCILNHECLGSALSFIVANKLSDAVVSPFTFRELFDQAFVDCDRMLTHVSHDIKAVKDRDPAADSYLSILLNLKGFQAIQVHRLAHCLWRQDRKELARFIQSRNSEVFGVDIHPACKIGHGIMFDHATGIVIGETAVIEDNVSILQGVTLGGTGNEQGDRHPKIREGVMIGAGAKVLGNIEVGQGARIGAGSVVLSAVAPHTTVVGVPAKVVGRPCNRPAETMDQNVLEQSDDSLTSALL

SEQ ID NO: 6322 - DNA, 822 bp, Photobacterium sp. SKA34
  CDS (1)..(822): transl_table=11
gtgaagcaatgtcaacaacaccagctttggccagcgatcaagcaggaagcacgagagcagtcagagcatgagcaaatgctcgcgagcttttatcatgccacgattattaagcatgatgaccttgctgctgcattgagttatatacttgcaaataaattggcaacaccatcgatgccagcgatggctgttcgtgaggtcatcgaagaagcgtatgctagcgattgttcgatagttgaatcggcagcacgtgatatttgtgctgttgttgaacgtgatcctgctattaatatgtattctattccattactttatctcaaaggttgtcacgctcttcaaggatatcgcgtagctaactggttatggaaacaagatcgaaaagccttagcggtttatctacaaaaccaaatctctgtagcttgccaagtcgatgtgcatccagcggcaaaaattggtcaagggatcatgtttgatcacgcgacgggtattgtgattggtgaaaccgcagtcattgaaaatgatgtctcaatccttcaggacgtcacattaggtggtacggggaaagagagcggcgatcgtcatccaaagatccgtgaaggggtgatgataggtgctggcgctaaagtgttaggcaatatcgaagttggtgaaggggcgaaaattggctcttgttcggtggtgttaaatcatgtgcctccccatacaactgttgccggtattcctgctaaagttgttgggcgaccaaattcagataaaccatcgatggatatggatcagcaatttaatggtaactcgcaaacgtttattgaaggtgatggtatttag

SEQ ID NO: 6323 - protein, 273 aa, Photobacterium sp. SKA34
MKQCQQHQLWPAIKQEAREQSEHEQMLASFYHATIIKHDDLAAALSYILANKLATPSMPAMAVREVIEEAYASDCSIVESAARDICAVVERDPAINMYSIPLLYLKGCHALQGYRVANWLWKQDRKALAVYLQNQISVACQVDVHPAAKIGQGIMFDHATGIVIGETAVIENDVSILQDVTLGGTGKESGDRHPKIREGVMIGAGAKVLGNIEVGEGAKIGSCSVVLNHVPPHTTVAGIPAKVVGRPNSDKPSMDMDQQFNGNSQTFIEGDGI

SEQ ID NO: 6324 - DNA, 807 bp, Neptuniibacter caesariensis
  CDS (1)..(807): transl_table=11
atgagccagaatccagaatgcccaacctggctttgggatgaaatttctgctgaagcagagcgagaagtgatagaggagcctgtactggctggcttctaccatgcgaatattcttggtcatcagagcttatgttcggcattagcttatctgctaagtcgcaagctttatgatgatgctgtgcctgcggtaacttttcgattagtgatcgaagaagtattccgtgaagcacctgagatcctgcaggcggtctgtgcagatattgcagccgttcgcaaccgtgatccggcgatcgataaatactcgacggtacttctctacctgaaaggcttccatgcgatacaggcgtatcgtgtggctcatcatatgtggaatcagggccgtaagagcatggcgctctatatccagagccgggttagctgtgttttgcaggttgatattcatcctgcggcgaagatcggtcagggggtaatgttcgaccacgcgacaggtatcgttgtaggtgagaccagtgtgattgaaaatgacgtttctattctgcagtcggtaacgctcggtggtaccggtaaagagtgcggtgatcgtcatccaaaaatccgcgaaggtgttatgatcgcagcgggtgctaagattttcggcaatattgagatcggtagcggcgctaaagttggtggtggcagtgttgtcttagacggtgttccagcacatacaacggtggtaggtgtgcctgcgagagcggttggtcatcctcagtgcgataagcctgcactggatatggatcagaatattctgcacgacaaagaaaagtaa

SEQ ID NO: 6325 - protein, 268 aa, Neptuniibacter caesariensis
MSQNPECPTWLWDEISAEAEREVIEEPVLAGFYHANILGHQSLCSALAYLLSRKLYDDAVPAVTFRLVIEEVFREAPEILQAVCADIAAVRNRDPAIDKYSTVLLYLKGFHAIQAYRVAHHMWNQGRKSMALYIQSRVSCVLQVDIHPAAKIGQGVMFDHATGIVVGETSVIENDVSILQSVTLGGTGKECGDRHPKIREGVMIAAGAKIFGNIEIGSGAKVGGGSVVLDGVPAHTTVVGVPARAVGHPQCDKPALDMDQNILHDKEK

SEQ ID NO: 6326 - DNA, 780 bp, Psychromonas sp. CNPT3
  CDS (1)..(780): transl_table=11
atgtcgctattacaagaacaattatggaataaaataagagatgaagcttggggatattcagcaaatgagcctattctagcgagttttttttattcgacaatactcaaccataaagatttaaaatccgcattaagttatcaattagcaggacgacttgatagtagtaccatgccggctattttagttcgtgaagttattgaagatgcgttcagcaatgatcctgagatcttaaatgctgcgatggctgatattatcgcagtacaagagcgagatcctgctgtgggtgatttttcaacacccttattataccttaaaggatttcatgcgttacaggtacaccgcattgcaaactggttgtggaaacaaaaccgtcgacctttagcgctgtacttacaaaatcgcagttcagaattgtttgcggttgatgtacaccctgccgccaccataggtaaaggcattatgtttgatcatgcgacaggcgtagtgattggagaaacagctgtgattgaagataatgtgtctttattacaaggtgtaacccttgggggaaccggtaaaaattgtggcgatcgacatcctaaaatacgtcaaggtgtgatgattggtgctggggccaaagtgttgggtaatattgaagtcggagtgggggctaaaattggtgctggtagtgtggtacttgaggctgttcctgagcacaccacggtcgcaggggttcctgcaaaaatcgttgggcacccatcttgcgctatgccatcactatccatggatcaagatatttag

SEQ ID NO: 6327 - protein, 259 aa, Psychromonas sp. CNPT3
MSLLQEQLWNKIRDEAWGYSANEPILASFFYSTILNHKDLKSALSYQLAGRLDSSTMPAILVREVIEDAFSNDPEILNAAMADIIAVQERDPAVGDFSTPLLYLKGFHALQVHRIANWLWKQNRRPLALYLQNRSSELFAVDVHPAATIGKGIMFDHATGVVIGETAVIEDNVSLLQGVTLGGTGKNCGDRHPKIRQGVMIGAGAKVLGNIEVGVGAKIGAGSVVLEAVPEHTTVAGVPAKIVGHPSCAMPSLSMDQDI

SEQ ID NO: 6328 - DNA, 822 bp, Photobacterium profundum 3TCK
  CDS (1)..(822): transl_table=11
gtgagggaatgccaacagaacgaggtctggcaagcaatcaagctagaagcgagagcgcagtcagaacaagagcctatgttagccagtttttatcatgcgacgattattaagcatgacaacttagccgccgcgctgagttatattttggctaataaattggcgacaccatcgatgcctgcaatggctgtacgcgaagtggttgaagaagcctttgcggccgattgtatgatcaccgagtctgctgcttgtgatattaaagcggttgttgagcgcgatcctgcggtagaaatgtattctatccctctgttatatctaaaaggttatcatgctttacaaggctatcgcgttgcgaactggctatggaagcagaaacgctttgcattagcggtatacctgcagaatcaaatttccgtaacatgccaagtcgatgtccatcctgctgcggttattgggcaaggtattatgtttgaccatgcgacaggtatcgttattggtgaaacggccgtgattgaaaatgatgtgtcgattttacaagatgttaccttgggtggtactggtaaggctggcggcgatcgtcatcctaaaattcgagaaggtgtgatgattggggcaggagcgaaagtattgggtaatattgaagtaggtgtaggggctaagattggctcttgctccgtggtattaaaccccgttcctcctcatactaccgttgctggtgtgcccgctaaagtcgtggggcgtcctagtagcgatatgcccgctatggacatggatcagcaatttaacggcactacgcaaacctttattgcgggtgatggtatctaa

SEQ ID NO: 6329 - protein, 273 aa, Photobacterium profundum 3TCK
MRECQQNEVWQAIKLEARAQSEQEPMLASFYHATIIKHDNLAAALSYILANKLATPSMPAMAVREVVEEAFAADCMITESAACDIKAVVERDPAVEMYSIPLLYLKGYHALQGYRVANWLWKQKRFALAVYLQNQISVTCQVDVHPAAVIGQGIMFDHATGIVIGETAVIENDVSILQDVTLGGTGKAGGDRHPKIREGVMIGAGAKVLGNIEVGVGAKIGSCSVVLNPVPPHTTVAGVPAKVVGRPSSDMPAMDMDQQFNGTTQTFIAGDGI

SEQ ID NO: 6330 - DNA, 789 bp, gamma proteobacterium HTCC2207
  CDS (1)..(789): transl_table=11
atgatcgccaatgaccctctgtgggacataatctgcagcgaagcacgcctcacggcctctcaagagcccttgatgagcggtttttttgatgccgccattttgagtcatcagagtttggctcaggcgctgtgctttaatctgtcccagcagttacacagctcggtgatgtccgcagccgccatctctgaggttttggctgaggccatggacagtgatgacgcaatctgtgatgccgcgcgcactgatatccgtgcctgtttcgatcgtgacccagcctgcgacaaccattttatgcctatactttacttcaaggggtttcaggcattgcagttatatagggtggctcactggttgtggcttcaggagcgcaaccatttggcgctctgtctacagagccagatatccgaagtattcgctgttgatattcatccgggtgccaagattggcagtggcattatgattgaccacgccagtgggttagttataggtgaaaccgctattgtcggtaacgatgtatctattttgcactctgtgactctaggcggcagtggctgcattaaaggtagccgccatccaaccattggcaatggcgtgatgatttccgctggtgccaagatccttggcaatgtgttgattggcgatggcgtaaaaattggtgccggtagtttggtgcttgagtcggtgccggcccatgtcacggtggctggcgtgcccgccaagattgtcggcacacccagagaggcgtcgcctgcgctggagatggatcagtatctcagtgatagctcctaa

SEQ ID NO: 6331 - protein, 262 aa, gamma proteobacterium HTCC2207
MIANDPLWDIICSEARLTASQEPLMSGFFDAAILSHQSLAQALCFNLSQQLHSSVMSAAAISEVLAEAMDSDDAICDAARTDIRACFDRDPACDNHFMPILYFKGFQALQLYRVAHWLWLQERNHLALCLQSQISEVFAVDIHPGAKIGSGIMIDHASGLVIGETAIVGNDVSILHSVTLGGSGCIKGSRHPTIGNGVMISAGAKILGNVLIGDGVKIGAGSLVLESVPAHVTVAGVPAKIVGTPREASPALEMDQYLSDSS

SEQ ID NO: 6332 - DNA, 843 bp, gamma proteobacterium HTCC2207
  CDS (1)..(843): transl_table=11
atggtgtctatgaataaaccgatcacagcatctatgacacccccttcaaaagagcccgcaattaaagggcctgacggcgtctggcagcaaatacgccgcgaagcgcaatctgcagcgactgacgaacccgcactggcaaacttctttaacgcgacagttatcagccacagcagtctcggcaacgcgctaagctactatctggccagcaaactcgccagcgatgaagtgccagaacccatgctgcgaacactaatggatagcgcattttcgacaacagatatcattgatgccgtggccgcggatattgccgctaccgttgatcgagactcggcatgcacattgtatttaacgccattcctctattttaaggggtttcttgcgctgcaagcgtatcgcgtggctcaccaactctggaatcaagagcgtcaatctttagccctattggtgcaataccggatttcgctgatctttgctgtcgatattcatcccgcagccgttattggcagcggcattttaatcgatcacgccaccggcctagtaatcggtgaaaccgcagtgatcgaggactgtgtatcgattatgcagtcggtgacccttggcggcaccggcaaagtctcaggagatcgtcacccaaaaattcgcaaaggcgtgctgcttggtcccggggcaaaaatactcggcaatattgaagtgggtgaaggcgccatggtcgctgcatccagcgtcgtcttaaaagccgtaccagctcatgcagtggtcgccggcgtgccagcagcagtggtcggtgatacgcgctgtgacgagccctcgcaggctatggatcattactttaagtgcgactaa

SEQ ID NO: 6333 - protein, 280 aa, gamma proteobacterium HTCC2207
MVSMNKPITASMTPPSKEPAIKGPDGVWQQIRREAQSAATDEPALANFFNATVISHSSLGNALSYYLASKLASDEVPEPMLRTLMDSAFSTTDIIDAVAADIAATVDRDSACTLYLTPFLYFKGFLALQAYRVAHQLWNQERQSLALLVQYRISLIFAVDIHPAAVIGSGILIDHATGLVIGETAVIEDCVSIMQSVTLGGTGKVSGDRHPKIRKGVLLGPGAKILGNIEVGEGAMVAASSVVLKAVPAHAVVAGVPAAVVGDTRCDEPSQAMDHYFKCD

SEQ ID NO: 6334 - DNA, 825 bp, Aurantimonas manganoxydans SI85-9A1
  CDS (1)..(825): transl_table=11
atgagcagcatgagctcgcattcccacgagacccttcaggccgtcgatccgatatgggcccaggtccggctggaggcagaggacgtcgcggcgcgtgaaccggttctgtccggcttcgtctatccgacgatcatcaaccagcgcagcctggaagcggcgctgattcatcgcgtgtcgcagcggttggaccatccggatctgccggcggtcaccatcgcccaggccttcgccgacttgctggatgccgacgacagcttccgtgcgacgctgcgcaccgacattcaggcggtctatgaccgcgacccggcgtgcgagcgctatctggagccgctgctttacttcaagggcttccacgccatccagacgcaccggctggcccactggctgtggaacgccgggcggcgcgacttcgcactctatctgcaggcgcgctcctcggtggtcttccagaccgacatccacccggcctcgcgcatgggacgcgggatcttcctcgatcacgcgacggggctggtcgtcggcttcaccgccgtgataggcgacaacgtctcgattcttcaggacgtcacgctcggtggcaccggcaaggaattcggcgaccgccatccgaagatcggcagcggcgtcctgatcggggcaggtgcgaagatcctcggcaatatccgcgtcggcgaatgctcgaagatcgcgtcgggttcggtggtgctgaaggaagtgccgccgcataccaccgtggccggcattcccgcgcgggtcatcggatcggccggcgattgcgacgagccggcccgggcgatggaccagtgcttcgaacggaacgactga

SEQ ID NO: 6335 - protein, 274 aa, Aurantimonas manganoxydans SI85-9A1
MSSMSSHSHETLQAVDPIWAQVRLEAEDVAAREPVLSGFVYPTIINQRSLEAALIHRVSQRLDHPDLPAVTIAQAFADLLDADDSFRATLRTDIQAVYDRDPACERYLEPLLYFKGFHAIQTHRLAHWLWNAGRRDFALYLQARSSVVFQTDIHPASRMGRGIFLDHATGLVVGFTAVIGDNVSILQDVTLGGTGKEFGDRHPKIGSGVLIGAGAKILGNIRVGECSKIASGSVVLKEVPPHTTVAGIPARVIGSAGDCDEPARAMDQCFERND

SEQ ID NO: 6336 - DNA, 822 bp, Vibrio angustum S14
  CDS (1)..(822): transl_table=11
gtgaagcaatgtcaacaacaccaactttggccagcgatcaagcaggaagcacgagagcagtcagagcatgaaccaatgcttgcgagtttttatcatgccacgattattaagcatgatgatcttgctgctgcattgagttatatacttgcaaataaattggcgacaccatcgatgccagcgatggctgttcgtgaggtcatcgaagaagcgtatgctagcgattgttcgatagttgaatcggcagcacgtgatatttgtgctgttgttgaacgtgatcctgctattgatatgtattctattccattactttatcttaaaggttgtcatgctcttcaaggatatcgcgtggctaattggttgtggaaacaagatcgaaaagccttagcggtttatctacaaaaccaaatctcggtagcttgccaagtcgatgtgcatcctgcggcaaaaatcggtcaaggaatcatgtttgatcacgcgaccggtattgtgattggtgaaaccgcagtcattgaaaatgatgtatcaatccttcaggacgtcacattaggtggtacgggtaaagagagtggtgatcgtcatccgaagatccgtgaaggggtgatgataggtgctggcgctaaagtattaggcaatatcgaagtcggtgaaggggcgaaaattggctcttgttcggtggtgttaaatcctgttcctccccatacaactgtggccggtattccagctaaagtcgttgggcgaccaaattctgataaaccatcgatggatatggatcagcaatttaatggtaactcgcaaacgtttattgaaggtgatggtatttag

SEQ ID NO: 6337 - protein, 273 aa, Vibrio angustum S14
MKQCQQHQLWPAIKQEAREQSEHEPMLASFYHATIIKHDDLAAALSYILANKLATPSMPAMAVREVIEEAYASDCSIVESAARDICAVVERDPAIDMYSIPLLYLKGCHALQGYRVANWLWKQDRKALAVYLQNQISVACQVDVHPAAKIGQGIMFDHATGIVIGETAVIENDVSILQDVTLGGTGKESGDRHPKIREGVMIGAGAKVLGNIEVGEGAKIGSCSVVLNPVPPHTTVAGIPAKVVGRPNSDKPSMDMDQQFNGNSQTFIEGDGI

SEQ ID NO: 6338 - DNA, 822 bp, Vibrio alginolyticus 12G01
  CDS (1)..(822): transl_table=11
atgaaacactgcgaaaaacaaaaagtctggaacaaaattgtctcagaagcccgtgaaatgtcagaacaagagcctatgctggcgagcttctatcatgccaccattatcaagcatgaaagtttgtgtgccgctctgagttatattctggctaacaaattgaacaccgcttccatgccagcgatggctgtgcgtgaagtggttgaagaagcctttgcagctgatccaaccatcactgacggcgcggcttgtgatatttgtgccacggtcaatcgcgaccctgctgtttcaatgtactcaatgccattgctgtacctaaaaggctatcacgcactgcaaggctaccgagtagcaaactggctgtggaagcaaggtcgtcacgctcttgcgacttacctacaaaatcagatttcggtagcatgtcaggtcgatattcaccctgcagcgcgcattggtagtggtatcatgctcgaccatgcaacaggcatcgtgattggtgaaactgccgtggtcgaaaacgacgtgtctatactgcaagatgtcacccttggtggtactggtaaagaatgcggtgatcgtcacccgaaaattcgcgagggtgtgatgatcggagctggtgcaaagattcttggcaatatcgaagtcggtgaaggcgcgaaaatcggatcttgctctgtggtattgcaagccgtgcctcctcacacaacggtggctggcgtgcctgcaaaaatcgtcggacgtccaaaaacggacaaaccctctctcgatatggatcaaggctttaacggcaagtcgcaaagctttatccatggagatggtatttaa

SEQ ID NO: 6339 - protein, 273 aa, Vibrio alginolyticus 12G01
MKHCEKQKVWNKIVSEAREMSEQEPMLASFYHATIIKHESLCAALSYILANKLNTASMPAMAVREVVEEAFAADPTITDGAACDICATVNRDPAVSMYSMPLLYLKGYHALQGYRVANWLWKQGRHALATYLQNQISVACQVDIHPAARIGSGIMLDHATGIVIGETAVVENDVSILQDVTLGGTGKECGDRHPKIREGVMIGAGAKILGNIEVGEGAKIGSCSVVLQAVPPHTTVAGVPAKIVGRPKTDKPSLDMDQGFNGKSQSFIHGDGI

SEQ ID NO: 6340 - DNA, 795 bp, Chlorobium ferrooxidans DSM 13031
  CDS (1)..(795): transl_table=11
atggcagaagacattaaacagatctggtcggaaattgtccgggaggcggccattgagtctctccgtgatcctgaaataaagatttttcttgagcagcatattttgcgttttgatgattttggttcatcgctggcaatgctgctctccgtaaagcttggctccaagcattttcctccgccggtcttgcaggggctttttgatcagttttatcgtcagtgccctgaacaggtcgagtacgcggtatatgatcttgaggcaacgcggcagcgtgatcctgcggcggtacactattttgaaatcatgctctttctgaaagggtatcaggcactacaggcctaccggcttgcacactggttatggatgcagggtcgcaagactatggcctattttatccagaatcgaatgtcggaggtttttgctgttgatattcatccggcggcagtgatcggaaaaggtatttttcttgatcatgcaaccagccttgttattggtgagacggcagttgttgatgataatgtgtcgcttctccatgaggtgacgcttggcggtaccggcaaagagagcggcgatcgccatccgaaggtacacaagtcggtaatgattggcgccggagcaaagattcttggtaatgttgtaatcggagaaggttcaaaggtcggggccggaagtgtggtgcttgatgatgttccgccgcactacacggttgtcggcgttccggcccagattgtcggtaaaacagaggtgcaggatccagcgttcgatatgaaccagagagttgatccggccaaaccctga

SEQ ID NO: 6341 - protein, 264 aa, Chlorobium ferrooxidans DSM 13031
MAEDIKQIWSEIVREAAIESLRDPEIKIFLEQHILRFDDFGSSLAMLLSVKLGSKHFPPPVLQGLFDQFYRQCPEQVEYAVYDLEATRQRDPAAVHYFEIMLFLKGYQALQAYRLAHWLWMQGRKTMAYFIQNRMSEVFAVDIHPAAVIGKGIFLDHATSLVIGETAVVDDNVSLLHEVTLGGTGKESGDRHPKVHKSVMIGAGAKILGNVVIGEGSKVGAGSVVLDDVPPHYTVVGVPAQIVGKTEVQDPAFDMNQRVDPAKP

SEQ ID NO: 6342 - DNA, 819 bp, Fulvimarina pelagi HTCC2506
  CDS (1)..(819): transl_table=11
atggtacagcgtaacgcgtcaaaactcaccgcagtgcgcgatgtcgatccgatctggaacagcctgcgcgaggaggcggcggcgatggcaaaggccgagcctacgcttgccggcttcgtctacgccacgatcctcaaccagaactcgttcgaagcggcgctcgcccatcgtatcgcccagcgcatggatcatggcgacgtgccggcctacatgatcacccaggctttcgagcagatgttcgatgacgatccggaactgtcggagatcatacggacggatatacaggctgttctcgaccgcgacgccgcctgcgaccgctatatcgagccgcttctttacttcaaggggttccacgcccttcagacgcatcgcctcgcccattggctctggaagcacgagcggcgcgacttcgcgctcttcctccagtctaggtcttcctcggtcttccagtgcgatatcaatccctgcgcccgtttcggtcgcggtatcttccttgaccattcgaccggcatagtcgtcggggagaccgccgttgttgcggacgatgtttccattcttcaagaggtaaccctcggcggtacgggaaaggaagatggcgaccgccatccgaaggtcggcaagggggttctgatcggggccggcgcaaaaatcctcggcaatatcaagatcggtgactgctcgaaggtcgcagcgggttcagtcgtgctgagagacgtgccgcaatattcgacagtcgccggcgtgccggcacgcgtcgtcgtcgttcgcaagggctgcgagccgccggcgcgggtcatggaccagcggatcgaacgctag

SEQ ID NO: 6343 - protein, 272 aa, Fulvimarina pelagi HTCC2506
MVQRNASKLTAVRDVDPIWNSLREEAAAMAKAEPTLAGFVYATILNQNSFEAALAHRIAQRMDHGDVPAYMITQAFEQMFDDDPELSEIIRTDIQAVLDRDAACDRYIEPLLYFKGFHALQTHRLAHWLWKHERRDFALFLQSRSSSVFQCDINPCARFGRGIFLDHSTGIVVGETAVVADDVSILQEVTLGGTGKEDGDRHPKVGKGVLIGAGAKILGNIKIGDCSKVAAGSVVLRDVPQYSTVAGVPARVVVVRKGCEPPARVMDQRIER

SEQ ID NO: 6344 - DNA, 819 bp, Rhodobacterales bacterium HTCC2255
  CDS (1)..(819): transl_table=11
atgtctcagccaaataaaaaacttcaaaatatagatcctgtatggggtagaattcagaatgaagcttcagctttgattcttgcagagccattaatgggtggaatggttcattcaagtatcttgcaccataatacttttagaaaagcacttagctatagaatatcattaaagttgtcctcagaggaaatgccagcacaaatcttacgtgaaattgttgatgaagttttatctacagacgactcgattgcattatctgcaagagcagacatggtcgctgtttttgatcgtgatccagcttgccatcaaatgctgcaaccaatgcttttttttaaaggttatcaggcattacaagcttatagagtttctcactggctatggaaaaatgatcgaaaagagatagcatattttattcagatgaggtgttcggaagtgtttggcgttgatatacatccaggggctgttttgggttgtggtattatgatagatcacgcccattcaattgtaattggtgaaacatctcgtgttggtgataatgtatcaatgttacattcagttacgcttggcggaactggtaaagctgatggggataggcatcctacgattgaaaacggtgttttaattggtgctggtgctaaaatattaggaaatataactgtaggatattgttctaaaattgcagctggttctgttgttttaaaagatataccaccttgcaaaactgtagcaggagtgcctggattaattgttggggaggctggctgtgaccagccctctcaaacaatggatcaattttttgaaggttgtgaaaagacttcataa

SEQ ID NO: 6345 - protein, 272 aa, Rhodobacterales bacterium HTCC2255
MSQPNKKLQNIDPVWGRIQNEASALILAEPLMGGMVHSSILHHNTFRKALSYRISLKLSSEEMPAQILREIVDEVLSTDDSIALSARADMVAVFDRDPACHQMLQPMLFFKGYQALQAYRVSHWLWKNDRKEIAYFIQMRCSEVFGVDIHPGAVLGCGIMIDHAHSIVIGETSRVGDNVSMLHSVTLGGTGKADGDRHPTIENGVLIGAGAKILGNITVGYCSKIAAGSVVLKDIPPCKTVAGVPGLIVGEAGCDQPSQTMDQFFEGCEKTS

SEQ ID NO: 6346 - DNA, 837 bp, Labrenzia aggregata IAM 12614
  CDS (1)..(837): transl_table=11
atgtcagcaccgatcggcaagaccggtttgaaagaagttccgacgcatgatccggtctggcatcaattgcgggatgaagcacaagcgatggtcgcggcagagccggccctgtcgtccttcgtctatgaaacggttctgaaccacgacagcctggaagaggccgtggttcatcgccttggcgaccggctgggccgggacatcgtttccgcatcgctgatccgccagacctaccttgaagcgctggccgacgagccggagcaggccaagatcttccgtgtcgacattgtagctgtcttcgaccgcgacccggcatgcttccgcttcctggaacccgtgctctacttcaagggatttcacggtttgcagactcaccggctggcgaactggctttggcgccggggccgcaaggattttgccctttatctgcaaagccgttcctcggaagtgtttcagatcgacatccatccggctgtccctgtggggcagggtatcttcatcgaccatggcacaggcatcgtcgttggcggcactgcggtgatcgaggatgatgtgtcgattctgcagggggtgacccttggcgggaccggcaaggaggatggcgaccgtcatccgaaaatccgccgcggtgtcttgctcggtgcgggcgccaaggtgcttggcaacctggaaatcggccattgctcacgcattgcgtcgggatcggtcgtgcttcaggacgtgcctgcaaacaccaccgttgccggggttccggccaagattgtcggcaaggcagggtgcgcagaaccggcgcgcagcatgaatcaactgctcggcgaagatgccagtcaatcgaattga

SEQ ID NO: 6347 - protein, 278 aa, Labrenzia aggregata IAM 12614
MSAPIGKTGLKEVPTHDPVWHQLRDEAQAMVAAEPALSSFVYETVLNHDSLEEAVVHRLGDRLGRDIVSASLIRQTYLEALADEPEQAKIFRVDIVAVFDRDPACFRFLEPVLYFKGFHGLQTHRLANWLWRRGRKDFALYLQSRSSEVFQIDIHPAVPVGQGIFIDHGTGIVVGGTAVIEDDVSILQGVTLGGTGKEDGDRHPKIRRGVLLGAGAKVLGNLEIGHCSRIASGSVVLQDVPANTTVAGVPAKIVGKAGCAEPARSMNQLLGEDASQSN

SEQ ID NO: 6348 - DNA, 819 bp, Alteromonadales bacterium TW-7
  CDS (1)..(819): transl_table=11
atgcgtcatgaaatttggcaacagcttcgaagtgaagcaaatgaagtcgtcactcgcgaaccacttttagcaagtcatgtgtattcatgtattttgaaccatgagtgtttaggttcggcgttaagctttattgttgctaacaaattggccgatgctgttgtatctgcatttactattcgtgaattattcgatcaatcatttgtaaaatgcgatcgcatgctgtcttttgtcgcagaagacattaaagctgtaaaagatagagacccagccgcagaaacctacctgactgttattttaaatttaaaggggtttcatgctattcaggctcatcgtttagctaactgcttgtggcaacaaaaccgtaaagaactggcgcgttttattcaaagccgtacttctgaagtgtttggtgtagatattcaccctgcttgtcaggttggtaaaggcataatgtttgaccacgcaacgggtattgttattggtgaaacggcagtcattgaagataatgtatcgatactgcaatcggttacgcttggcggtacaggtaatgagcaaggtgatcgtcatcctaaaatcagagcgggtgtgttaattggcgcaggtgcaaaagtgctgggtaatattgaagtgggtgagggcgcacgtattggtgcagggtcggtggtattaactgctgtgccacctcatacaacggccgttggcgtaccggccaaaattattggcagacctgaatgcccgtgtcctgcgcaaagtatgaaccaaaactttttagctacaccagagccagaaaacgaatcgcataccagcgctatgctgtga

SEQ ID NO: 6349 - protein, 272 aa, Alteromonadales bacterium TW-7
MRHEIWQQLRSEANEVVTREPLLASHVYSCILNHECLGSALSFIVANKLADAVVSAFTIRELFDQSFVKCDRMLSFVAEDIKAVKDRDPAAETYLTVILNLKGFHAIQAHRLANCLWQQNRKELARFIQSRTSEVFGVDIHPACQVGKGIMFDHATGIVIGETAVIEDNVSILQSVTLGGTGNEQGDRHPKIRAGVLIGAGAKVLGNIEVGEGARIGAGSVVLTAVPPHTTAVGVPAKIIGRPECPCPAQSMNQNFLATPEPENESHTSAML

SEQ ID NO: 6350 - DNA, 816 bp, marine gamma proteobacterium HTCC2143
  CDS (1)..(816): transl_table=11
atggcaacgcaacctattgcgattagccctgaaaatgatgccatatggcaaagtattcagacagaaacccaagctgccattaataaagagcctgttttggcgagttttttgcactctaccatcctcaatcataagaccctggaacgtgcccttagctttcatctggctaataaactggacagcccaacagtatcagcactgttggttcgggaagtcattgaggatgctctggcgtctgattcaaccattgccaaagccgttcgctgtgatatccgcgcggtcaaagagcgtgattctgcctgtagcttatactctgtgccttttctctattttaaaggctttcatgcgctgcaggcctaccgtgttgcgcattggctgtggaatcagggacgggaagatttagccttatttttccagaactgtatttctaccgaatttggcgtagacattcaccccgcggcgaagataggacacggtattctgatcgatcatgcaacgggtgtggtgatcggagaaactgcaaccgttggcaacaatgtgtcgctcatgcactcggtaacattgggtggcacgggtaaagaaggcggagaccgtcatccaaaagtgggcgacggcgtattgatcagtgccggcgccaaaattcttggtaacatccgcattggcagtggcgctaaagtgggatccggtagtgtcgtattacaagatgtgcccgctcatactaccgttgctggcgtacccgcaaaggtgattggcaaaccaggcagtgatcaaccggcactggatatgaatcacggcattaactgtgatatgggctag

SEQ ID NO: 6351 - protein, 271 aa, marine gamma proteobacterium HTCC2143
MATQPIAISPENDAIWQSIQTETQAAINKEPVLASFLHSTILNHKTLERALSFHLANKLDSPTVSALLVREVIEDALASDSTIAKAVRCDIRAVKERDSACSLYSVPFLYFKGFHALQAYRVAHWLWNQGREDLALFFQNCISTEFGVDIHPAAKIGHGILIDHATGVVIGETATVGNNVSLMHSVTLGGTGKEGGDRHPKVGDGVLISAGAKILGNIRIGSGAKVGSGSVVLQDVPAHTTVAGVPAKVIGKPGSDQPALDMNHGINCDMG

SEQ ID NO: 6352 - DNA, 837 bp, marine gamma proteobacterium HTCC2080
  CDS (1)..(837): transl_table=11
atggtgaccgttatgacggcagttcattcagtaccaataaaaaaactacagggcggtgaccctatctgggagcaaatgcgcgcagagaccgagcgcgctgccagccaagaaccggtcttggtgagctttctgcatgcaaccattttgcatcatgacgaactggaatgcgccctaagctttcacctggccaaccagctcgatagcccaacagttccggccatgatgcttcgagaaatcatgctggcggcctttagcagtgacgccaccctgcgcagcgctatacgtgacgatttacaggcggttcttgatcgcgactcggcctgtcaggaatatcatctgcctttcctctatttcaaaggttttcaagccttacaaacccaccgcgttgcccattggctttggcaggaaaatcgacattcgctggctctatttctacaaagccaggtatcacaaaagtttggcatagacattcatcctgcagcacgttttggtcatggcatcatgctcgatcacgccactggcttagtgattggtgaaacggccgtagtaggcaaccacgtctcgatacttcagtcggtcactctggggggtactggaaaacaagatggcgaccgccacccaaaaattggcgatggcgtcctcatttcagccggtgccaaaattttgggcaatattatcgttggggaaggtgccaaggtcggcgctggttccgtagtgctgcatgacgtgccatcccacacaactgtggcaggagtacctgcaaaagtcgtgggcgtccccgactcggagacacccgcgctagatatggatcatgcgcttcctgaatcggactggtga

SEQ ID NO: 6353 - protein, 278 aa, marine gamma proteobacterium HTCC2080
MVTVMTAVHSVPIKKLQGGDPIWEQMRAETERAASQEPVLVSFLHATILHHDELECALSFHLANQLDSPTVPAMMLREIMLAAFSSDATLRSAIRDDLQAVLDRDSACQEYHLPFLYFKGFQALQTHRVAHWLWQENRHSLALFLQSQVSQKFGIDIHPAARFGHGIMLDHATGLVIGETAVVGNHVSILQSVTLGGTGKQDGDRHPKIGDGVLISAGAKILGNIIVGEGAKVGAGSVVLHDVPSHTTVAGVPAKVVGVPDSETPALDMDHALPESDW

SEQ ID NO: 6354 - DNA, 810 bp, Rhodobacterales bacterium HTCC2150
  CDS (1)..(810): transl_table=11
atgagcaagttagatcagaaactatcaactctggatcctgtttggggtcaaattcgtaaagaggcagaagaagccgttgttgcggaaccgttgcttggtggtttaatccattctactttgttgcatcatgacacgcttgaggcagctttggcttatcgggtttcaatgaaactggcgtcggctgagatgtctgaacagattttgcgtgaaattgcagatcatgtttatgaaaatgacgccgacatcggccaatcatcacgtgcagatcttatggcgatttatgaacgtgatccggcgtgccatcggttgttgcagccgattttatatttcaaaggttttcaagccgttcaagcctttcgtattgggcattcactttggaatgcagggcgtaaagatatggcgtactttttccaaatgcgtgtatccgaggtatttggcgtcgacattcacccagcggcaacaattggtcgtggattgatgattgatcacgcgcattcaattgtcatcggcgaaacggcccgtgttggtgataatgtttcgatgttgcattcggtaacattaggcggaaccggtaaagaagatcacattcgtcatccgaaaattggagatggcgtattgatcggtgctggtgccaaggtattaggcaatattgaagtgggtaattgttcacgcgtggcagcaggttcggtggttttacagaacgtccctgattgcaaaaccgtggcaggtgtacccgccaaaatcgtcggagaggcgggatgcgatcacccaagcctgacgatgaaccaaattttaggcattaacgaataa

SEQ ID NO: 6355 - protein, 269 aa, Rhodobacterales bacterium HTCC2150
MSKLDQKLSTLDPVWGQIRKEAEEAVVAEPLLGGLIHSTLLHHDTLEAALAYRVSMKLASAEMSEQILREIADHVYENDADIGQSSRADLMAIYERDPACHRLLQPILYFKGFQAVQAFRIGHSLWNAGRKDMAYFFQMRVSEVFGVDIHPAATIGRGLMIDHAHSIVIGETARVGDNVSMLHSVTLGGTGKEDHIRHPKIGDGVLIGAGAKVLGNIEVGNCSRVAAGSVVLQNVPDCKTVAGVPAKIVGEAGCDHPSLTMNQILGINE

SEQ ID NO: 6356 - DNA, 819 bp, Sagittula stellata E-37
  CDS (1)..(819): transl_table=11
atggccgagacacgcatgaaactggccgaggtcgacccggtctgggcgcgcatcgcccgtgaagccgaagaagccgtggcgcatgaacccttgctgggcggtctggtgcattactccatcctgcaccatccgacgatggaaagggcgctgagctaccggacttcgttgaagctggccaacggcgagatgtccgaacagatcctccgggaaatctgcgacgaagcgtattcggcggatccggaccttgcccatgcggcgcgggccgatatcaccgcgacctacgagcgtgacccggcgtgccaccgctacctgcagccgttgcttttcttcaagggcttccaggcggtgcaggcttatcgcgtggcgcattggctctggacgcaggggcgcaaggatctggcgtatttcttccagatgcggtcctccgaggtcttcggcacggacatccacccggcggcccgtatcgggcgcggcatcatgatcgaccacgcgcattccatcgtgatcggggaaacggctgtcgtgggcgacaacgtgtccatgctgcactcggtcacgcttggcggcacagggaaagaagactccgaccgccatcccaagatcgggaacaacgtgctgatcggggcaggtgccaaggtgttgggtaacatcacggtcggccactgctcgcgcattgcggcggggtctgtcgtgctgaaagaagtgccgccgtgcaccaccgtggcgggggtccccgcgaagatcgtgggcgaggccggctgcgaccagccctccaaggagatggaccagatcctgcgtggcgaaacgctgggcatgtga

SEQ ID NO: 6357 - protein, 272 aa, Sagittula stellata E-37
MAETRMKLAEVDPVWARIAREAEEAVAHEPLLGGLVHYSILHHPTMERALSYRTSLKLANGEMSEQILREICDEAYSADPDLAHAARADITATYERDPACHRYLQPLLFFKGFQAVQAYRVAHWLWTQGRKDLAYFFQMRSSEVFGTDIHPAARIGRGIMIDHAHSIVIGETAVVGDNVSMLHSVTLGGTGKEDSDRHPKIGNNVLIGAGAKVLGNITVGHCSRIAAGSVVLKEVPPCTTVAGVPAKIVGEAGCDQPSKEMDQILRGETLGM

SEQ ID NO: 6358 - DNA, 822 bp, Vibrionales bacterium SWAT-3
  CDS (1)..(822): transl_table=11
atgaaatactgtgaacaacaaaaagtttggcaatgcattgtaaaagaagctcgacagcagtctgagcaagaacctatgcttgcgagtttttaccatgccacgattatcaaccatgaaagcctaggggctgcactcagctacattcttgctaacaagttaaagactgcttcgatgccagcaatggctgtacgtgaagtggttgagcaagcgtttgaagaagatgactcaatcattgatgcggccgcttgtgatatctgcgcgacagttactcgagatccggctgtagaaatgtactctatgccattgctctaccttaaaggctatcacgcactgcaaggttatcgcgtggctaactggttatggaagcaagggcgtattgcactggcaacgtacctgcaaaaccaaatttcagtcgcatgccaagtggatatccatccggctgcacgtattggcaaagctatcatgctcgaccacgcaacaggcatcgttatcggtgaaacagcagtggtagaaaacgacgtatccatccttcaagatgttactctcggaggtaccggtaaagaaggcggtgatcgtcaccctaaaatccgtgaaggtgtgatgattggtgctggtgcgaaaatactcggcaatattgaagtgggtgaaggcgctaaaattggctcttgttctgtggtactacaagctgtaccaccacatactacggtcgctggtgttcccgctaagattgtcggtaagccaaagactgataagccttctctagatatggaccaagggttcaatggtcgctcacaaagctttatccatggtgatgggatataa

SEQ ID NO: 6359 - protein, 273 aa, Vibrionales bacterium SWAT-3
MKYCEQQKVWQCIVKEARQQSEQEPMLASFYHATIINHESLGAALSYILANKLKTASMPAMAVREVVEQAFEEDDSIIDAAACDICATVTRDPAVEMYSMPLLYLKGYHALQGYRVANWLWKQGRIALATYLQNQISVACQVDIHPAARIGKAIMLDHATGIVIGETAVVENDVSILQDVTLGGTGKEGGDRHPKIREGVMIGAGAKILGNIEVGEGAKIGSCSVVLQAVPPHTTVAGVPAKIVGKPKTDKPSLDMDQGFNGRSQSFIHGDGI

SEQ ID NO: 6360 - DNA, 774 bp, Lentisphaera araneosa HTCC2155
  CDS (1)..(774): transl_table=11
atgattagcaagttttggcaggaaattttgactcaggcggaggctgtgaagcaggatgagcaccgtctcgcaaaactgattgatgaagccattttatccaagtccagtattgagcaagttttgacttctcgcctcgcggaaagtttaggtgaaaaatatgtcagtgctgaagatcttgaacatatttttacggaactctacgctgaagacccgtttttagcgaaggccgcaaagaaagatttgaaggcgatttgtgatcgtgaccccgcttgcaactgctatgtcattcctatgctgtactacaaaggttttcaggctttacaagcgtctcgtttagctcatatcttatggaataaaggtcgagcccatttagctagccatattcaatctcgcaatgctgagatttttggtgtggatattcacccaggtgctcgctttggtacaggtattctcctcgaccacgcttcttcatttgtcgcaggagaaacggctgttgtgggtgatgatgtctcgatcttacacgaagttaccctcgggggttcaggtaaggaatgtggagatcgtcacccgaaagtgggtaatggcgttctcattggtgcaggagctaaactgctaggtaatatctgtattggtgcaggagctaaaattggtgcaggaagtgttgtccttgatgatgtggaagggcatacgacagttgttggcgtgccggcaagacccgttggtaagcccctacatcagagcccatccaagtatatggatcatcatgtggagtaa

SEQ ID NO: 6361 - protein, 257 aa, Lentisphaera araneosa HTCC2155
MISKFWQEILTQAEAVKQDEHRLAKLIDEAILSKSSIEQVLTSRLAESLGEKYVSAEDLEHIFTELYAEDPFLAKAAKKDLKAICDRDPACNCYVIPMLYYKGFQALQASRLAHILWNKGRAHLASHIQSRNAEIFGVDIHPGARFGTGILLDHASSFVAGETAVVGDDVSILHEVTLGGSGKECGDRHPKVGNGVLIGAGAKLLGNICIGAGAKIGAGSVVLDDVEGHTTVVGVPARPVGKPLHQSPSKYMDHHVE

SEQ ID NO: 6362 - DNA, 831 bp, Roseovarius sp. TM1035
  CDS (1)..(831): transl_table=11
atggcacatacaagacgaaagctggccgaactcgatccggtctgggggcagatcgcccaagaggccaaggccgccatcgccgatgagccgctcttgggcgggctgatccattccagcgtgctgcatcacggcaccttcgaatcagcgcttgcctatcgcatttccctcaaactcacctccaacgagatgcccgaacagatcctgcgcgagatttgcgacaaggctttggcgtctgacccgtccatcggccttgccgcccgcgccgatatcgtggccgtcaatgaccgcgatccggcctgcgaccggttcctcttgccgctccttttcttcaagggctttcaggcaatccaggcctatcgcatcgcccattggctctggacgacgggccgccgtgatcttgcgcgctttttccagatgcgcgcctccgaagtgttcggcgtcgatattcaccccgccgcccgcatcggcaagggcatcatgatcgaccacgcccattccatcgtgatcggggaaaccgccgtggtcggcgacaatgtctcgatgctgcattccgtcactctgggcggcaccggcaaggaagaagaggatcgtcaccccaagatcggcaatggcgtcctgatcggggccggggccaaagtgctgggcaatatccgcgtcggcaattgcagccgtatcgccgcaggctcggtcgttctgcaagaggtgcccccctgcaagaccgttgcaggcgtgcccgccaaaatcgtgggcgaagctggctgcgatcaaccctcggtcaagatggaccagctcttgggcgtgcgcggcactgacgacgacgcgagcgactga

SEQ ID NO: 6363 - protein, 276 aa, Roseovarius sp. TM1035
MAHTRRKLAELDPVWGQIAQEAKAAIADEPLLGGLIHSSVLHHGTFESALAYRISLKLTSNEMPEQILREICDKALASDPSIGLAARADIVAVNDRDPACDRFLLPLLFFKGFQAIQAYRIAHWLWTTGRRDLARFFQMRASEVFGVDIHPAARIGKGIMIDHAHSIVIGETAVVGDNVSMLHSVTLGGTGKEEEDRHPKIGNGVLIGAGAKVLGNIRVGNCSRIAAGSVVLQEVPPCKTVAGVPAKIVGEAGCDQPSVKMDQLLGVRGTDDDASD

SEQ ID NO: 6364 - DNA, 780 bp, Moritella sp. PE36
  CDS (1)..(780): transl_table=11
atggaagataaactttcaatgtcttggcttaaaattagaggtgaggctaaattattagttgaacaggaacctatgctcgcgagctttttccattcaacaatactaaatcacgatagtttaaaatgctcattgagttttcaattagcaaataagctcggtagcgcgacaatgcctgctattttattacgtgaagtgattgaagaagcattaaaagctgaaccggatattttacatgcggttgctgctgatttatgtgcagtacaggaacgagatccggcggtagaatatttctcgacaccgctcttatatctgaaaggatttttggccttgcagtcgtatcgaattgcgcactggctctggaatcaaaagcgtgaagcattagcgatttatttacaaaaccaaatatcagtggtgtttgctgttgatattcatccagctgctcgaataggcaaaggtattatgcttgatcacgcaaccggtattgtgattggcgaaacggcaattatagaagatgatgtgtcaattttacaaagtgtcacgcttggtggtaccggtaaagaaagtggcgatcgtcatccgaaaattagagccggagtgatgattggtgctggcgcgaaagtgctgggtaatattgaagtcggcagaggggctaaagtcggtgctggtagtgtggtactagagtcggtaccggaacacacgacagtcgcaggtgtccccgctaaagttgttggtaaaccggattctgatatgccttcattagcgatgaatcaaacaatttga

SEQ ID NO: 6365 - protein, 259 aa, Moritella sp. PE36
MEDKLSMSWLKIRGEAKLLVEQEPMLASFFHSTILNHDSLKCSLSFQLANKLGSATMPAILLREVIEEALKAEPDILHAVAADLCAVQERDPAVEYFSTPLLYLKGFLALQSYRIAHWLWNQKREALAIYLQNQISVVFAVDIHPAARIGKGIMLDHATGIVIGETAIIEDDVSILQSVTLGGTGKESGDRHPKIRAGVMIGAGAKVLGNIEVGRGAKVGAGSVVLESVPEHTTVAGVPAKVVGKPDSDMPSLAMNQTI

SEQ ID NO: 6366 - DNA, 822 bp, Vibrio cholerae MZO-2
  CDS (1)..(822): transl_table=11
atgaaacagtgcgcacacaccaaggtttggcaaactattgtcgctgaagctcgcgagcaagccgagcaagagccgatgctcgccagtttttaccatgccaccattattaagcatgacagtttaaaagcggcattgagctatattctggccaaccgtttgaacactgcatccatgcctgcgatggcagtacgagaagtgattgaagaagcgtttgctgccgatccgagtatctcagaagcggcggcgtgtgatatttgcgcgacagtcaaccgcgatccggcagtgtcgatgtactcaatgccgctactttacctaaaaggttatcacgctttacaaggctatcgggtggctaactggttatggcgacaagggcgtaaggcgctcgcgacctatttccaaaatcagatatcagtggcgtgtcaggtggatattcaccctgcagcgcgtattggtcgcggcatcatgctcgatcacgcgacggggatcgtgattggtgaaaccgccgtggtagaagatgatgtatcgatcttgcaggacgttacgcttggcggtaccggtaaagagtgcggcgatcgccacccgaaaattcgtgaaggggtgatgattggtgcgggcgcgaaaatcttaggcaacatcgaagttggagaaggggcgaaaattggctcgggatcggtcgtgttgcaagctgtaccgccccataccacagtcgctggaatacctgctcgtattgtggggcggccacaatcggataagccttctttggatatggatcagcagtttaatggtcgttcgcagacgtttatcggcggtgatggtatctag

SEQ ID NO: 6367 - protein, 273 aa, Vibrio cholerae MZO-2
MKQCAHTKVWQTIVAEAREQAEQEPMLASFYHATIIKHDSLKAALSYILANRLNTASMPAMAVREVIEEAFAADPSISEAAACDICATVNRDPAVSMYSMPLLYLKGYHALQGYRVANWLWRQGRKALATYFQNQISVACQVDIHPAARIGRGIMLDHATGIVIGETAVVEDDVSILQDVTLGGTGKECGDRHPKIREGVMIGAGAKILGNIEVGEGAKIGSGSVVLQAVPPHTTVAGIPARIVGRPQSDKPSLDMDQQFNGRSQTFIGGDGI

SEQ ID NO: 6368 - DNA, 822 bp, Vibrio harveyi HY01
  CDS (1)..(822): transl_table=11
atgaaacactgcgaaaaacaaaaagtctgggacaagatcgtttcagaagcccgtgaaatgtcagagcaagagccgatgctggcgagcttttatcatgcaaccatcatcaagcatgacagcttgtgtgccgcattgagctacattctggccaacaaattgaacaccgcctccatgccagcaatggcagtacgtgaagtggtagaagaagcctttgctgctgatccaacgattacggacggcgccgcttgtgacatttgtgccacggtgaatcgcgacccagctgtttcaatgtactcaatgccgttgttgtacctaaagggctaccatgccttgcaaggctaccgagtggctaactggttgtggaagcaaggtcgtcacgctcttgcaacttacctacaaaaccagatttctgttgcatgtcaggttgatattcaccctgcagcgcgcattggtagtggtatcatgctagaccatgcaaccggtattgtgattggtgaaacggccgttgtcgaaaacgacgtgtctattctgcaagatgtcacccttggtggtaccggcaaagaatgcggtgaccgtcacccgaaaattcgcgaaggcgtaatgatcggcgcaggtgcaaagattcttggcaatatcgaagtgggcgaaggcgcaaaaattggctcctgctccgtggtattgcaagcagtgccgccacacacaaccgtggctggtgtgcctgcaaaaattgttggtcgtccgaaaacggacaaaccttctctcgatatggatcaaggctttaatggcaaatcgcaaagctttatccatggggatggtatttaa

SEQ ID NO: 6369 - protein, 273 aa, Vibrio harveyi HY01
MKHCEKQKVWDKIVSEAREMSEQEPMLASFYHATIIKHDSLCAALSYILANKLNTASMPAMAVREVVEEAFAADPTITDGAACDICATVNRDPAVSMYSMPLLYLKGYHALQGYRVANWLWKQGRHALATYLQNQISVACQVDIHPAARIGSGIMLDHATGIVIGETAVVENDVSILQDVTLGGTGKECGDRHPKIREGVMIGAGAKILGNIEVGEGAKIGSCSVVLQAVPPHTTVAGVPAKIVGRPKTDKPSLDMDQGFNGKSQSFIHGDGI

SEQ ID NO: 6370 - DNA, 816 bp, Phaeobacter gallaeciensis 2.10
  CDS (1)..(816): transl_table=11
atgcttgagacgcgccacgccgttagttccgttgatccggtttgggatcagatcaccaccgaggcgcaggacgccgtgagccgccagccgctgatgggcgggctgatccatgcctgcatcctgcatcacacctcgcttgagaaggcgctgtcctatcgcattgcggccaagctctgctctaatgagatgtcgatggtgatcctgcgcgaaatcgtcgacaaggcctatggggaaaacccggatctgattgccgctggacgcgccgatctgatggcggtctatgagcgtgatccggcctgccatcgtctgttgcagccgatcctctacttcaagggctatcaggcggtgcaggcctaccgggtcgcccattggctgtggcagaagggtgattacgacctgtcctatttcttccagatgcgaatttccgagatctttggcgtcgatatccatccggcggccaaaatcggccgcggcatcatgatcgatcacgcccattccattgttatcggtgaaaccgctgtggttggtgacaatgtatcgatgctgcattcggtgaccctcggcggcaccggcaaggaagaggaagatcgccatccgaagatcggcgatggtgtgctgatcggggccggtgccaaggttctgggcaacatcaaggtcggccattgtagccgcattgcggccggatcagtggtgctgcaggagatcccgccctgcaagaccgtggcgggcgtgccggccaagatcgtcggcgaggcaggctgcgatcagccgtcagtgagcatgaatcaggtgctgggaggcggcaagccgcaatag

SEQ ID NO: 6371 - protein, 271 aa, Phaeobacter gallaeciensis 2.10
MLETRHAVSSVDPVWDQITTEAQDAVSRQPLMGGLIHACILHHTSLEKALSYRIAAKLCSNEMSMVILREIVDKAYGENPDLIAAGRADLMAVYERDPACHRLLQPILYFKGYQAVQAYRVAHWLWQKGDYDLSYFFQMRISEIFGVDIHPAAKIGRGIMIDHAHSIVIGETAVVGDNVSMLHSVTLGGTGKEEEDRHPKIGDGVLIGAGAKVLGNIKVGHCSRIAAGSVVLQEIPPCKTVAGVPAKIVGEAGCDQPSVSMNQVLGGGKPQ

SEQ ID NO: 6372 - DNA, 813 bp, Oceanibulbus indolifex HEL-45
  CDS (1)..(813): transl_table=11
atggcacaaacacgcagaaatatctcgaaagtggacccggtgtgggaccaaattcagcaagaagccgaagatgcggtgcgtgacgagccgctcatcggcggctttgttcatgcctgtattctgcaccataaatcgatcgagaacgcgctctcctatcgcatcgccgcaaagctttcgtccaatgagatgtcgatgatggtcgtgcgcgaaatggtcgaagaagcctatgccgaagaccccgatcttgtggctgcggcgcgcgctgatctggtcgcgatctatgaccgcgatccggcttgccatcggcttctgcagcctatcctttatttcaaaggctatcaggcggtgcaggcatatcgggttggccaccacctttatatgaagggcaaacgcgatctggcctatttcatccaaatgcgggtgagcgagatcttcggcgtcgatattcacccggcggcaaagatgggcaagggcatcatgatcgaccacgcgcattctatcgtgatcggtgagacggcagtggtgggcgataacgtttcaatgctgcattcggtcactcttggtggcacgggcaaagaggaagaagaccggcaccccaagatcggcaacggcgtgctaatcggtgcaggcgcaaaggtgctgggcaatatcaccatcggtcattgcagccgcatcgccgcgggttctgtggtgctagaggcggtgcctgcttgcaaaaccgtcgcaggcatccccgcgcggattgtgggggaggcgggctgtgatcagccttcaatgtcgatgaaccatctcttcgggccaaacagcgaataa

SEQ ID NO: 6373 - protein, 270 aa, Oceanibulbus indolifex HEL-45
MAQTRRNISKVDPVWDQIQQEAEDAVRDEPLIGGFVHACILHHKSIENALSYRIAAKLSSNEMSMMVVREMVEEAYAEDPDLVAAARADLVAIYDRDPACHRLLQPILYFKGYQAVQAYRVGHHLYMKGKRDLAYFIQMRVSEIFGVDIHPAAKMGKGIMIDHAHSIVIGETAVVGDNVSMLHSVTLGGTGKEEEDRHPKIGNGVLIGAGAKVLGNITIGHCSRIAAGSVVLEAVPACKTVAGIPARIVGEAGCDQPSMSMNHLFGPNSE

SEQ ID NO: 6374 - DNA, 771 bp, Shewanella benthica KT99
  CDS (1)..(771): transl_table=11
atgcgttatgaagtttgggaacagcttagggtcgaagcagaagacttggttcgtaaggagcccttgcttgccagtcatgtttattcatcgattctcaatcacgattgtctgggttcggcgctcagctttatcgtggccaataaactctcagatggagtggtatcgccttttactttccgtgagctgttcgataaagccttcatccattgcgagcagatgctaacctatgtggccacagacattaaggcggtgaaggagcgcgatcccgcggtggtgagttacctgaccgttatcttgaacctcaaggggttccaggctattcaggtgcatcgcctggcgaattgtctttggagtcagggccgcaccgaattagcgcaatttattcagagccgtaactcggaagtattcggtgtcgatattcatccggcctgtaagatgggcactggcatcatgtttgaccacgctacggggattgtcataggtgagactgcggttattgaaaataatgtgtctctgcttcaaggagtgacattaggtggtacgggaaatcagcagggtgatcgtcatcccaagatccgtgcaggtgtgatgatcggtgccggtgctaaagtattgggtaatatcgaggttggcgaaggtgccaagatcggcgcaggctctgtggtattgagcgatgtggcttgccacactacagttgtaggtgtgccagcaaaagtcgtcggtaagcccgagtctatatgcccggcaaagacgatggaacaaaacatataa

SEQ ID NO: 6375 - protein, 256 aa, Shewanella benthica KT99
MRYEVWEQLRVEAEDLVRKEPLLASHVYSSILNHDCLGSALSFIVANKLSDGVVSPFTFRELFDKAFIHCEQMLTYVATDIKAVKERDPAVVSYLTVILNLKGFQAIQVHRLANCLWSQGRTELAQFIQSRNSEVFGVDIHPACKMGTGIMFDHATGIVIGETAVIENNVSLLQGVTLGGTGNQQGDRHPKIRAGVMIGAGAKVLGNIEVGEGAKIGAGSVVLSDVACHTTVVGVPAKVVGKPESICPAKTMEQNI

SEQ ID NO: 6376 - DNA, 822 bp, Vibrio campbellii AND4
  CDS (1)..(822): transl_table=11
atgaaacactgcgaaaaacaaaaagtctgggacaaaatcgtgtcagaagcccgtgagttgtctgagcaagagccaatgctggcgagcttttatcatgcgactattatcaagcatgacagcctatgtgcggcattgagttacattctggccaacaaattgaacacggcttccatgcccgcaatggcggtgagagaggtggttgaagaagcttttgccgctgatccaaccatcacggaatgcgcagcttgtgatatttgtgccacagtgaatcgcgatccagctgttttaatgttctcaatgccattattgtacctaaaaggctaccatgctctgcaaggttaccgagtggctaactggttgtggaaacaaggtcgtcatgcccttgcgacctacctacaaaatcagatttctgtggcatgtcaggtcgacattcaccctgctgcgtgcattggtagtggtatcatgctagaccatgctactggcattgtgattggtgaaactgcggtggtcgaaaacgacgtatctatcctgcaagatgtcacccttggtggtacaggtaaagagagcggtgaccgccacccgaaaattcgcgaaggcgtaatgatcggagcaggggcaaaaatcctgggcaatatcgaagtaggacaaggggcaaaaattggctcttgctccgtggtattgcaagcagtaccgccgcacacaaccgtagctggcgtacctgcaaaaattgttggtcgtccaaaaacggacaaaccttctctcgatatggatcaaggctttaacggcaagtcacaaagctttatccacggcgatggtatttaa

SEQ ID NO: 6377 - protein, 273 aa, Vibrio campbellii AND4
MKHCEKQKVWDKIVSEARELSEQEPMLASFYHATIIKHDSLCAALSYILANKLNTASMPAMAVREVVEEAFAADPTITECAACDICATVNRDPAVLMFSMPLLYLKGYHALQGYRVANWLWKQGRHALATYLQNQISVACQVDIHPAACIGSGIMLDHATGIVIGETAVVENDVSILQDVTLGGTGKESGDRHPKIREGVMIGAGAKILGNIEVGQGAKIGSCSVVLQAVPPHTTVAGVPAKIVGRPKTDKPSLDMDQGFNGKSQSFIHGDGI

SEQ ID NO: 6378 - DNA, 807 bp, Haemophilus parasuis 29755
  CDS (1)..(807): transl_table=11
atgacaaaccaaccgcttgatcttatttggcagaatattcgtaatgaagcacaagagcttgtaaatagtgagccgatgcttgccagtttttttcacgcaaccattctgaaacatcatcatttaggcgatgcgttaagctatattttggcaaacaaactggcaaatgcgattatgccggcaattgcattaaaagagatcattgaagaagcctatcaagcagatccgcaaattattgccagtgctgcctgcgatattgaagctgttcgtactcgagatcctgcggtcgataaatggagtacgcctttgctttatctcaaaggttatcacgctttgcaaagctatagagtcacccattatttgtggcaacaagggcgaaaagctttggctatttatctgcaaaatgagatttccgttgcttttgatgtggatattcaccctgcggctagtgttggttgtggcattatgttagaccacgccacggggattgtggtgggagaaacggcagtgatcgaaaacgatgtgtctattttgcaaggcgtaacgctaggtggtacaggtaaagaacacggagatcgccacccgaaaattcgtgaaggcgtgatgattggggctggggctaaaattttaggtaatattgagattggtcgttactcaaaaattggggcaaattcggttgtattacaagcggtgcctgaatatgccactgcggctggtgtccctgctcgaattattgggcattctcaacaacaaaaacccgcttttgaaatgaatcaatattttgatgataccaataaagagatcaattga

SEQ ID NO: 6379 - protein, 268 aa, Haemophilus parasuis 29755
MTNQPLDLIWQNIRNEAQELVNSEPMLASFFHATILKHHHLGDALSYILANKLANAIMPAIALKEIIEEAYQADPQIIASAACDIEAVRTRDPAVDKWSTPLLYLKGYHALQSYRVTHYLWQQGRKALAIYLQNEISVAFDVDIHPAASVGCGIMLDHATGIVVGETAVIENDVSILQGVTLGGTGKEHGDRHPKIREGVMIGAGAKILGNIEIGRYSKIGANSVVLQAVPEYATAAGVPARIIGHSQQQKPAFEMNQYFDDTNKEIN

SEQ ID NO: 6380 - DNA, 822 bp, Escherichia albertii TW07627
  CDS (1)..(822): transl_table=11
atgtcgtgtgaagaactggaaattgtctggaacaatattaaagcggaagccagagcgctggcggactgtgagccaatgctggccagtttttaccacgcaacattactcaagcacgaaaacctcggcagcgcgttaagctatatgctggcgaataaactggcatcgccgattatgcctgctattgcgattcgcgaagtggtggaggaagcctacgccgctgacccggaaatgatcgcttctgcggcgtgtgatattcaggcggtacgtacccgcgacccggcagtcgataaatactcaactcccttgttatacctgaaaggttttcatgccttgcaggcctatcgcattggtcactggctgtggaatcaggggcgtcgcgcgctggctatttttctgcaaaaccaggtttctgtgacgttccaggtcgatattcacccggcagccaaaattggtcgcggtattatgcttgaccacgcgacgggcatcgtcgtcggtgaaacggcggtgattgaaaatgacgtatctattctgcaatctgtgacgcttggcggtacggggaaaaccagcggtgaccgtcacccgaaaattcgtgaaggcgtgatgattggcgcgggcgcaaaaattctcggtaatattgaagttggacgcggtgcgaaaattggcgcggggtctgtagtgctgcaaccggtgccgccgcacactaccgccgctggcgtaccggcacgcatcgttggtaaaccagacagcgataagccatcaatggatatggatcagcatttcaacggtattaaccatacgtttgaatatggcgatgggatctga

SEQ ID NO: 6381 - protein, 273 aa, Escherichia albertii TW07627
MSCEELEIVWNNIKAEARALADCEPMLASFYHATLLKHENLGSALSYMLANKLASPIMPAIAIREVVEEAYAADPEMIASAACDIQAVRTRDPAVDKYSTPLLYLKGFHALQAYRIGHWLWNQGRRALAIFLQNQVSVTFQVDIHPAAKIGRGIMLDHATGIVVGETAVIENDVSILQSVTLGGTGKTSGDRHPKIREGVMIGAGAKILGNIEVGRGAKIGAGSVVLQPVPPHTTAAGVPARIVGKPDSDKPSMDMDQHFNGINHTFEYGDGI

SEQ ID NO: 6382 - DNA, 822 bp, Providencia stuartii ATCC 25827
  CDS (1)..(822): transl_table=11
atgtcgcgagaagaattggataggatctgggggtttattaaagaggaagcaaaatcgcttgctgattgtgaaccgctactagccagtttttttaatgcaacactgctaaagcatgacaacttaggcagtgcgctcagctatatgttagcaaacaagctaagctctcccattatgcctgcgatggaagtgagggagattgttgaagaagcgtatcgtaatgatgagcagatgatcttttcagctgcaatggatttatccgccgtgcgtctacgtgaccccgcggtggataaatactctacgccactcctctaccttaaagggttccatgcattgcaaggttaccgtattgggcattggctatggaaagaggggcgccaagcgcttgcggtttacctgcaaaatcaaatatcagtcacttttgcagtggatattcaccctgctgctcgtattggttgtggcattatgctggaccatgccacgggcattgtgattggtgaaactgccgttgttgagaacgatgtttctattcttcaatctgtgactttaggcggtacaggcaaaacctgtggtgaccgtcaccctaaagtacgagaaggcgtgatgatcggcgctggcgcgaagattcttggtaatattgagataggccgtggcgcaaaaattggtgctggctcggttgttcttcaccctgttccccctcatacaaccgtcgcgggtgtacctgctcgggtggttggcaagccaaatagtgataaaccatcatttgagatggatcagaactttaatggttcgatttatggttttgaagatggcgatgggatttga

SEQ ID NO: 6383 - protein, 273 aa, Providencia stuartii ATCC 25827
MSREELDRIWGFIKEEAKSLADCEPLLASFFNATLLKHDNLGSALSYMLANKLSSPIMPAMEVREIVEEAYRNDEQMIFSAAMDLSAVRLRDPAVDKYSTPLLYLKGFHALQGYRIGHWLWKEGRQALAVYLQNQISVTFAVDIHPAARIGCGIMLDHATGIVIGETAVVENDVSILQSVTLGGTGKTCGDRHPKVREGVMIGAGAKILGNIEIGRGAKIGAGSVVLHPVPPHTTVAGVPARVVGKPNSDKPSFEMDQNFNGSIYGFEDGDGI

SEQ ID NO: 6384 - DNA, 822 bp, Shigella dysenteriae 1012
  CDS (1)..(822): transl_table=11
atgtcgtgtgaagaactggaaattgtctggaacaatattaaagccgaagccagaacgctggcggactgtgagccaatgctggccagtttttaccacgcgacgctactcaagcacgaaaaccttggcagtgcactgagctacatgctggcgaacaagctgtcatcgccaattatgcttgctattgctatccgtgaagtggtggaagaagcctacgccgctgacccggaaatgatcgcctctgcggcctgtgatattcaggcggtgcgtacccgcgacccggcagtcgataaatactcaaccccgttgttatacctgaagggttttcatgccttgcaggcctatcgcatcggtcactggttgtggaatcaggggcgtcgcgcactggcaatctttctgcaaaaccaggtttctgtgacgttccaggttgatattcacccggcagcaaaaattggtcgcggtatcatgcttgaccacgcgacaggcatcgtcgttggtgaaacggcggtgattgaaaacgacgtatcgattctgcaatctgtgacgcttggcggtactgggaaaactagcggcgaccgtcacccgaaaattcgtgaaggcgtaatgattggcgcgggcgcgaagattctcggcaatattgaagttggtcgcggcgcgaagattggcgcaggttccgtggtgctgcaaccggtgccgccgcataccaccgccgctggcgttccggcacgcattgtcggcaagccggatagcgataaaccatcaatggatatggaccagcatttcaatggtattaaccatacatttgagtatggggatggaatctga

SEQ ID NO: 6385 - protein, 273 aa, Shigella dysenteriae 1012
MSCEELEIVWNNIKAEARTLADCEPMLASFYHATLLKHENLGSALSYMLANKLSSPIMLAIAIREVVEEAYAADPEMIASAACDIQAVRTRDPAVDKYSTPLLYLKGFHALQAYRIGHWLWNQGRRALAIFLQNQVSVTFQVDIHPAAKIGRGIMLDHATGIVVGETAVIENDVSILQSVTLGGTGKTSGDRHPKIREGVMIGAGAKILGNIEVGRGAKIGAGSVVLQPVPPHTTAAGVPARIVGKPDSDKPSMDMDQHFNGINHTFEYGDGI

SEQ ID NO: 6386 - DNA, 822 bp, Enterobacter cancerogenus ATCC 35316
  CDS (1)..(822): transl_table=11
atgccgtgtgaagaactggatatcgtctggaacaatattaaagccgaagcgcgagctttagctgactgcgagcccatgctggccagtttctaccacgcgacgctgctcaagcacgaaaacctcggtagcgccctgagctacatgctcgccaacaagctggcctcctcaatcatgccggctattgccatccgcgaagtggtggaagaggcctatgccgccgacccggagatgatcgcctctgccgcctgcgatattcaggccgtgcgcacgcgcgatccggctgtcgacaaatattctacgccgctgctgtaccttaagggcttccatgcgcttcaggcctaccgcatcggccactggttgtggaacgagggccgccgcgcgctggctatctttctgcaaaaccaggtttccgtgaccttccaggtagatattcacccggcggcgaaaattggccgtgggatcatgctcgatcatgccaccggcatcgtggtgggtgaaacggcggtgatcgaagatgacgtctcgattctgcaatcggtgaccctgggcggtaccggaaaaaccagcggtgatcgccatccgaagatccgtgaaggggtgatgattggcgcgggtgccaagatcctcggcaacatcgaagtggggcgcggcgcgaaaatcggcgcgggttccgtggtgctgcagcccgttccaccgcacaccaccgccgctggcgtaccggcgcgcatcgtcggtaagccagacagcgaaaaaccgtcaatggacatggatcagcacttcaacggcattcaccacaccttcgagtatggtgacggcatctga

SEQ ID NO: 6387 - protein, 273 aa, Enterobacter cancerogenus ATCC 35316
MPCEELDIVWNNIKAEARALADCEPMLASFYHATLLKHENLGSALSYMLANKLASSIMPAIAIREVVEEAYAADPEMIASAACDIQAVRTRDPAVDKYSTPLLYLKGFHALQAYRIGHWLWNEGRRALAIFLQNQVSVTFQVDIHPAAKIGRGIMLDHATGIVVGETAVIEDDVSILQSVTLGGTGKTSGDRHPKIREGVMIGAGAKILGNIEVGRGAKIGAGSVVLQPVPPHTTAAGVPARIVGKPDSEKPSMDMDQHFNGIHHTFEYGDGI

SEQ ID NO: 6388 - DNA, 1269 bp, Oryza sativa subsp. indica
  CDS (1)..(1269)
atgccacccggtggggaacagctcaacgtgggagatgatgaaacacgacactgccgagtggtcacactaggtgttgcaccggatccaaatccgttagtttctgttggctatcaaggttgctgtcgaccagagtctgccgctgcgtgccctcagcctaggtgcagctcgcgccgttggatcacttggtcgaagcgtgtccgtgtgccacgtcatcgtgtacaccacaccacaccagcttcgagctctgattggttggctgacgtgtccgtctccacgcctatttattcgctcttcccgcgcgcgtcccgcccggcgacggcgacctcaccggcgtcgacgtcaccggccgacgacgacgagacttcagcgatgaccaccgcccagccactccagcacgagcatgacccgtccccgccggagccggacgccgccgccgacgccgacgacgaggaggagtcgcgggtgtggtcccagatcaaggccgaggcgcgccgcgacgccgacggcgagccggcgctggcgtcgttcgtgtacgccaccgtgctctcccaccccaccctcgccggctccctcgccttccacctcgccaacaagctcgcctcctcctccacgctgctctcctccacgctcctctacgacctcttcgccgccgcccacgccgcgcgccccgacctccgcgccgccgccgccgccgacctcctagccgcgggcgcccgcgacccggcctgcgcgggccgcctctcccactgcctcctcgactacaagggcttcctcgccgtccaggcccaccgcgtcgcgcacgcgctctgggcgcagggccgccgcgccctggcgctcgcgctccagtcccgcgtcgccgaggtcttcgccgtcgacatccacccggccgccgccgtggggagcggcgtcctcctggaccacgccaccggggtggtcatcggcgagaccgccgtcgtcggcgacggcgtgtccatcctccaccacgtcacgctgggcgggaccggcgaggccgtcggcgaccggcaccccaaggtcggcgacggcgtgctcatcggcgccggcgcgaccatcctcgggaacgtcaggatcggcgccggcgccaagatcggggccgggtcgctggtgctcgccgacgtgccgccgggggccacggcggtggggaacccggcgaggctgctgctcggcggggaccagcgcggcggcgcgccggccggtgaatccatggaccatgcctccttcatgctggagtggtcggattacaccatttga

SEQ ID NO: 6389 - protein, 422 aa, Oryza sativa subsp. indica
MPPGGEQLNVGDDETRHCRVVTLGVAPDPNPLVSVGYQGCCRPESAAACPQPRCSSRRWITWSKRVRVPRHRVHHTTPASSSDWLADVSVSTPIYSLFPRASRPATATSPASTSPADDDETSAMTTAQPLQHEHDPSPPEPDAAADADDEEESRVWSQIKAEARRDADGEPALASFVYATVLSHPTLAGSLAFHLANKLASSSTLLSSTLLYDLFAAAHAARPDLRAAAAADLLAAGARDPACAGRLSHCLLDYKGFLAVQAHRVAHALWAQGRRALALALQSRVAEVFAVDIHPAAAVGSGVLLDHATGVVIGETAVVGDGVSILHHVTLGGTGEAVGDRHPKVGDGVLIGAGATILGNVRIGAGAKIGAGSLVLADVPPGATAVGNPARLLLGGDQRGGAPAGESMDHASFMLEWSDYTI

SEQ ID NO: 6390 - DNA, 954 bp, Oryza sativa subsp. indica
  CDS (1)..(954)
atggcagcctgcgtcgacaagtggccgccggcggcgtacctgtgccgcctgccggagaagttctactgcgtcttgccggactgcaccgctacggaccgtccggtggtcaccgcatcggcggcgccggcgccggcgccggccgctagcgggagcagcggcgactacgtgtgggacgtgctgcgcgccgaggcgcaggacgacgcggacgacgagccgctcctccgcaagttctaccacgacctcgtcctgtcgcggccgtcgctggagtccgcgctcgcctcgctgctggcgaccaagctctgcatccccggcgcgctgccgcaggaccagctccgggacctcctcgccggcgcgctcgccgcgcacccggaggccgggcgcgccgcgcgcgccgacctcgtcgcggcgcgcgaccgcgacccggcctgcgccaagatggtccactgcttcctctactacaagggcttcctggcactgcaggcccaccgcgcggcgcacgcgctctggtccgacaaccgcagggcgccggctctcctcctccagagccgcgcctccgaggtgttcggcgtcgacatccaccccggtgcgcgcattggctgcggcatcctgctcgaccacgccacgggcgtcgtcatcggcgagacggccgtcgtcggctacgacgtgtccatcctgcacggggtgacgctgggcggcacggggaaggagtccggcgaccggcaccccaaggtcggggacggtgtgctgatcggcgccggggcgagcgtgctcggcaatgtgcacattggcgacggagcgaagatcggagccggcgcagtcgtgctacgggacgtggcggacggaaccacggccgtcgggaacccagcgaagccgatcatcggcaagaaggcggcgccgctacggcggccggaagagcttcccggggtaaccatggagcagagatggtcggattga

SEQ ID NO: 6391 - protein, 317 aa, Oryza sativa subsp. indica
MAACVDKWPPAAYLCRLPEKFYCVLPDCTATDRPVVTASAAPAPAPAASGSSGDYVWDVLRAEAQDDADDEPLLRKFYHDLVLSRPSLESALASLLATKLCIPGALPQDQLRDLLAGALAAHPEAGRAARADLVAARDRDPACAKMVHCFLYYKGFLALQAHRAAHALWSDNRRAPALLLQSRASEVFGVDIHPGARIGCGILLDHATGVVIGETAVVGYDVSILHGVTLGGTGKESGDRHPKVGDGVLIGAGASVLGNVHIGDGAKIGAGAVVLRDVADGTTAVGNPAKPIIGKKAAPLRRPEELPGVTMEQRWSD

SEQ ID NO: 6392 - DNA, 945 bp, Oryza sativa subsp. indica
  CDS (1)..(945)
atgccggccggccagccgcacgcgcacgagcccgacggcggcggcgcgagccaccgccggccccagtcgccgccgtcgctccccgcggaggtggtcccggcgttcgcgccgccggagtcggaggacgaggagtcctgggtctggtcccagatcaaggccgaggcgcgccgcgacgccgacgccgagccggcgctcgcgtccttcctctacgccagcgtggctcttcccacccctccctcccgcgctccatctccttccacctcgccaacaagctctgctcctccaccctcctctccacgctcctctacgacctcttcctggcttccttcaccgcgcacccctccctccgcgcgcgtcgtcgccgacctcctcgccgcccgctcccgcgacccggcctgcgtcggcttctcccagtgcctcctcaacttcaagggcttcctcgccatccaggcgcaccgcgtgtcgcacgtcctctgggcgcagcagcgacgcccccttgccctcgccctccagtcccgcgtcgccgacgtcttcgccgtcgacatccaccccgcggccgtcgtcggcaagggcatcctcctcgaccacgccaccggcgtcgtcatcggcgagaccgccgtcgtcggcgacaacgtctccatcctccaccacgtcacactgggtggcacaggcaaggctgtcggtgaccggcaccccaagattggggatggtgttctgattggcgccggggcgacgattcttggcaacgtcaagattggagccggggccaagattggtgccgggtcagtggtgctgatagatgtgccggcgaggaacacggcggtggggaatccagccaggttgattggcaggaagaacggtgaggttgagaaggatgaggacatgcccggggaatccatggatcacacatccttcattcgacagtggtcggactacaccatttga

SEQ ID NO: 6393 - protein, 314 aa, Oryza sativa subsp. indica
MPAGQPHAHEPDGGGASHRRPQSPPSLPAEVVPAFAPPESEDEESWVWSQIKAEARRDADAEPALASFLYASVALPTPPSRAPSPSTSPTSSAPPPSSPRSSTTSSWLPSPRTPPSARVVADLLAARSRDPACVGFSQCLLNFKGFLAIQAHRVSHVLWAQQRRPLALALQSRVADVFAVDIHPAAVVGKGILLDHATGVVIGETAVVGDNVSILHHVTLGGTGKAVGDRHPKIGDGVLIGAGATILGNVKIGAGAKIGAGSVVLIDVPARNTAVGNPARLIGRKNGEVEKDEDMPGESMDHTSFIRQWSDYTI

SEQ ID NO: 6394 - DNA, 735 bp, Vitis vinifera
  CDS (1)..(735)
atgagcttaattctgtctcataaatcattggaaagtgccctagccaatcatctttcgatcaaattgagcaattcgagtcttcccagcagtacactctatgatctctttatgggtgtgttggttgaagatggggaaatcatgggagctgttaaagatgatttgagggcagtcaaggagagagacccagcttgcataagctacgtgcagtgtctggtgaatttcaaaggctttttggcatgccaagctcatagagtggcacataggctgtggtcgcaagggagaaaaattctggcattggtaattcagaatagagtgtctgaagcttttgccgtggatatccatcctggggctaagattggaagaggaatattgcttgatcacgcgactggagtcgtcataggggagacagcggtgattggagatgatgtgtcgattttgcataatgtgaccttaggagggactgggaaggtgtctggtgataggcatccgaagcttggcgatggggtgctgattggtgctgggacttgtattttgggaaatgttagaattggggatggggccaaggttggtgctggttcagtggtgttaaaggaagtgcctccgaaaactactgcagttgggaaccccgcaaggttggttggagggaaggagaatccaattaagcttgataagattcccagtttcaccatggaccagacttctcatatctctgagtggtctgattatgttatttaa

SEQ ID NO: 6395 - protein, 244 aa, Vitis vinifera
MSLILSHKSLESALANHLSIKLSNSSLPSSTLYDLFMGVLVEDGEIMGAVKDDLRAVKERDPACISYVQCLVNFKGFLACQAHRVAHRLWSQGRKILALVIQNRVSEAFAVDIHPGAKIGRGILLDHATGVVIGETAVIGDDVSILHNVTLGGTGKVSGDRHPKLGDGVLIGAGTCILGNVRIGDGAKVGAGSVVLKEVPPKTTAVGNPARLVGGKENPIKLDKIPSFTMDQTSHISEWSDYVI

SEQ ID NO: 6396 - DNA, 873 bp, Vitis vinifera
  CDS (1)..(873)
  misc_feature (16)..(16): m is a or c
  misc_feature (55)..(55): s is g or c
atgcctgctggagaamttcggcacccttcgatactgccggccactgagtctggasaagacgaggcctggctttggactcagatcaaagccgaagcgcgtcgagacgctgagtcggaacccgcactcgcgagttacctctactcaacgattctctctcactcgtccctcgaacgctctctctcatttcacctcggcaacaagctctgctcctcgactctgctctctactctcctctacgatctattcctggacaccttctccaaagatgcggagctgcgatccgccaccgtcgccgatctacgcgccaatcatatgcgtgacccggcctgcgtgtcgttctcgcattgtctcctgaattacaagggttttctggcttgccaggctcacagagtggctcacaggctctggactcagatgaggcggccgctcgcgctcgcgcttcagtcgcggattgctgacgtgttcgcggtggatatccacccggcggcgaggattgggaaggggattctgtttgatcacgccaccggagtggtggtcggagagacggcggtgatcggtaacaatgtatcgattctgcatcacgtgacgctcggcggcacgggcaaggccggcggtgaccgccatccaaaaatcggagatggagttctgattggagcgggagcaacgattctggggaacataaagatcggggagggagcgaagataggagcggggtcggtggtgctgatcgatgtgccggcgaggacaacggcggttgggaatccggcgaggctagtgggagggaaagagaagcctgcgaggcatgaggacgtgcctggtgaatcgatggatcatacatcgttcatttctgagtggtcagattatatcatctga

SEQ ID NO: 6397 - protein, 290 aa, Vitis vinifera
  misc_feature (6)..(6): The Xaa at location 6 stands for Ile, or Leu.
MPAGEXRHPSILPATESGZDEAWLWTQIKAEARRDAESEPALASYLYSTILSHSSLERSLSFHLGNKLCSSTLLSTLLYDLFLDTFSKDAELRSATVADLRANHMRDPACVSFSHCLLNYKGFLACQAHRVAHRLWTQMRRPLALALQSRIADVFAVDIHPAARIGKGILFDHATGVVVGETAVIGNNVSILHHVTLGGTGKAGGDRHPKIGDGVLIGAGATILGNIKIGEGAKIGAGSVVLIDVPARTTAVGNPARLVGGKEKPARHEDVPGESMDHTSFISEWSDYII

SEQ ID NO: 6398 - DNA, 873 bp, Vitis vinifera
  CDS (1)..(873)
atgcctgctggagaacttcggcacccttcgatactgccggccactgagtctggagaagacgaggcctggctttggactcagatcaaagccgaagcgcgtcgagacgctgagtcggaacccgcactcgcgagttacctctactcaacgattctctctcactcgtcgctcgaacgctctctctcatttcacctcggcaacaagctctgctcctcgactctgctctctactctcctctacgatctattcctggacaccttctccaaagatgcggagctgcgatccgccaccgtcgccgatctacgcgccaatcatatgcgtgacccggcctgcgtgtcgttctcgcattgtctcctgaattacaagggttttctggcttgccaggctcacagagtggctcacaggctctggactcagatgaggcggccgctcgcgctcgcgcttcagtcgcggattgctgacgtgttcgcggtggatatccacccggcggcgaggattgggaaggggattctgtttgatcacgccaccggagtggtggtcggagagacggcggtgatcggtaacaatgtatcgattctgcatcacgtgacgctcggcggcacgggcaaggccggcggtgaccgccatccaaaaatcggagatggagttctgattggagcgggagcaacgattctggggaacataaagatcggggagggagcgaagataggagcggggtcggtggtgctgatcgatgtgccggcgaggacaacggcggttgggaatccggcgaggctagtgggagggaaagagaagcctgcgaggcatgaggacgtgcctggtgaatcgatggatcatacatcgttcatttctgagtggtcagattatatcatctga

SEQ ID NO: 6399 - protein, 290 aa, Vitis vinifera
MPAGELRHPSILPATESGEDEAWLWTQIKAEARRDAESEPALASYLYSTILSHSSLERSLSFHLGNKLCSSTLLSTLLYDLFLDTFSKDAELRSATVADLRANHMRDPACVSFSHCLLNYKGFLACQAHRVAHRLWTQMRRPLALALQSRIADVFAVDIHPAARIGKGILFDHATGVVVGETAVIGNNVSILHHVTLGGTGKAGGDRHPKIGDGVLIGAGATILGNIKIGEGAKIGAGSVVLIDVPARTTAVGNPARLVGGKEKPARHEDVPGESMDHTSFISEWSDYII

SEQ ID NO: 6400 - DNA, 915 bp, Vitis vinifera
  CDS (1)..(915)
atggctgcttgtattgacacttccagagcagagactgcccaaacgaaccaactttcttgcgagccaaacgggtcccaactcgatgatcatatgtacaagttcgcaaatttctgccgacccagtttctctgatcttaatggccgcaaaagaattcacacaagtacactgatttacgaagctaggtctgatgttgagcaagaacccatcttgtcaagctactattacagcttaattctgtctcataaatcattggaaagtgccctagccaatcatctttcgatcaaattgagcaattcgagtcttcccagcagtacactctatgatctctttatgggtgtgttggttgaagatggggaaatcatgggagctgttaaagatgatttgagggcagtcaaggagagagacccagcttgcataagctacgtgcagtgtctggtgaatttcaaaggctttttggcatgccaagctcatagagtggcacataggctgtggtcgcaagggagaaaaattctggcattggtaattcagaatagaattggaagaggaatattgcttgatcacgcgactggagtcgtcataggggagacagcggtgattggagatgatgtgtcgattttgcataatgtgaccttaggagggactgggaaggtgtctggtgataggcatccgaagcttggcgatggggtgctgattggtgctgggacttgtattttgggaaatgttagaattggggatggggccaaggttggtgctggttcagtggtgttaaaggaagtgcctccgaaaactactgcagttgggaaccccgcaaggttggttggagggaaggagaatccaattaagcttgataagattcccagtttcaccatggaccagacttctcatatctctgagtggtctgattatgttatttaa

SEQ ID NO: 6401 - protein, 304 aa, Vitis vinifera
MAACIDTSRAETAQTNQLSCEPNGSQLDDHMYKFANFCRPSFSDLNGRKRIHTSTLIYEARSDVEQEPILSSYYYSLILSHKSLESALANHLSIKLSNSSLPSSTLYDLFMGVLVEDGEIMGAVKDDLRAVKERDPACISYVQCLVNFKGFLACQAHRVAHRLWSQGRKILALVIQNRIGRGILLDHATGVVIGETAVIGDDVSILHNVTLGGTGKVSGDRHPKLGDGVLIGAGTCILGNVRIGDGAKVGAGSVVLKEVPPKTTAVGNPARLVGGKENPIKLDKIPSFTMDQTSHISEWSDYVI

SEQ ID NO: 6402 - DNA, 825 bp, Vitis vinifera
  CDS (1)..(825)
atggcagcttgtatccacaactcaaggactagcactgaagctgcagcttctccattttctcaagactctgcagatcatcaatgccagataagaaattctccatggtttgccaaaaaatgcaaacccagtttccaaaatcttttttcatgcgaccccattaagcgggttcgcctgcaagccgataaagaagatgatgttctgtggctgaagatcagagagcaagctctatgtgatatggagcaagagcccatcttgtccaagtactattgttcttcaatactacagcatgattcactagaaagcgccttgtcgaatcagctagcggctaaactcagcaatacagatcttcccagaagcaccctcatggaggttttcgcaggagtgttggcagaggatgaggaggtcaggagagccattagagctgacctcaaagctctgtggtcacaaggcaggattgtgatggctctgctgatccaaagccgggtatccgaggtcttcgcggtggatatccatcctggggccaagctgggacatggggtagtactggatcatgccaccggaattgtcatcggagagacggcggtgataggagacaatgtcacaatcttgcataatgtgacactgggtggcacagggaaggtgaatggggacaggcaccctaaggttggtgatggggttttgataggtgcagggactaaagtcttgggcagcattagggttggtgatagggctaagattggagcagggtcagtggttttaaaagaagtgcctacagagactactagtgttgggaacccagctagattggttggccttaaatcctaa

SEQ ID NO: 6403 - protein, 274 aa, Vitis vinifera
MAACIHNSRTSTEAAASPFSQDSADHQCQIRNSPWFAKKCKPSFQNLFSCDPIKRVRLQADKEDDVLWLKIREQALCDMEQEPILSKYYCSSILQHDSLESALSNQLAAKLSNTDLPRSTLMEVFAGVLAEDEEVRRAIRADLKALWSQGRIVMALLIQSRVSEVFAVDIHPGAKLGHGVVLDHATGIVIGETAVIGDNVTILHNVTLGGTGKVNGDRHPKVGDGVLIGAGTKVLGSIRVGDRAKIGAGSVVLKEVPTETTSVGNPARLVGLKS

SEQ ID NO: 6404 - DNA, 945 bp, Zea mays
  CDS (1)..(945)
atggctgcctgtgtcgacaagtggcaccccacgcacgccggccgcctcaccggcgccatctaccgctacttgccggacggcgccacggaccgcgcggtggccgccgccgccgccgcgccggcgtccgcgagcggcggcgacgacgacgacgtctgggacgagctgcgcgcggaggcgcaggccgacgcggacgccgagcctctgctccgcaagtactacgccgacctcgtcctgtcgcgcccgtcgctggaggccgccctcgccgcgcacctgtcggccaagctctgcgtccccggcgcgctgccgcaggacgcgctccgggacctcctggccgccgcactggccgcgcgcccggagtccggccgcgccgcgcgcgccgacctccgcgcggcgcgcgaccgcgacgcggcctgcggccggatggtgcactgcttcctctactacaagggcttcctcgccctgcaggcgcaccgcgccgcgcacgggctgtggtgcgagggccgctccgcgccggccttcctcctccagagccgcgcgtccgaggtgttcggcgtcgacatccaccccggcgcgcgcattggctcggggatcctgttcgaccacgccacgggcatcgtcatcggcgagacggccgtcgttgggaacgacgtctccatcctgcacggcgtcaccctcggcggcacgggaaaggagtccggcgaccggcacccgaaggtcggggacggggtgctgatcggcgccggcgccagcgtgctcggcaatgtgcgcgttggagccggggcgaagattggagcaggggcggtcgtgctacgggacgtgccggaggggaccacggccgtcgggaaccccgccaaggcggtcgggaagaaggcggcgccgcagcggcggccggaagagcagcctggggtcaccatggagcaagggtggtcggactacgtgatttga

SEQ ID NO: 6405 - protein, 314 aa, Zea mays
MAACVDKWHPTHAGRLTGAIYRYLPDGATDRAVAAAAAAPASASGGDDDDVWDELRAEAQADADAEPLLRKYYADLVLSRPSLEAALAAHLSAKLCVPGALPQDALRDLLAAALAARPESGRAARADLRAARDRDAACGRMVHCFLYYKGFLALQAHRAAHGLWCEGRSAPAFLLQSRASEVFGVDIHPGARIGSGILFDHATGIVIGETAVVGNDVSILHGVTLGGTGKESGDRHPKVGDGVLIGAGASVLGNVRVGAGAKIGAGAVVLRDVPEGTTAVGNPAKAVGKKAAPQRRPEEQPGVTMEQGWSDYVI

SEQ ID NO: 6406 - DNA, 933 bp, Zea mays
  CDS (1)..(933)
atgacggccgggcagcttctgcgcaccgagccatcagcccagccccagcgggtgcgccacagcaccccgccggcggcactccaagcagacatcgtgccgtcgtacccgccgcccgagtcggacggtgacgagtcgtgggtctggtcccagatcaaggcggaggcgcggcgcgacgcggacgcggagccggcgctggcctccttcctctacgcgacggtgctgtcgcacgcgtccctggaccggtccctggccttccacctggccaacaagctgtgctcctccacgctgctgtcgacgctcctctacgacctcttcgtggcgtcgctcgcggagcacccgtccgtccgcgcggcggcggtggccgacctgatcgccgcgcggtcgcgggacccggcctgcgcgggcttcgcgcactgcctcctcaactacaaggggttcctggccgtgcaggcgcaccgcgtggcgcacgtgctgtgggcgcagggccggcgcgcgctggcgctggcgctccagtcccgcgtcgccgaggtcttcgccgtggacatccacccggccgccaccgtcggcaggggcatcctgctcgaccacgccacgggcgtcgtcgtcggggagacggccgtcgtgggcgacaacgtctccatactccaccacgtgacgctgggcggcaccggcaaggcggtgggcgaccggcaccccaagatcggggacggcgtgctcatcggcgccggcgcgaccgtcctcggaaacgtcaggatcggcgccggcgccaaggtcggcgccgggtccgtcgtgctcatcgacgtgccgcccaggagcaccgccgtggggaaccccgccaggctgatcggcgggaagaagggcgaggaggtgatgccgggggagtccatggaccacacctccttcatacagcagtggtcggactacatcatttga

SEQ ID NO: 6407 - protein, 310 aa, Zea mays
MTAGQLLRTEPSAQPQRVRHSTPPAALQADIVPSYPPPESDGDESWVWSQIKAEARRDADAEPALASFLYATVLSHASLDRSLAFHLANKLCSSTLLSTLLYDLFVASLAEHPSVRAAAVADLIAARSRDPACAGFAHCLLNYKGFLAVQAHRVAHVLWAQGRRALALALQSRVAEVFAVDIHPAATVGRGILLDHATGVVVGETAVVGDNVSILHHVTLGGTGKAVGDRHPKIGDGVLIGAGATVLGNVRIGAGAKVGAGSVVLIDVPPRSTAVGNPARLIGGKKGEEVMPGESMDHTSFIQQWSDYII

SEQ ID NO: 6408 - DNA, 885 bp, Zea mays
  CDS (1)..(885)
atgccggccggccagccgcacgcgcacgaagccgctgccgccgcctgcgtcggcagcggcgcgaaccactccaaccaccgagtgccggcgcactcgccaccgccgctccccgcggaggtggtgccggcgtacccgcccccggagtcggaggacgacgagacctgggtgtggacgcagatcaaggcggaggcccgccgcgacgcggacgcggagccggcgctcgcctccttcctctacgccaccgtgttgttccacctcgccacgctcaccgcgcacccctctctccgcgccgccgtcgtcgccgacctcctcgcggcccactcccgcgaccccgcctgcgtcggcttctcccactgcctcctcaactacaagggcttcctcgccatccaggcccaccgcgtcgcgcacgtgctctgggcgcagcagcgacggcccctcgcgctcgcgctccagtcccgcgtcgccgacgtcttcgccgttgacatccaccccgccgccgtcgtcgggaagggaatcctcctcgaccacgccaccggcgtcgtcatcggtgagacggccgtcgtcggcgacaacgtctccatcctccaccacgtcaccttgggcgggaccgggaaggcggtgggtgaccggcaccccaagattggggatggcgtgctgattggagcaggggccaccattcttggtaacgtgaaaattggtgccggggctaagattggagccggatccgtggtgctgatagatgtgccggcgaggagcacggcggttgggaaccctgccaggctgattggtgggaagaaggccgagggtgcgaatgaggaggacatgccaggggagtccatggatcacacgtccttcatacgtcaatggtcggactacaccatttga

SEQ ID NO: 6409 - protein, 294 aa, Zea mays
MPAGQPHAHEAAAAACVGSGANHSNHRVPAHSPPPLPAEVVPAYPPPESEDDETWVWTQIKAEARRDADAEPALASFLYATVLFHLATLTAHPSLRAAVVADLLAAHSRDPACVGFSHCLLNYKGFLAIQAHRVAHVLWAQQRRPLALALQSRVADVFAVDIHPAAVVGKGILLDHATGVVIGETAVVGDNVSILHHVTLGGTGKAVGDRHPKIGDGVLIGAGATILGNVKIGAGAKIGAGSVVLIDVPARSTAVGNPARLIGGKKAEGANEEDMPGESMDHTSFIRQWSDYTI

SEQ ID NO: 6410 - DNA, 972 bp, Zea mays
  CDS (1)..(972)
atgccggccggccagccgcacgcgcacgaagccgctgccgccgcctgcgtcggcagcggcgcgaaccactccaaccaccgagtgccggcgcactcgccaccgccgctccccgcggaggtggtgccggcgtacccgcccccggagtcggaggacgacgagacctgggtgtggacgcagatcaaggcggaggcccgccgcgacgcggacgcggagccggcgctcgcctccttcctctacgccaccgtgttgtcccacccgtccctgccccgctccctctccttccacctcgccaacaagctctgctcctccacgctcctctccacgctcctctacgacctcttcctcgccacgctcaccgcgcacccctctctccgcgccgccgtcgtcgccgacctcctcgcggcccactcccgcgaccccgcctgcgtcggcttctcccactgcctcctcaactacaagggcttcctcgccatccaggcccaccgcgtcgcgcacgtgctctgggcgcagcagcgacggcccctcgcgctcgcgctccagtcccgcgtcgccgacgtcttcgccgttgacatccaccccgccgccgtcgtcgggaagggaatcctcctcgaccacgccaccggcgtcgtcatcggtgagacggccgtcgtcggcgacaacgtctccatcctccaccacgtcaccttgggcgggaccgggaaggcggtgggtgaccggcaccccaagattggggatggcgtgctgattggagcaggggccaccattcttggtaacgtgaaaattggtgccggggctaagattggagccggatccgtggtgctgatagatgtgccggcgaggagcacggcggttgggaaccctgccaggctgattggtgggaagaaggccgagggtgcgaatgaggaggacatgccaggggagtccatggatcacacgtccttcatacgtcaatggtcggactacaccatttga

SEQ ID NO: 6411 - protein, 323 aa, Zea mays
MPAGQPHAHEAAAAACVGSGANHSNHRVPAHSPPPLPAEVVPAYPPPESEDDETWVWTQIKAEARRDADAEPALASFLYATVLSHPSLPRSLSFHLANKLCSSTLLSTLLYDLFLATLTAHPSLRAAVVADLLAAHSRDPACVGFSHCLLNYKGFLAIQAHRVAHVLWAQQRRPLALALQSRVADVFAVDIHPAAVVGKGILLDHATGVVIGETAVVGDNVSILHHVTLGGTGKAVGDRHPKIGDGVLIGAGATILGNVKIGAGAKIGAGSVVLIDVPARSTAVGNPARLIGGKKAEGANEEDMPGESMDHTSFIRQWSDYTI

SEQ ID NO: 6412 - DNA, 933 bp, Zea mays
  CDS (1)..(933)
atgacggccgggcagcttctgcgcaccgagccatcggcccagccccagcgggtgcgccacagcaccccgccggcggcactccaagcgggcatcgtgccgtcgtacccgccgcccgagtcggacggtgacgagtcgtgggtctggtcccagatcaaggcggaggcgcggcgcgacgcggacgcggagccggcgctggcctccttcctctacgcgacggtgctgtcgcacgcgtccctggaccggtccctggccttccacctggccaacaagctgtgctcctccacgctgctgtcgacgctcctctacgacctcttcgtggcgtcgctcgcggagcacccgtccgtccgcgccgcggcggtggccgacctgatcgccgcgcggtcgcgggacccggcctgcgcgggcttcgcgcactgcctcctcaactacaaggggttcctggccgtgcaggcgcaccgcgtggcgcacgtgctgtgggcgcagggccggcgcgcgctggcgctggcgctccagtcccgcgtcgccgaggtcttcgccgtggacatccacccggccgccaccgtcggcaggggcatcctgctggaccacgccacgggcgtcgtcgtcggggagacggccgtcgtgggcgacaacgtctccatactccaccacgtgacgctgggcggcaccggcaaggcggtgggcgaccggcaccccaagatcggggacggcgtgctcatcggcgccggcgcgaccgtcctgggcaacgtcaggatcggcgccggcgccaaggtcggcgccgggtccgtcgtgctcatcgacgtgccgcccaggagcaccgccgtggggaaccccgccaggctgatcggcgggaagaagggcgaggaggtgatgccgggggagtccatggaccacacctccttcatacagcagtggtcggactacatcatttga

SEQ ID NO: 6413 - protein, 310 aa, Zea mays
MTAGQLLRTEPSAQPQRVRHSTPPAALQAGIVPSYPPPESDGDESWVWSQIKAEARRDADAEPALASFLYATVLSHASLDRSLAFHLANKLCSSTLLSTLLYDLFVASLAEHPSVRAAAVADLIAARSRDPACAGFAHCLLNYKGFLAVQAHRVAHVLWAQGRRALALALQSRVAEVFAVDIHPAATVGRGILLDHATGVVVGETAVVGDNVSILHHVTLGGTGKAVGDRHPKIGDGVLIGAGATVLGNVRIGAGAKVGAGSVVLIDVPPRSTAVGNPARLIGGKKGEEVMPGESMDHTSFIQQWSDYII

SEQ ID NO: 6414 - DNA, 822 bp, Providencia rustigianii DSM 4541
  CDS (1)..(822): transl_table=11
atgtcgcgtgaagaactggatagaatttggggatatataaaggaagaagccaaagcgcttgctgactgcgaaccgttacttgccagtttttttaatgcgacactgctgaaacatgaaaacctcggcagcgctctcagctatatgttagccaataaactcagttcaccgattatgcctgccatggaagtgcgtgaaattgttgaggaagcttatcgcaatgatgagcagatgattttctccgctgcgatggatctttccgctgttcgcctgcgtgaccccgccgttgataaatattccactccactgctgtatttaaaaggttttcatgccttgcaagcttatcggatcggtcattggctatggggcgaagggcgtaaggcgttagctgtatacctgcaaaatcaaatttcggtttcttttggtgttgatattcatcccgcagcccaaattggttgtggcattatgctcgaccatgcaacgggtattgtgattggtgaaacggcgattgttgagaatgatgtttcgattttacagtcggttactctcggcggtaccggtaaaacttgcggcgatcgtcatcctaaagtacgtgaaggggtcatgattggtgcaggtgcaaagattttaggcaatatcgaaatcggccgtggtgcaaaaattggtgctggctctgtggtgttacatccagttccacctcatacaactgttgctggagtcccagctcgcattgtaggtaaaccaaccagcgataagccatctctggaaatggatcaaaactttaatgggaacattgatggttttgaagatggggatgggatttag

SEQ ID NO: 6415 - protein, 273 aa, Providencia rustigianii DSM 4541
MSREELDRIWGYIKEEAKALADCEPLLASFFNATLLKHENLGSALSYMLANKLSSPIMPAMEVREIVEEAYRNDEQMIFSAAMDLSAVRLRDPAVDKYSTPLLYLKGFHALQAYRIGHWLWGEGRKALAVYLQNQISVSFGVDIHPAAQIGCGIMLDHATGIVIGETAIVENDVSILQSVTLGGTGKTCGDRHPKVREGVMIGAGAKILGNIEIGRGAKIGAGSVVLHPVPPHTTVAGVPARIVGKPTSDKPSLEMDQNFNGNIDGFEDGDGI

SEQ ID NO: 6416 - DNA, 822 bp, Providencia alcalifaciens DSM 30120
  CDS (1)..(822): transl_table=11
atgtcgcgtgaagaattggatagaatttggggttacattaaggaagaagccaaggcgcttgctgactgtgagcccttactcgccagtttttttaacgcgacattactaaagcatgataatttaggtagcgcgcttagctatatgttggcaaataagcttagttcccccattatgcctgcaatcgaagttcgtgagatcgtagaagaagcttaccgcaatgatgagcaaatgattttttctgcggcgatggatctttctgcggtacgtttacgtgaccccgcggttgataagtactcgactcctctgttgtatttaaaaggctttcacgccttacaagcctaccgtattgggcattggttatggggagaaggtcgtaaggcacttgcggtctacttacaaaaccaaatttcagtttcttttggtgttgatattcatcctgctgcacaaattggttgcggaattatgctcgaccatgcgacaggaattgtgattggtgagacggcgattgtcgaaaatgatgtgtctattcttcagtctgttacactaggcggtaccggtaaaacctgtggcgaccgtcatcctaaagtacgtgaaggggtgatgattggcgctggcgctaaaattctgggcaatattgaaattggtcgtggcgcgaaaattggcgctggctctgtggtattacatcccgttcctcctcatacgacagtggcgggcgttcctgctcgtattgttggtaagccaacaagcgataagccatcgctagagatggatcaaaactttaatggtaacgttgatggttttgaaagcggggatgggatctag

SEQ ID NO: 6417 - protein, 273 aa, Providencia alcalifaciens DSM 30120
MSREELDRIWGYIKEEAKALADCEPLLASFFNATLLKHDNLGSALSYMLANKLSSPIMPAIEVREIVEEAYRNDEQMIFSAAMDLSAVRLRDPAVDKYSTPLLYLKGFHALQAYRIGHWLWGEGRKALAVYLQNQISVSFGVDIHPAAQIGCGIMLDHATGIVIGETAIVENDVSILQSVTLGGTGKTCGDRHPKVREGVMIGAGAKILGNIEIGRGAKIGAGSVVLHPVPPHTTVAGVPARIVGKPTSDKPSLEMDQNFNGNVDGFESGDGI

SEQ ID NO: 6418 - DNA, 846 bp, Picea sitchensis
  CDS (1)..(846)
atggggtctgagaacggctgtacgatggaggaaaatgatgagttatgggagcagttgagatatgaagcgaagtgtgacgcggatgcggagctcgccctggcaagctatctgtacgcgacaattctggttcacaggaccatggaacaggcgctggcatttcacctgggcaacaagctgtcgagctccaccctttccaacactctcctctacaatctggtcgtggacgtcttcatggaggaccctgaaatccgcgacgcgattcgaatcgacatgagggcggtgagagaaaaggaccccgcctgcgtctcctattgccactgtatgctcaatttcaagggtttcctggcctgccaggcgcaccgagtggctcacaggctgtggtctcagggtcgaatcccgctggccctagcgatccagagcaggatctccgaggtgttcgccatggacatacatcccgcggccaaaatagggaagggggtcctctttgaccacggcacaggcatcgtcatcggcgagacggcgagcatcggcaacaacgtttcgatccttcaccacgttactcttggaggcacagggaagcaagggggcgaccgtcatcctaagattggcaacggcgttctcatcggcgcgggggctacgattttggggaacatcaaaattggggaaggcgccaagatcggagccggggcggttgttttgatcgatgtgccgccgcgtactactgctgttggtaatcctgctagattagtcggtggcaggcgcaatcccacccaattgaccgagactcccagcgagactatggatcatacctcattcattagtgagtggtctgattatgttatttag

SEQ ID NO: 6419 - protein, 281 aa, Picea sitchensis
MGSENGCTMEENDELWEQLRYEAKCDADAELALASYLYATILVHRTMEQALAFHLGNKLSSSTLSNTLLYNLVVDVFMEDPEIRDAIRIDMRAVREKDPACVSYCHCMLNFKGFLACQAHRVAHRLWSQGRIPLALAIQSRISEVFAMDIHPAAKIGKGVLFDHGTGIVIGETASIGNNVSILHHVTLGGTGKQGGDRHPKIGNGVLIGAGATILGNIKIGEGAKIGAGAVVLIDVPPRTTAVGNPARLVGGRRNPTQLTETPSETMDHTSFISEWSDYVI

SEQ ID NO: 6420 - DNA, 846 bp, Picea sitchensis
  CDS (1)..(846)
atggggtctgagaacggctttgcgatggaggaaaatgatgagatatggcagcagttgagatgtgaagcaaagcgtgacgcggatgcggagctcgccctggcaagctatctgtacgcgacaattctggttcacaggaccatggaacaggcgctggcatttcacctgggcaacaagctgtcgagccccaccctttccaacacgctcctctacaatctggtcgtggacgtcttcatggaggaccctgaaatccgcgacgcgattcgaactgacatgaggacggtgagagaaaaagatcccgcctgcgactcctattgccactgtatgctcaatttcaagggtttcctagcctgccagtcgcagcgagtggcgcacaggctgtggtctcagggtcgaatcccgttggccctagcgatccagagcaggatctccgaggtgttcgccatggacatccatcccgcggccaaaatagggaagggggtcctctttgaccacggtaccggggttgtcatcggtgagacggcaagcatcggcgacaacgtttcgatccttcaccacgttactcttggaggcacagggaagcaaggaggcgaccgtcatcctaagattggcaacggtgttctcatcggcgcaggggctacgattttggggaacgtcaaaattggggaaggcgccaagatcggagccggggcggttgttatgatcgatgttccgccgcgtaccactgctgttggtaatcctgctagattagtcggtggcaagcgcaatcccaccaaattgaccgagaatcccagcgagactatggaccatacctccttcattagtgagtggtctgattatgttatttag

SEQ ID NO: 6421 - protein, 281 aa, Picea sitchensis
MGSENGFAMEENDEIWQQLRCEAKRDADAELALASYLYATILVHRTMEQALAFHLGNKLSSPTLSNTLLYNLVVDVFMEDPEIRDAIRTDMRTVREKDPACDSYCHCMLNFKGFLACQSQRVAHRLWSQGRIPLALAIQSRISEVFAMDIHPAAKIGKGVLFDHGTGVVIGETASIGDNVSILHHVTLGGTGKQGGDRHPKIGNGVLIGAGATILGNVKIGEGAKIGAGAVVMIDVPPRTTAVGNPARLVGGKRNPTKLTENPSETMDHTSFISEWSDYVI

SEQ ID NO: 6422 - DNA, 891 bp, Ricinus communis
  CDS (1)..(891)
atgccggccggcgagctacgctattctcctccgccaactccacaggcaacaaatgactcaatcacaacccacgaagacgagggatgggtgtgggcgcagattaaagcggaggctcggcgagacgcggagtcagagccagcattagctagctacctctattcaacgattctgtctcactcttcccttgagcggtctctctctttccatttagggaacaagctttgctcatctacgcttctatctactcttttatatgatctttttctcaatactttctcttccgattcttctcttcgtgctgctgctgtcgctgatcttagggctgctcgtgttcgcgaccctgcttgcgtttcgttctctcattgccttcttaattataaagggttcttggcttgccaggctcatcgagttgctcacaagttgtggaccgaggcacgcaggccgttggcactggctttacactctcgaatatctgatgtttttgctgttgatatacatccagcagcaaagattgggaagggggtattgtttgatcatgcaactggtgttgtcattggtgaaacagcagtggttgggaataatgtgtcaattttgcaccatgttacacttggaggaacagggaaagcatgcggtgatcgacatcccaaaattggagacggagtgttgattggagcaggcgcgacaattttaggaaatgttaagattggggaaggagcaaaggttggggctggctcagtggtgctgattgatgttccccctcgaactacagcagtgggaaaccctgcaaggttggtgggtggaaaggaaacacctgcaaagcatgaggaatgtcctggagaatccatggaccatacttcttttatctcagagtggtcagattatatcatttga

SEQ ID NO: 6423 - protein, 296 aa, Ricinus communis
MPAGELRYSPPPTPQATNDSITTHEDEGWVWAQIKAEARRDAESEPALASYLYSTILSHSSLERSLSFHLGNKLCSSTLLSTLLYDLFLNTFSSDSSLRAAAVADLRAARVRDPACVSFSHCLLNYKGFLACQAHRVAHKLWTEARRPLALALHSRISDVFAVDIHPAAKIGKGVLFDHATGVVIGETAVVGNNVSILHHVTLGGTGKACGDRHPKIGDGVLIGAGATILGNVKIGEGAKVGAGSVVLIDVPPRTTAVGNPARLVGGKETPAKHEECPGESMDHTSFISEWSDYII

SEQ ID NO: 6424 - DNA, 1191 bp, Ricinus communis
  CDS (1)..(1191)
atgaaagttctggccgcagctccttctctatataaggccttttctcctcctttctcttctctccacaagcctttcttatctccacaagtttcttcttcgattctccctctatccaaccatctctatagcatttcttctatggctgcttgtgtcgacactccaagaacagatacctctaaactttctcgcgatccaaacaggccacagtctcaaactgatcatcaccatgacaattctttcagcaagtatgtgaaaaattattgtcgacccagtttctccgatcatgtttcttgcatacccgtttccaagaatcacattaaaactctgcatacacgtccagttcttgaagaccgagatcaggatcaagaaattgaggctaaagaagatccatggcttaaaatgcaagaagaagcaagattagatgttgaccaagaaccaattttatctagctactatttcacatcaattctttcccaggcatcactggaaagggctttggcaaatcatctagctataaagctaagtaactcgagccttcccactagcactctttttgacatctttattggagtccttgaagagaatcaagatataattgattctgtaaaggcagatttgagagctgttaaagaaagagatccagcttgcataagttatgttcactgtttcttgaattttaaaggtttcctttcttgccaagcgcatagaatagcacataaattgtggacacaaggcaggacggttttggctatattgatacaaaacagagtatccgaagcatttgcagttgatatacatccaggagctaaaattgggcaagggatattacttgatcatgctacaggagtagttgtgggagagactgctgtgattgggaataatgtgtcaattctgcataatgttacactaggtggaacaggaaagactagtggtgacaggcatccaaagattggcgatggggttttgattggggctggaacttgtattttgggtaacattaagattggtgatggggcaaagattggagcatgttcagtggtgctgaaggatgttccagccaggactactgcagttggaaatcctgctagattgattggagggaaagaaaatccaactaagcttgataagattccaagttttacaatggatcatacttcacatatacacgagtggtctgattatgttatttaa

SEQ ID NO: 6425 - protein, 396 aa, Ricinus communis
MKVLAAAPSLYKAFSPPFSSLHKPFLSPQVSSSILPLSNHLYSISSMAACVDTPRTDTSKLSRDPNRPQSQTDHHHDNSFSKYVKNYCRPSFSDHVSCIPVSKNHIKTLHTRPVLEDRDQDQEIEAKEDPWLKMQEEARLDVDQEPILSSYYFTSILSQASLERALANHLAIKLSNSSLPTSTLFDIFIGVLEENQDIIDSVKADLRAVKERDPACISYVHCFLNFKGFLSCQAHRIAHKLWTQGRTVLAILIQNRVSEAFAVDIHPGAKIGQGILLDHATGVVVGETAVIGNNVSILHNVTLGGTGKTSGDRHPKIGDGVLIGAGTCILGNIKIGDGAKIGACSVVLKDVPARTTAVGNPARLIGGKENPTKLDKIPSFTMDHTSHIHEWSDYVI

SEQ ID NO: 6426 - DNA, 783 bp, Lutiella nitroferrum 2002
  CDS (1)..(783): transl_table=11
atgagcgaaaactacgacgacccgatctggcttgccgtcttcaaggaggccgaagccgccgcgcaggccgagcctctgctggcgagcttcctgcacatgacggtgctgcgccacgacacgctggaagacgtgctggccttccacctgtcgagcaagctctcgagcccggtgatggacgcgcgcgccttgatggagctgttccgcgaggcgctcgcggccgaccccgtcatcggccagaagatgcgcgccgacatcgtggcctgctacgaccgcgacccggcctgcgagggctactccatcccgttgctgtacttcaagggctttcacgccatccagagccagcgcgtgacgcactggctgtggcagcaggggcggcagacgctggcgctgttcctgcagaaccgcatctccgaggtgaccggcgccgacatccacccggcggcgcgcatcggccagggcgtgatgctggaccacggcaccggcgtggtggtgggcgaaaccgcggtgatcggcgacaacgtctcgatcctgcacggcgtgacgctgggcggctccggcaaggagcgcggcgaccgccatcccaagatcggcgacggcgtgctgatcggcaccggcgcggcgatcctcggcaacatccacgtcggcgagtgcgccaaggtcggcgccggcagcgtggtgctggacgacgtgccaccgcacagcaccgtggccggggtgccggccaaggtggtgggctcgcccggaccgggcacgccggggctggacatggaccagcgggtgtaa

SEQ ID NO: 6427 - protein, 260 aa, Lutiella nitroferrum 2002
MSENYDDPIWLAVFKEAEAAAQAEPLLASFLHMTVLRHDTLEDVLAFHLSSKLSSPVMDARALMELFREALAADPVIGQKMRADIVACYDRDPACEGYSIPLLYFKGFHAIQSQRVTHWLWQQGRQTLALFLQNRISEVTGADIHPAARIGQGVMLDHGTGVVVGETAVIGDNVSILHGVTLGGSGKERGDRHPKIGDGVLIGTGAAILGNIHVGECAKVGAGSVVLDDVPPHSTVAGVPAKVVGSPGPGTPGLDMDQRV

SEQ ID NO: 6428 - DNA, 834 bp, Proteus penneri ATCC 35198
  CDS (1)..(834): transl_table=11
atgagagtgagtatgtcgctagaagagctaaaaagagtctgggatcatattaaaaatgaagcaagatgcttggcagattgcgagccaattttggcgagttttttccatgcgacattactcaaacatgaaaacttaggtagtgccttaagttatatgttggcaaataagctagcaactcaaacaatgcccgcgattgctgttcgggagattgttgaagaagcatatcgtagtgataattctatgattgaatcggcagcttatgatatttcggctgtgcgtttacgcgatcctgccgttgataaatactctacaccactgctttatttaaaaggtttccatgccttacaagcttatcgcatcgcgcattggttatggaatcaagatcgcaaagcgttagcggtgtatctgcaaaaccagatttctgtgacctttggtgttgatattcatccagctgcccgtattggccacggtattatgcttgatcacgcaacaggcattgtaattggtgaaaccgctatcgtagagaacgatgtttctattttacaatctgtgacgttaggtggaacaggtaaaacttgtggtgaccgtcatcctaaagtgcgtgaaggggtaatgattggtgcgggtgcaaaaatactcggcaatatcgagattggtcgcggtgccaaaattggtgcgggatcagtcgttttacatgaagttcctgcgcacactaccgttgctggtgttcctgctcgcattgttggtaagccgaccagtgacaagccttcactcgatatggatcaacactttaatggtgtcgtacccggttttgaatgtggtgatggcatttaa

SEQ ID NO: 6429 - protein, 277 aa, Proteus penneri ATCC 35198
MRVSMSLEELKRVWDHIKNEARCLADCEPILASFFHATLLKHENLGSALSYMLANKLATQTMPAIAVREIVEEAYRSDNSMIESAAYDISAVRLRDPAVDKYSTPLLYLKGFHALQAYRIAHWLWNQDRKALAVYLQNQISVTFGVDIHPAARIGHGIMLDHATGIVIGETAIVENDVSILQSVTLGGTGKTCGDRHPKVREGVMIGAGAKILGNIEIGRGAKIGAGSVVLHEVPAHTTVAGVPARIVGKPTSDKPSLDMDQHFNGVVPGFECGDGI

SEQ ID NO: 6430 - DNA, 795 bp, Eikenella corrodens ATCC 23834
  CDS (1)..(795): transl_table=11
atgaccaccctcgactacgccgacagccgcaccctgtggcaaaccatcctggccgaaaccgcccaagccgcccaaagcgagcccatgctcgccagcttcctacaccaaaccgtgctgcgccacagcagcatcgaccgcgtgctcgccttccacctttccagcaagctcgccagccccgtgatggacagccgcgcgctcaacgaaatcttcttccaggcactcgacagcgacacccgcatttccaaagccatgcaggccgacatcgtcgcctactacgaacgcgaccccgcctgcgacgcctactacctgccgctactctactacaaaggcttccacgccgtgcaagcccaccgtatcaaccactggctgtggcagcacggccgcaaaaccctcgcctacttcctgcaaaaccgcgcctccgaagtatttggcatcgacatccaccccgccgcccgtttcggccacggcattatggtcgaccacggcaccggccttgtggtgggtgaaaccgccgttttgggcaatgacatctccatcctgcacggcgttaccctcggcggctccggcaaagaaggcggcgaccgtcaccccaaaatcagcgacggcgtgatgatcggcgccaatgcctccatcctcggtaacatccgcgtgaacgaatgcgccaaagtcggcgccggcagcgtggtggtgcacgacgtacccgcccacagtaccgtagtcggcgtgcccgcccgcgtgatcggtcaaggcaacgtgcgcccctccgccgatatggatcaaagcttggattcatga

SEQ ID NO: 6431 - protein, 264 aa, Eikenella corrodens ATCC 23834
MTTLDYADSRTLWQTILAETAQAAQSEPMLASFLHQTVLRHSSIDRVLAFHLSSKLASPVMDSRALNEIFFQALDSDTRISKAMQADIVAYYERDPACDAYYLPLLYYKGFHAVQAHRINHWLWQHGRKTLAYFLQNRASEVFGIDIHPAARFGHGIMVDHGTGLVVGETAVLGNDISILHGVTLGGSGKEGGDRHPKISDGVMIGANASILGNIRVNECAKVGAGSVVVHDVPAHSTVVGVPARVIGQGNVRPSADMDQSLDS

SEQ ID NO: 6432 - DNA, 819 bp, Neisseria flavescens NRL30031/H210
  CDS (1)..(819): transl_table=11
atgaaaaaagaccatttgaattcaagcgattttaatctgtggcacaccatccgcgaagaaaccgaagcagcagtcgcggccgaacctatgctggcgagcttcctgcatcaaactgtgttacaccacgattcgctcgattcggtacttgcctaccatctttccagcaagcttggcagtccgcttatggacgtgcgcgcgctgtttgaaatttatcagcaggctttgagcgtggacacccgtatcagcaaatgcgtcgaggccgacttgaaagccatttacgagcgcgacccggcttgtgatgaatattcgctgccgctgttgtatttcaaaggcttccacgccgtacaggcacaccgcatcaaccactggctctatcaaaacggccgtaaaacgctggcgtatttcctgcaaaaccgcatgtcggaagtcttcggtgtcgatatccacccggccgcccgtttcggtcacggcctgatgctcgaccatgccaccggttttgtggccggcgaaacggccgtcttgggcaacaatatttccatcctccacggcgtaacgctgggcggttcgggcaaagaaagcggcgaccgccacccgaaaatcggcgatggcgtgatgattggtgcgaatgcctcaattttgggcaatatccgcatcggcgaaaatgctaaaatcggcgcaggcagcgtggtggttgccgatgtaccgtcttcgattaccgttgtcggcgtaccggccaaaccggttggccgctcgtccaaaaccccgtctgccgatatggatcaaaacattcaattatcgactacggattttgtgatttaa

SEQ ID NO: 6433 - protein, 272 aa, Neisseria flavescens NRL30031/H210
MKKDHLNSSDFNLWHTIREETEAAVAAEPMLASFLHQTVLHHDSLDSVLAYHLSSKLGSPLMDVRALFEIYQQALSVDTRISKCVEADLKAIYERDPACDEYSLPLLYFKGFHAVQAHRINHWLYQNGRKTLAYFLQNRMSEVFGVDIHPAARFGHGLMLDHATGFVAGETAVLGNNISILHGVTLGGSGKESGDRHPKIGDGVMIGANASILGNIRIGENAKIGAGSVVVADVPSSITVVGVPAKPVGRSSKTPSADMDQNIQLSTTDFVI

SEQ ID NO: 6434 - DNA, 804 bp, Neisseria lactamica ATCC 23970
  CDS (1)..(804): transl_table=11
ttgaacacaaacggtttcgacctctggcacaccatccgcgaagaaaccgcggccgctgccgccgccgaaccgatgctggcaagttttttgcaccaaaccgtgttgcgccacgagtccctcggctccgtccttgcctaccacctttccagcaaactcggcagcccgattatggacgtgcgcgcgctgtttgaaatctaccagcaggcgttgggcagcgacacccaaatcggcaaatgtgtcgaagcagacttgaaagccatctacgaacgcgatcccgcctgcgacgaatattcgctgccgcttttatatttcaaaggcttccacgcgattcaggcacaccgcatcaaccaccggctgtatctcgacgggcgcaaaacgctggcgtatttcctgcaaaaccgtatgtccgaagtattcggcgtggacatccatcccgccgcccgtttcggatacgggctgatgctcgaccacgccaccggctttgttgccggagaaaccgccgtgttgggcaacaatatttcgattttgcacggcgtaacgctcggcggttcgggcaaagaaggcggcgaccgccaccccaaaatcggcgacggcgtgatgatcggcgcaaacgcctcgatattgggcaatatccgcatcggcagcaatgccaaaatcggggcgggcagcgtcgtggtttcagacgtgccgccgtccatcacggttgtcggcgtacccgccaaacccgtggcgcgatcgctcaaaacaccgtcggcggatatggatcaaaatatccagtttaccgaaatcgactttatgatttga

SEQ ID NO: 6435 - protein, 267 aa, Neisseria lactamica ATCC 23970
MNTNGFDLWHTIREETAAAAAAEPMLASFLHQTVLRHESLGSVLAYHLSSKLGSPIMDVRALFEIYQQALGSDTQIGKCVEADLKAIYERDPACDEYSLPLLYFKGFHAIQAHRINHRLYLDGRKTLAYFLQNRMSEVFGVDIHPAARFGYGLMLDHATGFVAGETAVLGNNISILHGVTLGGSGKEGGDRHPKIGDGVMIGANASILGNIRIGSNAKIGAGSVVVSDVPPSITVVGVPAKPVARSLKTPSADMDQNIQFTEIDFMI

SEQ ID NO: 6436 - DNA, 846 bp, Brucella ceti str. Cudo
  CDS (1)..(846): transl_table=11
atgcaaaactggagtatggatatgtccgttcgcatgtcttcaaaagtgaatgccggtctcgatcaggtcgatcccatctggcattccatccgtgccgaagcggaggaggcgaccaggaatgacccggttctgggcgcctttctctacgccacgattctcaaccagccgagccttgaagaagcggtgatgcatcgtatcgccgaacgccttggccatctcgatgtgagcgcggatatcctgcgccagaccttcgatacgatgcttgaggcaaacccggaatggtcgcacgtcctgcgtgtggatattcaggctgtttatgaccgcgatccggcctatagccgctttatggatccggttctttacctgaagggcttccatgcgatccagacacaccgtctggcgcactggctttacaagcaaggtcgcaaggatttcgcctattatcttcagagccgctcgtcatcgatctttcagaccgatattcacccggcggccaggcttggcagcgggctgtttctcgaccatgctacagggcttgtggtgggtgaaacggccgttgtagaagataatgtctcgatcctgcatggggttacgctgggcggaaccggcaaatcgagcggtgatcgccatccgaaaatccgtcagggcgtgctgattggggcaggcgcaaaaatcctcggcaacatccaggtagggcagtgctccaagatcgcggctggttccgttgtgctgaagtccgtgccgcataatgtaaccgtggcgggcgtgcctgcgcgcatcatcggcgaaacgggctgcacggagccatcccgcgtgatggaccagatgctgggtgacggcatctaa

SEQ ID NO: 6437 - protein, 281 aa, Brucella ceti str. Cudo
MQNWSMDMSVRMSSKVNAGLDQVDPIWHSIRAEAEEATRNDPVLGAFLYATILNQPSLEEAVMHRIAERLGHLDVSADILRQTFDTMLEANPEWSHVLRVDIQAVYDRDPAYSRFMDPVLYLKGFHAIQTHRLAHWLYKQGRKDFAYYLQSRSSSIFQTDIHPAARLGSGLFLDHATGLVVGETAVVEDNVSILHGVTLGGTGKSSGDRHPKIRQGVLIGAGAKILGNIQVGQCSKIAAGSVVLKSVPHNVTVAGVPARIIGETGCTEPSRVMDQMLGDGI

SEQ ID NO: 6438 - DNA, 1053 bp, Micromonas pusilla CCMP1545
  CDS (1)..(1053)
atggaacctttgtacccaaagtctcgctcgccggtggcgagctgtcggaagttctcgacagtcttcgggacttccttcccgaagaggccgatgacgacccgtcccgcgggtttcccgccgatcgcgacgtcgaagtacaccttgttcgtgatttcgttgttgcagattatcggtgacgtgtccggggcggggcagtcgcccgccgcgaacgccggcgcggcagccgcggccgccgccgcggcggcggatccaacgagagcggcgcgacgggatacgatgtgcaaggaggcgagagcggacgcggacaaggaaccggcgttggcgagctatctgttcagcaccatcttagcgcacaagtccttggaagacgcgttggcattcgtactcgcgaataagctcaagagcaccgtgctcctggactcgcagctcctcgagttgttttccgcgacgtatcgacgtgacggccatctggtgaagatggctcaggcggacatgcaggcgtacatcgagcgcgaccccgcttgcgaaaaatacatgcatatacttctcttctttaaggggttccaagcgatccaggcgcatcgcgtagcttctgcgctgtggaaacaggacaggaaacctctcgcactcttacttcagagccgaatatccgaaatatttcacgtagacatccatcccggggcgaacatcggcgcgggtatcatgttagaccacgccaccggcgtcgtgattggggaaaccgcagttgtggaggataacgtgtcgatccttcacggagtcacgttggggggaacggggacgaaggatggagacagacatcctaagataggaaccggggttgtcatcggtgcgggagtcacgatcctcggtaacctcaaggttggcgcgaactcgaagatcggcgccggttctgtcgtgctgagggacatacccgagaactgcaccgccgttgggattcccgcgaggctcgtgggcggacccaagccggaatcgcagccgagcctcagcatggatcaggtatccgggttatccgattacgcgtacgacatctga

SEQ ID NO: 6439 - protein, 350 aa, Micromonas pusilla CCMP1545
MEPLYPKSRSPVASCRKFSTVFGTSFPKRPMTTRPAGFPPIATSKYTLFVISLLQIIGDVSGAGQSPAANAGAAAAAAAAAADPTRAARRDTMCKEARADADKEPALASYLFSTILAHKSLEDALAFVLANKLKSTVLLDSQLLELFSATYRRDGHLVKMAQADMQAYIERDPACEKYMHILLFFKGFQAIQAHRVASALWKQDRKPLALLLQSRISEIFHVDIHPGANIGAGIMLDHATGVVIGETAVVEDNVSILHGVTLGGTGTKDGDRHPKIGTGVVIGAGVTILGNLKVGANSKIGAGSVVLRDIPENCTAVGIPARLVGGPKPESQPSLSMDQVSGLSDYAYDI

SEQ ID NO: 6440 - DNA, 1044 bp, Spinacia oleracea
  CDS (1)..(1044)
atgttggcggtttcatatgccattccgtcttgctgcattaacagattttatatccgagaattttcaagttctcttcaaccggccctccaccacccctggtacaagaagagattcgggtgctgctccaccaatcaggaaaattgcagtttaggttctcccacacatctccctagaatgccaggaggggatttgagtgttgcaccatcagtgggtcatttaacagcaaataacgaggcgtggttgtgggatcagataaagggtgaagcccgtcgtgatgctgattcagagcctgcacttgcctcttatctatactccacaatcctttcacactcctctctagaacggtcactctccttccacctaggaaacaagctgtgttcctccactttgctgtcaactcttctttatgatctcttccttaacatcttatcatctgattcttctctgcttgatgctgttgttgctgatttacgtgctgccagagtacgtgacccagcttgtgtatccttttctcactgccttctaaactacaaggggttcttagcatgtcaatcacaccgtgtggcccacaaactatggaatcaagatagacggcctcttgcacttgcacttcactccagaatatctgatgtatttgctgttgatatccaccctgctgctagaattgggaaggggatactctttgatcatgctactggtgttgttattggagagacagcaataattggtgacaactgttcgatattacatcacgtgacacttggtggaacaggaaaagctggaggtgaccgtcacccaaaagtcggtgatggagttttaataggtgctggggcaacaatcctgggtaatgttaggattggtgatggagcaaagataggtgcaggatcagtagtgctcattgatgttcctcctagaacaacagctgtgggtaatccagctagattaatcggtggcaaagagaaaccgtcacagaattcagatgttcctggagagtctatggatcacacttcatttatttcagagtggtccgattatatcatttaa

SEQ ID NO: 6441 - protein, 347 aa, Spinacia oleracea
MLAVSYAIPSCCINRFYIREFSSSLQPALHHPWYKKRFGCCSTNQENCSLGSPTHLPRMPGGDLSVAPSVGHLTANNEAWLWDQIKGEARRDADSEPALASYLYSTILSHSSLERSLSFHLGNKLCSSTLLSTLLYDLFLNILSSDSSLLDAVVADLRAARVRDPACVSFSHCLLNYKGFLACQSHRVAHKLWNQDRRPLALALHSRISDVFAVDIHPAARIGKGILFDHATGVVIGETAIIGDNCSILHHVTLGGTGKAGGDRHPKVGDGVLIGAGATILGNVRIGDGAKIGAGSVVLIDVPPRTTAVGNPARLIGGKEKPSQNSDVPGESMDHTSFISEWSDYII

SEQ ID NO: 6442 - DNA, 918 bp, Musa balbisiana
  CDS (1)..(918)
atgccgacggagaagacgaaccagaacggcctcgccgcctcggccccggcggcagctgcgcggcacgcgatcccgacgtacccgccgccggagtcggagtcggaggagtcgtgggtgtgggcgcagattaaggcggaggcccaccgggacgcggagtcggagccggcgctggcgagcttcctctacgccacggtgctctcccacaactccctggccttctccctcgccttccacctcgccaacaaactctgctcctccactctcctctccaccctcctctacgacctcttcctccagtccttttcctccaagccctccctcatctccgctgttgtcgcggacctcctcgctgttcgccaccgcgaccccgcctgcgtctccttctcccactgcctcctcaactacaagggcttcctcgccgtccaggctcaccgcgtgtcccacctcctctggggccagcaccgccgccccctcgccctcgccctccagtcccgcatcgccgacgttttcgccgtcgacatccaccccgccgcccgtatcggcaagggcatcctcctcgaccacgccaccggcgtcgtcgtcggcgagaccgccgtgatcggcaacaacgtctccatcctccaccacgtcaccctcggtggcaccggcaaggccgtcggcgaccgccacccgaagatcggcgacggcgtcctcatcggagccggcgctaccatcctcggcaacatccggataggggagggggccaagatcggtgccgggtccgtcgtcctcatcgacgtgcccccgaggaccacggtcgtcgggaaccctgcccggctcgtcggggggaaggacaagcccgcgaggcacgacgatgtgccaagcgaatccatggatcacacttccttcatccaggagtggtccgactacatcatctga

SEQ ID NO: 6443 - protein, 305 aa, Musa balbisiana
MPTEKTNQNGLAASAPAAAARHAIPTYPPPESESEESWVWAQIKAEAHRDAESEPALASFLYATVLSHNSLAFSLAFHLANKLCSSTLLSTLLYDLFLQSFSSKPSLISAVVADLLAVRHRDPACVSFSHCLLNYKGFLAVQAHRVSHLLWGQHRRPLALALQSRIADVFAVDIHPAARIGKGILLDHATGVVVGETAVIGNNVSILHHVTLGGTGKAVGDRHPKIGDGVLIGAGATILGNIRIGEGAKIGAGSVVLIDVPPRTTVVGNPARLVGGKDKPARHDDVPSESMDHTSFIQEWSDYII

SEQ ID NO: 6444 - DNA, 885 bp, Citrullus lanatus
  CDS (1)..(885)
atgccagttggtgagcttcgattttcgtctcagtcttcaacgacggtggtggagtctactacaaacaacgacgagacatggttgtgggggcagattaaagcagaggcgcggcgagatgccgagtcagagccggcattggctagctatctttactcgacgattttgtcacattcatcgctcgagagatcgctttcgtttcatttggggaacaaactttgctcctccacgcttctttctactctcctttacgatcttttcctcaatgctttctccactgattactgtctaagatcagctgttgtcgcggatttgcaagcagctcgtgaacgtgacccagcctgtgtttcattctcacattgcctcctcaattacaaaggattcttagcctgccaggctcatcgtgtggctcacaagctgtggaatcaatcacgtaggccgctagcactggcacttcaatctcgcattgctgatgtcttcgccgttgacattcaccctgcagcaagaattgggaaaggcattctgtttgatcatgctaccggtgtagtggtgggtgagacggcagtgataggcaacaatgtctcaattcttcatcatgtcactcttggagggacaggaaagatgtgtggagacaggcatccaaagattggggatggtgttttaatcggtgctggagcgaccattcttggcaatgttaagattggagaaggagccaagatcggggcaggatcggtggtgctcattgatgtgccaccacgaactactgccgtgggcaatcccgcaaggctggtggggggaaaggagaagccatcacagctcgaggatattcctggagagtccatggaccatacatctttcatatccgaatggtcagattacataatttga

SEQ ID NO: 6445 - protein, 294 aa, Citrullus lanatus
MPVGELRFSSQSSTTVVESTTNNDETWLWGQIKAEARRDAESEPALASYLYSTILSHSSLERSLSFHLGNKLCSSTLLSTLLYDLFLNAFSTDYCLRSAVVADLQAARERDPACVSFSHCLLNYKGFLACQAHRVAHKLWNQSRRPLALALQSRIADVFAVDIHPAARIGKGILFDHATGVVVGETAVIGNNVSILHHVTLGGTGKMCGDRHPKIGDGVLIGAGATILGNVKIGEGAKIGAGSVVLIDVPPRTTAVGNPARLVGGKEKPSQLEDIPGESMDHTSFISEWSDYII

SEQ ID NO: 6446 - DNA, 936 bp, Thlaspi goesingense
  CDS (1)..(936)
atgccgccggccggagaactccgtcatcaacctccttcagaggatacacagtctacagatactccatctgccgaagcagcagctgcggcagcgatattagcggcagctgcagattcggaggctgctggattatggacacagatcaaagcggaagctcgccgcgacgctgaggcggagccggcgttagctagctatctctactcgacgattctctctcattcttctctcgagcgatcgatctcgttccatttgggaaacaagctctgctcctcgacgcttctctccacgcttttatacgatcttttcttaaacaccttcacctccgatccatctctgcgcaacgccaccgtcgcagatcttcgcgctgctcgcgttcgtgatccggcttgcatctcgttctcgcattgcctcctcaattataaaggcttcttagcaattcaggcgcatcgtgtgtcacacaagctatggacgcaatcgcggaagccattagcgttagctctccactcgagaatctccgacgtattcgccgtcgatatccatcccgcggcgaggatcggaaaagggatacttctcgaccacgcaacgggagtcgtcatcggagaaacagctgtgatagggaacaacgtatcgatcctccaccacgtgacgctcggtggaaccggtaaagcttgcggagacagacatccgaagatcggcgacggttgcttgatcggagctggggcgactattctcgggaacgtgaagatcggcgcaggagctaaagtaggagctggatccgtggtcctgatcgacgtgcctccgcgagctacggcggttgggaatccggcgaggctcgtgggagggaaagagaaaccaacgattcatgatgaggaatgtcccggagaatcgatggatcacacttccttcatctcggaatggtcagattacattatttga

SEQ ID NO: 6447 - protein, 311 aa, Thlaspi goesingense
MPPAGELRHQPPSEDTQSTDTPSAEAAAAAAILAAAADSEAAGLWTQIKAEARRDAEAEPALASYLYSTILSHSSLERSISFHLGNKLCSSTLLSTLLYDLFLNTFTSDPSLRNATVADLRAARVRDPACISFSHCLLNYKGFLAIQAHRVSHKLWTQSRKPLALALHSRISDVFAVDIHPAARIGKGILLDHATGVVIGETAVIGNNVSILHHVTLGGTGKACGDRHPKIGDGCLIGAGATILGNVKIGAGAKVGAGSVVLIDVPPRATAVGNPARLVGGKEKPTIHDEECPGESMDHTSFISEWSDYII

SEQ ID NO: 6448 - DNA, 960 bp, Thlaspi goesingense
  CDS (1)..(960)
atggcaccgtgcatcgacacttccagaaccggaaaaacccagctctctcaaaacgatgattctggtttccgttacctgaatttctgtggacccggtttctctgagcggatttcacgcgggaaccacacgaaaacccaaacagacgacgatgtctggcttaagatgcgagaagaagctaaatctgacgtcgagcaagaacccattttgtcgagctactatgacgcttccattacatcgcatccatcgttggatcatgctttggcgagcatcctctccgtaaagctcagtaatctgaccttaccaagcgacacgctttttgaattgttcatcagcgttttacaagaaagccctgaaactgaaatcattgactcggtgaagcaagatctactagcagccaaggaaagagacccagcttgtgtaagctacgtccactgcttcctgagcttcaagggcttcctcgcgtgtcaagctcatcgaatcgctcacaaactctggactcaggacagaaaaatgctagctttactgatccagaacagagtatcggaggttttcgccgtcgattttcacccaggggcgaggatcggaaaagggattttgttagaccacgcgacggccgtggtgatcggcgagacggcggtggttggagacaatgtttcgattctccacggcgtgacgctcggaggaacagggaaacagtgcggcgaccggcatccgaagattggtgatggagtcttgatcggagccgggacttgtatattggggaatataacaatcggtgagggagttaaaattgggtcgggttcggtggtgctgaaggacgtgccgccgcgtacgacggcggtaggaaatccggcgagattgattggtgggaaagagaatccgacaaaacacgacaagattcccggtctgaccatggaccaaacatcgcatatgaccgagtggtctgattacgttatctaa

SEQ ID NO: 6449 - protein, 319 aa, Thlaspi goesingense
MAPCIDTSRTGKTQLSQNDDSGFRYLNFCGPGFSERISRGNHTKTQTDDDVWLKMREEAKSDVEQEPILSSYYDASITSHPSLDHALASILSVKLSNLTLPSDTLFELFISVLQESPETEIIDSVKQDLLAAKERDPACVSYVHCFLSFKGFLACQAHRIAHKLWTQDRKMLALLIQNRVSEVFAVDFHPGARIGKGILLDHATAVVIGETAVVGDNVSILHGVTLGGTGKQCGDRHPKIGDGVLIGAGTCILGNITIGEGVKIGSGSVVLKDVPPRTTAVGNPARLIGGKENPTKHDKIPGLTMDQTSHMTEWSDYVI

SEQ ID NO: 6450 - DNA, 1188 bp, Thlaspi goesingense
  CDS (1)..(1188)
atgttcccggtcacaagtcgccgccacttctctttctccctatatatgctccgttcatcttctccacacacccatgtcctctactcttcctctttcctcccttcatttgtctcatccaggtcctctgcacccaaacataaccgaaaaaccttaccccctccaatggcggcgtgtatcgacacgtgcagaaccgggaaacctcagatttcttctcgcgattctaccaggtctcacgacgatgaatccggtttccgttacctgaattactaccgtaccggttacccggaccgagtttcgcgagctccgatcaacgggatccagaccagaaccctccacacccgcccgctcgttgaagatctcgaccgagacgccgaaatcgacgatgtctgggagaaaatccgcgaagaagccaagtccgatatccagcgagaacctattgtttccggctattatcacgcatcgattgtctcccagcgatccttggaggcggcgttggcgaacactctatcggttaaactcagcaacttgaaccttcccagcaacacgctcttcgatttgttcaacggcgttctcgaagaacacccagaaatcgttgaatgtgtgaagcaagatctgatagcggtcaaggaaagagacccagcttgcataagctacgtccattgtttcctacacttcaaaggcttcctcgcctgccaagcgcatcgaattgctcatgagctctggacgcaggaccggaaaatcctcgctttgttgatccagaacagagtatcggaggccttcgccgttgatttccaccctggggccaaaatcggaaccgggattttgctcgaccacgctaccgccatcgtcatcggcgagacggcggtggtggggaacaacgtctctatcctccacaacgtaacgctcggaggaacggggaaacagtgcggagacaggcacccgaagatcggcgacggggtcttgattggagctgggacgtgtattttggggaatataacgattggagagggagccaagatcggtgctggctcggtggtgctgaaggacgtgccgccgcgtacgacggctgtgggaaatccggcgagattgcttggtggcaaagataatccgaaaaagcacgacaagatacctggcctgaccatggaccagacgtcgcatatatccgagtggtcggattatgtaatttga

SEQ ID NO: 6451 - protein, 395 aa, Thlaspi goesingense
MFPVTSRRHFSFSLYMLRSSSPHTHVLYSSSFLPSFVSSRSSAPKHNRKTLPPPMAACIDTCRTGKPQISSRDSTRSHDDESGFRYLNYYRTGYPDRVSRAPINGIQTRTLHTRPLVEDLDRDAEIDDVWEKIREEAKSDIQREPIVSGYYHASIVSQRSLEAALANTLSVKLSNLNLPSNTLFDLFNGVLEEHPEIVECVKQDLIAVKERDPACISYVHCFLHFKGFLACQAHRIAHELWTQDRKILALLIQNRVSEAFAVDFHPGAKIGTGILLDHATAIVIGETAVVGNNVSILHNVTLGGTGKQCGDRHPKIGDGVLIGAGTCILGNITIGEGAKIGAGSVVLKDVPPRTTAVGNPARLLGGKDNPKKHDKIPGLTMDQTSHISEWSDYVI

SEQ ID NO: 6452 - DNA, 882 bp, Beta vulgaris
  CDS (1)..(882)
atgccaggaggggaagtcagtgcgccttcatcagtggttctgccgacagcagaatccattgaaaatgacgaggcctgggtgtggggccagatcaaggctgaagcccgtcgtgatgctgactcagaacctgcacttgcctcctacctctactccacaatcctttctcattcctctttggaaagatcgctatccttccacctaggcaataaactgtgctcctccactttgctgtcgaccctcctgtacgacctcttccttaacatcttctcgtccgattcttctctgcgtgttgctgttgttgcagatttacgtgctgccagagtccgtgacccagcatgtgtctccttctctcactgtcttctcaactataaaggttttttggcttgtcaggctcaccgtgtggcccacaggctctggaatcaggaacgacagccccttgcacttgctcttcactcccgaatatccgatgtctttgctgtcgatatccaccctgcagctcgaattggaaaggcaattctctttgaccatgccactggggtggttattggagagacagcagtaataggtgacaactgctcgattttacaccatgtgaccctcgggggaacaggaaaagctgtgggtgatcgtcacccaaaggttggtgatggagttctaattggtgctggggcaacaattttgggtaacattaagattggtgatggggcgaagattggggcgggatcagtggtgctgattgatgttcctccaagggcaacagcagtgggaaacccagcacggttgctcggagggaaagagaaaccgtcgaggaatgtggatgtgccaggagagtctatggatcacacttcttttatttcagagtggtccgattacattatatga

SEQ ID NO: 6453 - protein, 293 aa, Beta vulgaris
MPGGEVSAPSSVVLPTAESIENDEAWVWGQIKAEARRDADSEPALASYLYSTILSHSSLERSLSFHLGNKLCSSTLLSTLLYDLFLNIFSSDSSLRVAVVADLRAARVRDPACVSFSHCLLNYKGFLACQAHRVAHRLWNQERQPLALALHSRISDVFAVDIHPAARIGKAILFDHATGVVIGETAVIGDNCSILHHVTLGGTGKAVGDRHPKVGDGVLIGAGATILGNIKIGDGAKIGAGSVVLIDVPPRATAVGNPARLLGGKEKPSRNVDVPGESMDHTSFISEWSDYII

SEQ ID NO: 6454 - DNA, 858 bp, Glycine max
  CDS (1)..(858)
atgccgacggggttaccggcggcgaattccttagtggcgccggacgaagaggggtgggtgtgggggcagatcaaggcggaggcgcgccgcgacgccgagtcggagcctgctttggcgagctacctctactcgacgatcctctcgcactcgtcgctcgagcgttctctgtcttttcacctcggaaataagctctgttcctccacgcttctctcgacgctcctttacgacctgttcctcaacgccttctcctccgacccctccctccgctccgccgccgtcgccgatctccgcgctgcccgcgaacgcgaccccgcctgcgtctcctactcccactgcctcctcaattacaaaggcttcctcgcttgccaggcgcaccgtgtggcgcatctgttgtggcggcaatcacggcggccgttggctttagcgctgcactctcgcatcgcaaatgtgtttgcggtggacattcacccggcggcaaggattgggaaggggattctgttcgaccatgccactggggtggtggaggggagacaccggaatcgggaacaatgtgtcgatcctgcaccatgttctctgggtgggactggcaaggttggtggagaccggcatcctaagattggggatggggtgcttattggtgctggtgctaccattctggggaatattaagattggggaaggtgcaaaggttggtgctggttcagtggttttaattgatgtgccaccacggacaacagcagttgggaacccggcgaggttggttggtgggaaggagaagccctctaagcatgaggatgtgcctggggagtctatggaccatacttcctttatctctgagtggtcagattatatcatttga

SEQ ID NO: 6455 - protein, 285 aa, Glycine max
MPTGLPAANSLVAPDEEGWVWGQIKAEARRDAESEPALASYLYSTILSHSSLERSLSFHLGNKLCSSTLLSTLLYDLFLNAFSSDPSLRSAAVADLRAARERDPACVSYSHCLLNYKGFLACQAHRVAHLLWRQSRRPLALALHSRIANVFAVDIHPAARIGKGILFDHATGVVEGRHRNREQCVDPAPCSLGGTGKVGGDRHPKIGDGVLIGAGATILGNIKIGEGAKVGAGSVVLIDVPPRTTAVGNPARLVGGKEKPSKHEDVPGESMDHTSFISEWSDYII

SEQ ID NO: 6456 - DNA, 939 bp, Rhizobium leguminosarum
  CDS (1)..(939): transl_table=11
atgctaaaaaaccatggcgacggcacccatatatgttattggcgttttcctctatatattggcattccgaaaacggcattccttccggcaacgaggagagcggcgatggtcgcaaagactgacatccgtgcttttgagacaggccatccgctgaaggtgatggatcccatctgggacagcctgcgcgaggaagcccggctcgccgccgaacgggacccggttctcgcggccttcctctattcgaccgtgatcaactaccactcgctcgaggaatgcgtcatccaccgcatctgcgagcgtctcgatcaccccgacatgcaggcgaacctgcttcgccagaccttcgaggaaatgctcctcgactggccggactggagctccatcctgcgcgtcgatatccaggcgatctatgaccgcgatcccgcctgcctgcgcttcatggaggcggtgctttatttcaagggcttccacgcgctgcagacacatcgtctcgcccattggctgctgaaccgcggccggcgtgattttgcgctctatctgcagagccgctcctccagcgtctttcagaccgacatcaatccggccgcccgtatcggcaagggcatcttcctcgatcacgccaccggcctcgtcgtcggcgagacggccgtcatcggcgacaacgtttcgatcctgcacggcgtcacactcggaggcaccggcaaggagggcgctgaccgccatcccaagatcggctccggcgtcatgatcggcgccggcgccaagatcctcggcaatatcgagatcggctactgctcacgagtcgccgcaggctccgtcgtattgaaggcggtgccgcccaagaagacggtggcgggcgtgccggccaaggtcgtcggtgaggccggttgttccgagccgtcgcgcaacatggaccaggtgattggcgccgatatctga

SEQ ID NO: 6457 - protein, 312 aa, Rhizobium leguminosarum
MLKNHGDGTHICYWRFPLYIGIPKTAFLPATRRAAMVAKTDIRAFETGHPLKVMDPIWDSLREEARLAAERDPVLAAFLYSTVINYHSLEECVIHRICERLDHPDMQANLLRQTFEEMLLDWPDWSSILRVDIQAIYDRDPACLRFMEAVLYFKGFHALQTHRLAHWLLNRGRRDFALYLQSRSSSVFQTDINPAARIGKGIFLDHATGLVVGETAVIGDNVSILHGVTLGGTGKEGADRHPKIGSGVMIGAGAKILGNIEIGYCSRVAAGSVVLKAVPPKKTVAGVPAKVVGEAGCSEPSRNMDQVIGADI

SEQ ID NO: 6458 - DNA, 870 bp, Allium tuberosum
  CDS (1)..(870)
atgccatgctcaacggttccatttcctacatttccgccaccagaatcggaatctgacgaatcctgggtttggaaccaaatcaaagctgaggcacgccgcgacgccgaatctgaacccgctttggccagctacttatactctactatcatttctcatccctctcttgctcgatctctatccttccatttggccaataagttgtgttcctcaactttgctttccacttcgctttacgatttgtttttgaacgctctctcaacttttcctaccattctgtcggcgacggttgcggatttgattgcggccaggcatcgcgatcccgcttgtatcggtttcagtcactgcttgttgaattttaaggggtttcttgccgtgcagactcaaaggatagcacacgtgctgtggtcccaatcacggcgaccccttgccctagccctacactctcgtgtggcggacgtcttatcggtggacatccaccctgcagctagaatcggcaaaggcatcctcctcgaccatgccaccggcgtagtaatcggcgaaactgcagtcataggcaacaacgtatccatcctccatcacgtgaccctgggcggcacaggaaaagctggaggagacaggcacccaaaaataggcgacggggttctgattggagcaggggccacgatcctaggaaacatcagaatcggcgctggggcgaagattggagcagggtctgttgttttgatcgatgtgccgcctaggactactgcggttgggaatccagctaggttgattggtgggaaggagaagccttctatgcacgaggatgtgcctggtgagtcaatggatcatacttccttcatttccgagtggtcggattatatcatctga

SEQ ID NO: 6459 - protein, 289 aa, Allium tuberosum
MPCSTVPFPTFPPPESESDESWVWNQIKAEARRDAESEPALASYLYSTIISHPSLARSLSFHLANKLCSSTLLSTSLYDLFLNALSTFPTILSATVADLIAARHRDPACIGFSHCLLNFKGFLAVQTQRIAHVLWSQSRRPLALALHSRVADVLSVDIHPAARIGKGILLDHATGVVIGETAVIGNNVSILHHVTLGGTGKAGGDRHPKIGDGVLIGAGATILGNIRIGAGAKIGAGSVVLIDVPPRTTAVGNPARLIGGKEKPSMHEDVPGESMDHTSFISEWSDYII

SEQ ID NO: 6460 - DNA, 870 bp, Allium cepa
  CDS (1)..(870)
atgccatgctcaactcttccaattccaacatttccgccacctgaatcggaatccgacgaatcctgggtttggaaccaaatcaaagcggaggcacaccgcgacgcggaatctgaaccagctttggccagctacttgtactctactatcatttctcatccctctctcgcccgttctctatccttccatttggccaataaattgtgttcttcaactttgctttccacttcgctttacgatttgtttttgaacacactctcaacttttcctaccgttctgtcggcgtcggttgccgatttgattgcggccaggcatcgggatccggcttgcgtcggtttcagtcactgcttgttgaattttaaggggtttcttgccgttcagactcaaaggatagcacacgtgctgtggtctcaatcacgccgtcctctcgccctggccctacactctcgtgtagcagatgtcctatcggtggacatccaccctgcagccaggatcggtaagggtatcctcctcgaccatgcaaccggcgtagtgatcggtgaaactgcagtcataggcaacaacgtctccattctccatcacgtgaccttagggggcacgggaaaagctggaggggacaggcaccctaaaataggggatggtgttttgattggggcaggggccacgatcctagggaatatcagaatcggtgctggggcgaaggtcggagcagggtctgttgttctgatcgatgtgccgcctaggactactgcggttgggaatccggctaggctgattggggggaaggagaagccttctgtgcacgaagatgtgcctggcgagtccatggatcatacttcattcatttctgagtggtcggattatatcatctga

SEQ ID NO: 6461 - protein, 289 aa, Allium cepa
MPCSTLPIPTFPPPESESDESWVWNQIKAEAHRDAESEPALASYLYSTIISHPSLARSLSFHLANKLCSSTLLSTSLYDLFLNTLSTFPTVLSASVADLIAARHRDPACVGFSHCLLNFKGFLAVQTQRIAHVLWSQSRRPLALALHSRVADVLSVDIHPAARIGKGILLDHATGVVIGETAVIGNNVSILHHVTLGGTGKAGGDRHPKIGDGVLIGAGATILGNIRIGAGAKVGAGSVVLIDVPPRTTAVGNPARLIGGKEKPSVHEDVPGESMDHTSFISEWSDYII

SEQ ID NO: 6462 - DNA, 1289 bp, Oryza sativa subsp. japonica
  CDS (51)..(1073)
ggcaatcgctccacttgtcgcctatatacgccttggcctctcggcgtccgatgctagtggtagtggcccgcaaatcctcctcctccgctcgcgtcgccgcccaccaaacccgatcccaccgcgccgcgatgccggccggccagccgcacgcgcacgagcccgacggcggcggcgcgagccaccgccggccccagtcgccgccgtcgctccccgcggaggtggtcccggcgttcgcgccgccggagtcggaggacgaggagtcctgggtctggtcccagatcaaggccgaggcgcgccgcgacgccgacgccgagccggcgctcgcgtccttcctctacgccaccgtgctctcccacccctccctcccgcgctccatctccttccacctcgccaacaagctctgctcctccaccctcctctccacgctcctctacgacctcttcctggcttccttcaccgcgcacccctccctccgcgccgccgtcgtcgccgacctcctcgccgcccgctcccgcgacccggcctgcgtcggcttctcccagtgcctcctcaacttcaagggcttcctcgccatccaggcgcaccgcgtgtcgcacgtcctctgggcgcagcagcgacgcccccttgccctcgccctccagtcccgcgtcgccgacgtcttcgccgtcgacatccaccccgcggccgtcgtcggcaagggcatcctcctcgaccacgccaccggcgtcgtcatcggcgagaccgccgtcgtcggcgacaacgtctccatcctccaccacgttacactgggtggcacaggcaaggctgtcggtgaccggcaccccaagattggggatggtgttctgattggcgccggggcgacgattcttggcaacgtcaagattggagccggggccaagattggtgccgggtcagtggtgctgatagatgtgccggcgaggaacacggcggtggggaatccagccaggttgattggcaggaagaacggtgaggttgagaaggatgaggacatgcccggggaatccatggatcacacatccttcattcgacagtggtcggactacaccatttgagggcgacgcgccgaggtctatttctcttcctctctgtataatccgtagtgttgatatgccaaaaactgatgtacttgtcgtgctttgggtaatctgtactgtagtgttgtatcatcagccgttttatcagtcgaatgcccatgctcatgtactgataactggtgattgatgaaatgatgagtcaaataaaagttgtataacttttgattttaaaaa

SEQ ID NO: 6463 - protein, 340 aa, Oryza sativa subsp. japonica
MLVVVARKSSSSARVAAHQTRSHRAAMPAGQPHAHEPDGGGASHRRPQSPPSLPAEVVPAFAPPESEDEESWVWSQIKAEARRDADAEPALASFLYATVLSHPSLPRSISFHLANKLCSSTLLSTLLYDLFLASFTAHPSLRAAVVADLLAARSRDPACVGFSQCLLNFKGFLAIQAHRVSHVLWAQQRRPLALALQSRVADVFAVDIHPAAVVGKGILLDHATGVVIGETAVVGDNVSILHHVTLGGTGKAVGDRHPKIGDGVLIGAGATILGNVKIGAGAKIGAGSVVLIDVPARNTAVGNPARLIGRKNGEVEKDEDMPGESMDHTSFIRQWSDYTI

SEQ ID NO: 6464 - DNA, 1173 bp, Brassica napus
  CDS (1)..(1173)
atgttcccggtcacaagtcgccgccacttcacatcctccctatatatcctccgttcatcttctccacacaaccatctacgtcctctactctccctcctcttcctcccttccgtccgctcctccaaatccaaatccaaatcctcctcttcaaccaacaaacacaaccaacaatctcctcctccaatggccgcgtgcatcgacacgtgccgaaccggtaaaccacagatctcacgcgactcgaaccggtcccacgacgacgaatccggtttccgttactccaattactaccgcccctccggttatcatccaacaacccagacgaaaaccatccacacccgtcctctcgtcgaagacctcccaaacgacgacgtatgggccaagatccgacaagaggccagatccgacatcgagagagagccaatcgtctccggctactaccaggcctcgatcgtctcgcaacgatctctcgaagccgccttagccaacacgctctccgtcaagctcagcaacctgaacctcccgagcaacacgctcttcgatctcttcaacggcgtcctcgaacagcaccctaagatcgtcgagtccgttaagcaagacctcttagccgtcaaagaaagagaccccgcctgcatcagctacgtccactgcttcctccacttcaaaggctttttagcctgccaggcccatcgaatagcccacgagctttggacccaaaaccgaaaggttcttgctctgctgatccagaacagagtctccgaagccttcgccgtcgatttccaccccggggccaagatcgggacggggattttgctcgaccacgcgacggcgattgtgatcggagagacggcggtggtgggggataatgtttcgattcttcataacgtgacgcttggaggcacggggaagcagtgtggggataggcacccgaagattggggacggggtgttgatcggagctgggacgtgtattcttgggaatattacgattggtgaaggggcgaagattggggctggctcggtggtgttgaaggatgtgccgccgaggacgacggctgtggggaatccggcgaggttgcttggtgggaaagataatccgaagaagcatgataaggatcctggtctgactatggaccaaacctcgcatatatccgagtggtcggattatgttatttaa

SEQ ID NO: 6465 - protein, 390 aa, Brassica napus
MFPVTSRRHFTSSLYILRSSSPHNHLRPLLSLLFLPSVRSSKSKSKSSSSTNKHNQQSPPPMAACIDTCRTGKPQISRDSNRSHDDESGFRYSNYYRPSGYHPTTQTKTIHTRPLVEDLPNDDVWAKIRQEARSDIEREPIVSGYYQASIVSQRSLEAALANTLSVKLSNLNLPSNTLFDLFNGVLEQHPKIVESVKQDLLAVKERDPACISYVHCFLHFKGFLACQAHRIAHELWTQNRKVLALLIQNRVSEAFAVDFHPGAKIGTGILLDHATAIVIGETAVVGDNVSILHNVTLGGTGKQCGDRHPKIGDGVLIGAGTCILGNITIGEGAKIGAGSVVLKDVPPRTTAVGNPARLLGGKDNPKKHDKDPGLTMDQTSHISEWSDYVI

SEQ ID NO: 6466 - DNA, 948 bp, Brassica napus
  CDS (1)..(948)
atggcaccctgcatctacacgtccaatacccatctctctcaagacgataattctcggttccgttacatgaatctcttccctgatcggatttcacgagcacccttcacgaaaacctcaaactctctggacggtgatgatgaagatgtctggattaagatgcttgaagaagctcaatccgacgttgagcaagaacccatattgtcaagctactattactcttccgttacatcgcatcggtcgttagactccgctttggcgaacattctctcggtaaagctcagcactttaaccttaccaagcagcaccctcttcgaactcttcaccagcgtcttacaagaaagcccagagatcatggagtcggcgaaacaagacctgttagcagcaaaggaaagagacccagcttgcttaagctacgtccaatgcttcctaagcttcaaaggcttcctcgcttgtcaagctcatcgcatcgctcacaagctctggacccaagacagaaagatcctcgctttactcatccaaaacagagtatccgaagctttcgccgtcgatatccatcccggagctaagatcgggaaaggggtgctgttagaccacgcgacggccgtggtgatcggagagacggcggtggttggagacaacgtttcgattctccacggcgtgacgctcggaggaacagggaagcagtgcggcgataggcatccgaagatcggcgacggagtcttgatcggagcagggacttgtatactggggaatataacaatcggagagggagctaaggttggatcggggtcggtggtgcttaaagacgtgccgccgcatacgacggcggttggaaacccggcgagattgatcggtgggaaagagaatccgaaaatgcttgataagatacccggtttgagcatggaccagacatcgtacttaaccgagtggtctgattatgtcatctaa

SEQ ID NO: 6467 - protein, 315 aa, Brassica napus
MAPCIYTSNTHLSQDDNSRFRYMNLFPDRISRAPFTKTSNSLDGDDEDVWIKMLEEAQSDVEQEPILSSYYYSSVTSHRSLDSALANILSVKLSTLTLPSSTLFELFTSVLQESPEIMESAKQDLLAAKERDPACLSYVQCFLSFKGFLACQAHRIAHKLWTQDRKILALLIQNRVSEAFAVDIHPGAKIGKGVLLDHATAVVIGETAVVGDNVSILHGVTLGGTGKQCGDRHPKIGDGVLIGAGTCILGNITIGEGAKVGSGSVVLKDVPPHTTAVGNPARLIGGKENPKMLDKIPGLSMDQTSYLTEWSDYVI

SEQ ID NO: 6468 - DNA, 948 bp, Brassica napus
  CDS (1)..(948)
atggcaccctgcatctacacgtccaatacccatctctctcaagacgataattctcggttccgttacatgaatctcttccctgatcggatttcacgagcacccttcacgaaaacctcaaactctctggacggtgatgatgaagatgtctggattaagatggttgaagaagctcaatccgacgttgagcaagaacccatattgtcaagctactattactcttccgttacatcgcatcggtcgttagacaccgctttggcgaacattctctccgtaaagctaagcactttgaccttaccaagcagcaccctcttcgaagtcttcaccagcgtcttacaagaaagcccagagatcatcgggtcggcgaaacaagacctgttagcagcaaaggaaagagacccagcttgcttaagctacgtccaatgcttcctaagcttcaaaggcttcctcgcttgccaagctcatcgcatcgctcacaagctctggacccaagacagaaagatcctcgctttgctcatccaaaacagagtatccgaagctttcgccgtcgatatccatcccggagctaagatcgggaaaggggtgttgttagatcacgcgacggccgtggtgatcggagagactgcggtggttggagacaacgtttcgattctccacggcgtgacgctcggaggaacagggaagcagtgcggcgatcggcatccgaagatcggtgacggagtcttgatcggagcagggacttgtgtattggggaatataacaatcggcgagggagctaaggttggatcggggtcggtggtgcttaaagacgtgccgccgcatacgacggcggttggaaacccggcgagattgatcggtgggaaagagaatccgaaaatgcttgataagatacccggtttgagcatggaccagacatcgtacttaaccgagtggtctgattatgtcatctaa

SEQ ID NO: 6469 - protein, 315 aa, Brassica napus
MAPCIYTSNTHLSQDDNSRFRYMNLFPDRISRAPFTKTSNSLDGDDEDVWIKMVEEAQSDVEQEPILSSYYYSSVTSHRSLDTALANILSVKLSTLTLPSSTLFEVFTSVLQESPEIIGSAKQDLLAAKERDPACLSYVQCFLSFKGFLACQAHRIAHKLWTQDRKILALLIQNRVSEAFAVDIHPGAKIGKGVLLDHATAVVIGETAVVGDNVSILHGVTLGGTGKQCGDRHPKIGDGVLIGAGTCVLGNITIGEGAKVGSGSVVLKDVPPHTTAVGNPARLIGGKENPKMLDKIPGLSMDQTSYLTEWSDYVI

SEQ ID NO: 6470 - DNA, 1032 bp, Glycine max
  CDS (1)..(1032)
atggctcatctgagccacaagaccttggtttatcttccagaaatgaggcctgaacatgaagctgaggaaggccaacccagaaaaagtcttggttctttttcttcttggcctcatcgtttggagaatgttttccccgtttatgccatgggaacttccaaccctgcagtcttggattcttcacttcacacttctgattgtcttgatcctatttgggatgctgtcagagaagaagccaagttagaggcagaaaaggagccaattttgagtagcttcttctatgccactattctgtctcatgattgcttggagcaagcattggcttttgctcttgccaaccgactccaaaaccctactcttttggcaactcagctgatggatatattatcgtatgtgatgaagcatgataaaagtatccagcaatgcattcgcttgtatattcaagcatgtaaagatcaggatgctgcttgtttgtcatattgctcagcacttttatatatgaagggctaccagtctttgcaagtatatcgagtagctcatgctttgtggggccagggacgcaaagttttggcctcagctttgcaaagtcgagttagtgaggtagtgtttgcacttggtaaaaaaaatggagaaatatttcgtaagggtattatttttgttgctgatgatccaaccctttattttctctactgcaggtttttggagttgatatacatccagggtgtaacttttggcggcacgggtaaggaaacaggtgatcggcatcccaaaatttctgaaggtgttctaattggagcacatgcaactatacttgggaatataacaattggtgaatgtgtgatgatagctgctggctcccttgtgttacaagaggttcctcctcacagcattgtggctggtgtaccagcaaaggttattggaagagtacatgagcattatccatccttaaccatgcagcaagatgaaaataagcatctatcggaggagtttttctatagcaaagatgaaaccacagaaaattactacataaattga

SEQ ID NO: 6471 - protein, 343 aa, Glycine max
MAHLSHKTLVYLPEMRPEHEAEEGQPRKSLGSFSSWPHRLENVFPVYAMGTSNPAVLDSSLHTSDCLDPIWDAVREEAKLEAEKEPILSSFFYATILSHDCLEQALAFALANRLQNPTLLATQLMDILSYVMKHDKSIQQCIRLYIQACKDQDAACLSYCSALLYMKGYQSLQVYRVAHALWGQGRKVLASALQSRVSEVVFALGKKNGEIFRKGIIFVADDPTLYFLYCRFLELIYIQGVTFGGTGKETGDRHPKISEGVLIGAHATILGNITIGECVMIAAGSLVLQEVPPHSIVAGVPAKVIGRVHEHYPSLTMQQDENKHLSEEFFYSKDETTENYYIN

SEQ ID NO: 6472 - DNA, 1032 bp, Glycine max
  CDS (1)..(1032)
atggctcatctgagccacaagaccttggtttatcttccagaaatgaggcctgaacatgaagctgaggaaggccaacccagaaaaagtcttggttctttttcttcttggcctcatcgtttggagaatgttttccccgtttatgccatgggaacttccaaccctgcagtcttggattcttcacttcacacttctgattgtcttgatcctatttgggatgctgtcagagaagaagccaagttagaggcagaaaaggagccaattttgagtagcttcttctatgccactattctgtctcatgattgcttggagcaagcattggcttttgctcttgccaaccgactccaaaaccctactcttttggcaactcagctgatggatatattatcgtatgtgatgaagcatgataaaagtatccagcaatgcattcgcttgtatattcaagcatgtaaagatcaggatgctgctagtttgtcatattgctcagcacttttatatatgaagggctaccagtctttgcaagtatatcgagtagctcatgctttgtggggccagggacgcaaagttttggcctcagctttgcaaagtcgagttagtgaggtagtgtttgcacttggtaaaaaaaatggagaaatatttcgtaagggtattatttttgttgctgatgatccaaccctttattttctctactgcaggtttttggagttgatatacatccagggtgtaacttttggcggcacgggtaaggaaacaggtgatcggcatcccaaaatttctgaaggtgttctaattggagcacatgcaactatacttgggaatataacaattggtgaatgtgtgatgatagctgctggctcccttgtgttacaagaggttcctcctcacagcattgtggctggtgtaccagcaaaggttattggaagagtacatgagcattatccatccttaaccatgcagcaagatgaaaataagcatctatcggaggagtttttctatagcaaagatgaaaccacagaaaattactacataaattga

SEQ ID NO: 6473 - protein, 343 aa, Glycine max
MAHLSHKTLVYLPEMRPEHEAEEGQPRKSLGSFSSWPHRLENVFPVYAMGTSNPAVLDSSLHTSDCLDPIWDAVREEAKLEAEKEPILSSFFYATILSHDCLEQALAFALANRLQNPTLLATQLMDILSYVMKHDKSIQQCIRLYIQACKDQDAASLSYCSALLYMKGYQSLQVYRVAHALWGQGRKVLASALQSRVSEVVFALGKKNGEIFRKGIIFVADDPTLYFLYCRFLELIYIQGVTFGGTGKETGDRHPKISEGVLIGAHATILGNITIGECVMIAAGSLVLQEVPPHSIVAGVPAKVIGRVHEHYPSLTMQQDENKHLSEEFFYSKDETTENYYIN

SEQ ID NO: 6474 - DNA, 912 bp, Oryza sativa
  CDS (1)..(912)
atgactgcgggccagcctctccgggacgatccccagccacgccggcacagcccgccggcgctccacccggccgtcgtgccggcgtacccgcccccggagtcggacgccgacgagtcgtgggtctggtcccagatcaaggccgaggcgcgccgcgacgccgacgccgagccggcgctcgcgtcgttcctctacgccaccgtgctctcccacccctccctcgaccgctcgctcgccttccacctcgccaacaagctctgctcctccacgctgctctccacgctcctctacgacctcttcgtcgcctccctcgccgcgcaccccaccctccgcgccgccgtcgtcgccgacctcctcgccgcgcgctccagggaccccgcctgcgtcggcttctcccactgcctcctcaactacaagggcttcctcgccatccaggcccagcgcgtcgcgcacgtgctctgggcgcaggaccgccgcgccctcgcgctcgcgctccagtcccgcgtcgccgacgtcttcgccgtcgacatccaccccgcggccgtcgtcggcaagggcgtcctcctcgaccacgccacgggcgtcgtcatcggagagaccgccgtcatcggcgacaacgtctccatcctccaccacgtcacgctgggcgggacaggcaaggccgtgggcgaccggcaccccaagatcggcgacggcgtcctcattggcgccggcgcgacgatcctcggcaatgtcaggatcggcgccggggccaagatcggggccgggtcgctggtgctcatcgacgtgccgccgaggaccacggcggtggggaatccggcgaggctgctcggcgggaagaagggcgacgacatgccgggtgaatccatggaccacacctccttcatccagcaatggtcggactacagcatctga

SEQ ID NO: 6475 - protein, 303 aa, Oryza sativa
MTAGQPLRDDPQPRRHSPPALHPAVVPAYPPPESDADESWVWSQIKAEARRDADAEPALASFLYATVLSHPSLDRSLAFHLANKLCSSTLLSTLLYDLFVASLAAHPTLRAAVVADLLAARSRDPACVGFSHCLLNYKGFLAIQAQRVAHVLWAQDRRALALALQSRVADVFAVDIHPAAVVGKGVLLDHATGVVIGETAVIGDNVSILHHVTLGGTGKAVGDRHPKIGDGVLIGAGATILGNVRIGAGAKIGAGSLVLIDVPPRTTAVGNPARLLGGKKGDDMPGESMDHTSFIQQWSDYSI

SEQ ID NO: 6476 - DNA, 954 bp, Triticum aestivum
  CDS (1)..(954)
atgccggcgggccagcagccaccggcgcgcgagcccgacggcggcgactccaaccaccacccccacccgccgccccccacgcccgcgctcccgtccgaggtggtgccggcctacccgccgccggagtcggaggacgacgagtcctgggtgtggacgcagatcaaggcggaggcccggcgcgacgccgacgccgagccggcgctcgcctccttcctctacgccaccgtgctctcccacccctccctgccccgctccctctccttccacctcgccaacaagctctgctcctccaccctcctctccacgctcctctacgacctcttcctcgcctccctcaccgcgcacccctccctccgcgccgccgtcgtcgccgacctcctcgccgcgcgcgcccgcgaccccgcctgcgtcggattctcccactgcctcctcaactacaagggcttcctcgccatccaggcgcaccgcgtcgcgcacgtgctctgggcgcagaaccgccgccccctcgcgctcgccctccagtcccgcgtcgccgacgtcttcgccgtcgacatccaccccgccgccgtcgtcggcaaggccatcctcctcgaccacgccaccggcgtcgtcatcggcgagaccgccgtcgtcggcgacaacgtctccatcctccaccacgtcaccctgggcgggaccggcaaggcggtcggcgaccgccaccccaagattggggacggcgtgctcataggcgccggcgccaccatcctcggcaacgtcatgattggagccggggccaagattggggctggctccgtggtgctgatagatgtgccggcgaggagcaccgcggtgggcaaccctgccaggctgattggagggaggaagggcgagtccgacaaggacgaggacatgcccggagagtccatggatcacacctccttcatacggcagtggtccgactacaccatctga

SEQ ID NO: 6477 - protein, 317 aa, Triticum aestivum
MPAGQQPPAREPDGGDSNHHPHPPPPTPALPSEVVPAYPPPESEDDESWVWTQIKAEARRDADAEPALASFLYATVLSHPSLPRSLSFHLANKLCSSTLLSTLLYDLFLASLTAHPSLRAAVVADLLAARARDPACVGFSHCLLNYKGFLAIQAHRVAHVLWAQNRRPLALALQSRVADVFAVDIHPAAVVGKAILLDHATGVVIGETAVVGDNVSILHHVTLGGTGKAVGDRHPKIGDGVLIGAGATILGNVMIGAGAKIGAGSVVLIDVPARSTAVGNPARLIGGRKGESDKDEDMPGESMDHTSFIRQWSDYTI

SEQ ID NO: 6478 - DNA, 933 bp, Zea mays
  CDS (1)..(933)
atgacggccgggcagcttctgcgcaccgagccatcagcccagccccagcgggtgcgccacagcaccccgccggcggcactccaagcagacatcgtgccgtcgtacccgccgcccgagtcggacggtgacgagtcgtgggtctggtcccagatcaaggcggaggcgcggcgcgacgcggacgcggagccggcgctggcctccttcctctacgcgacggtgctgtcgcacgcgtccctggaccggtccctggccttccacctggccaacaagctgtgctcctccacgctgctgtcgacgctcctctacgacctcttcgtggcgtcgctcgcggaccacccgtccgtccgcgcggcggcggtggccgacctgatcgccgcgcggtcgcgggacccggcctgcgcgggcttcgcgcactgcctcctcaactacaaggggttcctggccgtgcaggcgcaccgcgtggcgcacgtgctgtgggcgcagggccggcgcgcgctggcgctggcgctccagtcccgcgtcgccgaggtcttcgccgtggacatccacccggccgccaccgtcggcaggggcatcctgctcgaccacgccacgggcgtcgtcgtcggggagacggccgtcgtgggcgacaacgtctccatactccaccacgtgacgctgggcggcaccggcaaggcggtgggcgaccggcaccccaagatcggggacggcgtgctcatcggcgccggcgcgaccgtcctcggaaacgtcaggatcggcgccggcgccaaggtcggcgccgggtccgtcgtgctcatcgacgtgccgcccaggagcaccgccgtggggaaccccgccaggctgatcggcgggaagaagggcgaggaggtgatgccgggggagtccatggaccacacctccttcatacagcagtggtcggactacatcatttga

SEQ ID NO: 6479 - protein, 310 aa, Zea mays
MTAGQLLRTEPSAQPQRVRHSTPPAALQADIVPSYPPPESDGDESWVWSQIKAEARRDADAEPALASFLYATVLSHASLDRSLAFHLANKLCSSTLLSTLLYDLFVASLADHPSVRAAAVADLIAARSRDPACAGFAHCLLNYKGFLAVQAHRVAHVLWAQGRRALALALQSRVAEVFAVDIHPAATVGRGILLDHATGVVVGETAVVGDNVSILHHVTLGGTGKAVGDRHPKIGDGVLIGAGATVLGNVRIGAGAKVGAGSVVLIDVPPRSTAVGNPARLIGGKKGEEVMPGESMDHTSFIQQWSDYII

SEQ ID NO: 6480 - DNA, 972 bp, Zea mays
  CDS (1)..(972)
atgccggccggccagccgcacgcgcacgaagccgctgccgccgcctgcgtcggcagcggcgcgaaccactccaaccaccgagtgccggcgcactcgccaccgccgctccccgcggaggtggtgccggcgtacccgcccccggagtcggaggacgacgagacctgggtgtggacgcagatcaaggcggaggcccgccgcgacgcggacgcggagccggcgctcgcctccttcctctacgccaccgtgttgtcccacccgtccctgccccgctccctctccttccacctcgccaacaagctctgctcctccacgctcctctccacgctcctctacgacctcttcctcgccacgctcaccgcgcacccctctctccgcgccgccgtcgtcgccgacctcctcgcggcccactcccgcgaccccgcctgcgtcggcttctcccactgcctcctcaactacaagggcttcctcgccatccaggcccaccgcgtcgcgcacgtgctctgggcgcagcagcgacggcccctcgcgctcgcgctccagtcccgcgtcgccgacgtcttcgccgttgacatccaccccgccgccgtcgtcgggaagggaatcctcctcgaccacgccaccggcgtcgtcatcggtgagacggccgtcgtcggcgacaacgtctccatcctccaccacgtcaccttgggcgggaccgggaaggcggtgggtgaccggcaccccaagattggggatggcgtgctgattggagcaggggccaccattcttggtaacgtgaaaattggtgccggggctaagattggagccggatccgtggtgctgatagatgtgccggcgaggagcacggcggttgggaaccctgccaggctgattggtgggaagaaggccgagggtgcgaatgacgaggacatgccaggggagtccatggatcacacgtccttcatacgtcaatggtcggactacaccatttga

SEQ ID NO: 6481 - protein, 323 aa, Zea mays
MPAGQPHAHEAAAAACVGSGANHSNHRVPAHSPPPLPAEVVPAYPPPESEDDETWVWTQIKAEARRDADAEPALASFLYATVLSHPSLPRSLSFHLANKLCSSTLLSTLLYDLFLATLTAHPSLRAAVVADLLAAHSRDPACVGFSHCLLNYKGFLAIQAHRVAHVLWAQQRRPLALALQSRVADVFAVDIHPAAVVGKGILLDHATGVVIGETAVVGDNVSILHHVTLGGTGKAVGDRHPKIGDGVLIGAGATILGNVKIGAGAKIGAGSVVLIDVPARSTAVGNPARLIGGKKAEGANDEDMPGESMDHTSFIRQWSDYTI

SEQ ID NO: 6482 - DNA, 1023 bp, Zea mays
  CDS (1)..(1023)
atgacgtcctgcgggtgtctgatgctcgagaaggtggagggcgacgcgtcggcgaagacgagggtgaaggccgcgccgggcgccggtgccggcgcctggtgcggctcgtgcgctggggactggcggggccggtcagaggccatcttccccatctacgtgatggggagctcgcgggagagcaccgtggcggcggcgcgcggcatagtcgactcccccgaggaccccatatgggttgccgtcaaggcggaggccaagtctgaggcagaaaaggaacctattttgagtagcttcttgtatgccagtgtgctgtctcatgattgcctagagcgtgcattgagcttcgtccttgcaaataggcttgaagatccaacattgcttgctactcagctaatcgatatttttaacgatgtcatgctgaataacaaagatatatgccgctccattcgccttgatgctcaggctttcaaagatagagatccagcttgtgcccaatatagttgggcactgttatacttaaagggctaccaatcgttgcaatcatacaggatagccaatatattatggaaccagggacgcaaagttttggcattggcactgcaaagccgtattagtgaggtctttgctgtggatatacatccagctgccaaaattggcgagggaatattgttggatcatggaacaggtctagtcattggtgaaactgctgtagttggaaactgggtttcattaatgcagggtgttacacttggaggtacaggcaaggaacatggagataggcaccccaagattggtcagggagctctaattggagccagtgctactatcctcggcaatattaatgtaggcgaaggtgccatgattgctgctggctcccttgttttaaaggacgtacctccccacagtatggctgtaggtaatcctgcaaaggtagttggttatacagagaaagaagatccttctttaactatgaaacatgatgcaaggagagattattttgagcatgctgccatcagattgagatga

SEQ ID NO: 6483 - protein, 340 aa, Zea mays
MTSCGCLMLEKVEGDASAKTRVKAAPGAGAGAWCGSCAGDWRGRSEAIFPIYVMGSSRESTVAAARGIVDSPEDPIWVAVKAEAKSEAEKEPILSSFLYASVLSHDCLERALSFVLANRLEDPTLLATQLIDIFNDVMLNNKDICRSIRLDAQAFKDRDPACAQYSWALLYLKGYQSLQSYRIANILWNQGRKVLALALQSRISEVFAVDIHPAAKIGEGILLDHGTGLVIGETAVVGNWVSLMQGVTLGGTGKEHGDRHPKIGQGALIGASATILGNINVGEGAMIAAGSLVLKDVPPHSMAVGNPAKVVGYTEKEDPSLTMKHDARRDYFEHAAIRLR

SEQ ID NO: 6484 - DNA, 20 bp, Artificial sequence
  primer
atggcaacatgcatagacac

SEQ ID NO: 6485 - DNA, 20 bp, Artificial sequence
  primer
ttaaatcacataatcagacc

SEQ ID NO: 6486 - protein, 291 aa, Artificial sequence
  consensus sequence
  Variant (2)..(2): Xaa in position 2 is any amino acid
  Variant (3)..(6): Xaa in position 3 to 6 is any or no amino acid
  Variant (9)..(12): Xaa in position 9 to 12 is any amino acid
  Variant (13)..(14): Xaa in position 13 to 14 is any or no amino acid
  Variant (17)..(17): Xaa in position 17 is any amino acid
  Variant (19)..(29): Xaa in position 19 to 29 is any amino acid
  Variant (30)..(37): Xaa in position 30 to 37 is any or no amino acid
  Variant (39)..(45): Xaa in position 39 to 45 is any amino acid
  Variant (47)..(62): Xaa in position 47 to 62 is any amino acid
  Variant (63)..(78): Xaa in position 63 to 78 is any or no amino acid
  Variant (80)..(81): Xaa in position 80 to 81 is any amino acid
  Variant (83)..(83): Xaa in position 83 is any amino acid
  Variant (84)..(85): Xaa in position 84 to 85 is any or no amino acid
  Variant (90)..(94): Xaa in position 90 to 94 is any amino acid
  Variant (95)..(98): Xaa in position 95 to 98 is any or no amino acid
  Variant (100)..(101): Xaa in position 100 to 101 is any amino acid
  Variant (104)..(105): Xaa in position 104 to 105 is any amino acid
  Variant (107)..(107): Xaa in position 107 is any amino acid
  Variant (109)..(110): Xaa in position 109 to 110 is any amino acid
  Variant (112)..(113): Xaa in position 112 to 113 is any amino acid
  Variant (115)..(115): Xaa in position 115 is any amino acid
  Variant (118)..(120): Xaa in position 118 to 120 is any amino acid
  Variant (122)..(124): Xaa in position 122 to 124 is any amino acid
  Variant (126)..(128): Xaa in position 126 to 128 is any amino acid
  Variant (130)..(130): Xaa in position 130 is any amino acid
  Variant (131)..(132): Xaa in position 131 to 132 is any or no amino acid
  Variant (134)..(135): Xaa in position 134 to 135 is any amino acid
  Variant (136)..(136): Xaa in position 136 is any or no amino acid
  Variant (138)..(138): Xaa in position 138 is any amino acid
  Variant (146)..(147): Xaa in position 146 to 147 is any amino acid
  Variant (149)..(149): Xaa in position 149 is any amino acid
  Variant (151)..(153): Xaa in position 151 to 153 is any amino acid
  Variant (159)..(159): Xaa in position 159 is any amino acid
  Variant (161)..(161): Xaa in position 161 is any amino acid
  Variant (167)..(170): Xaa in position 167 to 170 is any amino acid
  Variant (173)..(173): Xaa in position 173 is any amino acid
  Variant (175)..(175): Xaa in position 175 is any amino acid
  Variant (176)..(176): Xaa in position 176 is any or no amino acid
  Variant (185)..(186): Xaa in position 185 to 186 is any amino acid
  Variant (187)..(187): Xaa in position 187 is any or no amino acid
  Variant (195)..(196): Xaa in position 195 to 196 is any amino acid
  Variant (199)..(199): Xaa in position 199 is any amino acid
  Variant (205)..(206): Xaa in position 205 to 206 is any amino acid
  Variant (211)..(212): Xaa in position 211 to 212 is any amino acid
  Variant (214)..(219): Xaa in position 214 to 219 is any amino acid
  Variant (226)..(227): Xaa in position 226 to 227 is any amino acid
  Variant (230)..(231): Xaa in position 230 to 231 is any amino acid
  Variant (232)..(232): Xaa in position 232 is any or no amino acid
  Variant (234)..(235): Xaa in position 234 to 235 is any amino acid
  Variant (237)..(237): Xaa in position 237 is any amino acid
  Variant (240)..(242): Xaa in position 240 to 242 is any amino acid
  Variant (244)..(245): Xaa in position 244 to 245 is any amino acid
  Variant (246)..(256): Xaa in position 246 to 256 is any or no amino acid
  Variant (258)..(260): Xaa in position 258 to 260 is any amino acid
  Variant (261)..(290): Xaa in position 261 to 290 is any or no amino acid
WXXXXXEAXXXXXXEPXLXXXXXXXXXXXXXXXXXXXLXXXXXXXLXXXXXXXXXXXXXXXXXXXXXXXXXXXXXXXXDXXAXXXRDPAXXXXXXXXXLXXKGXXAXQXXRXXHXLWXXXRXXXAXXXQXXXSXXXFXVDIHPAAXXGXGXXXDHATGXVXGETAVXXXXVSXLXXVTLGGTGKXXXGDRHPKIXXGVXIGAGAXXLGNIXXGXXXXXXAGSVVLXXVPXXXTXXGXPAXXXGXXXXXXXXXXXXXPXXXXXXXXXXXXXXXXXXXXXXXXXXXXXXXXXM

SEQ ID NO: 6487 - protein, 20 aa, Artificial sequence
  protein pattern
  Variant (5)..(5): Xaa in position 5 is Ile, Leu or Val
  Variant (6)..(7): Xaa in position 6 to 7 is any amino acid
  Variant (8)..(8): Xaa in position 8 is Gly, Asn or Ser
  Variant (9)..(9): Xaa in position 9 is Ala, Cys or Val
  Variant (10)..(10): Xaa in position 10 is Leu, Met or Val
  Variant (15)..(15): Xaa in position 15 is Ala, Ser, Thr or Val
  Variant (16)..(16): Xaa in position 16 is any amino acid
  Variant (17)..(17): Xaa in position 17 is Ile, Leu or Val
RHPKXXXXXXIGAGXXXLGN

SEQ ID NO: 6488 - protein, 21 aa, Artificial sequence
  protein pattern
  Variant (3)..(3): Xaa in position 3 is Ala, Gly or Ser
  Variant (4)..(4): Xaa in position 4 is any amino acid
  Variant (5)..(5): Xaa in position 5 is Ala, Gly or Ser
  Variant (6)..(6): Xaa in position 6 is Phe, Ile, Leu or Val
  Variant (7)..(7): Xaa in position 7 is Ile or Val
  Variant (8)..(8): Xaa in position 8 is any amino acid
  Variant (14)..(14): Xaa in position 14 is Ile, Leu or Val
  Variant (15)..(15): Xaa in position 15 is Ala, Asp, Glu or Gly
  Variant (16)..(18): Xaa in position 16 to 18 is any amino acid
  Variant (19)..(19): Xaa in position 19 is Ala, Ser or Thr
  Variant (20)..(20): Xaa in position 20 is Ile, Leu, Met or Val
  Variant (21)..(21): Xaa in position 21 is Leu or Met
DHXXXXXXGETAVXXXXXXXX

SEQ ID NO: 6489 - protein, 19 aa, Artificial sequence
  protein pattern
  Variant (2)..(3): Xaa in position 2 to 3 is any amino acid
  Variant (6)..(6): Xaa in position 6 is Phe or Tyr
  Variant (7)..(7): Xaa in position 7 is any amino acid
  Variant (8)..(8): Xaa in position 8 is Ala or Ser
  Variant (9)..(9): Xaa in position 9 is any amino acid
  Variant (11)..(11): Xaa in position 11 is Ala, Gly, Ser, Thr or Val
  Variant (12)..(12): Xaa in position 12 is any amino acid
  Variant (14)..(14): Xaa in position 14 is any amino acid
  Variant (15)..(15): Xaa in position 15 is Ala, Gly, Ser or Thr
  Variant (16)..(17): Xaa in position 16 to 17 is any amino acid
LXXKGXXXXQXXRXXXXLW

SEQ ID NO: 6490 - protein, 29 aa, Artificial sequence
  protein pattern
  Variant (2)..(6): Xaa in position 2 to 6 is any amino acid
  Variant (7)..(8): Xaa in position 7 to 8 is any or no amino acid
  Variant (10)..(11): Xaa in position 10 to 11 is any or no amino acid
  Variant (15)..(15): Xaa in position 15 is Leu or Val
  Variant (16)..(17): Xaa in position 16 to 17 is any amino acid
  Variant (19)..(22): Xaa in position 19 to 22 is any amino acid
  Variant (24)..(24): Xaa in position 24 is Ala, Ser, Thr or Val
  Variant (25)..(25): Xaa in position 25 is Ala or Val
  Variant (27)..(27): Xaa in position 27 is any amino acid
GXXXXXXXGXXSVVXXXVXXXXTXXGXPA

SEQ ID NO: 6491 - protein, 21 aa, Artificial sequence
  protein pattern
  Variant (2)..(4): Xaa in position 2 to 4 is any amino acid
  Variant (5)..(5): Xaa in position 5 is Ala or Ser
  Variant (6)..(10): Xaa in position 6 to 10 is any amino acid
  Variant (12)..(12): Xaa in position 12 is Phe, Ile or Val
  Variant (13)..(13): Xaa in position 13 is any amino acid
  Variant (15)..(15): Xaa in position 15 is Ala, Cys or Gly
  Variant (17)..(17): Xaa in position 17 is any amino acid
  Variant (18)..(18): Xaa in position 18 is Phe, Ile, Leu, Met or Val
  Variant (20)..(20): Xaa in position 20 is any amino acid
QXXXXXXXXXDXXPXAXXGXG

SEQ ID NO: 6492 - protein, 12 aa, Artificial sequence
  protein pattern
  Variant (2)..(2): Xaa in position 2 is Ile or Leu
  Variant (3)..(3): Xaa in position 3 is any amino acid
  Variant (5)..(7): Xaa in position 5 to 7 is any amino acid
  Variant (12)..(12): Xaa in position 12 is Ala, Cys, Thr or Val
DXXAXXXRDPAX

SEQ ID NO: 6493 - protein, 11 aa, Artificial sequence
  protein pattern
  Variant (9)..(10): Xaa in position 9 to 10 is any amino acid
  Variant (11)..(11): Xaa in position 11 is Glu, Gly or Ser
VTLGGTGKXXX

SEQ ID NO: 6494 - DNA, 381 bp, Arabidopsis thaliana
  CDS (1)..(381)
atggcaccgaaggcagagaagaaaccgtcggagaaagcaccaaaggcagataagaagatcacgaaagaaggaggaagcgagaggaagaagaagactaagaagagcacagagacgtacaagatctacctattcaaggtgttgaaacaagttcatcctgatatcgggatctctggaaaagccatgggaatcatgaacagtttcatcaacgacaccttcgagaaaattgctctggaatcgtcgcgattggctaggtataacaagaaaccgacgatcacgtcccgggaaatccaaaccgccgtaaggctcgtgttgcctggtgaattagcgaagcacgctgtttctgagggtaccaaagccgtcaccaaattcaccagttcttag

SEQ ID NO: 6495 - protein, 126 aa, Arabidopsis thaliana
MAPKAEKKPSEKAPKADKKITKEGGSERKKKTKKSTETYKIYLFKVLKQVHPDIGISGKAMGIMNSFINDTFEKIALESSRLARYNKKPTITSREIQTAVRLVLPGELAKHAVSEGTKAVTKFTSS

SEQ ID NO: 6496 - DNA, 726 bp, Triticum aestivum
  CDS (138)..(557)
gaagaagaaggccaagaagagcgtggagacgtacaagatctacatcttcaaggtgctcaagcaggtgcacaaagctccacctcctccccacaccttcgcacaaagctccacctcctccccacaccgtcgaagcacccatggcgcctaaggcggagaagaagccggcgctggagaagaccccggcggggaagaagcccgcggcggagaagagacccgcggccgggaagacggcgtccaaggagggcggcgagaagaaggggaagaagaaggccaagaagagcgtggagacgtacaagatctacatcttcaaggtgctcaagcaggtgcaccccgacatcggcatctcctccaaggccatgtccatcatgaactccttcatcaacgacatcttcgagaagctcgccggcgagtccgccaagctggcccgctacaacaagaagcccaccatcacgtcaagggagatccagacctccgtccgccttgtcctccccggcgagctcgccaagcacgccgtctccgagggcaccaaggccgtcaccaagttcacctcctcctaggcgtcttcctcgtttcatgagctgatggcggcgttctgtgtgtagttagcagtgcgatgttacaatctctgtaagaattgtgctgcttgttggtttgaagaattagtgttgttgctgtctgaattattgttcaacgtgtgcttgtattattcagttttgattggaaggt

SEQ ID NO: 6497 - protein, 139 aa, Triticum aestivum
MAPKAEKKPALEKTPAGKKPAAEKRPAAGKTASKEGGEKKGKKKAKKSVETYKIYIFKVLKQVHPDIGISSKAMSIMNSFINDIFEKLAGESAKLARYNKKPTITSREIQTSVRLVLPGELAKHAVSEGTKAVTKFTSS

SEQ ID NO: 6498 - DNA, 511 bp, Triticum aestivum
  CDS (63)..(470)
tcttttctccatcccagccaaacttttctctcgccctcgaagcagcagccgccgcagcatccatggcacccaaggccgccgagaagaagccggtggagaagacccccgcgggcaagaagcccaaggcggagaagaaggtgccggcgtccaaggagggcggcgacaagaaggggaagaagaaggccaagaagagcgtggagacgtacaagatctacatcttcaaggtgctcaagcaggtgcaccccgacatcggcatctcctccaaggccatgtccatcatgaactccttcatcaacgacatcttcgagaagctcgccggcgagtccgccaagctcgcgaggtacaacaagaagcccaccatcacgtcccgcgagatccagacctccgtccgccttgtccttcccggcgagctcgccaagcatgccgtctccgagggcaccaaggccgtcaccaagttcacctcgtcctaggctcctcgggcgtagagacttgtgtttatttcttcttcctc

SEQ ID NO: 6499 - protein, 135 aa, Triticum aestivum
MAPKAAEKKPVEKTPAGKKPKAEKKVPASKEGGDKKGKKKAKKSVETYKIYIFKVLKQVHPDIGISSKAMSIMNSFINDIFEKLAGESAKLARYNKKPTITSREIQTSVRLVLPGELAKHAVSEGTKAVTKFTSS

SEQ ID NO: 6500 - DNA, 411 bp, Triticum aestivum
  CDS (1)..(411)
atggcgcccaaggccgagaagaagcccgccgcggagaagaagccggtggagacggagaagaagcccaaggccgagaagcgcgtgcccggcaaggacggcggcgccgacaagaagaagaagaaggccaagaagagcgtcgagacctacaagatctacatcttcaaggtgctcaagcaggtccaccctgacatcggcatctcctccaaggccatgtccatcatgaactccttcatcaacgacatcttcgagaagctcgccggcgagtcggccaagctcgcgcgctacaacaagaagcccaccgtcacctcccgggagatccagaccgccgtgcgcctcgtccttcccggcgagctcgccaagcatgccgtctccgagggcaccaaggccgtcaccaagtttacctcctcttag

SEQ ID NO: 6501 - protein, 136 aa, Triticum aestivum
MAPKAEKKPAAEKKPVETEKKPKAEKRVPGKDGGADKKKKKAKKSVETYKIYIFKVLKQVHPDIGISSKAMSIMNSFINDIFEKLAGESAKLARYNKKPTVTSREIQTAVRLVLPGELAKHAVSEGTKAVTKFTSS

SEQ ID NO: 6502 - DNA, 450 bp, Zea mays
  CDS (1)..(450)
atggcgcccaaggccgagaagaagcccgccgccaagaagcctgcggaggaggagccggcggcggagaaggccacggcggggaagaagcccaaggctgagaagcggctccccgcgggcaagtccgcaggcaaggagggtggcgagaagaaggggaagaagaaggcaaagaagtcggtggagacgtacaagatctacatcttcaaggtgctgaagcaggtgcacccggacattggcatctcgtccaaggccatgtccatcatgaactccttcatcaacgacatcttcgagaagctggcggcggaggcggccaagctggcgcggtacaacaagaagcctaccattacgtcccgcgagatccagacctccgttcgcctcgtcctccccggcgagctcgccaagcacgccgtctccgagggcaccaaagccgtcaccaagttcaccagctcctag

SEQ ID NO: 6503 - protein, 149 aa, Zea mays
MAPKAEKKPAAKKPAEEEPAAEKATAGKKPKAEKRLPAGKSAGKEGGEKKGKKKAKKSVETYKIYIFKVLKQVHPDIGISSKAMSIMNSFINDIFEKLAAEAAKLARYNKKPTITSREIQTSVRLVLPGELAKHAVSEGTKAVTKFTSS

SEQ ID NO: 6504 - DNA, 459 bp, Zea mays
  CDS (1)..(459)
atggcacccaaggcggagaagaagccggcggcgaagaagcccgcagaggaggagcccgcggccccggcggagaaggctcccgctgggaagaagccgaaggcggagaagcggctcccggcgggaaaatccgccggcaaggaaggcggtgttgacaagaaggggcggaagaaggccaagaagagcgtggagacgtacaagatctacatcttcaaggtgctgaagcaggtgcacccggacatcggcatctcctccaaggccatgtccatcatgaactccttcatcaacgacatcttcgagaagctcgccggcgaggcggccaagctcgcccgttacaacaagaagcccaccatcacctcccgggagatccagacctccgtccgcctcgttctacccggcgagctcgccaagcacgccgtctcggagggcaccaaggccgtcaccaagttcacctcgtcctaa

SEQ ID NO: 6505 - protein, 152 aa, Zea mays
MAPKAEKKPAAKKPAEEEPAAPAEKAPAGKKPKAEKRLPAGKSAGKEGGVDKKGRKKAKKSVETYKIYIFKVLKQVHPDIGISSKAMSIMNSFINDIFEKLAGEAAKLARYNKKPTITSREIQTSVRLVLPGELAKHAVSEGTKAVTKFTSS

SEQ ID NO: 6506 - DNA, 462 bp, Oryza sativa
  CDS (1)..(462)
atggcgcccaaggcagagaagaagccggccgcgaagaagcccgcggaggaggagcccgcggcggagaaggccgagaaggcccccgcggggaagaagcccaaggcggagaagcgtctccccgccggcaaggccgagaagggcagcggcgaggggaggaaggcggggcggaagaaggcgaagaagagcgtcgagacctacaagatctacatcttcaaggtgctcaagcaggtccaccccgatatcggcatctcctccaaggccatgtccatcatgaactccttcatcaacgacatcttcgagaagctcgccggggagtccgccaagctcgcccgctacaacaagaagcccaccatcacctcccgcgagatccagacctccgtccgcctcgtcctccccggcgagctcgccaagcacgccgtctccgagggcaccaaggccgtcaccaaattcacctccgcttag

SEQ ID NO: 6507 - protein, 153 aa, Oryza sativa
MAPKAEKKPAAKKPAEEEPAAEKAEKAPAGKKPKAEKRLPAGKAEKGSGEGRKAGRKKAKKSVETYKIYIFKVLKQVHPDIGISSKAMSIMNSFINDIFEKLAGESAKLARYNKKPTITSREIQTSVRLVLPGELAKHAVSEGTKAVTKFTSA

SEQ ID NO: 6508 - DNA, 462 bp, Oryza sativa
  CDS (1)..(462)
atggcgcccaaggcggagaagaagccggccgcgaagaagcccgcggaggaggagcccgcagcggagaaggccgagaaggcccccgcggggaagaagcccaaggcggagaagcgtctccccgccggcaaggccgagaagggcagcggcgaggggaagaaggcggggaggaagaaggcgaagaagagcgtcgagacctacaagatctacatcttcaaggtgctcaagcaggttcaccccgacatcggcatctcctccaaggccatgtccatcatgaactccttcatcaatgacatcttcgagaagctcgccggagagtccgccaagctcgcccgctacaacaagaagcccaccatcacctcccgggagatccagacctccgtccgcctcgtcctccccggcgagctcgccaagcacgccgtctctgagggcaccaaggccgtcactaaattcacctccgcttag

SEQ ID NO: 6509 - protein, 153 aa, Oryza sativa
MAPKAEKKPAAKKPAEEEPAAEKAEKAPAGKKPKAEKRLPAGKAEKGSGEGKKAGRKKAKKSVETYKIYIFKVLKQVHPDIGISSKAMSIMNSFINDIFEKLAGESAKLARYNKKPTITSREIQTSVRLVLPGELAKHAVSEGTKAVTKFTSA

SEQ ID NO: 6510 - DNA, 462 bp, Oryza sativa
  CDS (1)..(462)
atggcgcccaaggcggagaagaagccggcggcgaagaagcccgcggaggaggagcccgcggcggagaaggccgagaaggccctggcggggaagaagcccaaggcggagaagcgtctccccgccggcaaggccgagaagagcagcggcgaggggaagaaggcggggcggaagaaggcgaagaagagcgtcgagacctacaagatctacatcttcaaggtgctcaagcaggtccaccccgacatcggcatctcctccaaggccatgtccatcatgaactccttcatcaacgacatcttcgagaagctcgccggggagtccgccaagctcgcgcgctacaacaagaagcccaccatcacctcacgggagatccagacctccgtccgcctcgtcctccccggcgagctcgccaagcacgccgtctccgagggcaccaaggctgtgaccaagttcacctccgcttag

SEQ ID NO: 6511 - protein, 153 aa, Oryza sativa
MAPKAEKKPAAKKPAEEEPAAEKAEKALAGKKPKAEKRLPAGKAEKSSGEGKKAGRKKAKKSVETYKIYIFKVLKQVHPDIGISSKAMSIMNSFINDIFEKLAGESAKLARYNKKPTITSREIQTSVRLVLPGELAKHAVSEGTKAVTKFTSA

SEQ ID NO: 6512 - DNA, 462 bp, Oryza sativa
  CDS (1)..(462)
atggcgcccaaggcggagaagaagccggcggcgaagaagcccgcggaggaggagcccgcggcggagaaggccgagaaggccccggcggggaagaagcccaaggcggagaagcgcctccccgccggcaagggcgagaagggcagcggcgaggggaagaaggcggggcggaagaaggcgaagaagagcgtcgagacctacaagatctacatcttcaaggtgctcaagcaggtccaccccgacatcggcatctcctccaaggccatgtccatcatgaactccttcatcaatgatatcttcgagaagctcgccggagagtccgccaagctcgcgcgctacaacaagaagcccaccatcacctcccgggagatccagaccgccgtccgcctcgtcctccccggcgagctcgccaagcacgccgtctccgagggcaccaaggccgttaccaagttcacttcctcctag

SEQ ID NO: 6513 - protein, 153 aa, Oryza sativa
MAPKAEKKPAAKKPAEEEPAAEKAEKAPAGKKPKAEKRLPAGKGEKGSGEGKKAGRKKAKKSVETYKIYIFKVLKQVHPDIGISSKAMSIMNSFINDIFEKLAGESAKLARYNKKPTITSREIQTAVRLVLPGELAKHAVSEGTKAVTKFTSS

SEQ ID NO: 6514 - DNA, 462 bp, Oryza sativa
  CDS (1)..(462)
atggcgcccaaggcggagaagaagccggccgcgaagaagcccgcggaggaggagcccgcggcggagaaggccgagaaggccccggcggggaagaagcccaaggcggagaagcgtctccccgccggcaagggcgagaagggcagcggcgaggggaagaaggcggggcggaagaaggggaagaagagcgtcgagacctacaagatctacatcttcaaggtgctcaagcaggtccaccccgacatcggcatctcctccaaggccatgtccatcatgaactccttcatcaacgacatcttcgagaagctcgccgccgaggccgccaagctcgcccgctacaacaagaagcccaccatcacctcccgggagatccagaccgccgtccgcctcgtcctccccggcgagcttgccaagcacgccgtctccgagggcaccaaggccgtcaccaagttcacttcctcttag

SEQ ID NO: 6515 - protein, 153 aa, Oryza sativa
MAPKAEKKPAAKKPAEEEPAAEKAEKAPAGKKPKAEKRLPAGKGEKGSGEGKKAGRKKGKKSVETYKIYIFKVLKQVHPDIGISSKAMSIMNSFINDIFEKLAAEAAKLARYNKKPTITSREIQTAVRLVLPGELAKHAVSEGTKAVTKFTSS

SEQ ID NO: 6516 - DNA, 468 bp, Oryza sativa
  CDS (1)..(468)
atggcgcccaaggcggagaagaagccggccgcgaagaagcccgcggaggaggagcccgcggcggagaaggccgagaaggccccggccgggaagaagcccaaggcggagaagcggctccccgccggcaagggcgagaagggctccggcgaggggaagaaggaccgcgctgggaggaagaaggcgaagaagagcgtcgagacctacaagatctacatcttcaaggtgctcaagcaggtccaccccgacatcggcatctcctccaaggccatgtccatcatgaactccttcatcaacgacatcttcgagaagctcgccgccgaggccgccaagctcgcccgctacaacaagaagcccaccatcacctcccgcgagatccagacctccgtccgcctcgtcctccccggcgagcttgccaagcacgccgtctccgagggcaccaaggctgtgaccaagttcacctccgcttag

SEQ ID NO: 6517 - protein, 155 aa, Oryza sativa
MAPKAEKKPAAKKPAEEEPAAEKAEKAPAGKKPKAEKRLPAGKGEKGSGEGKKDRAGRKKAKKSVETYKIYIFKVLKQVHPDIGISSKAMSIMNSFINDIFEKLAAEAAKLARYNKKPTITSREIQTSVRLVLPGELAKHAVSEGTKAVTKFTSA

SEQ ID NO: 6518 - DNA, 420 bp, Oryza sativa
  CDS (1)..(420)
atggcgcccaaggcggagaagaagcccgcggagaagaagccggtggaggagaaggcggagaagaagcccaaggccgagaagcgggtgccgggcgccaaggagggcggcggcgagaagaaggggaagaagaaggccaagaagagcgtcgaaacttataagatctacattttcaaggtcctcaagcaggtgcatcccgatatcgggatatcgtccaaggccatgtcgatcatgaactcgttcatcaacgatatcttcgagaagctcgcccaggaggccgcccgtctcgcccgctacaacaagaagccgaccatcacctcccgcgagatccagacctcggtgcgcctcgtcctccccggcgagctcgccaagcacgccgtctctgagggcaccaaggccgtcaccaagttcacgtcgtcttaa

SEQ ID NO: 6519 - protein, 139 aa, Oryza sativa
MAPKAEKKPAEKKPVEEKAEKKPKAEKRVPGAKEGGGEKKGKKKAKKSVETYKIYIFKVLKQVHPDIGISSKAMSIMNSFINDIFEKLAQEAARLARYNKKPTITSREIQTSVRLVLPGELAKHAVSEGTKAVTKFTSS

SEQ ID NO: 6520 - DNA, 357 bp, Oryza sativa
  CDS (1)..(357)
atgtcgcaacgcatccacttcctctctcgttgccaattcgagtcttctcaacctctcgatccgggcgtgatggtgccgaaggcggagaagaagccggcagagaagaagccagcagaggagaaggtgcatccagacataggaatctcctccaaggccatgtccatcatgaattccttcgtcaacgacattttcgagaagctcgagcaggaggccgcgaggcttgccaggtacaacaagaagcccacaatcacctcccgcgagatccagacctctgttcgtctcgtcctccccggcgagcttgccaagcacgccgtctccgagggcaccaaggccgtcaccaagttcacctcctcctaa

SEQ ID NO: 6521 - protein, 118 aa, Oryza sativa
MSQRIHFLSRCQFESSQPLDPGVMVPKAEKKPAEKKPAEEKVHPDIGISSKAMSIMNSFVNDIFEKLEQEAARLARYNKKPTITSREIQTSVRLVLPGELAKHAVSEGTKAVTKFTSS

SEQ ID NO: 6522 - DNA, 459 bp, Oryza sativa
  CDS (1)..(459)
atggcgcccaaggcggagaagaagccggcggcgaagaagcccgcggaggaggagcccgcggcggagaaggccccggcggcggggaagaagcccaaggcggagaagcggctccccgcggggaagggcgagaagggcggcgccggcgaggggaagaaggccgggaggaagaaggggaagaagagcgtggagacctacaagatctacatcttcaaggttctcaagcaggtccaccccgacatcggcatctcctccaaggccatgtccatcatgaactccttcatcaacgacatcttcgagaagctcgccgccgaggccgccaagctcgcccgctacaacaagaagcccaccatcacctcccgcgagatccagacctccgtccgcctcgtcctccccggcgagctcgccaagcacgccgtctccgagggcaccaaggccgtcaccaagttcacctccgcttag

SEQ ID NO: 6523 - protein, 152 aa, Oryza sativa
MAPKAEKKPAAKKPAEEEPAAEKAPAAGKKPKAEKRLPAGKGEKGGAGEGKKAGRKKGKKSVETYKIYIFKVLKQVHPDIGISSKAMSIMNSFINDIFEKLAAEAAKLARYNKKPTITSREIQTSVRLVLPGELAKHAVSEGTKAVTKFTSA

SEQ ID NO: 6524 - DNA, 453 bp, Oryza sativa
  CDS (1)..(453)
atggcgcccaaggccgagaagaagcccgcggagaagaagccggcggaggagaaggccggcgagaaggcgcccgcggccgggaagaagcccaaggccgagaagcggctgccggcgtccaagggggagaagggcggcgagggcaagaaggagcgcggcaggaagaaggccaagaagagcgtcgagacctacaagatatacatcttcaaggtgctcaagcaggtgcacccggacatcgggatctcctccaaggccatgtcaatcatgaactcgttcatcaacgacatcttcgagaagctcgccggcgaggccgccaagctcgccaggtacaacaagaagcccaccatcacctccagggagatccagacctccgtccgcctcgtcctccccggcgagctcgccaagcacgccgtctccgagggcaccaaggccgtcaccaagttcaccagctcttag

SEQ ID NO: 6525 - protein, 150 aa, Oryza sativa
MAPKAEKKPAEKKPAEEKAGEKAPAAGKKPKAEKRLPASKGEKGGEGKKERGRKKAKKSVETYKIYIFKVLKQVHPDIGISSKAMSIMNSFINDIFEKLAGEAAKLARYNKKPTITSREIQTSVRLVLPGELAKHAVSEGTKAVTKFTSS

SEQ ID NO: 6526 - DNA, 405 bp, Glycine max
  CDS (1)..(405)
atggcgaaggctgcggagaaaaagcctgcggccgagaaggctccggcggagaaaaagccaaaggcggagaagaaggttccaaaggaaggcagcggcggagagaagaagaagaagaggtcgaagaagagcgtggaaacgtacaagatctacatattcaaggtgctgaagcaggtacatcctgacatcggcatttcgagcaaggccatggggatcatgaacagcttcatcaacgatatattcgagaagcttgcgcaggaagcagcgcgtctcgcgaggtataacaagaagccgaccattacatccagggagatccagaccgctgtcaggttggtgctgcccggggaacttgccaagcacgctgtttcggaaggaaccaaggctgttacaaagttcactagctcttag

SEQ ID NO: 6527 - protein, 134 aa, Glycine max
MAKAAEKKPAAEKAPAEKKPKAEKKVPKEGSGGEKKKKRSKKSVETYKIYIFKVLKQVHPDIGISSKAMGIMNSFINDIFEKLAQEAARLARYNKKPTITSREIQTAVRLVLPGELAKHAVSEGTKAVTKFTSS

SEQ ID NO: 6528 - DNA, 417 bp, Glycine max
  CDS (1)..(417)
atggctcccccaaaggccgagaagaagcccgcggagaaaaagcccgcagagaaggctccggcggagaagaagcccaaggccgagaagaagatatcgaaggaaggaggaagcgagaagaagaagaagagaacaaagaagagcgtggagacctacaagatttacatcttcaaggtgctgaagcaggttcaccccgacatcggaatctcaagcaaggccatggggatcatgaacagtttcataaacgacatcttcgagaagctcgcccaggagtcgtcgcgattggctaggtataacaagaagcctaccattacttccagggagatccaaacggcggtgcgtttggtcctccctggggagttggccaaacacgctgtctctgaaggtaccaaggccgtcaccaagttcaccagctcttga

SEQ ID NO: 6529 - protein, 138 aa, Glycine max
MAPPKAEKKPAEKKPAEKAPAEKKPKAEKKISKEGGSEKKKKRTKKSVETYKIYIFKVLKQVHPDIGISSKAMGIMNSFINDIFEKLAQESSRLARYNKKPTITSREIQTAVRLVLPGELAKHAVSEGTKAVTKFTSS

SEQ ID NO: 6530 - DNA, 402 bp, Glycine max
  CDS (1)..(402)
atggcgaaggctgcggagaagaagccagcggctgagaagtctccggcggagaagaagcctaaggcagagaaaaagattccgaaggaaggcggtggcgagaagaagaagaagaggtcgaagaagagcgtggagacctacaagatctatatcttcaaggtgctgaagcaggtacaccctgacatcggtatttctagcaaggccatggggatcatgaacagcttcatcaacgacatcttcgagaagctcgcgcaggaagcggcgcgtctcgccaggtacaacaagaagcctactattacctccagggagattcagaccgcggtcaggttggtgctgcccggggagcttgccaagcacgccgtttctgaaggaaccaaagccgttaccaagttcactagctcttag

SEQ ID NO: 6531 - protein, 133 aa, Glycine max
MAKAAEKKPAAEKSPAEKKPKAEKKIPKEGGGEKKKKRSKKSVETYKIYIFKVLKQVHPDIGISSKAMGIMNSFINDIFEKLAQEAARLARYNKKPTITSREIQTAVRLVLPGELAKHAVSEGTKAVTKFTSS

SEQ ID NO: 6532 - DNA, 411 bp, Glycine max
  CDS (1)..(411)
atggccaagggagagaagaaaccggcggagaagaagcccgcggagaaggctccggcggagaaaacaaaagccgagaagaagatcccaaaggaacccgcctcgggcgagaagaagaagaagaagagaaacaagaagagcgtggagacgtacaagatctacatattcaaggtgctgaagcaagtgcaccctgacatcgggatctccagcaaagccatggggatcatgaacagcttcatcaacgacatcttcgagaagctcgctcaggaatcttccaggctcgcgcgctacaacaagaagcctaccatcacctctcgcgagatccagaccgccgttcgtcttgttctccccggcgagctcgccaagcacgctgtctccgaaggcaccaaggctgtcacaaagttcactagctaa

SEQ ID NO: 6533 - protein, 136 aa, Glycine max
MAKGEKKPAEKKPAEKAPAEKTKAEKKIPKEPASGEKKKKKRNKKSVETYKIYIFKVLKQVHPDIGISSKAMGIMNSFINDIFEKLAQESSRLARYNKKPTITSREIQTAVRLVLPGELAKHAVSEGTKAVTKFTS

SEQ ID NO: 6534 - DNA, 450 bp, Glycine max
  CDS (1)..(450)
atggcacctaaggcagagaagaagccagcggagaagaagccggtggaggagaagaagtcgacggtgggagacaaggctccggcggagaagaagccgaaggccggaaagaagcttccgaaggagggaggagccggcggagaaggggggaagaagaaaaagaggaacaagaagagcgtggagacatacaagatatacatattcaaggttctgaagcaggtccaccctgacattggtatctcaagcaaggccatgggaatcatgaacagcttcatcaacgacatcttcgagaagcttgctcaggaatcttccagacttgcccgctacaacaagaagcccaccatcacttcaagggagatccagaccgcggtcaggcttgtgctgcccggtgaactggccaagcacgccgtttctgagggtaccaaggccgtcaccaagttcaccagctcttga

SEQ ID NO: 6535 - protein, 149 aa, Glycine max
MAPKAEKKPAEKKPVEEKKSTVGDKAPAEKKPKAGKKLPKEGGAGGEGGKKKKRNKKSVETYKIYIFKVLKQVHPDIGISSKAMGIMNSFINDIFEKLAQESSRLARYNKKPTITSREIQTAVRLVLPGELAKHAVSEGTKAVTKFTSS

SEQ ID NO: 6536 - DNA, 450 bp, Glycine max
  CDS (1)..(450)
atggcaccaaaggcagagaagaagccagcggagaagaagcccgcggaggagaagaagtcgacggtgggagacaaggctccggcggagaagaagccgaaggccggaaagaagcttcctaaggagggaggagccggcggagaaggggggaagaagaagaagaggaacaagaagagcgtggagacatacaagatatacatattcaaggtgctgaagcaggtccaccctgacattggtatctcaagcaaggccatgggaatcatgaacagcttcatcaacgacatcttcgagaagcttgctcaggaatcttccagacttgcccgctacaacaagaagcccaccatcacttcaagggaaatccagaccgcggtcaggcttgtgctgcccggtgaattggccaagcacgccgtttctgagggtaccaaggccgtcaccaagttcaccagctcttga

SEQ ID NO: 6537 - protein, 149 aa, Glycine max
MAPKAEKKPAEKKPAEEKKSTVGDKAPAEKKPKAGKKLPKEGGAGGEGGKKKKRNKKSVETYKIYIFKVLKQVHPDIGISSKAMGIMNSFINDIFEKLAQESSRLARYNKKPTITSREIQTAVRLVLPGELAKHAVSEGTKAVTKFTSS

SEQ ID NO: 6538 - DNA, 432 bp, Glycine max
  CDS (1)..(432)
atggcaccaaaggcggagaagaagcccgcagaggagaagaagtccacggtgggagacaaggctccggcggagaagaagccaaaggccggaaagaagcttccgaaggagggaggcgccggcggagaagggaagaagaagaagaggaacaagaagagcgtggagacatacaagatctacatcttcaaggttctgaagcaggttcaccctgacattggtatctcaagcaaggccatgggaatcatgaacagcttcatcaacgacatcttcgagaagcttgcccaggaatcttctagacttgcccgctacaacaagaaacccaccatcacttcgagggaaattcagaccgcggtcaggcttgtgctgcccggtgaattggctaagcacgccgtctctgagggtaccaaggccgtcaccaagtttactagctcttaa

SEQ ID NO: 6539 - protein, 143 aa, Glycine max
MAPKAEKKPAEEKKSTVGDKAPAEKKPKAGKKLPKEGGAGGEGKKKKRNKKSVETYKIYIFKVLKQVHPDIGISSKAMGIMNSFINDIFEKLAQESSRLARYNKKPTITSREIQTAVRLVLPGELAKHAVSEGTKAVTKFTSS

SEQ ID NO: 6540 - DNA, 447 bp, Glycine max
  CDS (1)..(447)
atggcaccaaaggcagagaagaagccagcagagaagaagcccgcggaggagaagaaatcgacggtgggagacaaggctccggcggagaagaagccaaaggccggaaagaagcttccgaaggagggaggcgccggcggagaagggaagaagaagaagagaaacaagaagagcgtggagacatacaagatctacatcttcaaggttctgaagcaggttcaccctgacattggtatctcaagcaaggccatgggaatcatgaacagcttcatcaacgacatcttcgagaagcttgcccaggaatcttctagacttgcccgctacaacaagaaacccaccatcacttcgagggaaattcagaccgcggtcaggcttgtgctgcccggtgaattggccaagcacgccgtttctgagggtacgaaggctgtcaccaagttcactagctcttga

SEQ ID NO: 6541 - protein, 148 aa, Glycine max
MAPKAEKKPAEKKPAEEKKSTVGDKAPAEKKPKAGKKLPKEGGAGGEGKKKKRNKKSVETYKIYIFKVLKQVHPDIGISSKAMGIMNSFINDIFEKLAQESSRLARYNKKPTITSREIQTAVRLVLPGELAKHAVSEGTKAVTKFTSS

SEQ ID NO: 6542 - DNA, 414 bp, Glycine max
  CDS (1)..(414)
atggccaagggagagaaaaaacctgcagagaagaagcccgcggcggagaaggctccggcggagaaaacaaaagccgagaagaagatcccgaaggacgcagcctccggcgagaagaagaagaagaggacgaagaagagcgtggagacgtacaagatctacatcttcaaggtgctgaagcaggttcaccctgacatcgggatctccagcaaggccatggggatcatgaacagcttcatcaacgacatcttcgagaagctcgctcaagaatcttccagactcgcgcgctacaacaagaagcctaccatcacctctcgcgaaatccagactgcggttcgtcttgtgctccctggtgagctcgccaagcacgctgtctccgaaggcaccaaggctgtaaccaagttcactagctcttga

SEQ ID NO: 6543 - protein, 137 aa, Glycine max
MAKGEKKPAEKKPAAEKAPAEKTKAEKKIPKDAASGEKKKKRTKKSVETYKIYIFKVLKQVHPDIGISSKAMGIMNSFINDIFEKLAQESSRLARYNKKPTITSREIQTAVRLVLPGELAKHAVSEGTKAVTKFTSS

SEQ ID NO: 6544 - DNA, 417 bp, Glycine max
  CDS (1)..(417)
atggctcccgcaaaggcagagaagaagcccgcggagaagaagccggcagagaaggccccagcggagaagaagccgaaggcggagaagaagatatcgaaggaaggaggaagcgagaagaagaagaagagaacaaagaagagcgttgagacctacaagatctacatcttcaaggtgttgaagcaagtgcaccccgacatcgggatctccagcaaggctatggggatcatgaacagtttcataaacgacatcttcgagaagctcgcccaggagtcatcgcgtctcgctaggtacaacaagaagcccaccattacttccagggagatccaaacggcggtgcgtttggtcctccctggggagttggccaagcatgccgtttctgaaggcaccaaggccgtcaccaaattcaccagctcttga

SEQ ID NO: 6545 - protein, 138 aa, Glycine max
MAPAKAEKKPAEKKPAEKAPAEKKPKAEKKISKEGGSEKKKKRTKKSVETYKIYIFKVLKQVHPDIGISSKAMGIMNSFINDIFEKLAQESSRLARYNKKPTITSREIQTAVRLVLPGELAKHAVSEGTKAVTKFTSS

SEQ ID NO: 6546 - DNA, 420 bp, Glycine max
  CDS (1)..(420)
atggctccggcaaaggcagagaagaagccggcggagaagaagccagcggcggagaaggcaccggcggagaagaagccgaaggcggagaagaagatctcgaaggaaggagggagcgagaagaagaagaagcgcacgaagaagagcgtggagacctacaagatctacatcttcaaggtcctcaagcaggttcaccccgacattggtatttccagcaaggccatgggcatcatgaacagcttcatcaacgacatcttcgagaagctcgcccaggaagcgtcgcgtttggctcgctacaacaagaagcccaccatcacctcgagggagatccagaccgccgtgcgtctcgtgctccctggtgaattggccaaacacgccgtttctgaagggaccaaggcggttaccaagtttaccagctcttga

SEQ ID NO: 6547 - protein, 139 aa, Glycine max
MAPAKAEKKPAEKKPAAEKAPAEKKPKAEKKISKEGGSEKKKKRTKKSVETYKIYIFKVLKQVHPDIGISSKAMGIMNSFINDIFEKLAQEASRLARYNKKPTITSREIQTAVRLVLPGELAKHAVSEGTKAVTKFTSS

SEQ ID NO: 6548 - DNA, 746 bp, Zea mays
  CDS (85)..(513)
  misc_feature (655)..(655): n is a, g, c or t
  misc_feature (656)..(656): n is a, g, c or t
  misc_feature (659)..(659): n is a, g, c or t
  misc_feature (660)..(660): n is a, g, c or t
  misc_feature (672)..(672): n is a, g, c or t
  misc_feature (679)..(679): n is a, g, c or t
  misc_feature (682)..(682): n is a, g, c or t
  misc_feature (688)..(688): n is a, g, c or t
  misc_feature (689)..(689): n is a, g, c or t
  misc_feature (690)..(690): n is a, g, c or t
  misc_feature (691)..(691): n is a, g, c or t
  misc_feature (692)..(692): n is a, g, c or t
acctaaagaatccaattccccaccagccccctcgcaccttccggcgaatcaccgcacctctccccggcgaagcagcagcgtccgatggcccccaaggcggagaagaagccggctgccgcggagaagactccggcggccgagaagaccaccgcgggcaagaagcccaaggccgagaagcggccgcccaagtccaaggagggcggcgccgacaagaggaagaagaaggccaagaagagcgtggagacgtacaagatctacatcttcaaggtgctgaagcaggtgcacccggacatcggtatctcctccaaggccatgtccatcatgaactccttcatcaacgacatcttcgagaagctcgccggcgagtccgccaagctcgcccgctacaacaagaagcccaccatcacctccagggagatccagacctccgtccgcctcgtcctcccgggcgagctcgccaagcacgccgtctctgagggcaccaaggccgtcaccaagttcacatcctcttagataggctgttctctgtcttcgtggttgatcgatggttctctgtaatgctcgttagctgttcggaccatgtcgctgtgtaacttgtgctggtgttgtggcaacatactgtttcatcatctcgtgaatcagtaactttgcttannaannaaaaaaaaaaanaaaaaanaanaaaaannnnnttggatggctgattctccaccggtacatcccgtcaccggtaaaaaaacttattc

SEQ ID NO: 6549 - protein, 142 aa, Zea mays
MAPKAEKKPAAAEKTPAAEKTTAGKKPKAEKRPPKSKEGGADKRKKKAKKSVETYKIYIFKVLKQVHPDIGISSKAMSIMNSFINDIFEKLAGESAKLARYNKKPTITSREIQTSVRLVLPGELAKHAVSEGTKAVTKFTSS

SEQ ID NO: 6550 - DNA, 719 bp, Gossypium hirsutum
  CDS (67)..(468)
gacttcatttttctaccggttgtttgtttggttaaaacagatagaaactttcatcattttcttccaatggcaccaaaggccgagaagaagcctgccgagaaaaagcctgtagcagagaaagctccagcttcagtggagaaaaaaatatcaaaggaaggcggggataagaaaaagaaaaagatcaaaaagagcacagagacttacaagatttacattttcaaggtcttgaaacaagttcatcctgatatcggtatctcaagcaaagccatggggattatgaacagtttcatcaatgatatatttgagaaattggctcaggaagcttctagattggccaggtacaataagaagccaacgattacatcgagggagatccaaacggcagtgagattagttttacctggcgaattggcaaaacacgccgtctctgaaggtaccaaggcggttaccaagtttaccagttcttagatttatagactttttgttttgagattttaatcccattgctacgatattaaattatatattatatttcttttgaatatatgttatacttaaatgatgctctaatgtcctagatgcaatagattaaagaatggaacttggcactttttttttccctttaacttcaatgtgttttgatttatcaattatgatgttaaatagctatccattttctgttatgattgtcaattgaacaaattgaaccatcacttgtc

SEQ ID NO: 6551 - protein, 133 aa, Gossypium hirsutum
MAPKAEKKPAEKKPVAEKAPASVEKKISKEGGDKKKKKIKKSTETYKIYIFKVLKQVHPDIGISSKAMGIMNSFINDIFEKLAQEASRLARYNKKPTITSREIQTAVRLVLPGELAKHAVSEGTKAVTKFTSS

SEQ ID NO: 6552 - DNA, 662 bp, Gossypium hirsutum
  CDS (75)..(491)
ccattcctcgagttcttctttcatttctgattccgttctcaaaaaaccctcgttttccccattctttatatcctatggctccaaaggttggtgagaagaagcccgccgagaaaaagccagcggaaaaggctccggcggagaagaggccaaaggcggagaagaagatctcaaaagaaggcggcgcagataagaagaagaagaaggttaagaagagcgtcgagacttacaagatttacatcttcaaggtattgaaacaggttcatcctgatatcgggatctcgagcaaagcgatggggataatgaacagtttcatcaacgatatctttgagaaattggctcaagaagcatcgagattggctaggtataataagaagccgacgattacatctagggagatccaaaccgccgttcgattggttttgcctggtgaattggctaagcatgccgtttctgaaggaacaaaggcggttactaagttcaccagttcttagatttctttttctttttgttttgagattggattctgattagggtttccgatttgggattttagggttttttaaatgatggtttaataatgttcttgagttgtaggctttcggattcaatgatggttgttttgattatacccaatatagatattgaatgatgtttctttccct

SEQ ID NO: 6553 - protein, 138 aa, Gossypium hirsutum
MAPKVGEKKPAEKKPAEKAPAEKRPKAEKKISKEGGADKKKKKVKKSVETYKIYIFKVLKQVHPDIGISSKAMGIMNSFINDIFEKLAQEASRLARYNKKPTITSREIQTAVRLVLPGELAKHAVSEGTKAVTKFTSS

SEQ ID NO: 6554 - DNA, 655 bp, Gossypium hirsutum
  CDS (61)..(504)
gcagaaaatcgcgcaaaatttatcgtcttccactcaaaacaaaccagaagagaatctaccatggcgcccaaagccgagaagaagcctgctgagaagaagccggccgaggagaaaaagactaccgtcgctgagaaatcccttgccgagaagaagccgaaggccggtaagaagcttcccaaagaaggcggcgcggccggagacaagaagaagaagaaggccaagaagagcgtggagacctacaagatctacatcttcaaggtccttaagcaagtccatcctgatatcgggatctcaagcaaggctatggggatcatgaacagtttcatcaacgatatcttcgagaagcttgctcaggaggcttctagactcgcgaggtacaacaagaagccaacgattacttccagggaaatccagaccgcagttaggcttgtacttcccggagagctcgccaaacacgccgtctctgaaggtactaaggcggttaccaagtttactagctcttgaaatttgaccttagggttttttttctctctgtaatttggcggaattcgataaatttaggattagggttttatggaatcttaaattgttgttgttacccttgtgttggttgatgtggttttgttgtaattacaagttgctaatggaatttgga

SEQ ID NO: 6555 - protein, 147 aa, Gossypium hirsutum
MAPKAEKKPAEKKPAEEKKTTVAEKSLAEKKPKAGKKLPKEGGAAGDKKKKKAKKSVETYKIYIFKVLKQVHPDIGISSKAMGIMNSFINDIFEKLAQEASRLARYNKKPTITSREIQTAVRLVLPGELAKHAVSEGTKAVTKFTSS

SEQ ID NO: 6556 - DNA, 698 bp, Gossypium hirsutum
  CDS (66)..(509)
tttcatcttctccaaatcagttttcaaaactctattggctcctaaaccccaaacgaaccctcagaatggcaccaaaagccgagaaaaagccagcagagaagaaaccagcggaggagaagaaaacagtagctgagaaagctccgccggagaagaagccaaaggcaggtaaaaagctaccgaaggaaggcggagcagctgccggagacaaaaagaagaagaggaccaagaagagtaccgaaacctacaagatctacatcttcaaggtccttaaacaagttcatccagatatcggtatctcaagcaaagctatgggcattatgaacagtttcatcaatgacatctttgagaaacttgctcaagaagcttcgagactcgcgaggtacaacaagaaacctactattacttctagggaaatccagaccgctgttaggcttgtacttcccggtgagctagcgaagcatgccgtttctgaagggactaaagctgtgactaagtttacttcgtcttgaagaaggggatttgtacgtttgtctttttagttagggtttgctttaagttgatgtttggagattgtgtattggaagatggatttactcgatcctgatgtgattatatagtagatttaaatggaattatttcacaatttcgcattatttctaggcatttgttcgtttttctaattcaactaatgggagatt

SEQ ID NO: 6557 - protein, 147 aa, Gossypium hirsutum
MAPKAEKKPAEKKPAEEKKTVAEKAPPEKKPKAGKKLPKEGGAAAGDKKKKRTKKSTETYKIYIFKVLKQVHPDIGISSKAMGIMNSFINDIFEKLAQEASRLARYNKKPTITSREIQTAVRLVLPGELAKHAVSEGTKAVTKFTSS

SEQ ID NO: 6558 - DNA, 866 bp, Gossypium hirsutum
  CDS (93)..(536)
cccacgcgtacgcccacgcgcccgcgcacccgcgggtttcagtattctctcattcttttcccgggacccagacaaactctaagaacaagaaaatggcaccaaaagctgagaagaagccagctgagaagaagccagcggaggagaagaagacggtagctgagaaagcccccgctgagaagaagccaaaggcaggcaaaaagcttcccaaggaaggcggagctgcggccggagacaagaagaagaagagggtcaagaagagtactgagacctacaagatctacatcttcaaggtcttgaagcaagttcaccctgatatcggtatctcaagcaaggctatgggaatcatgaacagcttcatcaatgatatctttgaaaagcttgcccaagaatcgtctaggctcgcaaggtacaacaagaagcctaccatcacttccagggaaatccagaccgctgttaggcttgtacttcccggtgagcttgcgaaacacgccgtttctgaagggaccaaggccgttaccaagtttacatcttcttgaaaaatgtgatttgtggttagggttagggttttcattttaaaagtagatcgcgttgtttttctcttccgttgtgaatcattctgctcttctgttatatgattccgtgtgtatcttgaagatggatctgctcgatcctgatttgaacatgttagaattgaatgcaattaaatactaaaatttagcgtattttcttgctttttataatctgtgggggcccgtacccaattgcctttgtggcgattacatcatggcgtgtttaaacgcggaatgtaaacctggttcccactaatgctgtagaatccctagcactgctatacaaaagccacgacg

SEQ ID NO: 6559 - protein, 147 aa, Gossypium hirsutum
MAPKAEKKPAEKKPAEEKKTVAEKAPAEKKPKAGKKLPKEGGAAAGDKKKKRVKKSTETYKIYIFKVLKQVHPDIGISSKAMGIMNSFINDIFEKLAQESSRLARYNKKPTITSREIQTAVRLVLPGELAKHAVSEGTKAVTKFTSS

SEQ ID NO: 6560 - DNA, 595 bp, Gossypium hirsutum
  CDS (43)..(468)
cggtcgcactttcgaatcttcagaatccacaactagtttcaaatggcacccaaagccgagaagaagccagccgagaaaaagccagctgaggagaaaaaggccgagaaggccccagctgagaaaaaaccaagagccgagaagaagctccctaaagaagccggggacaagaagaagaagcgaagcaagaagagcattgaaacctacaagatctacatcttcaaggtgctgaagcaggtccatcctgatatcggcatttccagcaaagccatgggtattatgaacagcttcatcaacgacatcttcgagaagctggctcaagaatcttcgaggctcgcacgctataacaagaagcccaccatcacctcccgtgagattcagactgccgtaagattggtcctgcctggggagttggccaagcatgctgtttcagaagggaccaaggcggttacaaagttcaccagttcttagtttccaaaaatctaaaatacaaaaaaaaaactgggaaatatggttttgttgtaaaattcattagctttttgtaggccttcctggtattcgcggagcttaaatggaaatttaaccatattttgaattt

SEQ ID NO: 6561 - protein, 141 aa, Gossypium hirsutum
MAPKAEKKPAEKKPAEEKKAEKAPAEKKPRAEKKLPKEAGDKKKKRSKKSIETYKIYIFKVLKQVHPDIGISSKAMGIMNSFINDIFEKLAQESSRLARYNKKPTITSREIQTAVRLVLPGELAKHAVSEGTKAVTKFTSS

SEQ ID NO: 6562 - DNA, 447 bp, Populus balsamifera
  CDS (1)..(447)
atggcaccaaaagccgagaagaagcccgccgagaagaagcctgctgaggagaagaagacagtggcagagaaagccccggcagagaagaagccgaaggcagggaagaagcttcccaaagaaggaggcggcgctgctgccggagacaagaagaagaagcgggtgaagaagagcacggagacatacaagatttacatcttcaaggtcctaaaacaagttcatccagacatagggatttccagcaaggctatgggtatcatgaattccttcattaatgatattttcgagaagctagcacaggaatcctccaggttagccaggtacaacaaaaagcccacaattacctcaagggagatccagacggctgtgaggttggtgttgcctggagagttggccaagcatgctgtttccgagggtaccaaggctgttactaagtttacaagctcttga

SEQ ID NO: 6563 - protein, 148 aa, Populus balsamifera
MAPKAEKKPAEKKPAEEKKTVAEKAPAEKKPKAGKKLPKEGGGAAAGDKKKKRVKKSTETYKIYIFKVLKQVHPDIGISSKAMGIMNSFINDIFEKLAQESSRLARYNKKPTITSREIQTAVRLVLPGELAKHAVSEGTKAVTKFTSS

SEQ ID NO: 6564 - DNA, 444 bp, Populus balsamifera
  CDS (1)..(444)
atggcaccaaaagcagagaagaaaccggcggagaagaagccggccgaagagaagaaaacggtggcagagaaagccccagcagagaagaagccgaaggcagggaagaagctcccaaaggaaggaggagcagcagccggagagaagaagaaaaagagggtgaagaagagcacagagacatacaagatctacatctttaaggtgctgaagcaagttcatccagatatagggatctcaagcaaggccatgggcataatgaattcctttattaatgatattttcgagaagcttgcgcaggaatcctcacgacttgctaggtataacaagaagcccacaattacctcgagggaaatccagactgctgtcaggttggttttgcccggagagttggctaaacatgctgtttcagaagggactaaggctgtcaccaagttcaccagttcttga

SEQ ID NO: 6565 - protein, 147 aa, Populus balsamifera
MAPKAEKKPAEKKPAEEKKTVAEKAPAEKKPKAGKKLPKEGGAAAGEKKKKRVKKSTETYKIYIFKVLKQVHPDIGISSKAMGIMNSFINDIFEKLAQESSRLARYNKKPTITSREIQTAVRLVLPGELAKHAVSEGTKAVTKFTSS

SEQ ID NO: 6566 - DNA, 764 bp, Zea mays
  CDS (86)..(532)
attcacaacttcaatccctcttttgctttaccaaattccaatttccaattcaaaaccctaactccgttcgaagcaccaaatcgtgatggcaccaaaggcagagaagaagccagcagagaagaagcccgcggaggagaagaaatcgacggtgggagacaaggctccggcggagaagaagccaaaggccggaaagaagcttccgaaggagggaggcgccggcggagaagggaagaagaagaagagaaacaagaagagcgtggagacatacaagatctacatcttcaaggttctgaagcaggttcaccctgacattggtatctcaagcaaggccatgggaatcatgaacagcttcatcaacgacatcttcgagaagcttgcccaggaatcttctagacttgcccgctacaacaagaaacccaccatcacttcgagggaaattcagaccgcggtcaggcttgtgctgcccggtgaattggccaatcacgccgtttctgagggtacgaaggctgtcaccaagttcactagctcttgaattagctatcttatcgctttccaaagactcttttctgtcccaatttgagattttaatcagtagtagacttttttttttgtttgataggatttgtaattgaaagaatggtcctgggttgatccttttgtgtattgaagtggcaagatgtattgattatataggaacgcagtattgtttagtattatactttcaagaatctccaatcggccattcgttaaaaaaaaaaaaaaaa

SEQ ID NO: 6567 - protein, 148 aa, Zea mays
MAPKAEKKPAEKKPAEEKKSTVGDKAPAEKKPKAGKKLPKEGGAGGEGKKKKRNKKSVETYKIYIFKVLKQVHPDIGISSKAMGIMNSFINDIFEKLAQESSRLARYNKKPTITSREIQTAVRLVLPGELANHAVSEGTKAVTKFTSS

SEQ ID NO: 6568 - DNA, 658 bp, Zea mays
  CDS (68)..(478)
acaccccctcacacctccgatccacaccccacctccccgcaccctaggatcatcatcagcagcacccatggcgcccaaggccgcagagaagaagccggtggagaagaccccggcgggcaagaagcccaaggcggagaagaaggtgccggcgtccaaggagggcggaggcgagaagaaggggaagaagaaggccaagaagagcgtggagacgtacaagatctacatcttcaaggtgctgaagcaggtgcacccagacatcggcatctcctccaaggccatgtccatcatgaactccttcatcaacgacatcttcgagaagctcgccggcgagtccgccaagctcgcgcggtacaacaagaagcccaccatcacgtcgagggagatccagacctccgttcgcctcgtcctccccggcgagcttgccaagcacgccgtctctgagggcaccaaggccgtcaccaagttcacctcctcctaggcgtcttccgatggcagcgttttgtgtgtagttagcagtgcgatggtacaatctctgtaggaattgtgctgcttgttggtctgaagaaatagtaatgtcgccgtctgaattattgctcaacgtgtgcttgtattattcagtttcggttggaaggttcttctgttaaaaaaaaaaaaaaaa

SEQ ID NO: 6569 - protein, 136 aa, Zea mays
MAPKAAEKKPVEKTPAGKKPKAEKKVPASKEGGGEKKGKKKAKKSVETYKIYIFKVLKQVHPDIGISSKAMSIMNSFINDIFEKLAGESAKLARYNKKPTITSREIQTSVRLVLPGELAKHAVSEGTKAVTKFTSS

SEQ ID NO: 6570 - DNA, 643 bp, Zea mays
  CDS (85)..(495)
atcaccgttcctcccacctcccagcgaagccacgcacaccacaccagagcacctctccccgtcgccgccgccgcagcagcatccatggcgcccaaggctgccgagaagaagccggcagagaagacccccgcgggcaagaaacccaaggcggagaagaaggtgccggcgtccaaggagggcgggggcgagaagaaggggaagaagaagtccaagaagagcgtggagacgtacaagatctacatcttcaaggtgctgaagcaggtgcacccggacatcgggatctcctccaaggccatgtccatcatgaactccttcatcaacgacatcttcgagaagctggccggcgagtcggccaagctggcgcggtacaacaagaagcccaccatcacgtcccgggagatccagacctccgtccgcctcgtcctccccggcgagctcgccaagcacgccgtctccgagggcaccaaggccgtcaccaagttcacttccgcctgattcggctgatggatcgatgtcaccctgtagtttcctgttcgtgctctgtcctcttgtaacttgtcctggttgtgtgggatcacatctcatgatccggagaaatagtaacagcgcttatttcagttcttgccgaaaaaaaaaaaaaaaa

SEQ ID NO: 6571 - protein, 136 aa, Zea mays
MAPKAAEKKPAEKTPAGKKPKAEKKVPASKEGGGEKKGKKKSKKSVETYKIYIFKVLKQVHPDIGISSKAMSIMNSFINDIFEKLAGESAKLARYNKKPTITSREIQTSVRLVLPGELAKHAVSEGTKAVTKFTSA

SEQ ID NO: 6572 - DNA, 642 bp, Zea mays
  CDS (81)..(509)
atcaccaaccaccaatccattccccaccagcaccttccggcgaaacacagcacctctccccggcgaagcagcagcgtccaatggcccccaaggcggagaagaagccggctgccgcggagaagaccccggcggccgagaagaccacggccgggaagaagcccaaggccgagaagcggcccccgaagtccaaggagggcggcgctgacaagaagaagaagaaggccaagaagagcgtggagacgtacaagatctacatcttcaaggtgctgaagcaggtgcacccggacatcggcatctcctccaaggccatgtccatcatgaactccttcatcaacgacatcttcgagaagctcgccggcgagtccgccaagctcgcccgctacaacaagaagccaaccatcacgtccagggagatccagacctccgtacgcctcgtcctccccggcgagctcgccaagcacgcagtgtccgagggcaccaaggccgtcaccaagttcacctcctcctagaccacgatggttctctgtaacagtcacctgtttagaccatgtcgtcttgtaacttgcgttggttctgtgggaacacactgtttcattacctcatgaaatggtaatggtgcttctttgaaaaaaaaaaaaaaaa

SEQ ID NO: 6573 - protein, 142 aa, Zea mays
MAPKAEKKPAAAEKTPAAEKTTAGKKPKAEKRPPKSKEGGADKKKKKAKKSVETYKIYIFKVLKQVHPDIGISSKAMSIMNSFINDIFEKLAGESAKLARYNKKPTITSREIQTSVRLVLPGELAKHAVSEGTKAVTKFTSS

SEQ ID NO: 6574 - DNA, 600 bp, Zea mays
  CDS (75)..(488)
aaaccacccaaattcttctcagatctgtacttgtacttgtacttcttctaaaacccagaaagaaaattaaagcaatggctccaaaagcagcagagaagaagccagtagaggagaaagctccggcggagaagaagccgaaggccgggaagaagctgcccaaggaagcaggtgcaggcgttgacatgaagaagaagaagaaatcgaagaagagcgtggagacgtataagatttacatcttcaaggttctgaagcaggttcatccagatgtcggaatctctagtaaagccatggggatcatgaacagtttcatcaatgacatcttcgagaagctcgcccaggaatcgtcaaagcttgcaaggtacaacaagaagccaacaatcacctcgagggagattcagactgctgttaggctcgttcttccaggagagctcgccaaacacgccgtctccgaaggcaccaaggccgtcactaaattcaccagctcttgaacatccaatctaaattaagtttcagttacctttcaatctcagttgtaattagttctatgaatctgtttggaatctaaaatatttgcgttttctcaaaaaaaaaaaaaaaaaa

SEQ ID NO: 6575 - protein, 137 aa, Zea mays
MAPKAAEKKPVEEKAPAEKKPKAGKKLPKEAGAGVDMKKKKKSKKSVETYKIYIFKVLKQVHPDVGISSKAMGIMNSFINDIFEKLAQESSKLARYNKKPTITSREIQTAVRLVLPGELAKHAVSEGTKAVTKFTSS

SEQ ID NO: 6576 - DNA, 603 bp, Zea mays
  CDS (60)..(476)
acagacgcatctttccattaaacaattcaccctctcttcaccaaactcatcgatcgataatggcacccaaggcggcagagaagaaaccggcggagaagaagccagctgagaaatccccggccgagaagcgtccaaaggcggagaagaagatctcaaaagaaggaggaagcgacaagaagaagaagaaggtgaagaagagcgttgagacgtacaagatctacatcttcaaggtcctcaagcaggttcaccccgacatcggaatctcgggtaaagcgatggggatcatgaacagtttcatcaacgacatattcgagaaactggcgcaggaatcatcgaagctcgctaggtacaacaagaagccgaccattacatcgagggagatccagacggcggttaggcttgtattgcccggagaactcgcgaaacacgccgtctctgaggggaccaaggcggttacgaaattcacaagcacttagggatttaaatgtttaggtttaattgttgtttggttgatgaatcgattgtattcggttagtgagatcatttgaatgaacaggtttctttttaatgaataacgattctctatcaaaaaaaaaaaaaaaa

SEQ ID NO: 6577 - protein, 138 aa, Zea mays
MAPKAAEKKPAEKKPAEKSPAEKRPKAEKKISKEGGSDKKKKKVKKSVETYKIYIFKVLKQVHPDIGISGKAMGIMNSFINDIFEKLAQESSKLARYNKKPTITSREIQTAVRLVLPGELAKHAVSEGTKAVTKFTST

SEQ ID NO: 6578 - DNA, 693 bp, Zea mays
  CDS (76)..(498)
acatcgcagcatccgcagtccccccagcccacaccttccaaccaagcaccaagctccaccgccgtcgaagcacccatggcacccaaggcggagaagaagccggcgccggagaagaccccggcggggaagaagcccgcggcggagaagaggcccgcggccgggaagacggcgtccaaggagggcgggggcgagaagaaggggaagaagaaggccaagaagagcgtggagacgtacaagatctacatcttcaaggtgctcaagcaggtgcaccccgacatcggcatctcctccaaggccatgtccatcatgaactccttcatcaacgacatcttcgagaagctcgccggcgagtccgccaagctggcccgctacaacaagaagcccaccatcacgtcgagggagatccagacctccgtccgcctcgtcctccccggcgagctcgccaagcacgccgtctccgagggcaccaaggccgtcaccaagttcacctcttcttaggcttcatccttgtatcatgagttgatggcggtgttctgtgtgtagttagcagtgcgatgttacaatctctgtaagaattgtgctgcttgtgggtctgaagaattagtcaggttgctgtctgaattattgctcaatcgtgtgcttgttttattcagtttcggttggaaggttctaaaaagaaaaaaaaaaaaaaaa

SEQ ID NO: 6579 - protein, 140 aa, Zea mays
MAPKAEKKPAPEKTPAGKKPAAEKRPAAGKTASKEGGGEKKGKKKAKKSVETYKIYIFKVLKQVHPDIGISSKAMSIMNSFINDIFEKLAGESAKLARYNKKPTITSREIQTSVRLVLPGELAKHAVSEGTKAVTKFTSS

SEQ ID NO: 6580 - DNA, 684 bp, Zea mays
  CDS (51)..(479)
accaagcaaaaaaccaaaaccgatctcagattcgtaacttccaatcatcaatggcgcccaaggcagagaagaagcccgcggaggagaaatcgaaagccgagaaggctccggcggagaagaaaccaaaggccgggaagaagctcccgaaggaggccggagcaggcgcaggcggagacaagaagaagaagacgaagaagaagagcgtcgagacgtacaagatctacatcttcaaggtcctgaagcaggttcacccggacatcggaatctcgagcaaggccatggggatcatgaacagcttcatcaacgatatcttcgagaagctcgctggtgaggcctcgaagctcgcgaggtacaacaagaagccaaccatcacttctagggagattcagaccgcggttaggcttgtgcttcctggagagttggcgaaacacgccgtgtcggaagggaccaaggctgtcacgaagttcaccagttcctagactatggggttgaattagagttcctttcttgttttttttcagtattgcaaatttgcaatttcacggttttgtatgtagtgcctattgcttttgttaaatcagttttcatgtccttgtttgtctctaatgttgctgtctgcttttgtggcattcgatcctccctccatagttgataaaggtttgtttgttaaaaaaaaaaaaaaaa

SEQ ID NO: 6581 - protein, 142 aa, Zea mays
MAPKAEKKPAEEKSKAEKAPAEKKPKAGKKLPKEAGAGAGGDKKKKTKKKSVETYKIYIFKVLKQVHPDIGISSKAMGIMNSFINDIFEKLAGEASKLARYNKKPTITSREIQTAVRLVLPGELAKHAVSEGTKAVTKFTSS

SEQ ID NO: 6582 - DNA, 592 bp, Zea mays
  CDS (65)..(481)
aatcacagacgcatctttccattaaacaatttaccctctcttcaccaaactcaatcaatcgataatggcacccaaggcggcagagaagaaaccggcggagaagaagccagccgagaaatcaccggcggagaagcgtccaaaggcggagaagaagatctcgaaggaaggaggaagcgacaagaagaagaagaaatcgaagaagagcgtggagacgtacaagatctacatcttcaaggtcctgaagcaggttcatcccgatatcggaatctcgggtaaagcgatggggatcatgaacagtttcatcaacgacatattcgagaaactggcgcaggaatcatcgaagctcgctaggtacaacaagaagccgacgattacgtcgagggagatccagacggcggttaggcttgtgttgcccggagagctcgcgaaacacgccgtctctgaggggactaaggcggttaccaaattcacaagcacttagggattgaaatgtttaggttttaattgttctttggttgatgaatcgattgtattcaattagtgagatcatttgaatgaacagctttctttttaatgaaaaaaaaaaaaaaaa

SEQ ID NO: 6583 - protein, 138 aa, Zea mays
MAPKAAEKKPAEKKPAEKSPAEKRPKAEKKISKEGGSDKKKKKSKKSVETYKIYIFKVLKQVHPDIGISGKAMGIMNSFINDIFEKLAQESSKLARYNKKPTITSREIQTAVRLVLPGELAKHAVSEGTKAVTKFTST

SEQ ID NO: 6584 - DNA, 641 bp, Saccharomyces cerevisiae
  CDS (51)..(467)
tcctctttcaatctctaaaaagtctaatctctaaaaaaaagtcatcgataatggctcccaaggcggcagagaagaaaccggcggagaagaagccagcagagaaggccccggcggagaagcgaccaaaggcggagaagaagatctcgaaggaagggggaagcgacaagaagaagaagaaggcgaagaagagcgtggagacgtacaagatctacatcttcaaggtcctgaagcaggtccatcccgacatcggaatctcagggaaggcgatggggatcatgaacagtttcatcaacgacatattcgagaaactcgcccaggaatcgtcgaagctcgcgaggtacaacaagaagccgacgattacgtctcgggagatccagacggcggttaggcttgtgttgccaggagagctcgcgaagcacgccgtttctgaagggacgaaggcggttaccaaattcacaagcacttagggtttcttttttttttttatcttgaatctgattcgcatgtttagatataaatgggattctctgtcttgatctttggttctggattgtattcaattagtgatatggttgaatgaacagtttctcgtgttaatgaatttgatgcggtttctcttttgcttgaaaaaaaaaaaaaaa

SEQ ID NO: 6585 - protein, 138 aa, Saccharomyces cerevisiae
MAPKAAEKKPAEKKPAEKAPAEKRPKAEKKISKEGGSDKKKKKAKKSVETYKIYIFKVLKQVHPDIGISGKAMGIMNSFINDIFEKLAQESSKLARYNKKPTITSREIQTAVRLVLPGELAKHAVSEGTKAVTKFTST

SEQ ID NO: 6586 - DNA, 618 bp, Saccharomyces cerevisiae
  CDS (61)..(507)
aatccccaatttcaaaccctaaccctaactttttcaacctccaaattctcaacaaattcaatggcaccaaaggcagagaagaagcccgccgagaagaaaccggcagaggagaagaaaacaccggcggccgagaaagctccggctgagaagaagccaaaggccggaaagaagctcccgaaggaagccggagccggtgcaaccgacaagaagaagaagaggacgaagaagagcgttgagacgtacaagatctacatcttcaaggtgttgaagcaggtgcatccagacatcgggatctcgagcaaagctatggggatcatgaacagttttatcaacgatatttttgagaaacttgctcaggagagttccaggcttgcgaggtacaacaagaagccaaccatcacttcgagggagattcagaccgccgtgagactcgttcttcccggtgaattggctaagcacgccgtgtctgaaggaaccaaggccgtaaccaagtttacaagctcttgaatggtttaggttttgttatggtgttgatgtatggtagggttagatcttcatgtctcgtgatggtttaccgtgttagttgcgtttatgactttttttttcttttttaatttg

SEQ ID NO: 6587 - protein, 148 aa, Saccharomyces cerevisiae
MAPKAEKKPAEKKPAEEKKTPAAEKAPAEKKPKAGKKLPKEAGAGATDKKKKRTKKSVETYKIYIFKVLKQVHPDIGISSKAMGIMNSFINDIFEKLAQESSRLARYNKKPTITSREIQTAVRLVLPGELAKHAVSEGTKAVTKFTSS

SEQ ID NO: 6588 - DNA, 627 bp, Glycine max
  CDS (105)..(518)
  misc_feature (11)..(11): n is a, g, c or t
taccggtccgnattcccgggtcgacccacgaacccgcttcgtttttcagcatttctactctccaaacactcgaattcgcattctcttcactctttccccaatccatggccaagggagagaagaaaccggcggagaagaagcccgcggagaaggctccggcggagaaaacaaaagccgagaagaagatcccaaaggaacccgcctcgggcgagaagaagaagaagaagagaaacaagaagagcgtggagacgtacaagatctacatattcaaggtgctgaagcaagtgcaccctgacatcgggatctccagcaaagccatggggatcatgaacagcttcatcaacgacatcttcgagaagctcgctcaggaatcttccaggctcgcgcgctacaacaagaagcctaccatcacctctcgcgagatccagaccgccgttcgtcttgttctccccggcgagctcgccaagcacgctgtctccgaaggcaccaaggctgtcacaaagttcactagctcatgagtgggtttctgagaatttagggtttattagatgtatattttcaatcttcgcggtgtaacggaacggcatattttgggagcaattgaattttatatttattttctttaaa

SEQ ID NO: 6589 - protein, 137 aa, Glycine max
MAKGEKKPAEKKPAEKAPAEKTKAEKKIPKEPASGEKKKKKRNKKSVETYKIYIFKVLKQVHPDIGISSKAMGIMNSFINDIFEKLAQESSRLARYNKKPTITSREIQTAVRLVLPGELAKHAVSEGTKAVTKFTSS

SEQ ID NO: 6590 - DNA, 650 bp, Glycine max
  CDS (87)..(533)
gattcacaacttcaatccctcttttgctttaccaaattccattttccaattcaaaaccctaactccgttcgaagcaccaaatcgtgatggcaccaaaggcagagaagaagccagcagagaagaagcctgtggaggagaagaaatcgacggtgggagacaaggctccggcggagaagaagccaaaggccggaaagaagcttccgaaggagggaggcgccggcggagaaggtaagaagaagaagagaaacaagaagagcgtggagacatacaagatctacatcttcaaggttctgaagcaggttcaccctgacattggtatctcaagcaaggccatgggaatcatgaacagcttcatcaacgacatcttcgagaagcttgcccaggaatcttctagacttgcccgctacaacaagaaacccaccatcacttcaagggaaattcagaccgcggtcaggcttgtgctgcccggtgaattggccaagcacgccgtttctgagggtaccaaggctgtcaccaagttcactagctcttgaattagctatcttatcgcttttctaagactcttttctgtcccaatttgagattttaatcagtagtagacttttttttgtttgataggatttgtaattgaaagaatggtcttgggttat

SEQ ID NO: 6591 - protein, 148 aa, Glycine max
MAPKAEKKPAEKKPVEEKKSTVGDKAPAEKKPKAGKKLPKEGGAGGEGKKKKRNKKSVETYKIYIFKVLKQVHPDIGISSKAMGIMNSFINDIFEKLAQESSRLARYNKKPTITSREIQTAVRLVLPGELAKHAVSEGTKAVTKFTSS

SEQ ID NO: 6592 - DNA, 534 bp, Oryza sativa Japonica Group
  CDS (1)..(534)
atgtctgaagagcagggtttcacttattgcgctgattatcacgcttaccgcgggaagaagagagcggcatccatggcgcccaaggcggagaagaagccggcggcgaagaagcccgcggaggaggagcccgcggcggagaaggccgagaaggccctggcggggaagaagcccaaggcggagaagcgtctccccgccggcaaggccgagaagagcagcggcgaggggaagaaggcggggcggaagaaggcgaagaagagcgtcgagacctacaagatctacatcttcaaggtgctcaagcaggtccaccccgacatcggcatctcctccaaggccatgtccatcatgaactccttcatcaacgacatcttcgagaagctcgccggggagtccgccaagctcgcgcgctacaacaagaagcccaccatcacctcacgggagatccagacctccgtccgcctcgtcctccccggcgagctcgccaagcacgccgtctccgagggcaccaaggctgtgaccaagttcacctccgcttag

SEQ ID NO: 6593 - protein, 177 aa, Oryza sativa Japonica Group
MSEEQGFTYCADYHAYRGKKRAASMAPKAEKKPAAKKPAEEEPAAEKAEKALAGKKPKAEKRLPAGKAEKSSGEGKKAGRKKAKKSVETYKIYIFKVLKQVHPDIGISSKAMSIMNSFINDIFEKLAGESAKLARYNKKPTITSREIQTSVRLVLPGELAKHAVSEGTKAVTKFTSA

SEQ ID NO: 6594 - DNA, 462 bp, Oryza sativa Japonica Group
  CDS (1)..(462)
atggcgcccaaggcggagaagaagccggccgcgaagaagcccgcggaggaggagcccgcggcagagaaggccgagaaggcccccgcggggaagaagcccaaggcggagaagcgtctccccgccggcaagggcgagaagggcagcggcgaggggaagaaggcggggcggaagaaggggaagaagagcgtcgagacctacaagatctacatcttcaaggtgctcaagcaggttcaccccgacatcggcatctcctccaaggccatgtccatcatgaactccttcatcaacgacatcttcgagaagctcgccggggagtccgccaagctcgcccgctacaacaagaagcccaccatcacctcccgggagattcagacctccgtccgcctcgtcctccccggcgagctcgccaagcacgccgtctccgagggcacgaaggccgtcaccaagtttacttccgcttag

SEQ ID NO: 6595 - protein, 153 aa, Oryza sativa Japonica Group
MAPKAEKKPAAKKPAEEEPAAEKAEKAPAGKKPKAEKRLPAGKGEKGSGEGKKAGRKKGKKSVETYKIYIFKVLKQVHPDIGISSKAMSIMNSFINDIFEKLAGESAKLARYNKKPTITSREIQTSVRLVLPGELAKHAVSEGTKAVTKFTSA

SEQ ID NO: 6596 - DNA, 465 bp, Zea mays
  CDS (1)..(465)
atggcgcccaaggcggagaagaagccggcggcgaagaaggtggcggaggaggagccctcggagaaggcggctccggcggagaaggcccccgcggggaagaagcccaaggcggagaagcggctacctgcgggcaagtccgccggcaaggagggcggggacaagaagggtaggaagaaggcgaagaagagcgtggagacctacaagatctacatcttcaaggtcctgaagcaggttcaccccgacatcggcatctcctccaaggccatgtccatcatgaactccttcatcaacgacatcttcgagaagctcgccgcggaggccgccaagctcgcccggtacaacaagaagcccaccatcacctcccgcgagatccagacctccgtccgcctcgtcctccccggcgagctcgccaagcacgccgtctcggagggtaccaaggccgtcaccaagttcacctcgtcttag

SEQ ID NO: 6597 - protein, 154 aa, Zea mays
MAPKAEKKPAAKKVAEEEPSEKAAPAEKAPAGKKPKAEKRLPAGKSAGKEGGDKKGRKKAKKSVETYKIYIFKVLKQVHPDIGISSKAMSIMNSFINDIFEKLAAEAAKLARYNKKPTITSREIQTSVRLVLPGELAKHAVSEGTKAVTKFTSS

SEQ ID NO: 6598 - DNA, 453 bp, Zea mays
  CDS (1)..(453)
atggcgcccaaggccgagaagaagcccgcggcgaagaagccggcggaggaggagcccgctgccgagaaggcgccggccgggaagaagcccaaggcggagaagcgtgtcccagcaggcaagtccgccggcaaggagggcggcgagggaaagaggggccggaagaagggcaagaagagcgtggagacctacaagatctacatcttcaaggtgctgaagcaggtgcacccggacatcggcatctcctctaaggccatgtccatcatgaactccttcatcaacgacatcttcgagaagctcgccgccgaggccgccaagctcgcgcggtacaacaagaagcccaccatcacctcccgtgagatccagacctccgtgcgcctcgtcctccccggggagctcgccaagcacgccgtctccgagggcaccaaggccgtcaccaagttcacctcgtcctag

SEQ ID NO: 6599 - protein, 150 aa, Zea mays
MAPKAEKKPAAKKPAEEEPAAEKAPAGKKPKAEKRVPAGKSAGKEGGEGKRGRKKGKKSVETYKIYIFKVLKQVHPDIGISSKAMSIMNSFINDIFEKLAAEAAKLARYNKKPTITSREIQTSVRLVLPGELAKHAVSEGTKAVTKFTSS

SEQ ID NO: 6600 - DNA, 456 bp, Zea mays
  CDS (1)..(456)
atggcacccaaggcggagaagaagccggcggccaagaagcccgcggaggaggagcccgcgacagagaaggtggagaaggctccggcggggaagaagcccaaggccgagaagcgcctcccggcgggcaagtccaaggagggcggcgagggcaagaaggggaaaaagaaggcgaagaagtccgtggagacctacaagatctacatcttcaaggtgctgaagcaggtgcaccccgacatcggcatctcgtccaaggccatgtccatcatgaactccttcatcaacgacatcttcgagaagctcgcggccgagtccgccaagctggcgcgctacaacaagaagcccaccatcacctcccgcgagatccagacctcggtgcgcctcgtcctccccggcgagctcgccaagcacgccgtctccgagggcactaaggccgttacgaagttcacctcgtcttag

SEQ ID NO: 6601 - protein, 151 aa, Zea mays
MAPKAEKKPAAKKPAEEEPATEKVEKAPAGKKPKAEKRLPAGKSKEGGEGKKGKKKAKKSVETYKIYIFKVLKQVHPDIGISSKAMSIMNSFINDIFEKLAAESAKLARYNKKPTITSREIQTSVRLVLPGELAKHAVSEGTKAVTKFTSS

SEQ ID NO: 6602 - DNA, 414 bp, Zea mays
  CDS (1)..(414)
atggcgcccaaggccgagaagaagcccgcggagaagaagccgacggaggagaaggccgagaagaagcccagggcggagaagcgcgtgccgggcaaggagggcggcgagaagaaggggaagaagaaggccaagaagagcgtcgagacgtacaagatctacatcttcaaggtgctcaagcaggtgcacccggacattggtatctcgtccaaggccatgtccatcatgaactccttcatcaacgacatcttcgagaagctggctgccgaggccgccaagctcgcccgctacaacaagaagcccaccataacctcccgggagatccagacttcggtgcgcctcgtccttcctggcgagctcgccaagcacgccgtctccgagggcaccaaggccgttaccaagtttacttcctcttag

SEQ ID NO: 6603 - protein, 137 aa, Zea mays
MAPKAEKKPAEKKPTEEKAEKKPRAEKRVPGKEGGEKKGKKKAKKSVETYKIYIFKVLKQVHPDIGISSKAMSIMNSFINDIFEKLAAEAAKLARYNKKPTITSREIQTSVRLVLPGELAKHAVSEGTKAVTKFTSS

SEQ ID NO: 6604 - DNA, 414 bp, Zea mays
  CDS (1)..(414)
atggcgcccaaggccgagaagaagcccgcggagaagaagccggcggaggagaaggccgagaagaagccaagggcggagaagcgcgtgccgagcaaggagggcggcgagaagaagggaaagaagaaggcgaagaagagcgtcgagacgtacaagatctacatcttcaaggtgctcaagcaggtgcacccggacattggcatctcgtccaaggccatgtccatcatgaactccttcatcaacgacatcttcgagaagctcgccgccgaggcagccaagctcgcccgctacaacaagaagcccaccatcacctcccgggagatccagacctcggtgcgcctcgtcctccccggcgagctcgccaagcacgccgtctccgaagggaccaaggcggttaccaagtttacatcctcttag

SEQ ID NO: 6605 - protein, 137 aa, Zea mays
MAPKAEKKPAEKKPAEEKAEKKPRAEKRVPSKEGGEKKGKKKAKKSVETYKIYIFKVLKQVHPDIGISSKAMSIMNSFINDIFEKLAAEAAKLARYNKKPTITSREIQTSVRLVLPGELAKHAVSEGTKAVTKFTSS

SEQ ID NO: 6606 - DNA, 447 bp, Zea mays
  CDS (1)..(447)
atggcgcccaaggcggagaagaagccagcggagaagaagccggcggccgaggagaaggcggagaagacgaccgcagggaagaagcccaaggccgagaagcggctgccctcgtccaagtcctccggcaaggagggcggcgagaagaaggggaagaagaaggccaagaagagcgtggagacctacaagatctacatcttcaaggtgctgaagcaggtgcaccccgacatcggcatatcctccaaggccatgtccatcatgaactccttcatcaacgacatctttgagaagctggccggcgaggccgccaagctggcgcggtacaacaagaagcccaccatcacgtcccgcgagatccagacctccgtgcgcctagtcctccccggagagctcgccaagcacgccgtctccgagggaaccaaggccgtcaccaagttcaccagcaactga

SEQ ID NO: 6607 - protein, 148 aa, Zea mays
MAPKAEKKPAEKKPAAEEKAEKTTAGKKPKAEKRLPSSKSSGKEGGEKKGKKKAKKSVETYKIYIFKVLKQVHPDIGISSKAMSIMNSFINDIFEKLAGEAAKLARYNKKPTITSREIQTSVRLVLPGELAKHAVSEGTKAVTKFTSN

SEQ ID NO: 6608 - DNA, 459 bp, Zea mays
  CDS (1)..(459)
atggcacccaaggcggacaagaagccggcggcgaagaagcctgcagaggagcccgcgacagagaaggcggagaaggctccggcggggaagaagcccaaggccgagaagcgcctcccggcgggcaagtccgccggtaaggagggcggcgagggcaagaaggggaaaaagaaagcgaagaagtccgtggagacctacaagatctacatcttcaaggtgctgaagcaggtgcaccccgacatcggcatctcgtccaaggccatgtccatcatgaactccttcatcaacgacatcttcgagaagctcgcggccgagtccgccaagctggcgcgctataacaagaagcccaccgtcacctcccgcgagatccagacctcggtgcgcctcgtcctccccggcgagcttgccaagcacgccgtctccgagggcaccaaggccgtcaccaagttcacctcttcttaa

SEQ ID NO: 6609 - protein, 152 aa, Zea mays
MAPKADKKPAAKKPAEEPATEKAEKAPAGKKPKAEKRLPAGKSAGKEGGEGKKGKKKAKKSVETYKIYIFKVLKQVHPDIGISSKAMSIMNSFINDIFEKLAAESAKLARYNKKPTVTSREIQTSVRLVLPGELAKHAVSEGTKAVTKFTSS

SEQ ID NO: 6610 - DNA, 375 bp, Bombyx mori
  CDS (1)..(375)
atgccgcctaagacaagtggaaaggccgccaagaaatctggtaaagcccagaaaaatatttcgaagaccgataagaaaaagaagaagcacaagaggaaggaaagttacgccatttacatttacaaagtgctgaagcaggtccatcccgacaccggtatttcgagtaaagccatgtcgatcatgaattcgttcgtgaacgacatcttcgaacgtatcgctgcagaagcttctcgtctcgcccattacaacaagcgttcgacgataacctcgagggaggttcagacttcagtgagattgttgttaccgggtgaactcgccaagcacgcggtcagtgaaggaaccaaagccgtcacgaaatacacgagctccaagtaa

SEQ ID NO: 6611 - protein, 124 aa, Bombyx mori
MPPKTSGKAAKKSGKAQKNISKTDKKKKKHKRKESYAIYIYKVLKQVHPDTGISSKAMSIMNSFVNDIFERIAAEASRLAHYNKRSTITSREVQTSVRLLLPGELAKHAVSEGTKAVTKYTSSK

SEQ ID NO: 6612 - DNA, 396 bp, Saccharomyces cerevisiae
  CDS (1)..(396)
atgtcctctgccgccgaaaagaaaccagcttccaaagctccagctgaaaagaagccagctgccaagaaaacatcaacctccgtcgatggtaagaagagatctaaggttagaaaggagacctattcctcttatatttacaaagttttgaagcaaactcacccagacactggtatttcccagaagtctatgtctattttgaactctttcgttaacgatatctttgaaagaattgctactgaagcttctaaattggccgcttataacaagaaatccactatttctgctagagaaatccaaacagccgttagattgatcttacctggtgaattggctaaacatgccgtctccgaaggtactagggctgttaccaaatactcctcctctactcaagcctaa

SEQ ID NO: 6613 - protein, 131 aa, Saccharomyces cerevisiae
MSSAAEKKPASKAPAEKKPAAKKTSTSVDGKKRSKVRKETYSSYIYKVLKQTHPDTGISQKSMSILNSFVNDIFERIATEASKLAAYNKKSTISAREIQTAVRLILPGELAKHAVSEGTRAVTKYSSSTQA

SEQ ID NO: 6614 - DNA, 396 bp, Saccharomyces cerevisiae
  CDS (1)..(396)
atgtctgctaaagccgaaaagaaaccagcctccaaagccccagctgaaaagaaaccagccgctaaaaagacttccacttccactgatggtaagaagagaagcaaggctagaaaggaaacatactcttcttacatttacaaagttttgaagcaaactcaccctgacactggtatttcccaaaagtccatgtctatcttgaactctttcgttaacgatatctttgaaagaatcgctactgaagcttctaaattggctgcgtataacaagaagtctactatctctgctagagaaattcaaaccgctgttagattgatcttaccaggtgaattggctaagcatgctgtctctgaaggtactagagctgttaccaagtactcttcctctactcaagcataa

SEQ ID NO: 6615 - protein, 131 aa, Saccharomyces cerevisiae
MSAKAEKKPASKAPAEKKPAAKKTSTSTDGKKRSKARKETYSSYIYKVLKQTHPDTGISQKSMSILNSFVNDIFERIATEASKLAAYNKKSTISAREIQTAVRLILPGELAKHAVSEGTRAVTKYSSSTQA

SEQ ID NO: 6616 - DNA, 447 bp, Arabidopsis thaliana
  CDS (1)..(447)
atggcaccaagagccgagaagaagcccgccgagaaaaaaaccgccgctgagagaccggtggaagagaacaaggctgctgaaaaggctccggcggagaagaaacccaaggcggggaagaaattgccaccaaaggaagccggtgacaagaagaagaagcgatctaagaaaaacgtcgaaacctacaagatctacatcttcaaggtgctgaagcaggttcatccagatatcggaatttcaagcaaagccatggggattatgaacagtttcatcaacgacatattcgagaagctagctcaggaatcttcgaaactcgctaggtacaacaagaagccgaccattacatctcgcgagatccagacggctgtgagactcgtcctccccggtgaactcgctaaacacgccgtctctgaaggtaccaaggcggttaccaagtttactagctcttga

SEQ ID NO: 6617 - protein, 148 aa, Arabidopsis thaliana
MAPRAEKKPAEKKTAAERPVEENKAAEKAPAEKKPKAGKKLPPKEAGDKKKKRSKKNVETYKIYIFKVLKQVHPDIGISSKAMGIMNSFINDIFEKLAQESSKLARYNKKPTITSREIQTAVRLVLPGELAKHAVSEGTKAVTKFTSS

SEQ ID NO: 6618 - DNA, 456 bp, Arabidopsis thaliana
  CDS (1)..(456)
atggcaccaaaagccggaaagaaaccagcagagaaaaagcccgcagagaaagctccagcagaagaagagaaagtagccgaaaaagcaccagcagagaagaaaccaaaagccggaaaaaaactaccaaaagaagcagtcaccggaggagtcgagaagaagaagaaacgagtcaagaaaagcacagagacatacaagatctacatcttcaaggtgttgaaacaagttcatccagatattggaatctcaagtaaagctatggggattatgaacagttttatcaatgatatattcgagaaacttgcgcaagaagcttcaaaattagctaggtataataagaaacctacgattacttctagggagattcagacagctgttagactagtgttacctggtgaacttgctaagcatgctgtttctgaaggaactaaggctgttactaagtttactagctcttag

SEQ ID NO: 6619 - protein, 151 aa, Arabidopsis thaliana
MAPKAGKKPAEKKPAEKAPAEEEKVAEKAPAEKKPKAGKKLPKEAVTGGVEKKKKRVKKSTETYKIYIFKVLKQVHPDIGISSKAMGIMNSFINDIFEKLAQEASKLARYNKKPTITSREIQTAVRLVLPGELAKHAVSEGTKAVTKFTSS

SEQ ID NO: 6620 - DNA, 417 bp, Arabidopsis thaliana
  CDS (1)..(417)
atggcgccgaaagcagcggagaagaaaccggcagagaagaaaccagccgggaaagctccggcggagaaactcccaaaggcggagaagaaaatcagcaaagacgccggaggaagcgagaagaagaagaagaaatcgaagaagagcgtcgagacttacaagatctacatcttcaaggttctgaaacaagttcatccagatgttggaatctctgggaaagctatggggattatgaacagtttcatcaatgacatcttcgagaaacttgctcaggaatcgtcaaagctcgctaggtacaataagaagccgacgattacatcgagggagattcaaaccgctgtgagacttgtgttgcctggagaactcgctaaacatgcggtttctgaaggcacgaaggcggttaccaaattcaccagttag

SEQ ID NO: 6621 - protein, 138 aa, Arabidopsis thaliana
MAPKAAEKKPAEKKPAGKAPAEKLPKAEKKISKDAGGSEKKKKKSKKSVETYKIYIFKVLKQVHPDVGISGKAMGIMNSFINDIFEKLAQESSKLARYNKKPTITSREIQTAVRLVLPGELAKHAVSEGTKAVTKFTS

SEQ ID NO: 6622 - DNA, 453 bp, Arabidopsis thaliana
  CDS (1)..(453)
atggcgccgagagcagagaagaagcccgcggagaagaaaccagccgccgagaaaccagtagaggagaaatcaaaagccgagaaagctccggcggagaagaaaccaaaagccggcaagaaactcccgaaggaagccggggccggcggcgataagaagaagaagatgaagaagaagagtgtggaaacttacaagatctacatcttcaaggttctgaaacaagttcatccagatattggtatttcaagcaaggctatgggtattatgaacagtttcatcaacgacatcttcgagaaattggcatcggaatcttcaaagctcgctaggtataacaagaagccgacgattacttctcgggagattcagactgctgttagactcgttcttcctggtgagctcgctaaacacgctgtttctgaaggaaccaaggctgttaccaaattcacaagctcttga

SEQ ID NO: 6623 - protein, 150 aa, Arabidopsis thaliana
MAPRAEKKPAEKKPAAEKPVEEKSKAEKAPAEKKPKAGKKLPKEAGAGGDKKKKMKKKSVETYKIYIFKVLKQVHPDIGISSKAMGIMNSFINDIFEKLASESSKLARYNKKPTITSREIQTAVRLVLPGELAKHAVSEGTKAVTKFTSS

SEQ ID NO: 6624 - DNA, 438 bp, Arabidopsis thaliana
  CDS (1)..(438)
atggcaccaaaggcagagaagaagccggcagagaagaaaccagtagaggagaaatcaaaagccgagaaagctcctgcagagaagaaaccaaaagccggcaagaaactcccgaaggaagccggtgccggcggcgataagaagaagaagatgaagaagaagagtgttgagacgtacaagatctacatcttcaaggttctgaaacaagttcatccagatattggtatttcaagcaaagctatggggattatgaacagtttcatcaacgacatctttgagaaattggcatcggaatcgtcgaagctcgcgaggtataataagaagccgacgattacttctcgggagattcagactgctgttagacttgttcttcctggtgagcttgcgaaacatgctgtttctgaaggaactaaggcggtgactaagtttactagctcttga

SEQ ID NO: 6625 - protein, 145 aa, Arabidopsis thaliana
MAPKAEKKPAEKKPVEEKSKAEKAPAEKKPKAGKKLPKEAGAGGDKKKKMKKKSVETYKIYIFKVLKQVHPDIGISSKAMGIMNSFINDIFEKLASESSKLARYNKKPTITSREIQTAVRLVLPGELAKHAVSEGTKAVTKFTSS

SEQ ID NO: 6626 - DNA, 417 bp, Arabidopsis thaliana
  CDS (1)..(417)
atggctccgaaagcggcagagaagaaaccggctgggaagaagccagcagaaaaagctccggcagagaaattaccaaaggcggagaagaagatcaccaaggaaggtggaagcgaaaagaagaagaagaaatcgaagaagaacatcgagacgtacaagatctacatcttcaaggttctgaaacaagttcatcctgatatcggaatctccgggaaagcgatggggatcatgaacagtttcatcaacgacatcttcgagaaactagctcaggaatcatcgcgattggctaggtacaacaagaaaccgacgatcacttctcgggaaattcagacggcggtgagacttgtgttgcctggagagctctcgaaacacgctgtttctgaaggcactaaggcggttactaaattcactagctcgtag

SEQ ID NO: 6627 - protein, 138 aa, Arabidopsis thaliana
MAPKAAEKKPAGKKPAEKAPAEKLPKAEKKITKEGGSEKKKKKSKKNIETYKIYIFKVLKQVHPDIGISGKAMGIMNSFINDIFEKLAQESSRLARYNKKPTITSREIQTAVRLVLPGELSKHAVSEGTKAVTKFTSS

SEQ ID NO: 6628 - DNA, 399 bp, Arabidopsis thaliana
  CDS (1)..(399)
atggcgccgaaggcagagaagaaaccggcggagaaagcaccagcaccaaaggcggagaagaagatcgcgaaagaaggaggaacgagcgagattgtcaagaagaagaagaagacgaagaagagcacagagacgtacaagatctacattttcaaggtattgaaacaggttcatccagatattggaatctctggtaaagcgatgggaatcatgaacagtttcatcaacgacattttcgagaaactcgctcaggaatcgtctcgtctcgctcgttacaataagaaaccgacgatcacgtctcgtgaaatccaaaccgccgtgagacttgttctgcctggtgaattggctaagcatgccgtctctgaaggaaccaaagctgtcaccaaattcacaagctcttaa

SEQ ID NO: 6629 - protein, 132 aa, Arabidopsis thaliana
MAPKAEKKPAEKAPAPKAEKKIAKEGGTSEIVKKKKKTKKSTETYKIYIFKVLKQVHPDIGISGKAMGIMNSFINDIFEKLAQESSRLARYNKKPTITSREIQTAVRLVLPGELAKHAVSEGTKAVTKFTSS

SEQ ID NO: 6630 - DNA, 438 bp, Arabidopsis thaliana
  CDS (1)..(438)
atggcgaaggcagataagaaaccagcggagaagaaaccggcagagaaaactccggcagccgaaccagcagcagcggcagagaagaaaccaaaagccggaaagaaactcccgaaggaaccagccggcgccggagacaagaagaagaagagatcaaagaagaacgttgagacatacaagatctacatcttcaaggtgttgaagcaagttcatccagatatcggaatctccagcaaagccatgggaatcatgaacagtttcatcaatgatatctttgagaaacttgctggtgagtcttcgaagcttgcgaggtacaacaagaagccgacgattacttctagggagattcagactgcggtgagacttgtgttgcctggagagttggcgaaacatgctgtttctgaagggactaaggcggttacgaagtttacgagttcttag

SEQ ID NO: 6631 - protein, 145 aa, Arabidopsis thaliana
MAKADKKPAEKKPAEKTPAAEPAAAAEKKPKAGKKLPKEPAGAGDKKKKRSKKNVETYKIYIFKVLKQVHPDIGISSKAMGIMNSFINDIFEKLAGESSKLARYNKKPTITSREIQTAVRLVLPGELAKHAVSEGTKAVTKFTSS

SEQ ID NO: 6632 - DNA, 453 bp, Arabidopsis thaliana
  CDS (1)..(453)
atggcgccgaaagcagagaagaagcccgctgagaagaaaccagcttccgagaagccggtggaggagaaatcaaaagccgagaaagctccggcggagaagaaaccaaaggccggaaagaagctcccgaaggaagctggtgccggaggcgacaagaagaaaaagatgaagaagaagagtgtcgagacttacaagatctacatcttcaaggtgcttaagcaagttcatcccgatatcggaatctccagcaaagcgatggggatcatgaacagtttcattaacgatatcttcgagaagcttgctcaagaggcgtcgaagcttgcgaggtacaataagaaacctacgatcacttctcgggagattcagactgctgtgagattggtgcttcctggagagttggcgaagcatgccgtttctgaggggactaaagccgtcacgaaattcaccagctcttga

SEQ ID NO: 6633 - protein, 150 aa, Arabidopsis thaliana
MAPKAEKKPAEKKPASEKPVEEKSKAEKAPAEKKPKAGKKLPKEAGAGGDKKKKMKKKSVETYKIYIFKVLKQVHPDIGISSKAMGIMNSFINDIFEKLAQEASKLARYNKKPTITSREIQTAVRLVLPGELAKHAVSEGTKAVTKFTSS

SEQ ID NO: 6634 - DNA, 369 bp, Caenorhabditis elegans
  CDS (1)..(369)
atgccaccaaagccatctgcaaagggagccaagaaggccgccaagaccgtcaccaagccaaaggacggaaagaagagacgtcatgcccgtaaggagtcatactctgtctacatctaccgtgtcctcaagcaggttcacccagatactggagtctcctcaaaggctatgtccatcatgaactctttcgtcaatgacgtcttcgagcgtatcgccgctgaagcatctcgtcttgctcactacaacaagcgttctaccatctcatcccgcgaaattcaaaccgctgttcgtttgattcttccaggagagcttgccaagcacgccgtgtctgagggaaccaaggccgttaccaagtacacttccagcaagtaa

SEQ ID NO: 6635 - protein, 122 aa, Caenorhabditis elegans
MPPKPSAKGAKKAAKTVTKPKDGKKRRHARKESYSVYIYRVLKQVHPDTGVSSKAMSIMNSFVNDVFERIAAEASRLAHYNKRSTISSREIQTAVRLILPGELAKHAVSEGTKAVTKYTSSK

SEQ ID NO: 6636 - DNA, 372 bp, Caenorhabditis elegans
  CDS (1)..(372)
atgccaccaaagccatctgccaagggagccaagaaggccgccaagaccgtcgttgccaagccaaaggacggaaagaagagacgtcatgcccgcaaggaatcgtactccgtctacatctaccgtgttctcaagcaagttcacccagacaccggagtctcctccaaggccatgtctatcatgaactccttcgtcaatgatgtattcgaacgcatcgcttcggaagcttcccgtcttgctcattacaacaaacgctcaacgatctcatcccgcgaaattcaaaccgctgtccgtttgattctcccaggagaacttgccaagcacgccgtgtctgagggaaccaaggccgtcaccaagtacacttccagcaagtaa

SEQ ID NO: 6637 - protein, 123 aa, Caenorhabditis elegans
MPPKPSAKGAKKAAKTVVAKPKDGKKRRHARKESYSVYIYRVLKQVHPDTGVSSKAMSIMNSFVNDVFERIASEASRLAHYNKRSTISSREIQTAVRLILPGELAKHAVSEGTKAVTKYTSSK

SEQ ID NO: 6638 - DNA, 426 bp, Caenorhabditis elegans
  CDS (1)..(426)
atggccaacaacccattccttacacttgtccaacgaccagtccaatcaatcgaaatggccccaccaaagccgtctgctaaaggagcaaagaaagccgccaagaccgtcaccaagccaaaggacggaaagaagagacgtcatgcccgtaaagaatcctactccgtgtacatctaccgtgtgctcaagcaggttcatccagacactggagtctcttccaaggctatgtccatcatgaactctttcgtcaacgacgtcttcgagcgtatcgctgctgaggcatctcgtcttgctcactacaacaagagatccaccatctcttctcgcgaaattcaaactgccgtccgtttgattcttccaggagagcttgccaagcacgccgtctctgagggaaccaaggctgtcaccaagtacacctctagcaagtaa

SEQ ID NO: 6639 - protein, 141 aa, Caenorhabditis elegans
MANNPFLTLVQRPVQSIEMAPPKPSAKGAKKAAKTVTKPKDGKKRRHARKESYSVYIYRVLKQVHPDTGVSSKAMSIMNSFVNDVFERIAAEASRLAHYNKRSTISSREIQTAVRLILPGELAKHAVSEGTKAVTKYTSSK

SEQ ID NO: 6640 - DNA, 372 bp, Caenorhabditis elegans
  CDS (1)..(372)
atggccccaccaaagccgtctgctaaaggagcaaagaaagccgccaagaccgtcaccaagccaaaggacggaaagaagagacgtcatgcccgtaaagaatcctactccgtgtacatctaccgtgtgctcaagcaggttcatccagacactggagtctcttccaaggctatgtccatcatgaactctttcgtcaacgacgtcttcgagcgtatcgctgctgaggcatctcgtcttgctcactacaacaagagatccaccatctcttctcgcgaaattcaaactgccgtccgtttgattcttccaggagagcttgccaagcacgccgtctctgagggaaccaaggctgtcaccaagtacacctctagcaagtaa

SEQ ID NO: 6641 - protein, 123 aa, Caenorhabditis elegans
MAPPKPSAKGAKKAAKTVTKPKDGKKRRHARKESYSVYIYRVLKQVHPDTGVSSKAMSIMNSFVNDVFERIAAEASRLAHYNKRSTISSREIQTAVRLILPGELAKHAVSEGTKAVTKYTSSK

SEQ ID NO: 6642 - DNA, 372 bp, Caenorhabditis elegans
  CDS (1)..(372)
atggccccaccaaaaccatcagctaaaggagccaaaaaggctgctaagaccgtcagcaagccaaaagacggaaagaaaagaaagcatgctcgtaaggaatcctactcggtctacatctaccgtgttttaaagcaggttcacccagacaccggtgtgtcatccaaggctatgtcgatcatgaattcgtttgtcaacgatgtcttcgagagaattgcttcggaagcatctcgtctggcccactacaacaagagatccaccatctcttctcgcgaaatccaaaccgctgtccgtctcattcttcctggagaacttgcaaagcatgctgtttcagaaggaaccaaggctgtcaccaagtacacttccagtaaataa

SEQ ID NO: 6643 - protein, 123 aa, Caenorhabditis elegans
MAPPKPSAKGAKKAAKTVSKPKDGKKRKHARKESYSVYIYRVLKQVHPDTGVSSKAMSIMNSFVNDVFERIASEASRLAHYNKRSTISSREIQTAVRLILPGELAKHAVSEGTKAVTKYTSSK

SEQ ID NO: 6644 - DNA, 426 bp, Caenorhabditis elegans
  CDS (1)..(426)
atggccatcaacccattctttacacttgtccaacgaccagtccaatcaatcgaaatggccccaccaaagccgtctgctaaaggagcaaagaaagccgccaagaccgtcaccaagccaaaggacggaaagaagagacgtcatgcccgtaaagaatcctactctgtgtacatctaccgtgtactcaagcaggttcatccagacactggagtctcttccaaggctatgtctatcatgaactctttcgtcaacgacgtcttcgagcgtatcgctgctgaggcatctcgtcttgctcactacaacaagagatccaccatctcttctcgcgaaattcaaactgccgtccgtttgattctgccaggagagcttgccaagcacgccgtctctgagggaaccaaggctgtcaccaagtacacctccagcaagtaa

SEQ ID NO: 6645 - protein, 141 aa, Caenorhabditis elegans
MAINPFFTLVQRPVQSIEMAPPKPSAKGAKKAAKTVTKPKDGKKRRHARKESYSVYIYRVLKQVHPDTGVSSKAMSIMNSFVNDVFERIAAEASRLAHYNKRSTISSREIQTAVRLILPGELAKHAVSEGTKAVTKYTSSK

SEQ ID NO: 6646 - DNA, 381 bp, Schizosaccharomyces pombe
  CDS (1)..(381)
atgtctgctgctgaaaagaaacccgcttccaaggctcccgccggtaaggctcctagggataccatgaagtctgctgataagaagcgtggtaaaaacagaaaggaaacttattcatcctatatttacaaggtgttgaagcaagttcaccctgatactggtatttccaaccaagccatgcgtatcttgaactctttcgtcaacgatatttttgagcgtattgccactgaggcttccaagcttgctgcttacaacaagaagtccactatttcttcccgtgaaatccagactgctgttcgtttgattcttcccggtgagttagccaagcacgccgttaccgaaggtaccaaatccgtcaccaagtattcttcttctgctcagtaa

SEQ ID NO: 6647 - protein, 126 aa, Schizosaccharomyces pombe
MSAAEKKPASKAPAGKAPRDTMKSADKKRGKNRKETYSSYIYKVLKQVHPDTGISNQAMRILNSFVNDIFERIATEASKLAAYNKKSTISSREIQTAVRLILPGELAKHAVTEGTKSVTKYSSSAQ

SEQ ID NO: 6648 - DNA, 384 bp, Ashbya gossypii ATCC 10895
  CDS (1)..(384)
atggcaccaaaggctgagaagaaacctgcttccaaggccccagcggcaaagaagaccactgcttctaccgacgcttctaagaagcggacgaagactagaaaggagacctactcctcttacatttacaaggttcttaagcagactcacccagatactggtatctcgcagaagtctatgtccattttgaactcgtttgtgaacgatatctttgagagaatcgcgtctgaggcatccaagcttgcggcctacaacaagaagtctacgatctctgctagagaaatccagactgctgtcagattgatcttgcccggtgagctagccaagcacgccgtgtctgagggtaccagagctgttaccaagtactcgtcttctacccaagcctga

SEQ ID NO: 6649 - protein, 127 aa, Ashbya gossypii ATCC 10895
MAPKAEKKPASKAPAAKKTTASTDASKKRTKTRKETYSSYIYKVLKQTHPDTGISQKSMSILNSFVNDIFERIASEASKLAAYNKKSTISAREIQTAVRLILPGELAKHAVSEGTRAVTKYSSSTQA

SEQ ID NO: 6650 - DNA, 399 bp, Ashbya gossypii ATCC 10895
  CDS (1)..(399)
atgtcgtccaaagcatccaaggcccctgcctccaaggcccccgccgagaagaaacccgccgccaagaagacgtcgtcctccgtggacgcgtccaagaagcgcaccaagaccagaaaggagacctactcctcgtacatctacaaggtcctgaagcagacccaccccgacaccggtatctcccagaagtccatgtccattctgaactccttcgtcaacgacatctttgagcgcattgcctccgaggcctccaagctggccgcgtacaacaagaagtctaccatctccgcgcgtgagatccagactgccgtgcgtctgatcctaccgggtgagctggccaagcacgcggtctccgagggcacgcgcgccgtcaccaagtactcgtcttccacgcaggcttga

SEQ ID NO: 6651 - protein, 132 aa, Ashbya gossypii ATCC 10895
MSSKASKAPASKAPAEKKPAAKKTSSSVDASKKRTKTRKETYSSYIYKVLKQTHPDTGISQKSMSILNSFVNDIFERIASEASKLAAYNKKSTISAREIQTAVRLILPGELAKHAVSEGTRAVTKYSSSTQA

SEQ ID NO: 6652 - DNA, 375 bp, Strongylocentrotus purpuratus
  CDS (1)..(375)
  misc_feature (67)..(67): n is a, g, c or t
  misc_feature (191)..(191): n is a, g, c or t
  misc_feature (192)..(192): n is a, g, c or t
  misc_feature (195)..(195): y is t or c
  misc_feature (196)..(196): r is g or a
  misc_feature (257)..(257): y is t or c
  misc_feature (258)..(258): r is g or a
  misc_feature (261)..(261): n is a, g, c or t
  misc_feature (262)..(262): n is a, g, c or t
atggctccaacagctcaagttgctaagaaaggctccaagaaggcagtcaaaggcaccaagacggccngcggtggcaagaagaggaacaggaaaaggaaggagagttatggaatctacatctacaaagtcctcaagcaggttcatccagataccggcatctccagtcgggccatggtcatcatgaacagctnngtyracgacatcttcgagcgaattgccggcgaatcttcccgcctcgctcagtacaacaaaaagtyracnntcagcagtcgcgagattcagaccgccgtccgcctcattctccccggagagctggcaaagcacgctgtgagcgagggtaccaaggcagtgacgaaatacactacctccaagtag

SEQ ID NO: 6653 - protein, 124 aa, Strongylocentrotus purpuratus
  misc_feature (23)..(23): The Xaa at location 23 stands for Arg, Cys, Gly, or Ser.
  misc_feature (64)..(64): The Xaa at location 64 stands for Stop, Cys, Leu, Phe, Ser, Trp, or Tyr.
  misc_feature (86)..(86): The Xaa at location 86 stands for Leu, or Ser.
  misc_feature (88)..(88): The Xaa at location 88 stands for Ile, Leu, Phe, or Val.
MAPTAQVAKKGSKKAVKGTKTAXGGKKRNRKRKESYGIYIYKVLKQVHPDTGISSRAMVIMNSXVBDIFERIAGESSRLAQYNKKXTXSSREIQTAVRLILPGELAKHAVSEGTKAVTKYTTSK

SEQ ID NO: 6654 - DNA, 372 bp, Strongylocentrotus purpuratus
  CDS (1)..(372)
atgcctgcgaaagcacaaccagctggaaagaagggatccaagaaggctaaggcccccagacctagcgggggcaagaagaggcgaagacgccgaaaggaaagctacggaatctacatctacaaggtgctgaagcaggttcaccctgacactggcatctccagccgtgccatgtccatcatgaacagtttcgtcaacgatgtcttcgagcgcatcgccgccgaggcttcccgtcttgcccactacaacaagaagtccaccatcaccagtcgtgaggtccagaccgtcgtcagactcctcctccccggagagctggccaagcacgccgtctctgagggcaccaaggctgtcaccaagtacaccacctccaagtaa

SEQ ID NO: 6655 - protein, 123 aa, Strongylocentrotus purpuratus
MPAKAQPAGKKGSKKAKAPRPSGGKKRRRRRKESYGIYIYKVLKQVHPDTGISSRAMSIMNSFVNDVFERIAAEASRLAHYNKKSTITSREVQTVVRLLLPGELAKHAVSEGTKAVTKYTTSK

SEQ ID NO: 6656 - DNA, 372 bp, Strongylocentrotus purpuratus
  CDS (1)..(372)
  misc_feature (301)..(301): n is a, g, c or t
atgcctgccaaagcacaagccgctggaaagaagggatcgaagaaggctaaggcccccaagcctagcggagacaagaagaggagacgaaagaggaaggaaagctacggaatctacatctacaaggttctgaagcaggttcaccccgacactggtatctccagccgtgccatgtccatcatgaacagcttcgtcaacgatgtcttcgagcgcatcgccgccgaggcttcccgccttgcccactacaacaagaagtccaccatcaccagtcgtgaggtccagaccgctgtcagactcctcctcnccggagagctggccaagcatgccgtctctgagggcaccaaggctgtcaccaagtacaccacctccaagtaa

SEQ ID NO: 6657 - protein, 123 aa, Strongylocentrotus purpuratus
  misc_feature (101)..(101): The Xaa at location 101 stands for Ala, Pro, Ser, or Thr.
MPAKAQAAGKKGSKKAKAPKPSGDKKRRRKRKESYGIYIYKVLKQVHPDTGISSRAMSIMNSFVNDVFERIAAEASRLAHYNKKSTITSREVQTAVRLLLXGELAKHAVSEGTKAVTKYTTSK

SEQ ID NO: 6658 - DNA, 372 bp, Apis mellifera
  CDS (1)..(372)
atgccgccaaaagttagtggtaaagctgtgaaaaaagctggtaaagctcagaaaaatattagtaaagctgataaaaagaaaaaaaggcggaggaaggaaagttatgctatttatatttataaagtacttaaacaagtgcatcctgacactggtatatcgagtaaagcaatgagtattatgaacagttttgtgaatgatgtatttgaacgcattgctgcagaagcatcaagattggcgcattataataaacgttctactattacttctcgtgaaattcaaactgctgtgagacttttattacctggtgaattagccaagcatgcagtcagtgaaggtactaaagcagttaccaaatataccagttctaaataa

SEQ ID NO: 6659 - protein, 123 aa, Apis mellifera
MPPKVSGKAVKKAGKAQKNISKADKKKKRRRKESYAIYIYKVLKQVHPDTGISSKAMSIMNSFVNDVFERIAAEASRLAHYNKRSTITSREIQTAVRLLLPGELAKHAVSEGTKAVTKYTSSK

SEQ ID NO: 6660 - DNA, 372 bp, Apis mellifera
  CDS (1)..(372)
atgccacctaaagcaagcggaaaagctgtgaagaaagctggtaaagctcagaagaatattagcaagtctgataagaaaaagaagaggaggaggaaggaaagttatgctatttacatctacaaggtgttgaagcaagttcatcctgatactggaatttccagtaaagccatgagcatcatgaacagctttgtaaatgatgtttttgagcgtattgcggccgaagcttcacgtttagcacattacaacaagagatctaccatcacttctcgggaaatccaaactgctgtcaggcttctgttgcctggtgaattggctaaacacgctgtttctgagggtactaaagccgtcaccaagtacaccagttcaaaataa

SEQ ID NO: 6661 - protein, 123 aa, Apis mellifera
MPPKASGKAVKKAGKAQKNISKSDKKKKRRRKESYAIYIYKVLKQVHPDTGISSKAMSIMNSFVNDVFERIAAEASRLAHYNKRSTITSREIQTAVRLLLPGELAKHAVSEGTKAVTKYTSSK

SEQ ID NO: 6662 - DNA, 372 bp, Apis mellifera
  CDS (1)..(372)
atgccaccaaagactagtggaaaagcagttaaaaaagctggtaaagctcaaaaaaatatcagtaaagctgataaaaaaaagaaacgcagaaggaaggaaagttacgctatttacatttataaagttcttaaacaagtacatccagatactggtatttctagtaaagctatgagcattatgaacagttttgtgaatgatgtatttgaacgcattgcggctgaagcatctcgcttggcacattataacaaaagatcaacgattacttctcgagaaattcaaactgctgtacgtttgcttcttcctggtgagttagccaagcatgctgtcagtgaaggaactaaagccgttaccaaatatactagctctaaataa

SEQ ID NO: 6663 - protein, 123 aa, Apis mellifera
MPPKTSGKAVKKAGKAQKNISKADKKKKRRRKESYAIYIYKVLKQVHPDTGISSKAMSIMNSFVNDVFERIAAEASRLAHYNKRSTITSREIQTAVRLLLPGELAKHAVSEGTKAVTKYTSSK

SEQ ID NO: 6664 - DNA, 381 bp, Apis mellifera
  CDS (1)..(381)
atgcctcctaaagctgttggaaaagcaattaaaaaggccattaaaatcccaaaaaatgttactataaataaagtagaaggaaaaagaaagaaaaaaagaaaagaaagttatggagtttatatttataaagtattaaagcaagttcatccggatacaggtatttcaagcaaagcaatgagcattatgaatagttttgtgaatgatatattcgagagaatcgcttctgaggcatctcgtttatcacattataataaacgatctactattacatcgagagaagtgcaaactgctgtgagacttttattacccggagaacttgctaaacatgcagttagtgaaggtacaaaggcagttactaaatatacaagtgtaaataaataa

SEQ ID NO: 6665 - protein, 126 aa, Apis mellifera
MPPKAVGKAIKKAIKIPKNVTINKVEGKRKKKRKESYGVYIYKVLKQVHPDTGISSKAMSIMNSFVNDIFERIASEASRLSHYNKRSTITSREVQTAVRLLLPGELAKHAVSEGTKAVTKYTSVNK

SEQ ID NO: 6666 - DNA, 375 bp, Strongylocentrotus purpuratus
  CDS (1)..(375)
atgcctgccaaagcagttagcggaaaaggagcgaagaaggccggtaaggcaaaggccagccgtgcaactgacggaaagaagaggaggaagcgccgaaaggaaagctacggaatctacatctacaaagttctgaagcaggttcatcccgatactggtatctccagccgtgccatgtccatcatgaacagcttcgtcaacgatgtcttcgagcgcattgccggtgaggcttcccgtcttgcccaatacaacaagaagtccaccatcagcagccgtgaggtccagaccgctgtcagactcctcctccccggagaactcgccaagcacgccgtctctgagggcaccaaggctgtcaccaagtacaccacctccaagtaa

SEQ ID NO: 6667 - protein, 124 aa, Strongylocentrotus purpuratus
MPAKAVSGKGAKKAGKAKASRATDGKKRRKRRKESYGIYIYKVLKQVHPDTGISSRAMSIMNSFVNDVFERIAGEASRLAQYNKKSTISSREVQTAVRLLLPGELAKHAVSEGTKAVTKYTTSK

SEQ ID NO: 6668 - DNA, 372 bp, Strongylocentrotus purpuratus
  CDS (1)..(372)
atgcctcctaaagcacaagccgccggaaagaagggatcgaagaaggctaaggcccccaggcctagcggggacaagaagaggagacgaaagaggaaggaaagctacggaatctacatctacaaggttctgaagcaggtccaccccgacactggtatctccagccgtgccatgtccatcatgaacagcttcgtcaacgatgtcttcgagcgcatcgccgccgaggcttcccgtcttgcccactacaacaagaagtctaccatcaccagccgtgaggtccagaccgctgtcagactcctcctccccggagagctggccaagcacgccgtctctgagggcaccaaggccgtcaccaaatacaccacctccaagtaa

SEQ ID NO: 6669 - protein, 123 aa, Strongylocentrotus purpuratus
MPPKAQAAGKKGSKKAKAPRPSGDKKRRRKRKESYGIYIYKVLKQVHPDTGISSRAMSIMNSFVNDVFERIAAEASRLAHYNKKSTITSREVQTAVRLLLPGELAKHAVSEGTKAVTKYTTSK

SEQ ID NO: 6670 - DNA, 372 bp, Strongylocentrotus purpuratus
  CDS (1)..(372)
atggctccaacagctcaagttgctaagaaaggctccaagaaggcagtcaaggcacctcggcccagcggtggcaagaagaggaacaggaaaaggaaggagagttatggaatctacatctacaaagtcctcaagcaggttcatccagataccggcatctccagtcgggccatggtcatcatgaacagcttcgtcaacgacatcttcgagcgaattgccggcgaatcttcccgcctcgctcagtacaacaaaaagtcaaccatcagcagtcgcgagattcagaccgccgtccgcctcattctccccggagagctggcaaagcacgctgtgagcgagggtaccaaggcagtgacgaaatacactacctccaagtag

SEQ ID NO: 6671 - protein, 123 aa, Strongylocentrotus purpuratus
MAPTAQVAKKGSKKAVKAPRPSGGKKRNRKRKESYGIYIYKVLKQVHPDTGISSRAMVIMNSFVNDIFERIAGESSRLAQYNKKSTISSREIQTAVRLILPGELAKHAVSEGTKAVTKYTTSK

SEQ ID NO: 6672 - DNA, 408 bp, Strongylocentrotus purpuratus
  CDS (1)..(408)
atggctccaacagctcaaagggctaagaaaggctccaagaaagcagccaaggcccctcggcccagcggtggcaagaagaggaacaagaaaaggaaggagagttatgcaatctacatctacaaagtcctcaagcaggttcatccgaataccggcatctccagtcgggccatggtcatcatgaacagcttcgtcaacgacatcttcgagcgaattgccagcgaatcttcccgcctcgccaagtacaacacgaagtcaaccatcacctggcgtgagattcagagcgccatccgccttattcttaccggagagttgctaaagcacgctgttcgcgaaggttatcacagtttcacgatgaaacgtcgtagcgaattagttaatcccttttatgataaaagcaacgtactttga

SEQ ID NO: 6673 - protein, 135 aa, Strongylocentrotus purpuratus
MAPTAQRAKKGSKKAAKAPRPSGGKKRNKKRKESYAIYIYKVLKQVHPNTGISSRAMVIMNSFVNDIFERIASESSRLAKYNTKSTITWREIQSAIRLILTGELLKHAVREGYHSFTMKRRSELVNPFYDKSNVL

SEQ ID NO: 6674 - DNA, 423 bp, Aspergillus terreus NIH2624
  CDS (1)..(423)
atgcctcccaaagccgctgagaagaagcccaccactggtggcaaggcccctgctggcaaggctcccgctgagaagaaggaggctggcaagaagaccgccgccgctgcctctggcgacaagaagaagcgtggcaagacccgcaaggagacctactcctcctacatctacaaggtcctcaagcaggtccaccccgacactggtatctccactcgtgccatgtccatcctgaactcctttgtcaacgacatcttcgagcgcgttgccaccgaggcctccaagctcgctgcctacaacaagaagtccaccatctcgtcgcgggagatccagacctccgtgcggctgatcctgcccggtgaactggccaagcacgccgtctccgaaggcaccaaggccgtcacgaagtactcttcttctgccaaataa

SEQ ID NO: 6675 - protein, 140 aa, Aspergillus terreus NIH2624
MPPKAAEKKPTTGGKAPAGKAPAEKKEAGKKTAAAASGDKKKRGKTRKETYSSYIYKVLKQVHPDTGISTRAMSILNSFVNDIFERVATEASKLAAYNKKSTISSREIQTSVRLILPGELAKHAVSEGTKAVTKYSSSAK

SEQ ID NO: 6676 - DNA, 414 bp, Chaetomium globosum CBS 148.51
  CDS (1)..(414)
atggcacccaaggccgctgacaagaagcccgcctccaaggccccggctaccgcttccaaggcccccgagaagaaggatgccggcaagaagactgcgccttcgggcgacaagaagaagcggaccaaggcccgcaaggagacttactcttcttacatctacaaggtcctgaagcaggtccaccccgacactggtatctccaaccgtgccatgtctatcttgaactcattcgtcaacgacattttcgagcgtgtcgctactgaggcttccaagctcgctgcctacaacaagaagtccaccatctcctcgcgcgagatccagacatccgtccgtctcatcctccctggcgaactggccaagcacgccgtgtcggaaggcaccaaggccgtcaccaagtactcgtccagcacgaaatag

SEQ ID NO: 6677 - protein, 137 aa, Chaetomium globosum CBS 148.51
MAPKAADKKPASKAPATASKAPEKKDAGKKTAPSGDKKKRTKARKETYSSYIYKVLKQVHPDTGISNRAMSILNSFVNDIFERVATEASKLAAYNKKSTISSREIQTSVRLILPGELAKHAVSEGTKAVTKYSSSTK

SEQ ID NO: 6678 - DNA, 420 bp, Coccidioides immitis RS
  CDS (1)..(420)
atggccccaaaagctgctgaaaagaagccaagcactggcggaaaggctcccgccggcggtaaagcacccgctgaaaaaaaggaagctggcaagaaaacggctgcttcaggcgagaagaaaaagcgaactaaggctcggaaggaaacgtattcttcatatatttacaaagtcctcaaacaagtccatccggacactggtatctctaaccgcgcaatgtctatcctaaattcttttgtgaatgatatctttgaacgcgtcgccactgaagcatcaaaacttgctgcatataacaagaagtccacgatttcttcacgggaaatccaaacctctgtgcgcctaattctaccaggagaactcgccaagcatgctgtttctgaaggcaccaaagctgtcacaaaatattcttcttctgccaaatag

SEQ ID NO: 6679 - protein, 139 aa, Coccidioides immitis RS
MAPKAAEKKPSTGGKAPAGGKAPAEKKEAGKKTAASGEKKKRTKARKETYSSYIYKVLKQVHPDTGISNRAMSILNSFVNDIFERVATEASKLAAYNKKSTISSREIQTSVRLILPGELAKHAVSEGTKAVTKYSSSAK

SEQ ID NO: 6680 - DNA, 423 bp, Neosartorya fischeri NRRL 181
  CDS (1)..(423)
atgcctcccaaagctgccgagaagaagcctagcactggtggcaaggcgcccgctggaaaggctcctgctgagaagaaggaagctggcaagaagaccgccgctgctgccactggcgacaagaagaagcgtggcaagaccaggaaggaaacctattcctcctacatctacaaggttctcaaacaagttcatcccgacactggtatttcgactcgtgccatgtctatcctgaactcctttgtcaatgatatctttgagcgcgtcgccacggaggcgtcaaagcttgctgcttacaacaagaaatcgaccatctcgtcgagggagatccagacttctgttcggctcatccttcctggtgagttggcgaagcacgccgtttcggaaggcactaaggctgtcacgaagtactcttcttctgccaaatag

SEQ ID NO: 6681 - protein, 140 aa, Neosartorya fischeri NRRL 181
MPPKAAEKKPSTGGKAPAGKAPAEKKEAGKKTAAAATGDKKKRGKTRKETYSSYIYKVLKQVHPDTGISTRAMSILNSFVNDIFERVATEASKLAAYNKKSTISSREIQTSVRLILPGELAKHAVSEGTKAVTKYSSSAK

SEQ ID NO: 6682 - DNA, 423 bp, Aspergillus clavatus NRRL 1
  CDS (1)..(423)
atgcctcccaaagccgccgagaagaagcctagcactggtggcaaggcccccgctggaaaggctcccgccgagaagaaggaagctggcaagaagactgccgccgctgcctccggtgacaagaagaagcgcggaaagaccaggaaggagacctactcctcatacatttacaaggttctcaagcaagttcaccccgacaccggtatctcgacccgtgccatgtccatcctgaactccttcgtcaatgacatcttcgagcgtgtcgctactgaggcctcgaaactggctgcttacaacaagaaatctactatttcgtcgagagagatccaaacttccgttcggcttatcctccctggtgaattggctaagcatgccgtatcggaaggcaccaaggcagtgacaaagtactcttcttctgccaaatga

SEQ ID NO: 6683 - protein, 140 aa, Aspergillus clavatus NRRL 1
MPPKAAEKKPSTGGKAPAGKAPAEKKEAGKKTAAAASGDKKKRGKTRKETYSSYIYKVLKQVHPDTGISTRAMSILNSFVNDIFERVATEASKLAAYNKKSTISSREIQTSVRLILPGELAKHAVSEGTKAVTKYSSSAK

SEQ ID NO: 6684 - DNA, 396 bp, Pichia stipitis CBS 6054
  CDS (1)..(396): transl_table=12
atggccccaccaaaagctgaaaagaagcctgcctctaaagccccagctgaaaagaagccagctgctaagaagactgcctcttctaccgacgctaagaagagaaccaagaccagaaaggaaacttactcttcgtacatctacaaggtcttgaagcaaactcacccagacaccggtatttctcaaaaggccatgtccatcatgaactcctttgttaacgatatctttgaaagaatcgcttccgaagcttccaagttggctgcctacaacaagaagtccaccatctctgccagagaaatccaaactgccgttagattgatcttgccaggtgaattggctaagcacgctgtttctgaaggaactagagctgtcaccaaatactcttctgcttccaactag

SEQ ID NO: 6685 - protein, 131 aa, Pichia stipitis CBS 6054
MAPPKAEKKPASKAPAEKKPAAKKTASSTDAKKRTKTRKETYSSYIYKVLKQTHPDTGISQKAMSIMNSFVNDIFERIASEASKLAAYNKKSTISAREIQTAVRLILPGELAKHAVSEGTRAVTKYSSASN

SEQ ID NO: 6686 - DNA, 396 bp, Pichia stipitis CBS 6054
  CDS (1)..(396): transl_table=12
atggccccaccaaaagctgaaaagaaacccgcttcgaaagccccagctgaaaagaagcctgctgctaagaagactgcttctgctactgactctaagaagagaactaagactagaaaagaaacctactcttcttacatctacaaggtcttgaaacaaactcacccagacactggaatctctcaaaaggctatgtctatcatgaactcttttgtgaatgatatctttgaaagaatcgcttctgaagcttccaagttggcagcctataacaagaagtctaccatttctgccagagaaattcaaactgctgtcagattgatcttgccaggtgaattggccaagcatgcagtttctgaaggtactagagctgttaccaagtactcttccgcttctaactag

SEQ ID NO: 6687 - protein, 131 aa, Pichia stipitis CBS 6054
MAPPKAEKKPASKAPAEKKPAAKKTASATDSKKRTKTRKETYSSYIYKVLKQTHPDTGISQKAMSIMNSFVNDIFERIASEASKLAAYNKKSTISAREIQTAVRLILPGELAKHAVSEGTRAVTKYSSASN

SEQ ID NO: 6688 - DNA, 426 bp, Aspergillus niger CBS 513.88
  CDS (1)..(426)
atgcctcccaaagccgctgagaagaagcccagcaccggtggcaaggccccggcaggcggcaaggctcccgctgagaagaaggaagccggcaagaagactgctgccgctgcctccggcgacaagaagaagcgtggaaagaccaggaaggagacctactcgtcttacatctacaaggtcttgaagcaggtccaccctgataccggtatctcgactcgtgctatgtccatcctgaactcctttgtcaatgatatcttcgagcgtgtcgcgaccgaggcctcgaaacttgccgcttacaacaagaagtccaccatctcttcacgggagatccagacctctgtgaggctcatccttcccggtgaattggcgaagcacgcggtgtcggaaggcaccaaggctgtcacgaagtactcgtcgtctgccaaataa

SEQ ID NO: 6689 - protein, 141 aa, Aspergillus niger CBS 513.88
MPPKAAEKKPSTGGKAPAGGKAPAEKKEAGKKTAAAASGDKKKRGKTRKETYSSYIYKVLKQVHPDTGISTRAMSILNSFVNDIFERVATEASKLAAYNKKSTISSREIQTSVRLILPGELAKHAVSEGTKAVTKYSSSAK

SEQ ID NO: 6690 - DNA, 339 bp, Ostreococcus lucimarinus CCE9901
  CDS (1)..(339)
atggccaagaagcccgcgcaaaagaagccctcgggcgccaagaaggttggacgcaagtccaagtccgaaacctacaagatctacatctacaaggtcttgaagcaagtgcacccggacaccggtatctcctccaaggcgatgtccatcatgaactcgttcatcaacgacatcttcgagaagatcgccacggaagccgccaagctcgcgcgatacaacaagaagccgacggtcacgtcccgcgaaatccaaaccgcggtccgattgatcttgccgggtgaactcgccaagcacgccgtctccgaaggcaccaaggccgtcaccaagttcacctccgcgtaa

SEQ ID NO: 6691 - protein, 112 aa, Ostreococcus lucimarinus CCE9901
MAKKPAQKKPSGAKKVGRKSKSETYKIYIYKVLKQVHPDTGISSKAMSIMNSFINDIFEKIATEAAKLARYNKKPTVTSREIQTAVRLILPGELAKHAVSEGTKAVTKFTSA

SEQ ID NO: 6692 - DNA, 390 bp, Pichia guilliermondii ATCC 6260
  CDS (1)..(390): transl_table=12
atggctccaaaagcagaaaagaaacccgcttcaaaggctccagctgagaagaagccagctgccaaaaagactgcttcgactgactccaagaagaggaccaagacaagaaaggaaacatactcttcgtacatatacaaggtcttgaagcaaacacacccagatactggtatttcccagaaggctatgtctatcatgaactctttcgtaaatgacatctttgagagagtcgcttccgaagcttcgaaattggctgcctacaacaagaagtcaactatttctgctagagagattcaaactgccgtgagattgatcttgcctggtgagttggctaagcacgctgtttctgaagctactagaactattactaaatactcatctgctgccaattag

SEQ ID NO: 6693 - protein, 129 aa, Pichia guilliermondii ATCC 6260
MAPKAEKKPASKAPAEKKPAAKKTASTDSKKRTKTRKETYSSYIYKVLKQTHPDTGISQKAMSIMNSFVNDIFERVASEASKLAAYNKKSTISAREIQTAVRLILPGELAKHAVSEATRTITKYSSAAN

SEQ ID NO: 6694 - DNA, 390 bp, Pichia guilliermondii ATCC 6260
  CDS (1)..(390): transl_table=12
atggcaccaaaggctgaaaagaaacccgcttccaaggctccagctgagaagaaaccagctgctaagaagactgcttcttctgactccaagaagagaaccaagaccagaaaggagacttactcttcttacatctacaaggtgttgaagcaaactcaccctgacactggtatctcgcaaaaggccatgtctatcatgaactcttttgttaacgatatctttgagagagttgcttctgaggcttccaagttggctgcttacaacaagaagtccaccatctctgctagagaaatccaaactgctgttagattgatcttgcccggtgaattggccaagcacgctgtttctgaggctaccagaaccatcaccaagtactcttctgctgctaactaa

SEQ ID NO: 6695 - protein, 129 aa, Pichia guilliermondii ATCC 6260
MAPKAEKKPASKAPAEKKPAAKKTASSDSKKRTKTRKETYSSYIYKVLKQTHPDTGISQKAMSIMNSFVNDIFERVASEASKLAAYNKKSTISAREIQTAVRLILPGELAKHAVSEATRTITKYSSAAN

SEQ ID NO: 6696 - DNA, 396 bp, Lodderomyces elongisporus NRRL YB-4239
  CDS (1)..(396)
atggcaccaaaagctgaaaagaaacctgcttcaaaagctcctgctgaaaagaaaccagccgctaaaaagactgcttcctcaaccgatggtggtaagaagagaaccaaggctagaaaggaaacctactcatcatacatttacaaggttttgaaacaaacacacccagacactggtatctcacaaaaggctatgtccatcatgaactcctttgtcaatgacatctttgagagaattgcttctgaagcttccaaattggctgcttacaacaagaaatcaaccatctctgctagagaagtccaaactgctgtgagattgatcttgccaggtgaattggctaagcacgctgtttctgaaggtactagagctgtcaccaagtactcctcagctcaaaactaa

SEQ ID NO: 6697 - protein, 131 aa, Lodderomyces elongisporus NRRL YB-4239
MAPKAEKKPASKAPAEKKPAAKKTASSTDGGKKRTKARKETYSSYIYKVLKQTHPDTGISQKAMSIMNSFVNDIFERIASEASKLAAYNKKSTISAREVQTAVRLILPGELAKHAVSEGTRAVTKYSSAQN

SEQ ID NO: 6698 - DNA, 417 bp, Ajellomyces capsulatus NAm1
  CDS (1)..(417)
atgccaccaaaggccgctgagaagaagccctccactgctggcaaagccccagctggcaaagctcctgagaagaaggaggccggcaaaaagaccactgctgctggtggtgagaagaaaaagcgatccaagaccagaaaagagacctactcctcctacatctacaaagtcctcaagcaagtccacccagatactggtatctcaaaccgcgccatgtccatcctcaattctttcgtcaatgatatctttgagcgtgtcgccactgaagcctccaagcttgctgcatacaacaagaaatccaccatttcttcccgagaaattcagacttccgtgagactcatcctgccaggtgaacttgccaagcatgccgtctctgaaggcacaaaggctgtcaccaagtactcctcgtccgccaaataa

SEQ ID NO: 6699 - protein, 138 aa, Ajellomyces capsulatus NAm1
MPPKAAEKKPSTAGKAPAGKAPEKKEAGKKTTAAGGEKKKRSKTRKETYSSYIYKVLKQVHPDTGISNRAMSILNSFVNDIFERVATEASKLAAYNKKSTISSREIQTSVRLILPGELAKHAVSEGTKAVTKYSSSAK

SEQ ID NO: 6700 - DNA, 423 bp, Botryotinia fuckeliana B05.10
  CDS (1)..(423)
atgccaccaaagggagttgcaagcaaggcaccagctgccgccaaggcacctgcatccgcatcaaaggccccagctagtaagcaagatgctggcaagaagaccaccaccagcgaaggaaagccacgcaagaagaagggacgcaaggagacctactcttcatacatctacaaagttctcaagcaagtccacccagatactggtatctccaaccgcgccatgtccatcttgaactcctttgtcaacgatatctttgagcgcgtcgccactgaggcatccaagctcgctgcttacaacaagaagagcaccatctcatcaagagaaatccaaacctctgttcgtctcattctccctggtgaactcgccaagcacgccgtctctgagggtaccaaggctgttaccaagtactcttcatccacgaaataa

SEQ ID NO: 6701 - protein, 140 aa, Botryotinia fuckeliana B05.10
MPPKGVASKAPAAAKAPASASKAPASKQDAGKKTTTSEGKPRKKKGRKETYSSYIYKVLKQVHPDTGISNRAMSILNSFVNDIFERVATEASKLAAYNKKSTISSREIQTSVRLILPGELAKHAVSEGTKAVTKYSSSTK

SEQ ID NO: 6702 - DNA, 420 bp, Sclerotinia sclerotiorum 1980
  CDS (1)..(420)
atgccaccaaagggagttgcaagcaaagccccagctgccactaaggcacctgcatccgcatcaaaggctccagctaagtcagatgctggaaagaaaaccaccgccggcgagggaaagccacgcaagaagaagggacgcaaggagacttactcttcatacatctacaaggttctcaagcaagtccacccagatactggtatttccaaccgcgccatgtctatcttgaactccttcgtcaacgatatcttcgagcgcgtcgctaccgaggcctccaagctcgcagcttacaataagaagagcaccatctcatcaagagagatccaaacctccgttcgtctcattcttcccggtgaacttgcaaagcacgccgtttctgagggtaccaaggctgtcaccaagtactcttcatccacgaaataa

SEQ ID NO: 6703 - protein, 139 aa, Sclerotinia sclerotiorum 1980
MPPKGVASKAPAATKAPASASKAPAKSDAGKKTTAGEGKPRKKKGRKETYSSYIYKVLKQVHPDTGISNRAMSILNSFVNDIFERVATEASKLAAYNKKSTISSREIQTSVRLILPGELAKHAVSEGTKAVTKYSSSTK

SEQ ID NO: 6704 - DNA, 393 bp, Nasonia vitripennis
  CDS (1)..(393)
atggctcctaaagcttcttcaaagaagcctcccaagtcgaaagcagagaagatcgctactccgactccaagtgccgttccagttgagaagaaaaagagcaaagtaaaaaggaagagagagagctttggttttttcatccataaggtgctgaagcaagttcatcctgatacaggaatatcctcgaaatcgatgatcatcatgaacagcttcgttaacgatatcttcgagcgcatcgctactgaagcttctcgtctgatttcatgcaacaacaagtctaccatcacgtctcgggaaattcaaaccgctgttcgtctgctacttcctggcgaaatcgctaaacatgctgtgagcgagggtaccaaagcagtaactaaatacaccagctctaagtag

SEQ ID NO: 6705 - protein, 130 aa, Nasonia vitripennis
MAPKASSKKPPKSKAEKIATPTPSAVPVEKKKSKVKRKRESFGFFIHKVLKQVHPDTGISSKSMIIMNSFVNDIFERIATEASRLISCNNKSTITSREIQTAVRLLLPGEIAKHAVSEGTKAVTKYTSSK

SEQ ID NO: 6706 - DNA, 375 bp, Nasonia vitripennis
  CDS (1)..(375)
atggctcctaaagcaagcggaaaggcagtcaagaaagccggcaaggccgttaaaaacatcaccaagggtgacaagaagaagcacaagaagaggaggaaggagagctacgccatctacatctacaaggtgctgaagcaggtccatcccgacaccggagtctccagcaaggccatgagtatcatgaacagctttgtaaacgacatcttcgagcgcatcgccgccgaggcttcgcgtctggcccattacaacaagagatcgacaatcacctcccgggagattcagacggccgttcggctcctgctccccggtgaactggccaagcacgctgtcagtgaaggcaccaaagccgtcaccaagtacaccagctccaagtaa

SEQ ID NO: 6707 - protein, 124 aa, Nasonia vitripennis
MAPKASGKAVKKAGKAVKNITKGDKKKHKKRRKESYAIYIYKVLKQVHPDTGVSSKAMSIMNSFVNDIFERIAAEASRLAHYNKRSTITSREIQTAVRLLLPGELAKHAVSEGTKAVTKYTSSK

SEQ ID NO: 6708 - DNA, 393 bp, Nasonia vitripennis
  CDS (1)..(393)
atggctcctaaaagtggcaaggctgctgctaccgctgctgctaagaaggtcgagaaggttgccaagaacattagcagcaaagatgacaagaagatgaagaagaagaagaagaggaaggagagttacgctacctacatttacaaggtgttgaagcaggtccacccggacaccggcgtctcgagcaaggcgatgagcgttatgaacagcttcgtcaacgatatctttgagcgcattgccgctgaagcctctcgacttgttcagtacaacaagaggtcgaccatcacatcccgggagatccaaacagccattcggctccttcttcctggtgaactcgctaaacacgccgtcagcgagggtactaaggctgttactaagtacaccagcgctaagtaa

SEQ ID NO: 6709 - protein, 130 aa, Nasonia vitripennis
MAPKSGKAAATAAAKKVEKVAKNISSKDDKKMKKKKKRKESYATYIYKVLKQVHPDTGVSSKAMSVMNSFVNDIFERIAAEASRLVQYNKRSTITSREIQTAIRLLLPGELAKHAVSEGTKAVTKYTSAK

SEQ ID NO: 6710 - DNA, 375 bp, Nasonia vitripennis
  CDS (1)..(375)
atggctccgaaggcaagcggcaaagctgttaaaaaagccgggaaagccgtgaagaacatcacgaaaggggacaaaaagaagcacaagaagaagaggaaggagagttacgctatctacatttacaaggtgctgaagcaggtccacccggacaccggtgtctcgagcaaggcgatgagcatcatgaacagcttcgtcaacgacatcttcgagcgcatcgccgccgaagcctctcgcttagctcactacaataagaggtcgaccatcacctcccgggagatccagaccgctgtcaggcttttgcttcctggcgaactcgccaagcacgccgtcagtgagggtacaaaggctgttactaagtacaccagctccaaatag

SEQ ID NO: 6711 - protein, 124 aa, Nasonia vitripennis
MAPKASGKAVKKAGKAVKNITKGDKKKHKKKRKESYAIYIYKVLKQVHPDTGVSSKAMSIMNSFVNDIFERIAAEASRLAHYNKRSTITSREIQTAVRLLLPGELAKHAVSEGTKAVTKYTSSK

SEQ ID NO: 6712 - DNA, 369 bp, Nematostella vectensis
  CDS (1)..(369)
atgcctcctaaatctggtaagaaacccgaagcatctaaaggcaagaaaaacgtcgtagctggtgacaaaaagaagcgcaaaggtcgtcgcaaggagagctacgccatctacatttacaaagttctgaagcaagttcatcccgacacaggaatctccagcaaagcaatgggcatcatgaattcgttcgtgaacgatatattcgaacgcatcgctgcagagtcgtctcgactagcgcactacaacaagaagtccacaatcagctcgcgagagattcagactgcaattcgcctactactaccaggggagcttgccaaacacgccgtcagcgaggggaccaaagccgttactaagtacaccagcagcaagtga

SEQ ID NO: 6713 - protein, 122 aa, Nematostella vectensis
MPPKSGKKPEASKGKKNVVAGDKKKRKGRRKESYAIYIYKVLKQVHPDTGISSKAMGIMNSFVNDIFERIAAESSRLAHYNKKSTISSREIQTAIRLLLPGELAKHAVSEGTKAVTKYTSSK

SEQ ID NO: 6714 - DNA, 369 bp, Nematostella vectensis
  CDS (1)..(369)
atgcctcctaaatctggtaagaaacccgaagcatctaaaggcaagaaaaacgtcgtagctggtgacaaaaagaagcgcaaaggtcgtcgcaaggagagctacgccatctacatttacaaagttctgaagcaagttcatcccgacacaggaatctccagcaaagcaatgggcatcatgaattcgttcgtgaacgatatattcgaacgcatcgctgcagagtcgtctcgactagcgcactacaacaagaagtccacaatcagctcgcaagagattcagactgcaattcgcctactactaccaggggagcttgccaaacacgccgtcagcgaggggaccaaagccgttactaagtacaccagcagcaagtga

SEQ ID NO: 6715 - protein, 122 aa, Nematostella vectensis
MPPKSGKKPEASKGKKNVVAGDKKKRKGRRKESYAIYIYKVLKQVHPDTGISSKAMGIMNSFVNDIFERIAAESSRLAHYNKKSTISSQEIQTAIRLLLPGELAKHAVSEGTKAVTKYTSSK

SEQ ID NO: 6716 - DNA, 357 bp, Nematostella vectensis
  CDS (1)..(357)
atgccgccaaaagtcaaagcagcaaagaaaggagggaagaagcaggccggagacaagaaaaagaggaatcgtagacgcaaggagagctatgctatctacatctataaagtccttcgtcaagtccaccccgacaccggtatctcgagcaaggccatgggcatcatgaactcgttcgtgaacgacatcttcgagcgcatcgctggtgaggcttcccgcctagcacactacaacaagaagcacaccatctcttcccgagaagtccaaacggccgttcgtttgcttctccccggggagctggccaaacacgccgtgagcgagggaaccaaggccgtcaccaagtacaccagcagcaagtga

SEQ ID NO: 6717 - protein, 118 aa, Nematostella vectensis
MPPKVKAAKKGGKKQAGDKKKRNRRRKESYAIYIYKVLRQVHPDTGISSKAMGIMNSFVNDIFERIAGEASRLAHYNKKHTISSREVQTAVRLLLPGELAKHAVSEGTKAVTKYTSSK

SEQ ID NO: 6718 - DNA, 372 bp, Nematostella vectensis
  CDS (1)..(372)
atgccaccaaaacctccagtcggaaaatccgcaggcaaaaaggccgtcaagaagcaggttggagagggcaagaagaagagaaagtcaagacgtaaggaaagctatgctatctacatctacaaggtgctgaagcaagttcaccccgacaccggtatctcgagcaaggccatgggcatcatgaactgtttcgtgaacgacatcttcgagcgcatcgctggtgaagcttcccgcctggcgcactacaacaagaagtccaccatcacgagcagggaaatccagacggccgttcgtctgctcctccccggtgagctggccaagcacgccgtgagcgaggggaccaaggccgtcaccaagtacaccagcagcaagtaa

SEQ ID NO: 6719 - protein, 123 aa, Nematostella vectensis
MPPKPPVGKSAGKKAVKKQVGEGKKKRKSRRKESYAIYIYKVLKQVHPDTGISSKAMGIMNCFVNDIFERIAGEASRLAHYNKKSTITSREIQTAVRLLLPGELAKHAVSEGTKAVTKYTSSK

SEQ ID NO: 6720 - DNA, 372 bp, Nematostella vectensis
  CDS (1)..(372)
atgccgccaaaaaccccagtcggaaaatccgcaggcaaaaaggccgtcaagaagcaggttggagagggcaagaagaagagaaagtcaagacgtaaggaaagctatgctatctacatctacaaggtgctgaagcaagtccaccccgacaccggtatctcgagcaaggccatggtcatcatgaactcgttcgtgcacgacatcttcgagcgcatcgctggtgaagcttcccgcctggcgcactacaacaagaagtccaccatcacgagcagggaaatccagacggccgttcgtctgcttctccccggtgagctggccaagcacgccgtgagcgagggaaccaaggccgtcaccaagtacaccagcagcaagtaa

SEQ ID NO: 6721 - protein, 123 aa, Nematostella vectensis
MPPKTPVGKSAGKKAVKKQVGEGKKKRKSRRKESYAIYIYKVLKQVHPDTGISSKAMVIMNSFVHDIFERIAGEASRLAHYNKKSTITSREIQTAVRLLLPGELAKHAVSEGTKAVTKYTSSK

SEQ ID NO: 6722 - DNA, 372 bp, Nematostella vectensis
  CDS (1)..(372)
atgccgccaaaagctcccgtaggaaaatccgcaggcaagaaggccgtcaaaaagcaggtcggagagggcaagaagaagagaaagggaagacgtaaggaaagctattctatctacatctacaaggtgctgaagcaagtccaccccgacaccggtatctcgagcaaagccatggtcatcatgaactctttcgtgaacgacatcttcgagcgcatcgctggtgaagcttcccgcctggcgcactacaacaagaagtccaccatcacgagcagggaaatccagacggccgttcgtctgctccttcccggtgagctggccaagcacgccgtgagcgagggaaccaaggccgtcaccaagtacaccagcagcaagtaa

SEQ ID NO: 6723 - protein, 123 aa, Nematostella vectensis
MPPKAPVGKSAGKKAVKKQVGEGKKKRKGRRKESYSIYIYKVLKQVHPDTGISSKAMVIMNSFVNDIFERIAGEASRLAHYNKKSTITSREIQTAVRLLLPGELAKHAVSEGTKAVTKYTSSK

SEQ ID NO: 6724 - DNA, 372 bp, Nematostella vectensis
  CDS (1)..(372)
atgccgccaaaagctcccgtaggaaaatccgcaggcaagaaggccgtcaaaaagcaggtcggagaaggcaagaagaaaagaaaaggaagacgtaaggaaagctatgctatctacatctacaaggtgctgaagcaagtccaccccgacaccggtatctcgagcaaggccatgggcatcatgaactcgttcgtgaacgacatcttcgagcgcatcgctggtgaagcttcccgcctggcgcactacaacaagaagtccaccatcacgagcagggaaatccagacggccgttcgtctgctccttcccggtgagctggccaagcacgccgtgagcgagggaaccaaggccgtcaccaagtacaccagcagcaagtaa

SEQ ID NO: 6725 - protein, 123 aa, Nematostella vectensis
MPPKAPVGKSAGKKAVKKQVGEGKKKRKGRRKESYAIYIYKVLKQVHPDTGISSKAMGIMNSFVNDIFERIAGEASRLAHYNKKSTITSREIQTAVRLLLPGELAKHAVSEGTKAVTKYTSSK

SEQ ID NO: 6726 - DNA, 372 bp, Nematostella vectensis
  CDS (1)..(372)
atgccgccaaaagctcccgcaggaaaatccgcaggcaaaaaggccgtcaaaaagcaggtcggagagggcaagaagaaaagaaaaggaagacgtaaggaaagctatgctatctacatctacaaggtgctgaagcaagtccaccccgacaccggtatctcgagcaaggccatgggcatcatgaactgtttcgtgaacgacatcttcgagcgcatcgctggtgaagcttcccgcctggcgcactacaacaagaagtccaccatcacgagcagggaaatccagacggccgttcgtctgctccttcccggtgagctggccaagcacgccgtgagcgagggaaccaaggccgtcaccaagtacaccagcagcaagtaa

SEQ ID NO: 6727 - protein, 123 aa, Nematostella vectensis
MPPKAPAGKSAGKKAVKKQVGEGKKKRKGRRKESYAIYIYKVLKQVHPDTGISSKAMGIMNCFVNDIFERIAGEASRLAHYNKKSTITSREIQTAVRLLLPGELAKHAVSEGTKAVTKYTSSK

SEQ ID NO: 6728 - DNA, 387 bp, Vanderwaltozyma polyspora DSM 70294
  CDS (1)..(387)
atgtctgccaaagccgaaaagaaacctgcctccaaagccccagccgctgccaagaagaccccaactgccggtggtgaaggtaagaagagaaccaaggccagaaaggaaacatactcatcatacatctacaaggttttgaaacaaacccatccagacacaggtatttcccaaaaggccatgtctattttgaattcttttgttaacgatattttcgaaagaattgctactgaagcctccaaattggctgcatacaacaagaagtccaccatctccgccagagaaatccaaactgctgtcagattgatcttgccaggtgaattggccaagcatgctgtttctgaaggtaccagagctgttaccaaatactcttcatctactcaagcttaa

SEQ ID NO: 6729 - protein, 128 aa, Vanderwaltozyma polyspora DSM 70294
MSAKAEKKPASKAPAAAKKTPTAGGEGKKRTKARKETYSSYIYKVLKQTHPDTGISQKAMSILNSFVNDIFERIATEASKLAAYNKKSTISAREIQTAVRLILPGELAKHAVSEGTRAVTKYSSSTQA

SEQ ID NO: 6730 - DNA, 393 bp, Vanderwaltozyma polyspora DSM 70294
  CDS (1)..(393)
atgtcttctgcttctaaggccccagcatctaaagccccagctgaaaagaaaccagctgccaagaaaacttctacttctactgatggtaagaagagaactaaggctagaaaggaaacttactcttcctacatttacaaagttttgaaacaaactcacccagacactggtatttctcaaaaggctatgtctattttgaactcttttgttaacgatatttttgaaagaatcgctactgaagcttccaaattagctgcttacaacaaaaaatctaccatctctgctagagaaatccaaactgctgttagattgatcttaccaggtgaattggctaaacatgctgtctctgaaggtaccagagctgttaccaaatactcttcctctactcaagcttag

SEQ ID NO: 6731 - protein, 130 aa, Vanderwaltozyma polyspora DSM 70294
MSSASKAPASKAPAEKKPAAKKTSTSTDGKKRTKARKETYSSYIYKVLKQTHPDTGISQKAMSILNSFVNDIFERIATEASKLAAYNKKSTISAREIQTAVRLILPGELAKHAVSEGTRAVTKYSSSTQA

SEQ ID NO: 6732 - DNA, 375 bp, Aedes aegypti
  CDS (1)..(375)
atggcaccgaaaaccagtggaaaggccgcgaagaaatccggcaaggcccagaagaacattgtcaagggcgacaagaagaagaagaagcagcgcaggaaggagagctatgccatctacatctacaaggtgttgaagcaagtccatcccgacactggcgtttcttcaaaggctatgagcatcatgaacagcttcgtcaacgacatctttgaacgtattgccgccgaagcctcccgtcttgctcactacaacaagcgctcgacaatcacttcccgcgaaattcaaaccgccgtccgtcttctgcttccaggagaattggctaagcatgctgtttccgaaggcaccaaggccgtcaccaagtacaccagctccaagtaa

SEQ ID NO: 6733 - protein, 124 aa, Aedes aegypti
MAPKTSGKAAKKSGKAQKNIVKGDKKKKKQRRKESYAIYIYKVLKQVHPDTGVSSKAMSIMNSFVNDIFERIAAEASRLAHYNKRSTITSREIQTAVRLLLPGELAKHAVSEGTKAVTKYTSSK

SEQ ID NO: 6734 - DNA, 372 bp, Aedes aegypti
  CDS (1)..(372)
atggcaccgaaaacaagtgaaaaagctgcgaaaaagtccggcaaggctcagaagagcgtcgtcaagggagataagaaaaagaaggtacgccgcaaggaaagctacgccatctatatttacaaggtgctgaaacaggtccacccggacaccggagtttcatcgaaggccatgagcatcatgaacagcttcgtcaacgacatcttcgagcggatcgctgctgaggcttcccgtttggctcattacaacaagcgttcgacgataacgtctcgtgaaattcaaaccgctgttcgtttgctgttgccgggagaattggccaagcatgccgtctccgagggtaccaaggccgtcaccaagtacaccagctcaaagtaa

SEQ ID NO: 6735 - protein, 123 aa, Aedes aegypti
MAPKTSEKAAKKSGKAQKSVVKGDKKKKVRRKESYAIYIYKVLKQVHPDTGVSSKAMSIMNSFVNDIFERIAAEASRLAHYNKRSTITSREIQTAVRLLLPGELAKHAVSEGTKAVTKYTSSK

SEQ ID NO: 6736 - DNA, 375 bp, Aedes aegypti
  CDS (1)..(375)
atggcaccgaaaactactgaaaaatctgcgaagaagtctggcaaggcacagaaaagcatcgtaaagggagataagaaacaaaggaagcaacgccgcaaggaaagctacgccatctacatttacaaggtgctgaaacaggtccacccggacaccggagtttcatcgaaggccatgagtatcatgaacagcttcgtcaacgacatcttcgagcggattgcttctgaggcctcacgtttggctcaatacaacaagcgttcgacgataacctctcgtgaaattcagaccgctgtccgtctgttgttgccgggtgaattggccaaacacgccgtttcggaaggtaccaaggccgtcaccaagtacaccagctctaagtaa

SEQ ID NO: 6737 - protein, 124 aa, Aedes aegypti
MAPKTTEKSAKKSGKAQKSIVKGDKKQRKQRRKESYAIYIYKVLKQVHPDTGVSSKAMSIMNSFVNDIFERIASEASRLAQYNKRSTITSREIQTAVRLLLPGELAKHAVSEGTKAVTKYTSSK

SEQ ID NO: 6738 - DNA, 372 bp, Caenorhabditis briggsae AF16
  CDS (1)..(372)
atggccccaccaaagccgtcagccaagggagcgaagaaagccgccaagaccgtcaccaagccaaaggacggaaagaagagaaaagcccatcgcaaggagtcgtactctgtctacatctaccgtgtcctcaagcaggttcacccagataccggagtatcctcgaaggccatgtccatcatgaactccttcgtcaatgacgtcttcgaacgcatcgctgctgaagcttctcgtcttgcccactacaacaagcgttcgaccatctcttcccgcgaaatccaaacggccgtccgtttgatccttccaggagagttggccaagcacgccgtttctgagggaaccaaggctgtgaccaagtacacatccagcaagtaa

SEQ ID NO: 6739 - protein, 123 aa, Caenorhabditis briggsae AF16
MAPPKPSAKGAKKAAKTVTKPKDGKKRKAHRKESYSVYIYRVLKQVHPDTGVSSKAMSIMNSFVNDVFERIAAEASRLAHYNKRSTISSREIQTAVRLILPGELAKHAVSEGTKAVTKYTSSK

SEQ ID NO: 6740 - DNA, 369 bp, Caenorhabditis briggsae AF16
  CDS (1)..(369)
atggccccaccaaagccatccgctaaaggagctaagaaggctgccaagacccagaagccaaagactgacaagaagagaaagcatgccagaaaggaatcctactccgtctacatctaccgtgtcctcaagcaggttcacccagatactggagtctcctcgaaggccatgtccatcatgaactccttcgtcaacgacgtcttcgagcgcatcgcctccgaagcttctcgtctcgcccactacaacaaacgctccaccatctcatctcgtgaaatccagaccgccgtccgtctcatccttccaggagagcttgccaagcacgccgtctccgaaggaaccaaggctgtgaccaagtacacctccagcaagtaa

SEQ ID NO: 6741 - protein, 122 aa, Caenorhabditis briggsae AF16
MAPPKPSAKGAKKAAKTQKPKTDKKRKHARKESYSVYIYRVLKQVHPDTGVSSKAMSIMNSFVNDVFERIASEASRLAHYNKRSTISSREIQTAVRLILPGELAKHAVSEGTKAVTKYTSSK

SEQ ID NO: 6742 - DNA, 462 bp, Chlamydomonas reinhardtii
  CDS (1)..(462)
atggcccccaagaaggacgagaagcccgtgaccgccgaggctggcgccgaggcccctgccaaggctgaggccaagcccaaggccgagaaggccgccaagaaggccaagaaggagccctccaagaaggctgctaaggagcccaagggcgatggcgagaagaaggacaagaagaagaagaagagcgctgtggagacctacaagctgtacatctacaaggtgctcaagcaggtgcaccccgacaccggcatcagcagcaaggccatgtccatcatgaacagcttcatcaacgacatctttgagaaggtggccaccgaggcctccaagctgagtcgctacaacaagaagcccactgtgacctcccgcgagatccagaccgccgtgcgcctggtgctgcccggcgagctggccaagcacgcggtgtcggagggcaccaaggccgtgactaagttcacctcaggctaa

SEQ ID NO: 6743 - protein, 153 aa, Chlamydomonas reinhardtii
MAPKKDEKPVTAEAGAEAPAKAEAKPKAEKAAKKAKKEPSKKAAKEPKGDGEKKDKKKKKSAVETYKLYIYKVLKQVHPDTGISSKAMSIMNSFINDIFEKVATEASKLSRYNKKPTVTSREIQTAVRLVLPGELAKHAVSEGTKAVTKFTSG

SEQ ID NO: 6744 - DNA, 462 bp, Chlamydomonas reinhardtii
  CDS (1)..(462)
atggcccccaagaaggacgagaagcccgcgaccgccgaggctggcgccgaggcccctgccaaggctgaggccaagcccaaggccgagaaggccggcaagaaggccaagaaggagcctgccaagaaggccgccaaggagcccaagggcgacggcgagaagaaggataagaagaagaagaagagcgccgtggagacctacaagctgtacatctacaaggtgctcaagcaggtgcaccccgacaccggcatcagcagcaaggccatgtccatcatgaacagcttcatcaacgacatctttgagaaggtggccactgaggcctccaagctgagccgctacaacaagaagcccaccgtgacctcccgcgagatccagaccgcggtgcgcctggtgctgcccggcgagctggccaagcacgcggtgtcggagggcaccaaggccgtgaccaagttcacctcgggctaa

SEQ ID NO: 6745 - protein, 153 aa, Chlamydomonas reinhardtii
MAPKKDEKPATAEAGAEAPAKAEAKPKAEKAGKKAKKEPAKKAAKEPKGDGEKKDKKKKKSAVETYKLYIYKVLKQVHPDTGISSKAMSIMNSFINDIFEKVATEASKLSRYNKKPTVTSREIQTAVRLVLPGELAKHAVSEGTKAVTKFTSG

SEQ ID NO: 6746 - DNA, 459 bp, Chlamydomonas reinhardtii
  CDS (1)..(459)
atggcccccaagaaggacgagaagcccgcgactcaggaggctgccgctgaggcccctgctaaggccgaggccaagcccaaggccgagaaggccgccaagaaggccaaggagccctccaagaaggctgccaaggagcccaagggcgacggcgagaagaaggacaagaagaagaagaagagcgccgtggagacctacaagctgtacatctacaaggtgctcaagcaggtgcaccccgacactggcatcagcagcaaggccatgtccatcatgaacagcttcatcaacgacatcttcgagaaggtggccactgaggcctccaagctgagccgctacaacaagaagcccaccgtcacctcccgcgagatccagaccgccgtgcgcctggtgctgcccggcgagctggccaagcacgcggtgtcggagggcaccaaggccgtgaccaagttcacctcgggctaa

SEQ ID NO: 6747 - protein, 152 aa, Chlamydomonas reinhardtii
MAPKKDEKPATQEAAAEAPAKAEAKPKAEKAAKKAKEPSKKAAKEPKGDGEKKDKKKKKSAVETYKLYIYKVLKQVHPDTGISSKAMSIMNSFINDIFEKVATEASKLSRYNKKPTVTSREIQTAVRLVLPGELAKHAVSEGTKAVTKFTSG

SEQ ID NO: 6748 - DNA, 462 bp, Chlamydomonas reinhardtii
  CDS (1)..(462)
atggcccccaagaaggacgagaagcccgcgactcaggaggctgccgctgaggcccctgctaaggccgaggccaagcccaaggccgagaaggccgccaagaaggccaagaaggagccctccaagaaggctgccaaggagcccaagggcgacggcgagaagaaggacaagaagaagaagaagagcgccgtggagacctacaagctgtacatctacaaggtgctcaagcaggtgcaccccgacactggcatcagcagcaaggccatgtccatcatgaacagcttcatcaacgacatcttcgagaaggtggccaccgaggcctccaagctgagccgctacaacaagaagcccaccgtcacctcccgcgagatccagaccgccgtgcgcctggtgctgcccggcgagctggccaagcacgcggtgtcggagggcaccaaggccgtgaccaagttcacctcgggctaa

SEQ ID NO: 6749 - protein, 153 aa, Chlamydomonas reinhardtii
MAPKKDEKPATQEAAAEAPAKAEAKPKAEKAAKKAKKEPSKKAAKEPKGDGEKKDKKKKKSAVETYKLYIYKVLKQVHPDTGISSKAMSIMNSFINDIFEKVATEASKLSRYNKKPTVTSREIQTAVRLVLPGELAKHAVSEGTKAVTKFTSG

SEQ ID NO: 6750 - DNA, 462 bp, Chlamydomonas reinhardtii
  CDS (1)..(462)
atggcccccaagaaggacgagaagcctgcgaccgcagaggccggcgccgaggcccctgccaaggccgatgccaagcccaaggccgagaaggccgccaagaaggccaagaaggagccctccaagaaggctgccaaggagcccaagggcgatggcgagaagaaggacaagaagaagaagaagagcgccgtggagacctacaagctgtacatctacaaggtgctcaagcaggtgcaccccgacaccggcatcagcagcaaggccatgtctatcatgaacagcttcatcaacgacatctttgagaaggtggccaccgaggcctccaagctgagccgctacaacaagaagcccaccgtgacctcccgcgagatccagaccgccgtgcgcctggtgctgcccggcgagctggccaagcacgcggtgtcggagggcaccaaggccgtgaccaagttcacctcgggctaa

SEQ ID NO: 6751 - protein, 153 aa, Chlamydomonas reinhardtii
MAPKKDEKPATAEAGAEAPAKADAKPKAEKAAKKAKKEPSKKAAKEPKGDGEKKDKKKKKSAVETYKLYIYKVLKQVHPDTGISSKAMSIMNSFINDIFEKVATEASKLSRYNKKPTVTSREIQTAVRLVLPGELAKHAVSEGTKAVTKFTSG

SEQ ID NO: 6752 - DNA, 462 bp, Chlamydomonas reinhardtii
  CDS (1)..(462)
atggcccccaagaaggacgagaaatccgcgactcaggaggccggcgccgaggcccctgccaaggccgaggccaagcctaaggccgagaaggccgccaagaaggccaagaaggagccctccaagaaggctgccaaggagcccaagggcgacggcgagaagaaggataagaagaagaagaagagcgccgtggagacctacaaactgtacatctacaaggtgctcaagcaggtgcaccctgacaccggcatcagcagcaaggccatgtctatcatgaacagcttcatcaacgacatctttgagaaggttgccaccgaggcatccaagctgagccgctacaacaagaagcctaccgtgacctcccgcgagatccagaccgccgtgcgcctggtgctgcccggcgagctggccaagcacgcggtgtcggagggcaccaaggccgtgaccaagttcacctcgggctaa

SEQ ID NO: 6753 - protein, 153 aa, Chlamydomonas reinhardtii
MAPKKDEKSATQEAGAEAPAKAEAKPKAEKAAKKAKKEPSKKAAKEPKGDGEKKDKKKKKSAVETYKLYIYKVLKQVHPDTGISSKAMSIMNSFINDIFEKVATEASKLSRYNKKPTVTSREIQTAVRLVLPGELAKHAVSEGTKAVTKFTSG

SEQ ID NO: 6754 - DNA, 468 bp, Chlamydomonas reinhardtii
  CDS (1)..(468)
atggcccctaagaaggacgagaagaaggacgcggccgctcccgaggctgctgagccgaaggcggagaaggagtccaagcccaaggcggacaaggccgccaagaaggccaagaagtcgcccgctaagaaggctgccaaggagggcggcgacggcgagaagggcgacaagaagaagggcaagaagaaatcgtcggtcgagacctacaagctctacatctacaaggtgctcaagcaggtgcaccccgacaccggcatcagcagcaaggccatgtcgattatgaacagcttcatcaacgacatattcgagaaggtggccaccgaggcctccaagctcagccgctacaacaagaagcccacggtcacctcccgcgagatccagaccgcggtgcgcctggtgctgcccggcgagctggccaagcacgcggtgtcggagggcaccaaggccgtgaccaagttcacctcgggctaa

SEQ ID NO: 6755 - protein, 155 aa, Chlamydomonas reinhardtii
MAPKKDEKKDAAAPEAAEPKAEKESKPKADKAAKKAKKSPAKKAAKEGGDGEKGDKKKGKKKSSVETYKLYIYKVLKQVHPDTGISSKAMSIMNSFINDIFEKVATEASKLSRYNKKPTVTSREIQTAVRLVLPGELAKHAVSEGTKAVTKFTSG

SEQ ID NO: 6756 - DNA, 468 bp, Chlamydomonas reinhardtii
  CDS (1)..(468)
atggcccctaagaaggacgagaagaaggacgcggccgctcccgaggctgctgagccaaaggcggagaaggagtccaagcccaaggcggacaaggccgccaagaaggccaagaaggcgcccgctaagaaggctgccaaggagggcggcgacggcgagaagggcgacaagaagaagggcaagaagaaatcgtcggtcgagacctacaagctctacatctacaaggtgctcaagcaggtgcaccccgacaccggcatcagcagcaaggccatgtcaattatgaacagcttcatcaacgacatcttcgagaaggtggccaccgaggcctccaagctcagccgctacaacaagaagccgacggtcacctcccgcgagatccagaccgcggtgcgcctggtgctgcccggcgagctggccaagcacgcggtgtcggagggcaccaaggccgtgaccaagttcacctcgggctaa

SEQ ID NO: 6757 - protein, 155 aa, Chlamydomonas reinhardtii
MAPKKDEKKDAAAPEAAEPKAEKESKPKADKAAKKAKKAPAKKAAKEGGDGEKGDKKKGKKKSSVETYKLYIYKVLKQVHPDTGISSKAMSIMNSFINDIFEKVATEASKLSRYNKKPTVTSREIQTAVRLVLPGELAKHAVSEGTKAVTKFTSG

SEQ ID NO: 6758 - DNA, 471 bp, Chlamydomonas reinhardtii
  CDS (1)..(471)
atggctcccaagaaggacgagaagcccgcgacccgtgccgcgacccaggaggcgggcgccgaggccactgcaaaggctgaggccaagcccaaggccgagaaggccgcgaagaaggccaagaaggagcctgccaagaaggccgccaaggagcccaagggcgatggcgagaagaaggacaagaagaagaagagcgccgtggagacctacaagctgtacatatacaaggtgctcaagcaggtgcaccccgacaccggcatcagcagcaaggccatgtccatcatgaacagcttcatcaacgacatctttgagaaggtggccaccgaggcctccaagctgagccgctacaacaagaagcccaccgtgacctctcgcgagatccagaccgccgtgcgcctggtgctgcccggtgagctggctaagcacgcggtgtcagagggcaccaaggccgtgaccaagttcacctcaggctaa

SEQ ID NO: 6759 - protein, 156 aa, Chlamydomonas reinhardtii
MAPKKDEKPATRAATQEAGAEATAKAEAKPKAEKAAKKAKKEPAKKAAKEPKGDGEKKDKKKKSAVETYKLYIYKVLKQVHPDTGISSKAMSIMNSFINDIFEKVATEASKLSRYNKKPTVTSREIQTAVRLVLPGELAKHAVSEGTKAVTKFTSG

SEQ ID NO: 6760 - DNA, 462 bp, Chlamydomonas reinhardtii
  CDS (1)..(462)
atggcccccaagaaggacgagaagcccgcgaccgccgaggccggcgccgaggcacctgccaaggctgaggccaagcccaaggctgagaaggccgccaagaaggccaagaaggagccctccaagaagactgccaaggaacccaagggcgacggcgagaagaaggacaagaagaagaagaagagcgccgtggagacctacaagctgtacatctacaaggtgctcaagcaggtgcaccccgacaccggcatcagcagcaaggccatgtccatcatgaacagcttcatcaacgacatctttgagaaggtggccaccgaggcctccaagctgagccgctacaacaagaagcccaccgtgacctcccgcgagatccagaccgccgtgcgcctggtgctgcccggcgagctggccaagcatgcggtgtcggagggcaccaaggccgtgaccaagttcacctcgggctaa

SEQ ID NO: 6761 - protein, 153 aa, Chlamydomonas reinhardtii
MAPKKDEKPATAEAGAEAPAKAEAKPKAEKAAKKAKKEPSKKTAKEPKGDGEKKDKKKKKSAVETYKLYIYKVLKQVHPDTGISSKAMSIMNSFINDIFEKVATEASKLSRYNKKPTVTSREIQTAVRLVLPGELAKHAVSEGTKAVTKFTSG

SEQ ID NO: 6762 - DNA, 462 bp, Chlamydomonas reinhardtii
  CDS (1)..(462)
atggcccccaagaaggacgagaagcccgcgaccgccgaggccggcgccgaggcccctgccaaggctgaggccaagcccaaggccgagaaggccgccaagaaggccaagaaggagccctccaagaaggctgccaaggagcccaagggcgacggcgagaagaaggacaagaagaagaagaagagcgccgtggagacctacaagctgtacatctacaaggtgctcaagcaggtgcaccccgacaccggcatcagcagcaaggccatgtccatcatgaacagcttcatcaacgacatctttgagaaggtggccaccgaggcctccaagctgagccggtacaacaagaagcccaccgtgacctcccgcgagatccagaccgccgtgcgcctggtgctgcccggcgagctggccaagcacgcggtgtcggagggcaccaaggccgtgaccaagttcacctcgggctaa

SEQ ID NO: 6763 - protein, 153 aa, Chlamydomonas reinhardtii
MAPKKDEKPATAEAGAEAPAKAEAKPKAEKAAKKAKKEPSKKAAKEPKGDGEKKDKKKKKSAVETYKLYIYKVLKQVHPDTGISSKAMSIMNSFINDIFEKVATEASKLSRYNKKPTVTSREIQTAVRLVLPGELAKHAVSEGTKAVTKFTSG

SEQ ID NO: 6764 - DNA, 462 bp, Chlamydomonas reinhardtii
  CDS (1)..(462)
atggcccccaagaaggacgagaagcccgcgaccgccgaggccggcgccgaggcccctgctaaggctgaggccaagcccaaggccgagaaggccgccaagaaggccaagaaggagccctccaagaaggctgccaaggagcccaagggcgagggcgagaagaaggacaagaagaagaagaagagcgctgtggagacctacaagctgtacatctacaaggtgctcaagcaggtgcaccccgacaccggcatcagcagcaaggccatgtccatcatgaacagcttcatcaacgacatctttgagaaggtggccaccgaggcctccaagctgagccgctacaacaagaagcccaccgtgacctcccgcgagatccagaccgccgtgcgcctggtgctgcccggcgagctggccaagcatgcggtgtcggagggcaccaaggccgtgaccaagttcacctcgggctaa

SEQ ID NO: 6765 - protein, 153 aa, Chlamydomonas reinhardtii
MAPKKDEKPATAEAGAEAPAKAEAKPKAEKAAKKAKKEPSKKAAKEPKGEGEKKDKKKKKSAVETYKLYIYKVLKQVHPDTGISSKAMSIMNSFINDIFEKVATEASKLSRYNKKPTVTSREIQTAVRLVLPGELAKHAVSEGTKAVTKFTSG

SEQ ID NO: 6766 - DNA, 366 bp, Chlamydomonas reinhardtii
  CDS (1)..(366)
atggctcccaaggctgctgagaaggctccggctaagaagacccccgccaagaccgcggagggctccaagaagaagaagaagctgaacaaggctgagacctacaaggtctacatctacaaggtgctgaagcaggtgcaccctgataccggtatctcctccaaggccatgtctatcatgaactcgttcatcaacgatatcttcgacaagatggccaacgaggccgtgcgcctggcccagtacaacaagaagcccaccctgacctcccgcgagattcagaccgctgtccgcctggtgctgcccggtgagctggccaagcacgcggtgtctgagggcaccaaggccgtgaccaagttcaccagcacctaa

SEQ ID NO: 6767 - protein, 121 aa, Chlamydomonas reinhardtii
MAPKAAEKAPAKKTPAKTAEGSKKKKKLNKAETYKVYIYKVLKQVHPDTGISSKAMSIMNSFINDIFDKMANEAVRLAQYNKKPTLTSREIQTAVRLVLPGELAKHAVSEGTKAVTKFTST

SEQ ID NO: 6768 - DNA, 462 bp, Chlamydomonas reinhardtii
  CDS (1)..(462)
atggcccccaagaaggacgagaagcccgcgactcaggaggccggcgccgaggcccctgccaaggctgaggccaagcccaaggccgagaaggccgccaagaaggccaagaaggagccctccaagaaggctgctaaggagcccaagggcgatggcgcgaagaaggacaagaagaagaagaagagcgccgtggagacctacaagctgtacatctacaaggtgctcaagcaggtgcaccccgacaccggcatcagcagcaaggccatgtccatcatgaacagcttcatcaacgatatctttgagaaggtggccactgaggcctccaagctgagccgctacaacaagaagcccaccgtgacctcccgtgagatccagaccgccgtgcgcctggtgctgcctggcgagctggccaagcacgcggtgtcggagggcaccaaggccgtgaccaagttcacctcgggctaa

SEQ ID NO: 6769 - protein, 153 aa, Chlamydomonas reinhardtii
MAPKKDEKPATQEAGAEAPAKAEAKPKAEKAAKKAKKEPSKKAAKEPKGDGAKKDKKKKKSAVETYKLYIYKVLKQVHPDTGISSKAMSIMNSFINDIFEKVATEASKLSRYNKKPTVTSREIQTAVRLVLPGELAKHAVSEGTKAVTKFTSG

SEQ ID NO: 6770 - DNA, 462 bp, Chlamydomonas reinhardtii
  CDS (1)..(462)
atggcccccaagagggacgagaagcccgcgactcaggaggccggcgccgaggcccctgccaaggccgaggccaagcctaaggccgagaaggccgccaagaaggccaagaaggagccctccaagaaggctgccaaggagcccaagggcgatggcgcgaagaaggacaagaagaagaagaagagcgccgtggagacctacaagctgtacatctacaaggtgctcaagcaggtgcaccccgacactggcatcagcagcaaggccatgtccatcatgaacagcttcatcaacgacatctttgagaaggtggccaccgaggcctccaaactgagccgctacaacaagaagcccaccgttacctcccgcgagatccagaccgccgtgcgcctggtgttgcccggcgagctggccaagcacgcagtgtcggagggcaccaaggccgtgaccaagttcacctcgggctaa

SEQ ID NO: 6771 - protein, 153 aa, Chlamydomonas reinhardtii
MAPKRDEKPATQEAGAEAPAKAEAKPKAEKAAKKAKKEPSKKAAKEPKGDGAKKDKKKKKSAVETYKLYIYKVLKQVHPDTGISSKAMSIMNSFINDIFEKVATEASKLSRYNKKPTVTSREIQTAVRLVLPGELAKHAVSEGTKAVTKFTSG

SEQ ID NO: 6772 - DNA, 462 bp, Chlamydomonas reinhardtii
  CDS (1)..(462)
atggcccccaagaaggacgagaagcccgcgactcaggaggccggcgccgaggcccctgccaaggccgaggccaagcccaaggccgagaaggccgccaagaaggccaagaaggagccctccaagaaggctgccaaggagcccaagggcgacggcgagaagaaggacaagaagaagaagaagagcgccgtggagacctacaagctgtacatctacaaggtgctcaagcaggtgcaccccgacaccggcatcagcagcaaggccatgtctatcatgaacagcttcatcaacgacatctttgagaaggtggccaccgaggcctctaagctgagccgctacaacaagaagcccaccgtgacctcccgcgagatccagaccgccgtgcgcctggtgctgcctggcgagctggccaagcacgcggtgtcggagggcaccaaggccgtgaccaagttcacctcgggctaa

SEQ ID NO: 6773 - protein, 153 aa, Chlamydomonas reinhardtii
MAPKKDEKPATQEAGAEAPAKAEAKPKAEKAAKKAKKEPSKKAAKEPKGDGEKKDKKKKKSAVETYKLYIYKVLKQVHPDTGISSKAMSIMNSFINDIFEKVATEASKLSRYNKKPTVTSREIQTAVRLVLPGELAKHAVSEGTKAVTKFTSG

SEQ ID NO: 6774 - DNA, 462 bp, Chlamydomonas reinhardtii
  CDS (1)..(462)
atggcccccaagaaggacgagaagcccccgactcaggaggccggcgccgaggcccctgccaaggccgaggccaagcccaaggccgagaaggccgccaagaaggccaagaaggagccctccaagaaggctgccaaggagcccaagggcgatggcgagaagaaggacaagaagaagaagaagagcgccgtggagacctacaagctgtacatctacaaggtgctcaagcaggtgcaccccgacaccggcatcagcagcaaggccatgtctatcatgaacagcttcatcaacgacatctttgagaaggtggccaccgaggcctccaagctgagccgctacaacaagaagcccaccgtgacctcccgtgagatccagaccgccgtgcgcctggtgctgcctggcgagctggccaagcacgcggtgtcggagggcaccaaggccgtgaccaagttcacctcgggctaa

SEQ ID NO: 6775 - protein, 153 aa, Chlamydomonas reinhardtii
MAPKKDEKPPTQEAGAEAPAKAEAKPKAEKAAKKAKKEPSKKAAKEPKGDGEKKDKKKKKSAVETYKLYIYKVLKQVHPDTGISSKAMSIMNSFINDIFEKVATEASKLSRYNKKPTVTSREIQTAVRLVLPGELAKHAVSEGTKAVTKFTSG

SEQ ID NO: 6776 - DNA, 360 bp, Hemiselmis andersenii
  CDS (1)..(360)
atgaaaaataaagttcaaaaaaaattaaatgaaaacaaaaaaaaaacagaaaaatctgatagaattataaaaaagaaaagggttatttcctatttaaactatatctataaagtgttgaagcaggttcataacgaaattggaatatcttcaaaagcaatcgattcaatgaattcttttgttatcgatttatttgaccgaataaccaccgaggcgaacaaattatcctattataataaaagcaaaaccctcacagcaagagaaattatgactggagtacgtttaattattcctggtgagcttgccaaacacgctatttcggaggggactaaagccgtagcaaaatacagaagctcaatttaa

SEQ ID NO: 6777 - protein, 119 aa, Hemiselmis andersenii
MKNKVQKKLNENKKKTEKSDRIIKKKRVISYLNYIYKVLKQVHNEIGISSKAIDSMNSFVIDLFDRITTEANKLSYYNKSKTLTAREIMTGVRLIIPGELAKHAISEGTKAVAKYRSSI

SEQ ID NO: 6778 - DNA, 426 bp, Malassezia globosa CBS 7966
  CDS (1)..(426)
atgccacctaagcctgctgagaagaagccaccatcaacggccggcaaggcacctgcctcagctggtaaggcaccgacggaaggagctaagaagacgtcaaaggcccctacaaagtcgtccgagaagaagaaatctagcagcaaggttcgaaaggagacttactcgacctacatctaccgtgtgttgaagcaggtccaccctgacacgggtatctcaaacaaggccatggccattcttaactcgtttgtgcaagatatctttgagcgtattgcctcagaggcgtcgaagctcgctagttacaacaagaagagcacaatttcttcgcgtgagatccagacagctgtgcgcctgattcttcccggcgaactatcgaaacacgccattgctgaggccacgcgctctgtcaccaagttctcgtcgacataa

SEQ ID NO: 6779 - protein, 141 aa, Malassezia globosa CBS 7966
MPPKPAEKKPPSTAGKAPASAGKAPTEGAKKTSKAPTKSSEKKKSSSKVRKETYSTYIYRVLKQVHPDTGISNKAMAILNSFVQDIFERIASEASKLASYNKKSTISSREIQTAVRLILPGELSKHAIAEATRSVTKFSST

SEQ ID NO: 6780 - DNA, 411 bp, Physcomitrella patens subsp. patens
  CDS (1)..(411)
atggctccaaaggcaggtgaggagcagaaggctggcaaatcgaaggccgaaaagaagcccgtggtgaagaaggcggagaagaagattaaggccgacaccaagggcgatgcgaagaagaagaagtctaagaagagtgtcgagacctacaagatttacatctacaaggtcttgaagcaggtgcaccctgataccggtatttcatcgaaggcgatgggtattatgaactcatttattaatgatattttcgagaagctggcccaagaggctgctcgtctggcacggtacaataagaagccaacgatcacttctcgcgagatccaaactgctgtgaggttaatattgccaggggaattggcgaagcacgccgtgtcagaaggtacaaaggcggtgactaagtttactagcgcataa

SEQ ID NO: 6781 - protein, 136 aa, Physcomitrella patens subsp. patens
MAPKAGEEQKAGKSKAEKKPVVKKAEKKIKADTKGDAKKKKSKKSVETYKIYIYKVLKQVHPDTGISSKAMGIMNSFINDIFEKLAQEAARLARYNKKPTITSREIQTAVRLILPGELAKHAVSEGTKAVTKFTSA

SEQ ID NO: 6782 - DNA, 405 bp, Physcomitrella patens subsp. patens
  CDS (1)..(405)
atggctcccaagactgatgagcaaaaggccggcaagagcaaagcggagaagaagccagtgaagaaggccgagaagaaaatcaagagcgacagcaagaccgacgccaagaagaagaagtcgaagaagagcgtcgagacttacaagatatacatctacaaggttttgaagcaggtacatcccgacaccggtatttcgtcgaaggcaatgggcattatgaactcctttatcaatgacattttcgaaaagcttgctcaagaagccgccagacttgcgcgctacaataagaagcctacaattacttctcgcgaaattcagactgccgtgcgtttgattttgcctggagagttggcaaagcatgcagtttcagaggggaccaaagccgtcactaagtttactagcgcttag

SEQ ID NO: 6783 - protein, 134 aa, Physcomitrella patens subsp. patens
MAPKTDEQKAGKSKAEKKPVKKAEKKIKSDSKTDAKKKKSKKSVETYKIYIYKVLKQVHPDTGISSKAMGIMNSFINDIFEKLAQEAARLARYNKKPTITSREIQTAVRLILPGELAKHAVSEGTKAVTKFTSA

SEQ ID NO: 6784 - DNA, 408 bp, Physcomitrella patens subsp. patens
  CDS (1)..(408)
atggcgccgaaggctgatgagcagaaggctggcaagagcaaagccgagaagaagccggtggtgaagaaggcggagaagaagatcaaaagtgatgtcaagggcgatgccaagaggaagaaatcgaagaagagcattgagacctacaagatctacatctacaaggttctgaagcaggtgcatcctgataccggtatctcctccaaggcaatgggaatcatgaactctttcatcaatgacatcttcgagaagcttgcgcaggaggctgcccgtcttgcgaggtacaataagaagcccaccattacatcccgcgagattcagaccgcagttcgcctgatcctgcccggggagttggctaagcacgcggtgtcggagggtaccaaggccgtgacgaaattcacaagtgcctag

SEQ ID NO: 6785 - protein, 135 aa, Physcomitrella patens subsp. patens
MAPKADEQKAGKSKAEKKPVVKKAEKKIKSDVKGDAKRKKSKKSIETYKIYIYKVLKQVHPDTGISSKAMGIMNSFINDIFEKLAQEAARLARYNKKPTITSREIQTAVRLILPGELAKHAVSEGTKAVTKFTSA

SEQ ID NO: 6786 - DNA, 417 bp, Physcomitrella patens subsp. patens
  CDS (1)..(417)
atggctccgaaggcagcatctcccgagcagaaggctggtaagtccaaggccgagaagaagcccgtggtgatgaaggccgagaagaaaatcaaagctgataccaagggtgatgcaaagaagaggaagaaatcgaagaaaaacgtggagacatacaagatttatatctacaaggttctgaagcaggtccaccctgacacaggcatctcatcaaaggctatgggaattatgaactcgttcataaacgatatttttgagaagttggcgcaggaggctgctcgtctggctcgatataacaagaagccaacgatcacctctcgtgagatccagactgctgtacgtctgatcctaccgggagagttggcgaagcacgctgtctcggagggaacgaaggcggtaacgaagttcacgagcgcgtag

SEQ ID NO: 6787 - protein, 138 aa, Physcomitrella patens subsp. patens
MAPKAASPEQKAGKSKAEKKPVVMKAEKKIKADTKGDAKKRKKSKKNVETYKIYIYKVLKQVHPDTGISSKAMGIMNSFINDIFEKLAQEAARLARYNKKPTITSREIQTAVRLILPGELAKHAVSEGTKAVTKFTSA

SEQ ID NO: 6788 - DNA, 411 bp, Physcomitrella patens subsp. patens
  CDS (1)..(411)
atggctcccaagacaggagaggagcagaaggccggcaaatccaaggccgagaagaagccggtggtgaagaaggctgagaagaagatcaaggctgacatcaagggtgatgccaagaagaagaagtcgaagaagagcattgagacttacaagatctacatctataaagttcttaaacaggtgcatcccgatactggtatatcctcgaaggcgatgggcatcatgaactcgttcattaatgatatttttgagaagttagcacaggaggccgcacgcctagcccgctacaacaagaagccgaccatcacctctcgtgagattcagactgctgtgcgtctgattctgccgggtgagttggcgaagcatgctgtatctgaggggaccaaggctgtgacgaagttcacgagcgcataa

SEQ ID NO: 6789 - protein, 136 aa, Physcomitrella patens subsp. patens
MAPKTGEEQKAGKSKAEKKPVVKKAEKKIKADIKGDAKKKKSKKSIETYKIYIYKVLKQVHPDTGISSKAMGIMNSFINDIFEKLAQEAARLARYNKKPTITSREIQTAVRLILPGELAKHAVSEGTKAVTKFTSA

SEQ ID NO: 6790 - DNA, 411 bp, Physcomitrella patens subsp. patens
  CDS (1)..(411)
atggcccccaaggcaggagaggagcagaaggctaccaagtccaaggccgagaagaagcccgtagtgaagaaggctgagaagaagatcaaggccgacactaagggtgattcgaagaagaagaagtcgaagaagagcgtggagacgtacaagatttacatctataaggtcttgaagcaggttcatcctgacactggtatctcatcgaaggctatgggtattatgaactcgtttataaacgatattttcgagaagttggctcaagaggcggctcgactagctcggtacaataagaagcccacgattacttctcgcgagattcagactgcagtgcgtctgattctcccgggtgagttggcgaagcacgcagtctcagagggaaccaaggccgtgacgaagttcactagcgcctag

SEQ ID NO: 6791 - protein, 136 aa, Physcomitrella patens subsp. patens
MAPKAGEEQKATKSKAEKKPVVKKAEKKIKADTKGDSKKKKSKKSVETYKIYIYKVLKQVHPDTGISSKAMGIMNSFINDIFEKLAQEAARLARYNKKPTITSREIQTAVRLILPGELAKHAVSEGTKAVTKFTSA

SEQ ID NO: 6792 - DNA, 411 bp, Physcomitrella patens subsp. patens
  CDS (1)..(411)
atggccccgaaggcaggagaagagcagaaggctaccaagtccaaggctgagaagaagcccgtggtgaagaaggcggagaagaagatcaaggccgacaccaagggcgattcgaagaagaagaagtcgaagaagaacgtggagacgtacaagatctacatatacaaggtgttgaagcaggttcatcctgacactggtatttcatcgaaggctatgggtattatgaactcgttcattaacgatattttcgagaagctggcgcaagaggcggcccgactgtctcggtataacaagaagccgacgatcacttctcgcgagattcagactgcagttcgtctgattctcccaggagagttggctaagcacgcagtctcagaaggcacaaaggccgtgacgaagttcaccagcgcctag

SEQ ID NO: 6793 - protein, 136 aa, Physcomitrella patens subsp. patens
MAPKAGEEQKATKSKAEKKPVVKKAEKKIKADTKGDSKKKKSKKNVETYKIYIYKVLKQVHPDTGISSKAMGIMNSFINDIFEKLAQEAARLSRYNKKPTITSREIQTAVRLILPGELAKHAVSEGTKAVTKFTSA

SEQ ID NO: 6794 - DNA, 408 bp, Physcomitrella patens subsp. patens
  CDS (1)..(408)
atggctccgaagagtgatgagcagaaggctggcaagagcaaggctgagaagaaaccagtagtgaagaaagccgagaagaagatcaagagcgatactaaggttgacgctaagaagaagaaggcgaagaagagcgttgagacgtacaagatttacatctacaaggtcttgaagcaggtacatcctgacactggtatatcttctaaggctatgggcatcatgaattcctttatcaacgatatctttgagaagttggcccaggaagccgctcggcttgcaaggtataataagaagccgaccatcacttctcgtgagattcaaaccgctgtgcgcttgattcttcccggagagttggcgaaacacgcagtgtctgaaggaactaaggctgtgacaaagttcacgagctcttag

SEQ ID NO: 6795 - protein, 135 aa, Physcomitrella patens subsp. patens
MAPKSDEQKAGKSKAEKKPVVKKAEKKIKSDTKVDAKKKKAKKSVETYKIYIYKVLKQVHPDTGISSKAMGIMNSFINDIFEKLAQEAARLARYNKKPTITSREIQTAVRLILPGELAKHAVSEGTKAVTKFTSS

SEQ ID NO: 6796 - DNA, 402 bp, Physcomitrella patens subsp. patens
  CDS (1)..(402)
atggcgcccaagactgatgagcagaaggctggtaagagcaaggccgagaagaagcccatgaagaaggcggagaagaaaatcaagagcgacgtcaagagcgatgtgaagaagaagtcgaagaagagcgtcgagacctacaagatttatatctataaagtgttgaagcaggtgcatcccgataccggtatttcatccaaggccatgggtatcatgaactcgtttattaacgacattttcgagaagctggcccaggaggctgccaggcttgcccgatacaataagaagcccaccatcacttcgcgtgagatccagattgctgtgcgtttaatcctgcccggagagctggctaagcacgctgtgtccgaggggaccaaggctgtcaccaagttgacaagcgcctaa

SEQ ID NO: 6797 - protein, 133 aa, Physcomitrella patens subsp. patens
MAPKTDEQKAGKSKAEKKPMKKAEKKIKSDVKSDVKKKSKKSVETYKIYIYKVLKQVHPDTGISSKAMGIMNSFINDIFEKLAQEAARLARYNKKPTITSREIQIAVRLILPGELAKHAVSEGTKAVTKLTSA

SEQ ID NO: 6798 - DNA, 423 bp, Phaeosphaeria nodorum SN15
  CDS (1)..(423)
atgcctcccaaagcgcagaagactcccaccaccggcggcaaggccccggctggaaaggcacccgttgagaagaaggaggctggcaagaagaccgccgctccctctggcgagaagaagaagcgcaccaagaccaggaaggagacctactcctcatacatctacaaggttctcaagcaggtccaccccgacactggtatctccaaccgcgccatgagcatcctgaactcgttcgtcaccacaacgcacatcttcgagcgcgtcgccactgaggcctccaagcttgccgcatacaacaagaagtccaccatctcgtcgcgcgagatccagacctcagtccgtctgatcctacccggtgaactcgccaagcacgccgtctctgagggcaccaaggccgtcacaaagtactcttcatccaccaaatag

SEQ ID NO: 6799 - protein, 140 aa, Phaeosphaeria nodorum SN15
MPPKAQKTPTTGGKAPAGKAPVEKKEAGKKTAAPSGEKKKRTKTRKETYSSYIYKVLKQVHPDTGISNRAMSILNSFVTTTHIFERVATEASKLAAYNKKSTISSREIQTSVRLILPGELAKHAVSEGTKAVTKYSSSTK

SEQ ID NO: 6800 - DNA, 441 bp, Coprinopsis cinerea okayama7#130
  CDS (1)..(441)
atggctcccaaacccgcttccactgccggcaaggcccctgtttccaccgcctccaaggctcccgctaagcctgctgagggtgcaaaggctgctaagaagacctccaagcccgcttctggtgctgacggcgacaagaagaagcgcaagaaggtccgaaaggagacttactcctcttacatttacaaggtcctcaagcaggtccaccctgatactggtatctccaacaaggcgatggccattctcaactcgttcgtgaacgacatcttcgagcgaattgccactgaggcttccaagctcgcttcttactccaagaagtccaccatctcatcacgcgaaatccaaactgctgtccgcctcatcctccctggtgaactcgccaagcacgctatctctgagggtaccaagtcggtgaccaaattctcttccgctggtgccaagtaa

SEQ ID NO: 6801 - protein, 146 aa, Coprinopsis cinerea okayama7#130
MAPKPASTAGKAPVSTASKAPAKPAEGAKAAKKTSKPASGADGDKKKRKKVRKETYSSYIYKVLKQVHPDTGISNKAMAILNSFVNDIFERIATEASKLASYSKKSTISSREIQTAVRLILPGELAKHAISEGTKSVTKFSSAGAK

SEQ ID NO: 6802 - DNA, 438 bp, Coprinopsis cinerea okayama7#130
  CDS (1)..(438)
atggcccccaaacccgcttccactgctggcaaggctcctgcctccaccgcctccaaggcccccgcaaagtctgcagaggcatccaaggccgctaagaagacctccaagcctgcacctgccgatggcgagaagaagaagcgaaagaaggtccgaaaggagacttactcttcctacatctacaaggtcctcaagcaggtccaccccgacactggtatctccaacaaggccatggccattttgaactcctttgtcaacgacatcttcgagcgaattgccacggaggcttccaaactcgcttcttactccaagaagtccaccatctcgtcaagagaaatccaaactgctgtgcgcctcatcctccctggtgaactcgccaagcacgctatctctgagggcaccaagtcagtaaccaagttctcgtccgctggtgccaagtaa

SEQ ID NO: 6803 - protein, 145 aa, Coprinopsis cinerea okayama7#130
MAPKPASTAGKAPASTASKAPAKSAEASKAAKKTSKPAPADGEKKKRKKVRKETYSSYIYKVLKQVHPDTGISNKAMAILNSFVNDIFERIATEASKLASYSKKSTISSREIQTAVRLILPGELAKHAISEGTKSVTKFSSAGAK

SEQ ID NO: 6804 - DNA, 399 bp, Culex quinquefasciatus
  CDS (1)..(399)
atggcaccgaaggcaagtccaggcggcaaggccgtcaagaaggcggcggttggcaaggctcagaagaacatctccaaggtcgacaagaagaccggcgtcggcaagcggaagccccgcaggaaggaaagctacgggatgtacatctacaaggtgctgaagcaggtccatccggatacgggcatctcgtcgaaggccatgagcatcatgaacagcttcgtgaacgacatcttcgagcggatcgcgggggaagcttcccggctggcccagtacaacaagcgggcgaccatctcgtcgcgggagattcagaccgcggttcggctgttgctgcccggggagttggccaagcacgccgtgtccgagggaaccaaggccgtgactaagtacaccagctcgaagtag

SEQ ID NO: 6805 - protein, 132 aa, Culex quinquefasciatus
MAPKASPGGKAVKKAAVGKAQKNISKVDKKTGVGKRKPRRKESYGMYIYKVLKQVHPDTGISSKAMSIMNSFVNDIFERIAGEASRLAQYNKRATISSREIQTAVRLLLPGELAKHAVSEGTKAVTKYTSSK

SEQ ID NO: 6806 - DNA, 375 bp, Culex quinquefasciatus
  CDS (1)..(375)
atggcaccaaaaccaagcgttagggccgccaggaagtccgccaggcccagaagaacatcaccaagggtgataagaagaagaagagggtccgcaggaaaggagagctacgccatctacatctacaaggtgttgaagcaggtccaccctgacaccggtatctcgtccaaggccatgagcatcatgaacagctttgtcaacgacatcttcgagcgtatcgccgccgaagcgtcccgtctggctcactacaacaagcgctcgaccatcacgtcccgcgaaatccagaccgctgttcgtctgctgctgcctggtgagctggccaagcacgccgtctctgagggtaccaaggctgtcaccaagtacaccagctccaagtaa

SEQ ID NO: 6807 - protein, 124 aa, Culex quinquefasciatus
MAPKPSVRAARKSARPRRTSPRVIRRRRGSAGKESYAIYIYKVLKQVHPDTGISSKAMSIMNSFVNDIFERIAAEASRLAHYNKRSTITSREIQTAVRLLLPGELAKHAVSEGTKAVTKYTSSK

SEQ ID NO: 6808 - DNA, 375 bp, Culex quinquefasciatus
  CDS (1)..(375)
atggcaccaaaaaccagcggtaaggccgccaagaagtccggcaaggcccagaagaacatcaccaagggtgataagaagaagaagaaggtccgcaggaaggagagctacgccatctacatctacaaggtgttgaagcaggtccaccctgacaccggtatctcgtccaaggccatgagcatcatgaacagctttgtcaacgacatcttcgagcgtatcgccgccgaagcgtcccgtctggctcactacaacaagcgctcgaccatcacgtcccgcgaaatccagaccgctgttcgtctgctgctgcctggtgagctggccaagcacgccgtctctgagggtaccaaggctgtcaccaagtacaccagctccaagtaa

SEQ ID NO: 6809 - protein, 124 aa, Culex quinquefasciatus
MAPKTSGKAAKKSGKAQKNITKGDKKKKKVRRKESYAIYIYKVLKQVHPDTGISSKAMSIMNSFVNDIFERIAAEASRLAHYNKRSTITSREIQTAVRLLLPGELAKHAVSEGTKAVTKYTSSK

SEQ ID NO: 6810 - DNA, 384 bp, Culex quinquefasciatus
  CDS (1)..(384)
atggcaccaccgaaatctagtggaaaggcggccaagaagtccagcggcaaggcgtccaagaacatcgtcaagggcgacaagaaggccaagaagaagaccaagcgtaaggagagctacgccatctacatctacaaggttctgaagcaggtccatccggacaccggaatctcgtcgaaggcgatgagcatcatgaacagcttcgtgaacgatatcttcgagcggattgctgccgaggcgtcccgattggcgcagtacaacaagcggtccacgatcacgtcccgcgagatccagaccgccgttcgtctgctgctgcccggggagttggccaagcacgccgtgtccgagggcaccaaggcggtcaccaagtacactagctccaagtaa

SEQ ID NO: 6811 - protein, 127 aa, Culex quinquefasciatus
MAPPKSSGKAAKKSSGKASKNIVKGDKKAKKKTKRKESYAIYIYKVLKQVHPDTGISSKAMSIMNSFVNDIFERIAAEASRLAQYNKRSTITSREIQTAVRLLLPGELAKHAVSEGTKAVTKYTSSK

SEQ ID NO: 6812 - DNA, 441 bp, Laccaria bicolor S238N-H82
  CDS (1)..(441)
atggctcctaaacccgcttccaccgctggcaaagccccagtctcgaccgcttccaaggctccagccaaatcgacggagggtgcaaaggcagccaagaagacagcgaaagccgcagcgcctgctgatggggagaagaagaagcgaaagaaggtccgaaaggagacttactcctcatacatctacaaagtccttaaacaggtccaccccgacaccggtatctccaacaaggcgatggccatcctcaacagcttcgtgaacgatatcttcgaacggattgccactgaagcttctaaactcgctgcctactccaagaagtccaccatctcatcacgcgaaatccaaacatcagtgcgactcattctgcccggtgaactcgccaaacacgcaatctcagaaggaaccaagtcggtaacgaagttctcatcggcgggcgcgaagtaa

SEQ ID NO: 6813 - protein, 146 aa, Laccaria bicolor S238N-H82
MAPKPASTAGKAPVSTASKAPAKSTEGAKAAKKTAKAAAPADGEKKKRKKVRKETYSSYIYKVLKQVHPDTGISNKAMAILNSFVNDIFERIATEASKLAAYSKKSTISSREIQTSVRLILPGELAKHAISEGTKSVTKFSSAGAK

SEQ ID NO: 6814 - DNA, 447 bp, Laccaria bicolor S238N-H82
  CDS (1)..(447)
atggcacccaaacccgcatccactgctggcaaagcccccgcttctaccgccaccgcttctaagactcccgccaaatccactgaaggtgctaaggcagcaaagaagacttcaaaagccgcagcaccagctgatggtgagaagaagaagagaaagaaggttcgaaaagagacatactcctcatacatctacaaggtcctaaagcaggtccaccccgacactggtatctccaacaaggcaatggctatcttgaacagcttcgtcaacgatatctttgagcggatcgcaacagaggcatcgaaactcgctgcatactcaaagaaatcaactatctcctcacgcgaaatccagacctctgtgcggttaatcctaccaggtgaactcgccaagcacgccatctctgagggtacgaagtcggttacaaaattctcatcggcgggtgccaaatag

SEQ ID NO: 6815 - protein, 148 aa, Laccaria bicolor S238N-H82
MAPKPASTAGKAPASTATASKTPAKSTEGAKAAKKTSKAAAPADGEKKKRKKVRKETYSSYIYKVLKQVHPDTGISNKAMAILNSFVNDIFERIATEASKLAAYSKKSTISSREIQTSVRLILPGELAKHAISEGTKSVTKFSSAGAK

SEQ ID NO: 6816 - DNA, 369 bp, Brugia malayi
  CDS (1)..(369)
  misc_feature (246)..(246): r is g or a
atgccaccgaagccgtcagctaaaggagcaaagaaagcagcgaagtctcataagccgcgtagtggcgataagaaacgacggagtcgacgaaaggagtcttactcagcatacatctatcgggtcctgaagcaggtacatcctgatacgggcatctcatcgaaggctatgtcgattatgaactcattcgtaaacgacgtcttcgaacgtattgctgcggaagctagtcgcttggctcattataataarcgttcaacgatctcatcccgtgaaattcagacagctgttcgacttattctcccaggtgaattggctaagcatgctgtttcggaaggtacaaaggcagttacgaagtacactagctcgaagtga

SEQ ID NO: 6817 - protein, 122 aa, Brugia malayi
MPPKPSAKGAKKAAKSHKPRSGDKKRRSRRKESYSAYIYRVLKQVHPDTGISSKAMSIMNSFVNDVFERIAAEASRLAHYNKRSTISSREIQTAVRLILPGELAKHAVSEGTKAVTKYTSSK

SEQ ID NO: 6818 - DNA, 414 bp, Podospora anserina DSM 980
  CDS (1)..(414)
atgccccccaaggccgctgacaagaagcccgccaacaaggcccccgccactgcctccaaggctcccgagaagaaggatgctggcaagaagaccgctgcctctggcgagaagaagaagcgcaccaaggcgcgcaaggagacctactcctcctacatttacaaggtcctcaagcaggtccaccccgacactggtatctccaaccgtgccatgtccatcctcaactctttcgtgaacgacatcttcgagcgcgtcgcgaccgaggcttccaagcttgccgcctacaacaagaagtccaccatctcatcccgtgagatccagacctccgtgcgcctcatccttcccggcgagcttgccaagcacgccgtgtctgaaggcaccaaggccgtcaccaagtactcgtcgagcacgaaatag

SEQ ID NO: 6819 - protein, 137 aa, Podospora anserina DSM 980
MPPKAADKKPANKAPATASKAPEKKDAGKKTAASGEKKKRTKARKETYSSYIYKVLKQVHPDTGISNRAMSILNSFVNDIFERVATEASKLAAYNKKSTISSREIQTSVRLILPGELAKHAVSEGTKAVTKYSSSTK

SEQ ID NO: 6820 - DNA, 417 bp, Pyrenophora tritici-repentis Pt-1C-BFP
  CDS (1)..(417)
atgcctcccaaagcccagaagactcccaccaccggcggcaaggccccggctggtaaggctcccgccgagaagaaggaggctggcaagaagaccgccgcgccctctggcgacaagaagaagcgcaccaagaccaggaaggagacctactcttcctacatctacaaggtcctcaagcaggtccaccccgacaccggaatttccaaccgtgccatgagcatcctcaactcctttgttaacgacatcttcgagcgcgttgccaccgaggctagcaagctcgctgcctacaacaagaagtcgaccatctcatcgcgcgagatccagacatcagtccgtctgatcctgcccggtgaacttgccaagcacgccgtttccgagggtaccaaggccgttaccaagtactcttcatccaccaaatag

SEQ ID NO: 6821 - protein, 138 aa, Pyrenophora tritici-repentis Pt-1C-BFP
MPPKAQKTPTTGGKAPAGKAPAEKKEAGKKTAAPSGDKKKRTKTRKETYSSYIYKVLKQVHPDTGISNRAMSILNSFVNDIFERVATEASKLAAYNKKSTISSREIQTSVRLILPGELAKHAVSEGTKAVTKYSSSTK

SEQ ID NO: 6822 - DNA, 381 bp, Acyrthosiphon pisum
  CDS (1)..(381)
atggctccaggaggtaaatccgcaggcggcaaagcgatgaagaagtccggtaaggctcaaaagaacatcgccaaatccgacaagaaacgcaagcccaagaggaaagaatcgtacgctatctacatctacaaagtgctgaagcaagtgcacccagacactggcgtttcctcaaaggcaatgagcatcatgaacagtttcgtcaacgatctcttcgaacgtatcgcttctgaatccagtcgtttggctcactacaacaagcgttcaactatcaccagtcgggaaatccaaaccgccgtccgcctcttgttgcccggcgaattggccaagcacgccgtcagtgagggaaccaaagccgtcaccaaatacacgagctccaaataa

SEQ ID NO: 6823 - protein, 126 aa, Acyrthosiphon pisum
MAPGGKSAGGKAMKKSGKAQKNIAKSDKKRKPKRKESYAIYIYKVLKQVHPDTGVSSKAMSIMNSFVNDLFERIASESSRLAHYNKRSTITSREIQTAVRLLLPGELAKHAVSEGTKAVTKYTSSK

SEQ ID NO: 6824 - DNA, 381 bp, Acyrthosiphon pisum
  CDS (1)..(381)
atggctccaggaggaaaatcaacaggaaaggcgatgaaaaaatcgtcgggcaaagcgcaaaagaacatcgtcaaggcaggaaagaaacgcaagcccaagaggaaagaatcgtacggtatttacatctacaaagtgctgaaacaagtacaccccgataccggcgtctcctcaaaggctatgagcatcatgaacagcttcgtcaatgatcttttcgagcgcatcgccgccgaatccagccggctggctcactacaacaagcgttcgacaatcaccagtcgggaaatccaaacagctgtccgtctcttgttgcccggtgaattggccaagcacgccgtcagcgaaggcacaaaggctgtcacaaaatacaccagctccaagtaa

SEQ ID NO: 6825 - protein, 126 aa, Acyrthosiphon pisum
MAPGGKSTGKAMKKSSGKAQKNIVKAGKKRKPKRKESYGIYIYKVLKQVHPDTGVSSKAMSIMNSFVNDLFERIAAESSRLAHYNKRSTITSREIQTAVRLLLPGELAKHAVSEGTKAVTKYTSSK

SEQ ID NO: 6826 - DNA, 381 bp, Acyrthosiphon pisum
  CDS (1)..(381)
atggctccaggaggaaaatcggctggtaaagcgatgaagaaatcatccggaaaagctcaaaagaacattgccaagtccgacaagaaacgcaagcccaagaggaaagaatcgtacgctatctacatctacaaagtgttgaagcaagtacatcccgacaccggcgtctcttcaaaggccatgagcatcatgaacagcttcgtcaacgatctgttcgaacgcatcgccgctgaatccagtcgtctggcccattacaacaagcgttcgaccattaccagccgggaaattcaaactgccgtccgccttttgttgccaggtgagttggccaagcacgccgtcagtgaaggtactaaggccgtgaccaagtataccagctccaaatga

SEQ ID NO: 6827 - protein, 126 aa, Acyrthosiphon pisum
MAPGGKSAGKAMKKSSGKAQKNIAKSDKKRKPKRKESYAIYIYKVLKQVHPDTGVSSKAMSIMNSFVNDLFERIAAESSRLAHYNKRSTITSREIQTAVRLLLPGELAKHAVSEGTKAVTKYTSSK

SEQ ID NO: 6828 - DNA, 387 bp, Acyrthosiphon pisum
  CDS (1)..(387)
atggcacctggagttggtaaagctatgaaaaagacatcaccgggcaaagcgcagaaaagcgtcgttgccaagccaggtggcggcaataggaaacgcaagaccaagaggcttcaaacgtacggcatctacatctacaaagtgctgaaacaagtgcatcccgataccagcatctcgtcaaaggccatgagtatcatgaacagcttcgtcaacgaccttttcgagcgcatcgccagcgaggctaaccgtctggcccaatacaacaagcgtaggacgatctccagtaaagagatccagacggccgtccggcttttgttgcccggtgaattggccaagcacgcagtcagcgaaggcaccaaggccgtgaccaagtataccagctccaaataa

SEQ ID NO: 6829 - protein, 128 aa, Acyrthosiphon pisum
MAPGVGKAMKKTSPGKAQKSVVAKPGGGNRKRKTKRLQTYGIYIYKVLKQVHPDTSISSKAMSIMNSFVNDLFERIASEANRLAQYNKRRTISSKEIQTAVRLLLPGELAKHAVSEGTKAVTKYTSSK

SEQ ID NO: 6830 - DNA, 369 bp, Drosophila ananassae
  CDS (1)..(369)
atgccgccgaaaaccagtggaaaggcagccaagaaggctggcaaagctcagaaaaatataaccaagaatgataagaagaagcgcaagaggaaggaaagctatgctatttacatctacaaggttctgaagcaggttcaccctgacactggaatttcgtctaaagctatgagtataatgaacagcttcgtaaacgatatctttgagcgtattgctgctgaggcttcgcgtctggctcattacaacaagcgctcgaccatcaccagtcgggaaatccaaacggctgttcgtcttctcctgcctggagagttggccaagcatgccgttagtgaaggaaccaaggctgtcactaagtatacaagctccaagtag

SEQ ID NO: 6831 - protein, 122 aa, Drosophila ananassae
MPPKTSGKAAKKAGKAQKNITKNDKKKRKRKESYAIYIYKVLKQVHPDTGISSKAMSIMNSFVNDIFERIAAEASRLAHYNKRSTITSREIQTAVRLLLPGELAKHAVSEGTKAVTKYTSSK

SEQ ID NO: 6832 - DNA, 396 bp, Drosophila ananassae
  CDS (1)..(396)
atgccgccgaaaaccagtggaaaggcagccaagaaggctggcaaagctcagaaaaatataaccaagaatgataagaagaagaagcgcaagaggaaggaaagctatgctatttacatctacaaggttctgaagcaggttcaccctgacactggaatttcgtctaaagctatgagtataatgaacagcttcgtaaacgatatctttgagcgtattgctgctgaggcttcgcgtctggctcattacaacaagcgctcgaccatcaccagtcgggaaatccaaacggctgttcgtcttctcctgcctggagagttggcccagcatgccgttagtgaaggaacaaagctgtcactaagtatacaagctccaagtagattgctcgcttgctggggcaaatga

SEQ ID NO: 6833 - protein, 131 aa, Drosophila ananassae
MPPKTSGKAAKKAGKAQKNITKNDKKKKRKRKESYAIYIYKVLKQVHPDTGISSKAMSIMNSFVNDIFERIAAEASRLAHYNKRSTITSREIQTAVRLLLPGELAQHAVSEGTKLSLSIQAPSRLLACWGK

SEQ ID NO: 6834 - DNA, 372 bp, Drosophila grimshawi
  CDS (1)..(372)
atgccgccgaaaactagtggaaaggcagccaaaaaggctggcaaggctcaaaagaacatcaccaagaatgacaagaagaagaagcgcaagaggaaggaaagctatgccatctacatttacaaagtgttgaagcaggtccatcctgacactggcatttcgtcaaaggcaatgagcatcatgaacagcttcgtgaatgatatttttgagcgtattgctgccgaggcatctcgtttggcccactacaacaaacgttcaaccatcacaagtcgggaaatccaaaccgctgtccgtcttttactgcccggagagttggctaagcacgccgtcagtgagggaaccaaagcagtcaccaagtacactagctccaagtaa

SEQ ID NO: 6835 - protein, 123 aa, Drosophila grimshawi
MPPKTSGKAAKKAGKAQKNITKNDKKKKRKRKESYAIYIYKVLKQVHPDTGISSKAMSIMNSFVNDIFERIAAEASRLAHYNKRSTITSREIQTAVRLLLPGELAKHAVSEGTKAVTKYTSSK

SEQ ID NO: 6836 - DNA, 372 bp, Drosophila grimshawi
  CDS (1)..(372)
atgccgccgaaaactagtggaaaggcagccaaaagggctggcaaggctcaaaagaacattaccaagaacgacaagaagaagaagcgcaagaggaaggaaagctatgccatctacatttacaaagtgttgaagcaggtccatcctgacactggcatttcgtcaaaggcaatgagcatcatgaacagcttcgtgaatgatatttttgagcgtattgctgccgaggcatctcgtttggcccactacaacaaacgttcaaccatcacaagtcgggaaatccaaaccgctgtccgtcttttactgcccggagagttggctaagcacgccgtcagtgagggaaccaaagcagtcaccaagtacactagctccaagtaa

SEQ ID NO: 6837 - protein, 123 aa, Drosophila grimshawi
MPPKTSGKAAKRAGKAQKNITKNDKKKKRKRKESYAIYIYKVLKQVHPDTGISSKAMSIMNSFVNDIFERIAAEASRLAHYNKRSTITSREIQTAVRLLLPGELAKHAVSEGTKAVTKYTSSK

SEQ ID NO: 6838 - DNA, 372 bp, Drosophila grimshawi
  CDS (1)..(372)
atgccgccgaaaactagtggaaaggcagccaaaaaggctggcaaggctcaaaagtacatcaccaagaatgacaagaagaagaagcgcaagaggaaggaaagctatgccatctacatttacaaagtgttgaagcaggtccatcctgacactggcatttcgtcaaaggcaatgagcatcatgaacagcttcgtgaatgatatttttgagcgtattgctgccgaggcatctcgtttggcccactacaacaaacgttcaaccatcacaagtcgggaaatccaaaccgctgtccgtcttttactgcccggagagttggctaagcacgccgtcagtgagggaaccaaagcagtcaccaagtacactagctccaagtaa

SEQ ID NO: 6839 - protein, 123 aa, Drosophila grimshawi
MPPKTSGKAAKKAGKAQKYITKNDKKKKRKRKESYAIYIYKVLKQVHPDTGISSKAMSIMNSFVNDIFERIAAEASRLAHYNKRSTITSREIQTAVRLLLPGELAKHAVSEGTKAVTKYTSSK

SEQ ID NO: 6840 - DNA, 372 bp, Drosophila sechellia
  CDS (1)..(372)
atgcctccgaaaactagtggaaaggcagccaagaaggctggcaaggctcagaagaacatcaccaagaacgacaagaaaaagaaacgcaagaggaaggagagctatgccatctacatttacaaggttctcaagcaggtccatcctgacaccagaatttcgtcgaaggcgatgagcataatgaacagctttgtaaatgatattttcgagcgaattgctgccgaagcgtctcgtctagctcactacaacaagcgctcgaccatcaccagtcgggaaatccaaacggctgttcgcctgcttctgcctggagagttggccaagcatgctgtcagtgagggaaccaaggctgttaccaagtacaccagctccaaataa

SEQ ID NO: 6841 - protein, 123 aa, Drosophila sechellia
MPPKTSGKAAKKAGKAQKNITKNDKKKKRKRKESYAIYIYKVLKQVHPDTRISSKAMSIMNSFVNDIFERIAAEASRLAHYNKRSTITSREIQTAVRLLLPGELAKHAVSEGTKAVTKYTSSK

SEQ ID NO: 6842 - DNA, 372 bp, Drosophila sechellia
  CDS (1)..(372)
atgcctccgaaaactagtggaaaggcagccaagaaggctggcaaggctcagaagaacatcaccaagaacgacaagaaaaagaaacgcaagaggaaggagagctatgccatctacatttacaaggttctcaagcaggtccatcctgacaccggaatttcgtcgaaggcgatgagcataatgaacagctttgtaaatgatattttcgagcgaattgctgccgaagcgtctcgtctagctcactacaacaagcgctcgaccatcaccagtcgggaaatccaaacggctgttcgcctgcttctgcctggagagttggccaagcatgctgtcagtgagggaaccaaggctgttaccaagtacaccagctccaattaa

SEQ ID NO: 6843 - protein, 123 aa, Drosophila sechellia
MPPKTSGKAAKKAGKAQKNITKNDKKKKRKRKESYAIYIYKVLKQVHPDTGISSKAMSIMNSFVNDIFERIAAEASRLAHYNKRSTITSREIQTAVRLLLPGELAKHAVSEGTKAVTKYTSSN

SEQ ID NO: 6844 - DNA, 372 bp, Drosophila sechellia
  CDS (1)..(372)
atgcctccgaaaactagtggaaaggtagccaagaaggctggcaaggctcagaagaacatcaccaagaacgacaagaaaaagaaacgcaagaggaaggagagttatgccatctacatttacaaggttctcaagcaggtccatcctgacaccggaatttcgtcgaaggcgatgagcataatgaacagctttgtaaatgatattttcgagcgaattgctgccgaagcgtctcgtctagctcactacaacaagcgctcgaccatcaccagtcgggaaatccaaacggctgttcgcctgcttctgcctggagagttggccaagcatgctgtcagtgagggaaccaaggctgttaccaagtacaccagctccaaataa

SEQ ID NO: 6845 - protein, 123 aa, Drosophila sechellia
MPPKTSGKVAKKAGKAQKNITKNDKKKKRKRKESYAIYIYKVLKQVHPDTGISSKAMSIMNSFVNDIFERIAAEASRLAHYNKRSTITSREIQTAVRLLLPGELAKHAVSEGTKAVTKYTSSK

SEQ ID NO: 6846 - DNA, 372 bp, Drosophila sechellia
  CDS (1)..(372)
atgcctccgaaaactagtggaaaggcagccaagaaggctggcaaggctcagaagaacatcaccaagaacgacaagaaaaagaaacgcaagaggaaggagagctatgccatctacatttacaaggttctcaagcaggtccatcctgacaccggaatttcgtcgaaggcgatgagcataatgaacagctttgtaaatgatattttcgagcgaattgctgccgaagcgtctcgtctagcttactacaacaagcgctcgaccatcaccagtcgggaaatccaaacggctgttcgcctgcttctgcctggagagttggccaagcatgctgtcagtgagggaaccaaggctgttaccaagtacaccagctccaaataa

SEQ ID NO: 6847 - protein, 123 aa, Drosophila sechellia
MPPKTSGKAAKKAGKAQKNITKNDKKKKRKRKESYAIYIYKVLKQVHPDTGISSKAMSIMNSFVNDIFERIAAEASRLAYYNKRSTITSREIQTAVRLLLPGELAKHAVSEGTKAVTKYTSSK

SEQ ID NO: 6848 - DNA, 372 bp, Drosophila sechellia
  CDS (1)..(372)
atgcctccgaaaactgctggaaaggcagccaagaaggctggcaaggctcagaagaacatcaccaagaacgacaagaaaaagaaacgcaagaggaaggagagctatgccatctacatttacaaggttctcaagcaggtccatcctgacaccggaatttcgtcgaaggcgatgagcataatgaacagctttgtaaatgatattttcgagcgaattgctgccgaagcgtctcgtctagctcactacaacaagcgctcgaccatcaccagtcgggaaatccaaacggctgttcgcctgcttctgcctggagagttggccaagcatgctgtcagtgagggaaccaaggctgttaccaagtacaccagctccaaataa

SEQ ID NO: 6849 - protein, 123 aa, Drosophila sechellia
MPPKTAGKAAKKAGKAQKNITKNDKKKKRKRKESYAIYIYKVLKQVHPDTGISSKAMSIMNSFVNDIFERIAAEASRLAHYNKRSTITSREIQTAVRLLLPGELAKHAVSEGTKAVTKYTSSK

SEQ ID NO: 6850 - DNA, 372 bp, Drosophila sechellia
  CDS (1)..(372)
atgcctccgaaaactagtggaaaggtagccaagaaggctggcaaggctcagaagaacatcaccaagaacgacaagaaaaagaaacgcaagaggaaggagagctatgccatctacatttacaaggttctcaagcaggtccatcctgacaccagaatttcgtcgaaggcgatgagcataatgaacagctttgtaaatgatattttcgagcgaattgctgccgaagcgtctcgtctagctcactacaacaagcgctcgaccatcaccagtcgggaaatccaaacggctgttcgcctgcttctgcctggagagttggccaagcatgctgtcagtgagggaaccaaggctgttaccaagtacaccagctccaaataa

SEQ ID NO: 6851 - protein, 123 aa, Drosophila sechellia
MPPKTSGKVAKKAGKAQKNITKNDKKKKRKRKESYAIYIYKVLKQVHPDTRISSKAMSIMNSFVNDIFERIAAEASRLAHYNKRSTITSREIQTAVRLLLPGELAKHAVSEGTKAVTKYTSSK

SEQ ID NO: 6852 - DNA, 372 bp, Drosophila sechellia
  CDS (1)..(372)
atgcctccgaaaactagtggaaaggcagccaagaaggctggcaaggctcagaagaacatcaccaagaacgacaagaaaaagaaacgcaagaggaaggagagttatgccatctacatttacaaggttctcaagcaggtccatcctgacaccggaatttcgtcgaaggcgatgagcataatgaacagctttgtaaatgatattttcgagcgaattgctgccgaagcgtctcgtctagctcactaccacaagcgctcgaccatcaccagtcgggaaatccaaacggctgttcgcctgcttctgcctggagagttggccaagcatgctgtcagtgagggaaccaaggctgttaccaagtacaccagctccaaataa

SEQ ID NO: 6853 - protein, 123 aa, Drosophila sechellia
MPPKTSGKAAKKAGKAQKNITKNDKKKKRKRKESYAIYIYKVLKQVHPDTGISSKAMSIMNSFVNDIFERIAAEASRLAHYHKRSTITSREIQTAVRLLLPGELAKHAVSEGTKAVTKYTSSK

SEQ ID NO: 6854 - DNA, 372 bp, Drosophila sechellia
  CDS (1)..(372)
atgcctccgaaaactagtggaaaggcagccaagaaggctggcaaggctcagaagaacatcaccaagaacgacaagaaaaagaaacgcaagaggaaggagagctatgccatctacatttacaaggttctcaagcaggtccatcctgacacaggaatttcgtcgaaggcgatgagcataatgaacagctttgtaaatgatattttcgagcgaattgctgccgaagcgtctcgtctagctcactacaacaagcgctcgaccatcaccagtcgggaaatccaaacggctgttcgcctgcttctgcctggagagttggccaagcatgctgtcagtgagggaaccaagtctgttaccaagtacaccagctccaaataa

SEQ ID NO: 6855 - protein, 123 aa, Drosophila sechellia
MPPKTSGKAAKKAGKAQKNITKNDKKKKRKRKESYAIYIYKVLKQVHPDTGISSKAMSIMNSFVNDIFERIAAEASRLAHYNKRSTITSREIQTAVRLLLPGELAKHAVSEGTKSVTKYTSSK

SEQ ID NO: 6856 - DNA, 363 bp, Drosophila sechellia
  CDS (1)..(363)
atgcctccgaaaactagtggaaaggcagccaagaaggctggcaaggctcagaagaacatcaccaagaacgacaagaaaaagaaacgcaagaggaaggagagctatgccatctacatttacaaggttctcaagcaggtccatcctgacaccggaatttcgtcgaaggcgatgagcataatgaacagctttgtaaatgatattttcgagcgaattgctgccgaagcgtctcgtctagctcactacaacaagcgctcgaccatcaccatccaaacggctgttcgcctgcttctgcctggagagttggccaagcatgctgtcagtgagggaaccaaggctgttaccaagtacaccagctccaaataa

SEQ ID NO: 6857 - protein, 120 aa, Drosophila sechellia
MPPKTSGKAAKKAGKAQKNITKNDKKKKRKRKESYAIYIYKVLKQVHPDTGISSKAMSIMNSFVNDIFERIAAEASRLAHYNKRSTITIQTAVRLLLPGELAKHAVSEGTKAVTKYTSSK

SEQ ID NO: 6858 - DNA, 372 bp, Drosophila virilis
  CDS (1)..(372)
atgccgccgaaaacaagtgggaaggcagccaaaaaggctggtaaggctcagaaaaacattaccaagaatgacaagaagaagaagcgcaagaggaaggaaagctacgctatctacatttacaaagtgctcaagcaggtccaccctgacaccggcatttcgtcaaaggcgatgagcataatgaacagctttgttaacgacattttcgagcgtattgctgccgaggcctcccgtttggctcactacaacaaacgctcgactattaccagtcgggaaatccaaaccgcagtacgtcttttgctgcccggcgaattgggcaagcacgctgtcagtgagggaacaaaagcagtttacaagtacaccagcttcaagtaa

SEQ ID NO: 6859 - protein, 123 aa, Drosophila virilis
MPPKTSGKAAKKAGKAQKNITKNDKKKKRKRKESYAIYIYKVLKQVHPDTGISSKAMSIMNSFVNDIFERIAAEASRLAHYNKRSTITSREIQTAVRLLLPGELGKHAVSEGTKAVYKYTSFK

SEQ ID NO: 6860 - DNA, 372 bp, Drosophila willistoni
  CDS (1)..(372)
atgccgccaaaaactagtggaaaagcagccaagaaggctggcaaggctcaaaagaacatcaccaagaatgacaaaaagaagaagcgcaagcgtaaggagagctatgctatttacatttacaaagtgttaaagcaagtccacccagacactggtatttcttcaaaagcaatgagcataatgaatagctttgtaaacgatatttttgaacgtattgctgctgaggcctcccgcttggcccactataataagaggtcgaccatcaccagtcgcgaaatccaaacggctgttcgtttgcttttgccgggtgagcttgctaagcacgctgatagtgagggaacaaaagctgtcaccaagtataccagctcaaaataa

SEQ ID NO: 6861 - protein, 123 aa, Drosophila willistoni
MPPKTSGKAAKKAGKAQKNITKNDKKKKRKRKESYAIYIYKVLKQVHPDTGISSKAMSIMNSFVNDIFERIAAEASRLAHYNKRSTITSREIQTAVRLLLPGELAKHADSEGTKAVTKYTSSK

SEQ ID NO: 6862 - DNA, 372 bp, Drosophila yakuba
  CDS (1)..(372)
atgccgccgaaaactagtggaaaggcagccaagaaggctggcaaggctcagaagaatatcaccaagaccgacaagaaaaagaagcgcaagaggaaggagagctatgccatctacatttacaaggttctcaagcaggtccatcctgacaccggcatttcatctaaggcgatgagcatcatgaacagctttgtaaatgatattttcgagcgcattgctgccgaggcgtctcgtctggctcactacaacaagcgctcgaccatcaccagtcgagaaatccaaacggctgttcgcctgcttctgccgggagagttggccaagcattctgtcagtgagggaaccaaggctgtcaccaagtacaccagctccaaataa

SEQ ID NO: 6863 - protein, 123 aa, Drosophila yakuba
MPPKTSGKAAKKAGKAQKNITKTDKKKKRKRKESYAIYIYKVLKQVHPDTGISSKAMSIMNSFVNDIFERIAAEASRLAHYNKRSTITSREIQTAVRLLLPGELAKHSVSEGTKAVTKYTSSK

SEQ ID NO: 6864 - DNA, 372 bp, Drosophila yakuba
  CDS (1)..(372)
atgccgccgaaaactagtggaaaggcagccaagaaggctggcaaggctcagaagaatatcaccaagaccgacaagaaaaagaagcgcaagaggaaggagagctatgccatctacatttacaaggttctcaagcaggtccatcctgacaccggcatttcatctaaggcgatgagcatcatgaacagctttgtaaatgatattttcgagcgcattgctgccgaggcgtctcgtctggctcactacaacaagcgctcgaccatcaccagtcgagaaatccaaacggctgttcgcctgcttctgccgggagagttggccaagcatgctgtcagtgagggaaccaaggctgtcaccaagtacaccagctccaaataa

SEQ ID NO: 6865 - protein, 123 aa, Drosophila yakuba
MPPKTSGKAAKKAGKAQKNITKTDKKKKRKRKESYAIYIYKVLKQVHPDTGISSKAMSIMNSFVNDIFERIAAEASRLAHYNKRSTITSREIQTAVRLLLPGELAKHAVSEGTKAVTKYTSSK

SEQ ID NO: 6866 - DNA, 375 bp, Trichoplax adhaerens
  CDS (1)..(375)
atgcctgccaaagctagcaagaagggagaaaagaaggccggaaaagccaaggccaccgccgcagcttctgaaaagaagaagcgtgcaaagaaaagaaaggaaagctattccatctacatctacaaagttttgaaacaagttcaccccgacactggaatctccagcaaggccatgagcatcatgaactctttcgttcaagatatcttcgaacgtatcgccaatgaagcttcccgcttggctcaatacaacaagcgttctaccgttaccagcagggaaattcagaccgctgttcgtcttctcttgcccggtgaattggctaagcacgccgtcagcgaaggtaccaaagctgtcaccaaatacaccagcagcaagtaa

SEQ ID NO: 6867 - protein, 124 aa, Trichoplax adhaerens
MPAKASKKGEKKAGKAKATAAASEKKKRAKKRKESYSIYIYKVLKQVHPDTGISSKAMSIMNSFVQDIFERIANEASRLAQYNKRSTVTSREIQTAVRLLLPGELAKHAVSEGTKAVTKYTSSK

SEQ ID NO: 6868 - DNA, 369 bp, Ciona intestinalis
  CDS (1)..(369)
atggttgcatccaaaggtcccaagaaagctatgaagagcacacctccagtagagaagaaggaacgcaagaataagcgccatcgtcgacgaaaggaaagcttcggcatctacatttacaaagtgttgaagcaagtccaccctgacactggtatctccagcaaggcaatgaacatcatgaattcatttgttcacgacctattcgaaagagttgccggagaatcttctcgtctctgtagctacaacaagcgctccactatcagcagtcgggaagtgcaaaccgcagttcgccttttgcttccaggggagcttgcaaaacatgctgtatcggagggtacaaaggctgttacaaagtacaccagctcaaagtaa

SEQ ID NO: 6869 - protein, 122 aa, Ciona intestinalis
MVASKGPKKAMKSTPPVEKKERKNKRHRRRKESFGIYIYKVLKQVHPDTGISSKAMNIMNSFVHDLFERVAGESSRLCSYNKRSTISSREVQTAVRLLLPGELAKHAVSEGTKAVTKYTSSK

SEQ ID NO: 6870 - DNA, 384 bp, Drosophila pseudoobscura pseudoobscura
  CDS (1)..(384)
atgccaccgaaaactgcaagcgggaacgcaaccaagaaggctggaaaggcacagaagaacatccacatcaacactaccgacaagaagaagaggcgcaaggtcaggaaggagagctatgccatctatatctacaaagttcttaagcaagtccacccggacactggtgtctcctccaaggcgatgagcatcatgaacagctttgtaaacgatatcttcgagcgcattgcctcggaagcctctcgtttgggtcactacaacaaaaagtccaccatcacaagtcgggaaatccaaacggctgtgcggctacttctgccgggagagctggccaagcacgccgtcagtgagggaaccaaggccgtcacgaagtacaccagctccaagtaa

SEQ ID NO: 6871 - protein, 127 aa, Drosophila pseudoobscura pseudoobscura
MPPKTASGNATKKAGKAQKNIHINTTDKKKRRKVRKESYAIYIYKVLKQVHPDTGVSSKAMSIMNSFVNDIFERIASEASRLGHYNKKSTITSREIQTAVRLLLPGELAKHAVSEGTKAVTKYTSSK

SEQ ID NO: 6872 - DNA, 393 bp, Hydra magnipapillata
  CDS (1)..(393)
atgtataaggagtcaaaagccgttaaccctaaagtggcaaaaaagggagagattcgagtcaacaataaaataaaagatgctgttgaaggagacagtcaacgcaaaaaaaaaagaagagagtcttacgctgtttacatatacaacgtgttaaagcaagtccaccctgatgttggagtttcctctaaggcgatgacaatcatgaatacctttgtcaacgatattttcgaacgaattgcgtctgaagcatcgacactttccaatcaaagcagaaaatcaactatttcttcgcgagaaattcaaacagctgtacgcctaatacttcctggcgaattagcaaagcacgcagtgaacgaaggaaccaaatgtgttacaaagtacgcaagcaccaaatag

SEQ ID NO: 6873 - protein, 130 aa, Hydra magnipapillata
MYKESKAVNPKVAKKGEIRVNNKIKDAVEGDSQRKKKRRESYAVYIYNVLKQVHPDVGVSSKAMTIMNTFVNDIFERIASEASTLSNQSRKSTISSREIQTAVRLILPGELAKHAVNEGTKCVTKYASTK

SEQ ID NO: 6874 - DNA, 405 bp, Hydra magnipapillata
  CDS (1)..(405)
atgtctgacgctccgaaaacaggagaaaagcaggctctcaaggtagccaaaaagggtgaaaaacgagctggcaaaaaaagtggtaagattgccggtataggagataagaaacgcaagaagaggagacgcgagtcctacgccatttacatctacaaagtgttgaagcaagtgcattccgatgtcggagttttgtctaaagcaatgagcatcatgaattcgttcgtgaacgacatttttgaaaagatcgcgtctgaagcttcgcgactcgcccttcaaaacaaaaagtctacaatctcttcacgtgaaattcaaaccgccgtgcgcctcttacttcctggtgaattggcaaaacacacagtgagcgaaggcaccaaagctgtcaccaagtacacgagcagcaaatag

SEQ ID NO: 6875 - protein, 134 aa, Hydra magnipapillata
MSDAPKTGEKQALKVAKKGEKRAGKKSGKIAGIGDKKRKKRRRESYAIYIYKVLKQVHSDVGVLSKAMSIMNSFVNDIFEKIASEASRLALQNKKSTISSREIQTAVRLLLPGELAKHTVSEGTKAVTKYTSSK

SEQ ID NO: 6876 - DNA, 405 bp, Hydra magnipapillata
  CDS (1)..(405)
atgtctgacgctccgaaaacaggaggaaagcaggcgcccaagctagccaaaaagggtgaaaaacgagctggcaaaaaaggcggcaagatcgccggtacaggagataagaaacgcaagaagaagagacgcgagtcgtacgccatttacatctataacgtgttaaagcaagtgcatcccgatgtcggagtttcgtctaaagcgatgagcatcatgaattcgttcgtgaacgacatttttgaaaggatcgcgtctgaagcttcgcgactcgcccttcaaaacaaaaagtctacaatctcttcacgtgaaattcaaacagccgtgcgcctcttacttcccggtgaattggcaaaacacgcagtgagcgaaggcaccaaagctgtcaccaagtacacgagcagcaagtag

SEQ ID NO: 6877 - protein, 134 aa, Hydra magnipapillata
MSDAPKTGGKQAPKLAKKGEKRAGKKGGKIAGTGDKKRKKKRRESYAIYIYNVLKQVHPDVGVSSKAMSIMNSFVNDIFERIASEASRLALQNKKSTISSREIQTAVRLLLPGELAKHAVSEGTKAVTKYTSSK

SEQ ID NO: 6878 - DNA, 399 bp, Hydra magnipapillata
  CDS (1)..(399)
atgtctaatgtgttaaaagttgctaagcctaaagtggcgaagaagatggaacttcaagccagtaaaaaaggaaataaagttccttttcctgctggtgagatgaaacaaaaaaaaaagagacgagagtcctatgctgtttatatatacaatgtattaaagcaagtccaccctgatgttggagtttcttctaaagcgatgacaatcatgaattcttttgtcaacgatatttttgaaagaatttcttctgaagcatcaagactttccgttcaaaacaagaagtctactatttcgtctcgcgaaattcaaaccgcagtacgccttttacttcctggtgaattagcaaaacatgctgtgagtgaaggtaccaaaagtgttgcaaagtacacaagcactaaataa

SEQ ID NO: 6879 - protein, 132 aa, Hydra magnipapillata
MSNVLKVAKPKVAKKMELQASKKGNKVPFPAGEMKQKKKRRESYAVYIYNVLKQVHPDVGVSSKAMTIMNSFVNDIFERISSEASRLSVQNKKSTISSREIQTAVRLLLPGELAKHAVSEGTKSVAKYTSTK

SEQ ID NO: 6880 - DNA, 405 bp, Hydra magnipapillata
  CDS (1)..(405)
atgtctgacgctccgaaaacaggacgaaagcaggcgcccaaggtggccaaaaagggtgaaaaacgagctggcaaaaaaggcggcaagatcgccggtacaggagataagaaacgcaagaagaagagacgcgagtcctacgccatttacatctataacgtgttaaagcaagtgcatcccgatgtcggagtttcgtctaaagcgatgagcatcatgaattcgttcgtgaacgacatttttgaaaggatcgcgtctgaagcttcgcgactcgcccttcaaaacaaaaagtctacaatctcttcacgtgaaattcaaacagccgtgcgcctcttacttcccggtgaattggcaaaacacgcagtgagcgaaggcaccaaagctgtcaccaagtacacgagcagcaagtag

SEQ ID NO: 6881 - protein, 134 aa, Hydra magnipapillata
MSDAPKTGRKQAPKVAKKGEKRAGKKGGKIAGTGDKKRKKKRRESYAIYIYNVLKQVHPDVGVSSKAMSIMNSFVNDIFERIASEASRLALQNKKSTISSREIQTAVRLLLPGELAKHAVSEGTKAVTKYTSSK

SEQ ID NO: 6882 - DNA, 405 bp, Hydra magnipapillata
  CDS (1)..(405)
atgtctgacgctccgaaagcaggaggaaagcaggcgcccaaggtagccaaaaagggtgaaaagcgagctggtaaaaaaggcggcaagatcgccgggacaggagataagaaacgcaagaagaagagacgcgagtcctacgccatttacatctataacgtgttaaagcaagtgcatcccgatgtcggagtttcgtctaaagcgatgagcatcatgaattcgttcgtgaacgacatttttgaaaggatcgcgtctgaagcttcgcgactcgcccttcaaaacaaaaagtctacaatctcttcgcgtgaaattcaaaccgccgtacgcctcttacttcccggtgaattggcaaaacacgcagtgagcgaaggcaccaaagctgttaccaagtacacgagcagcaagtag

SEQ ID NO: 6883 - protein, 134 aa, Hydra magnipapillata
MSDAPKAGGKQAPKVAKKGEKRAGKKGGKIAGTGDKKRKKKRRESYAIYIYNVLKQVHPDVGVSSKAMSIMNSFVNDIFERIASEASRLALQNKKSTISSREIQTAVRLLLPGELAKHAVSEGTKAVTKYTSSK

SEQ ID NO: 6884 - DNA, 405 bp, Hydra magnipapillata
  CDS (1)..(405)
atgtctgacgctccgaaaacaggaggaaagcaggcgcccaaggtagccaaaaagggtgaaaaacgagctggcaaaaaaggcggcaagatcgccggtacaggagataagaaacgcaagaagaagagacgcgagtcctacgccatttacatctataacgtgttaaagcaagtgcatcccgatgtcggagtttcgtctaaagcgatgagcatcatgaattcgttcgtgaacgacatttttgaaaggatcgcgtctgaagcttcgcgactcgcccttcaaaacaaaaagtctacaatctcttcacgtgaaattcaaacagccgtgcgcctcttacttcccggtgaattggcaaaacacgcagtgagcgaaggcaccaaagctgtcaccaagtacacgagcagcaagtag

SEQ ID NO: 6885 - protein, 134 aa, Hydra magnipapillata
MSDAPKTGGKQAPKVAKKGEKRAGKKGGKIAGTGDKKRKKKRRESYAIYIYNVLKQVHPDVGVSSKAMSIMNSFVNDIFERIASEASRLALQNKKSTISSREIQTAVRLLLPGELAKHAVSEGTKAVTKYTSSK

SEQ ID NO: 6886 - DNA, 378 bp, Schizosaccharomyces japonicus yFS275
  CDS (1)..(378)
atgtctgctgaaaagaagcccgcatccaaggcccccgccggcaaggtccccaaggacaccatgaagtctgtcgacaagaagcgtggtaagaacagaaaggagacctactcgtcgtacatctacaaggtgttgaagcaagtccaccccgacactggtatttccaaccaagccatgcgtattctcaactctttcgtcaacgatatctttgagcgtatcgccaccgaggcttccaagctcgccgcctacaacaagaagtccactatttcttctcgggagatccaaactgccgtccgtcttattttgcccggtgagcttgctaagcatgctgtcactgaaggcaccaagtctgttaccaagtactctagcagtgcccaataa

SEQ ID NO: 6887 - protein, 125 aa, Schizosaccharomyces japonicus yFS275
MSAEKKPASKAPAGKVPKDTMKSVDKKRGKNRKETYSSYIYKVLKQVHPDTGISNQAMRILNSFVNDIFERIATEASKLAAYNKKSTISSREIQTAVRLILPGELAKHAVTEGTKSVTKYSSSAQ

SEQ ID NO: 6888 - DNA, 369 bp, Branchiostoma floridae
  CDS (1)..(369)
atggctcctgggatcagtaagaagggtgagaaaaaggcgggaaagtccaggatgggcggttcaatggaaaggagaaaaaagagaaagaggaaggagacctactcagtctacatctacaaagtcttgaaacaggttcatcctgacacgggcatctccagtaaggccatgaacatcatgaactcttttgtgaacgacatcttcgagcggatcgcctcagaagcctcgcggctggcccagtacaacaaacgatccaccatcaccagtcgggagatccagacggctgtgcggctgctgctgcccggagagctggccaaacacgccgtcagcgaaggcaccaaggccgtcaccaagtacaccagttccaaatag

SEQ ID NO: 6889 - protein, 122 aa, Branchiostoma floridae
MAPGISKKGEKKAGKSRMGGSMERRKKRKRKETYSVYIYKVLKQVHPDTGISSKAMNIMNSFVNDIFERIASEASRLAQYNKRSTITSREIQTAVRLLLPGELAKHAVSEGTKAVTKYTSSK

SEQ ID NO: 6890 - DNA, 363 bp, Branchiostoma floridae
  CDS (1)..(363)
atgcccccaaaaacgacaggaaaggctgccaagaaggccggcaaggcccgccgtgcaggtggagccaagaggaggaggagaaggagggagtccttcggtatctacatctacaaggtgctcaagcaggtgcaccccgataccggtgtctccagcaaggccatgggcatcatgaactccttcgtcaacgacatcttcgagcgtatcgctggcgaggcttcccgcctggctcactacaacaagcgctccaccatcagcagccgggagatccagaccgccgtgcgtctgctcctgcctggtgagctggccaagcacgccgtcagcgagggcaccaaggccgtcaccaagtacaccagctccaagtaa

SEQ ID NO: 6891 - protein, 120 aa, Branchiostoma floridae
MPPKTTGKAAKKAGKARRAGGAKRRRRRRESFGIYIYKVLKQVHPDTGVSSKAMGIMNSFVNDIFERIAGEASRLAHYNKRSTISSREIQTAVRLLLPGELAKHAVSEGTKAVTKYTSSK

SEQ ID NO: 6892 - DNA, 363 bp, Branchiostoma floridae
  CDS (1)..(363)
atgccgccaaagaccccaggaaaggccgccaagaaggccggcaaggcccgccgtgcaggtggagccaagaggaggaggagaaggagggagtccttcggtatctacatctacaaggtgctcaagcaggtgcaccccgacaccggtgtctccagcaaggccatgggaatcatgaactccttcgtcaacgacatcttcgagcgtatcgccggcgaggcttcccgcctggctcactacaacaagcgctccaccatcagcagccgggagatccagaccgccgtgcgtctgctcctgcctggtgagctggccaagcacgccgttagcgagggcaccaaggccgtcaccaagtacaccagctccaagtaa

SEQ ID NO: 6893 - protein, 120 aa, Branchiostoma floridae
MPPKTPGKAAKKAGKARRAGGAKRRRRRRESFGIYIYKVLKQVHPDTGVSSKAMGIMNSFVNDIFERIAGEASRLAHYNKRSTISSREIQTAVRLLLPGELAKHAVSEGTKAVTKYTSSK

SEQ ID NO: 6894 - DNA, 366 bp, Branchiostoma floridae
  CDS (1)..(366)
atgccagcaaagggagcaaagggagccaagaaggccggcaaaggccgcccaatgggtaagggtggtaagaacaagaggaggaggaggagggagaccttcggtatctacatctacaaggtgctcaagcaggtgcatcctgacaccggtgtctccagcaaggccatgggcatcatgaactccttcgtcaacgacatcttcgagcgtatcgctggcgaggcttcccgcctggctcactacaacaagcgctccaccatcagcagccgagagatccagaccgccgtgcgtctgctcctgcctggtgagctggccaagcacgccgtcagcgagggcaccaaggccgtcaccaagtacaccagctccaagtaa

SEQ ID NO: 6895 - protein, 121 aa, Branchiostoma floridae
MPAKGAKGAKKAGKGRPMGKGGKNKRRRRRETFGIYIYKVLKQVHPDTGVSSKAMGIMNSFVNDIFERIAGEASRLAHYNKRSTISSREIQTAVRLLLPGELAKHAVSEGTKAVTKYTSSK

SEQ ID NO: 6896 - DNA, 363 bp, Branchiostoma floridae
  CDS (1)..(363)
atgccccccaaaacgacaggaaaggctgccaagaaggccggcaaggcccgccgtgcaggtggagccaagaggaggaggagaaggagggagtccttcggtatctacatctacaaggtgctcaagcaggtgcaccccgataccggtgtctccagcaaggccatgggcatcatgaactccttcgtcaacgacatcttcgagcgtatcgctggcgaggcttcccgcctggctcactacaacaagcgcttcaccatcagcagccgggagatccagaccgccgtgcgtctgctcctgcctggtgagctggccaagcacgccgtcagcgagggcaccaaggccgtcaccaagtacaccagctccaagtaa

SEQ ID NO: 6897 - protein, 120 aa, Branchiostoma floridae
MPPKTTGKAAKKAGKARRAGGAKRRRRRRESFGIYIYKVLKQVHPDTGVSSKAMGIMNSFVNDIFERIAGEASRLAHYNKRFTISSREIQTAVRLLLPGELAKHAVSEGTKAVTKYTSSK

SEQ ID NO: 6898 - DNA, 363 bp, Branchiostoma floridae
  CDS (1)..(363)
atgccgccaaagaccccaggaaaggccgccaagaaggccggcaaggcccgccgtgcaggtggagccaagaggaggaggagaaggagggagtccttcggtatctacatctacaaggtgctcaagcaggtgcaccccgacacaggtgtctccagcaaggccatgggcatcatgaactccttcgtcaacgacatcttcgagcgtatcgctggcgaggctccccgcctggctcactacaacaagcgctccaccatcagcagccgggagatccagaccgccgtgcgtctgctcctgcctggtgagctggccaagcacgccgtcagcgagggcaccaaggccgtcaccaagtacaccagctccaagtaa

SEQ ID NO: 6899 - protein, 120 aa, Branchiostoma floridae
MPPKTPGKAAKKAGKARRAGGAKRRRRRRESFGIYIYKVLKQVHPDTGVSSKAMGIMNSFVNDIFERIAGEAPRLAHYNKRSTISSREIQTAVRLLLPGELAKHAVSEGTKAVTKYTSSK

SEQ ID NO: 6900 - DNA, 369 bp, Branchiostoma floridae
  CDS (1)..(369)
atgccgcccaaaggaggaggaaaagctgccaagaaggccggtaaggccaggcctgctagggccaaaggcaaggggaggagaaagagaaaggagtcttacggtgtctacatctacaaggtgctcaatcaggtgcaccccgaccctcctggtgtctccagcaaggccatgggcatcataaactgcttcctcaacgacatcttcgagcgtatcgctggcgaggcttcccgcctggctcactacaacaagcgctccaccatcagcagccgggagatccagaccgccgtgcgtctgctgctgcctggtgagttggccacgcacgccgtcagcgagggcaccaaggccgtcaccaagtacaccagctccaagtaa

SEQ ID NO: 6901 - protein, 122 aa, Branchiostoma floridae
MPPKGGGKAAKKAGKARPARAKGKGRRKRKESYGVYIYKVLNQVHPDPPGVSSKAMGIINCFLNDIFERIAGEASRLAHYNKRSTISSREIQTAVRLLLPGELATHAVSEGTKAVTKYTSSK

SEQ ID NO: 6902 - DNA, 369 bp, Branchiostoma floridae
  CDS (1)..(369)
atggctcctgggatcagcaaaaagggtgagaaaaaggcgggaaagtccaggatgggcggtacaatggaaaggagaaaaaagagaaagaggaaggagacctactcagtctacatctacaaagtcttgaaacaggttcatcctgacacgggcatctccagtaaggccatgaacatcatgaactcttttgtgaacgacatcttcgagcggatcgcctcagaagcctcgcggttggcccagtacaacaaacgatccaccatcaccagtcgggagatccagaccgctgtgcggctgctactgcccggagagctggccaaacacgccgtcagcgaaggcaccaaggccgtcaccaagtacaccagttccaaatag

SEQ ID NO: 6903 - protein, 122 aa, Branchiostoma floridae
MAPGISKKGEKKAGKSRMGGTMERRKKRKRKETYSVYIYKVLKQVHPDTGISSKAMNIMNSFVNDIFERIASEASRLAQYNKRSTITSREIQTAVRLLLPGELAKHAVSEGTKAVTKYTSSK

SEQ ID NO: 6904 - DNA, 399 bp, Branchiostoma floridae
  CDS (1)..(399)
atgccgccgaagtccatcaacaacaacaacaacctcaaggtccgcgcggacagcgcctcttcacctgaacctgacacaaggcctcatgggaaggcacgccgacgtcatcaccggaatcggaaagagacctacaacagctacatctacaaggtgctgaagcaagttcaccctgatgtcgggatctccagcaaagccatgaacatcatgaactccttcgtgaacgacgtgtttgagcggatggctggcgaggcctcgcgactggcgcactacaacaagaaacagacagtctccagtcgagagatccagaccgttgtgaggctgctcctgcctggagagctggccaagcacgcggtcagtgaggggaccaaggccgtcaccaagtacaccagcaccaagtga

SEQ ID NO: 6905 - protein, 132 aa, Branchiostoma floridae
MPPKSINNNNNLKVRADSASSPEPDTRPHGKARRRHHRNRKETYNSYIYKVLKQVHPDVGISSKAMNIMNSFVNDVFERMAGEASRLAHYNKKQTVSSREIQTVVRLLLPGELAKHAVSEGTKAVTKYTSTK

SEQ ID NO: 6906 - DNA, 390 bp, Branchiostoma floridae
  CDS (1)..(390)
atggcgcgtacgtccacaaagaaaccgggagccgcgaagtccggagggaccaaggcgatgaccaaggcgggcaggccacccggtaagccgaaccggaggaagagaaaggagagcttcggtacttacatcttcaaggtgttgaaacaggtccacccagatactggtatatcagcacgagctatgggcatcatgaactcgttcgtcaacgatctcttcgagcggattgcttccgagtcttcccgcctggcgaactacaacaggcgctccaccatcagcagccgggagatccagaccgccgtgcggcttctcctaccgggcgagttggccaagcacgctgtcagcgagggcactaaggccgtcacaaagtacaccagcaataccgctaagtaa

SEQ ID NO: 6907 - protein, 129 aa, Branchiostoma floridae
MARTSTKKPGAAKSGGTKAMTKAGRPPGKPNRRKRKESFGTYIFKVLKQVHPDTGISARAMGIMNSFVNDLFERIASESSRLANYNRRSTISSREIQTAVRLLLPGELAKHAVSEGTKAVTKYTSNTAK

SEQ ID NO: 6908 - DNA, 390 bp, Branchiostoma floridae
  CDS (1)..(390)
atggcgcgtacgtccacaaagaaaccgggagccgcgaagtccggagggaccaaggcgatgaccaaggcgggcaggccacccggcaaaccgaaccggaggaagagaaaggagagcttcggtacctacatcttcaaggtgttaaaacaggtccacccagatactggtatctcagcacgtgccatgggcatcatgaactcgttcgtcaacgatctcttcgagcggattgcttccgaatcttcccgcctggcgaactacaacaagcgctccaccatcagcagccgggagatccagaccgccgtgcggcttctcctaccgggcgagttggccaagcacgccgtcagcgaaggcaccaaggccgtcaccaaatacaccagcaacaccgctaagtaa

SEQ ID NO: 6909 - protein, 129 aa, Branchiostoma floridae
MARTSTKKPGAAKSGGTKAMTKAGRPPGKPNRRKRKESFGTYIFKVLKQVHPDTGISARAMGIMNSFVNDLFERIASESSRLANYNKRSTISSREIQTAVRLLLPGELAKHAVSEGTKAVTKYTSNTAK

SEQ ID NO: 6910 - DNA, 366 bp, Branchiostoma floridae
  CDS (1)..(366)
atgccgccaaaaggaggaggaaaagccgccaagaaggccggaaaggccaggcccgccggagccaagggcaagaggaggagaaagaggagggagaccttcggtgtctacatctacaaggtgctcaagcaggtgcatcccgacaccggtgtctccagcaaggccatgggcatcatgaactccttcgtcaacgacatcttcgagcgtatcgccgctgaggcttcccgcctggctcactacaacaagcgctccaccatcagcagccgggagatccagaccgccgtgcgtctgctcctgcctggtgagctggccaagcacgccgtcagcgagggcaccaaggccgtcaccaagtacaccagctccaagtaa

SEQ ID NO: 6911 - protein, 121 aa, Branchiostoma floridae
MPPKGGGKAAKKAGKARPAGAKGKRRRKRRETFGVYIYKVLKQVHPDTGVSSKAMGIMNSFVNDIFERIAAEASRLAHYNKRSTISSREIQTAVRLLLPGELAKHAVSEGTKAVTKYTSSK

SEQ ID NO: 6912 - DNA, 363 bp, Branchiostoma floridae
  CDS (1)..(363)
  misc_feature (7)..(7): n is a, g, c or t
atgcccncaagtggtaaagccgttaagaaagctggcaaggccaggcccgccggagacaagaagcgcggaaggaggagaaagagaagggaaaccttcggcgtttacatctacaaggtgttgaaacaggtgcaccccgacacaggcgtctccagcaaggcaatgggcatcatgaattctttcgtcaacgacatttttgagcgcatcgccgccgagtcgtcccgtctggctaactacaacaagcgctccaccatcagtagccgcgagatccagacagccgtgcgactcctgctgccgggcgagctagccaagcacgccgtcagcgagggcactaaggccgtcaccaagtacacaagttccaagtga

SEQ ID NO: 6913 - protein, 120 aa, Branchiostoma floridae
  misc_feature (3)..(3): The Xaa at location 3 stands for Ala, Pro, Ser, or Thr.
MPXSGKAVKKAGKARPAGDKKRGRRRKRRETFGVYIYKVLKQVHPDTGVSSKAMGIMNSFVNDIFERIAAESSRLANYNKRSTISSREIQTAVRLLLPGELAKHAVSEGTKAVTKYTSSK

SEQ ID NO: 6914 - DNA, 363 bp, Branchiostoma floridae
  CDS (1)..(363)
atgccgcctagtggaaaagctgctaagaaagctggcaaagccaggtcagccggagacaagaagcgcggaaggaggggaaagagaagggaaaccttcggcgtctacatctataaggtgctgaaacaggtgcaccccgacaccggtgtctccaataaagccatgggcatcatgaactccttcgtcaacgtcattttagagcgcatcgccgccgaggcttcttgcctggctcactacaacaagcgctccaccatcagcagccgcgagattcataccgccgtgcgactcctgctaccgggcgagctggccaagcacgccgtcagcgagggcaccaaggccgtcaccaagtacaccagctcccggtag

SEQ ID NO: 6915 - protein, 120 aa, Branchiostoma floridae
MPPSGKAAKKAGKARSAGDKKRGRRGKRRETFGVYIYKVLKQVHPDTGVSNKAMGIMNSFVNVILERIAAEASCLAHYNKRSTISSREIHTAVRLLLPGELAKHAVSEGTKAVTKYTSSR

SEQ ID NO: 6916 - DNA, 438 bp, Vitis vinifera
  CDS (1)..(438)
atggcgcccaaggcagagaagaagcccgcggagaagaagccagccggtggcgaggagaagaaggccgagaaggctccggcggagaagaagccaagggctgagaagaagctaccaaaggacgcgtcttctactgataagaagaagaagaggacgaggaaaaatgtggagacctataagatctacatcttcaaggtgttgaagcaggttcatcctgacatcgggatttccagcaaggctatgggcatcatgaacagcttcatcaatgacatctttgagaaactcgctcaggaggcctccaggctcgcgaggtacaacaagaagccgaccatcacctccagggagattcagaccgctgtgaggcttgttctgcccggtgagcttgcgaagcacgctgtttctgaggggaccaaggcggtcaccaagtttactagctcttag

SEQ ID NO: 6917 - protein, 145 aa, Vitis vinifera
MAPKAEKKPAEKKPAGGEEKKAEKAPAEKKPRAEKKLPKDASSTDKKKKRTRKNVETYKIYIFKVLKQVHPDIGISSKAMGIMNSFINDIFEKLAQEASRLARYNKKPTITSREIQTAVRLVLPGELAKHAVSEGTKAVTKFTSS

SEQ ID NO: 6918 - DNA, 459 bp, Vitis vinifera
  CDS (1)..(459)
atggcgccaaaggcagagaagaagccagcagagaagaagccagcgtcggagaagcctacggaggagaagaagtctacggtggcggagaaggctccagcggagaagaagccaaaggccgggaagaagcttcccaaggaaggcgctgctgccggtgacaagaagaagaagcggtcgaagaagaacgttgagacctacaagatctacatcttcaaggtcttgaagcaggtccaccccgacattgggatttcgagcaaggctatgggaatcatgaacagctttattaacgatatcttcgagaaacttgctcaggaggcgtcgaggcttgcaaggtacaataagaagccaactattacatcgagggagatccagactgcggtgaggcttgtgttgcctggtgaactggctaagcacgccgtctccgagggtaccaaggcggtgaccaagttcacaagttcgtga

SEQ ID NO: 6919 - protein, 152 aa, Vitis vinifera
MAPKAEKKPAEKKPASEKPTEEKKSTVAEKAPAEKKPKAGKKLPKEGAAAGDKKKKRSKKNVETYKIYIFKVLKQVHPDIGISSKAMGIMNSFINDIFEKLAQEASRLARYNKKPTITSREIQTAVRLVLPGELAKHAVSEGTKAVTKFTSS

SEQ ID NO: 6920 - DNA, 396 bp, Vitis vinifera
  CDS (1)..(396)
atggcgccaaaggcagagaagaagccagcagagaagaagccaaagccaaaggccgggaagaagcttcccaaggaaggcgctgctgccggtgacaagaagaagaagcggtcgaagaagaacgttgagacctacaagatctacatcttcaaggtcttgaagcaggtccaccccgacattgggatttcgagcaaggctatgggaatcatgaacagctttattaacgatatcttcgagaaacttgctcaggaggcgtcgaggcttgcaaggtacaataagaagccaactattacatcgagggagatccagactgcggtgaggcttgtgttgcctggtgaactggctaagcacgccgtctccgagggtaccaaggcggtgaccaagttcacaagttcgtga

SEQ ID NO: 6921 - protein, 131 aa, Vitis vinifera
MAPKAEKKPAEKKPKPKAGKKLPKEGAAAGDKKKKRSKKNVETYKIYIFKVLKQVHPDIGISSKAMGIMNSFINDIFEKLAQEASRLARYNKKPTITSREIQTAVRLVLPGELAKHAVSEGTKAVTKFTSS

SEQ ID NO: 6922 - DNA, 414 bp, Vitis vinifera
  CDS (1)..(414)
atggcgccaaaggcagagaagaagccagcagagaagaagccagcgtcggagaagcctacggaggagaagaagtctacgaagcttcccaaggaaggcgctgctgccggtgacaagaagaagaagcggtcgaagaagaacgttgagacctacaagatctacatcttcaaggtcttgaagcaggtccaccccgacattgggatttcgagcaaggctatgggaatcatgaacagctttattaacgatatcttcgagaaacttgctcaggaggcgtcgaggcttgcaaggtacaataagaagccaactattacatcgagggagatccagactgcggtgaggcttgtgttgcctggtgaactggctaagcacgccgtctccgagggtaccaaggcggtgaccaagttcacaagttcgtga

SEQ ID NO: 6923 - protein, 137 aa, Vitis vinifera
MAPKAEKKPAEKKPASEKPTEEKKSTKLPKEGAAAGDKKKKRSKKNVETYKIYIFKVLKQVHPDIGISSKAMGIMNSFINDIFEKLAQEASRLARYNKKPTITSREIQTAVRLVLPGELAKHAVSEGTKAVTKFTSS

SEQ ID NO: 6924 - DNA, 447 bp, Vitis vinifera
  CDS (1)..(447)
atggcgccaaaggcagagaagaagcccgccgagaagaagccggcagaggagaagaagtcgacggtggccgagaaggcgccggcggagaagaagcccaaggccgggaagaagctacccaaggaaggcggcgccggccctggagacaagaagaagaagcgcacgaagaagagcgttgagacctacaagatctacatcttcaaggtcttgaagcaggttcatcccgatatcgggatctctagcaaggccatgggtattatgaacagcttcatcaacgatatctttgagaagcttgctcaggaatcctcgcggctcgctcgctacaacaagaagcccacgattacttcgcgggagatccagactgccgtgcgattggtgcttcctggagagttggccaagcacgcggtctccgagggaaccaaggctgtgacgaaatttacaagttcttga

SEQ ID NO: 6925 - protein, 148 aa, Vitis vinifera
MAPKAEKKPAEKKPAEEKKSTVAEKAPAEKKPKAGKKLPKEGGAGPGDKKKKRTKKSVETYKIYIFKVLKQVHPDIGISSKAMGIMNSFINDIFEKLAQESSRLARYNKKPTITSREIQTAVRLVLPGELAKHAVSEGTKAVTKFTSS

SEQ ID NO: 6926 - DNA, 399 bp, Vitis vinifera
  CDS (1)..(399)
atggcgccaaaggcagagaagaagcccgccgagaagaagccgaagcccaaggccgggaagaagctacccaaggaaggcggcgccggccctggagacaagaagaagaagcgcacgaagaagagcgttgagacctacaagatctacatcttcaaggtcttgaagcaggttcatcccgatatcgggatctctagcaaggccatgggtattatgaacagcttcatcaacgatatctttgagaagcttgctcaggaatcctcgcggctcgctcgctacaacaagaagcccacgattacttcgcgggagatccagactgccgtgcgattggtgcttcctggagagttggccaagcacgcggtctccgagggaaccaaggctgtgacgaaatttacaagttcttga

SEQ ID NO: 6927 - protein, 132 aa, Vitis vinifera
MAPKAEKKPAEKKPKPKAGKKLPKEGGAGPGDKKKKRTKKSVETYKIYIFKVLKQVHPDIGISSKAMGIMNSFINDIFEKLAQESSRLARYNKKPTITSREIQTAVRLVLPGELAKHAVSEGTKAVTKFTSS

SEQ ID NO: 6928 - DNA, 411 bp, Vitis vinifera
  CDS (1)..(411)
atggcgccaaaggcagagaagaagcccgccgagaagaagccggcagaggagaagaagtcgacggccgggaagaagctacccaaggaaggcggcgccggccctggagacaagaagaagaagcgcacgaagaagagcgttgagacctacaagatctacatcttcaaggtcttgaagcaggttcatcccgatatcgggatctctagcaaggccatgggtattatgaacagcttcatcaacgatatctttgagaagcttgctcaggaatcctcgcggctcgctcgctacaacaagaagcccacgattacttcgcgggagatccagactgccgtgcgattggtgcttcctggagagttggccaagcacgcggtctccgagggaaccaaggctgtgacgaaatttacaagttcttga

SEQ ID NO: 6929 - protein, 136 aa, Vitis vinifera
MAPKAEKKPAEKKPAEEKKSTAGKKLPKEGGAGPGDKKKKRTKKSVETYKIYIFKVLKQVHPDIGISSKAMGIMNSFINDIFEKLAQESSRLARYNKKPTITSREIQTAVRLVLPGELAKHAVSEGTKAVTKFTSS

SEQ ID NO: 6930 - DNA, 444 bp, Vitis vinifera
  CDS (1)..(444)
atggcgcccaaggctgagaagaagcccgccgagaagaagccagcggaggagaagaaaaccgtggccgagaaggctccagcggagaagaagcccaaggccggcaagaagctgcccaaggaggccggtgctgccgccggtgacaagaagaagaagcgcacgaagaagagcgttgagacctacaagatctacatcttcaaggtgctgaagcaggtccatcctgacatcgggatctccagcaaggccatggggatcatgaacagcttcatcaacgacatcttcgagaaacttgcccaggaggcatcgcggctggcgcgctacaacaagaagccgacgatcacttctcgggagatccagaccgcagtacgattggtacttcccggcgagttggccaagcacgctgtttcggagggaaccaaggccgtaacgaagttcaccagttcttga

SEQ ID NO: 6931 - protein, 147 aa, Vitis vinifera
MAPKAEKKPAEKKPAEEKKTVAEKAPAEKKPKAGKKLPKEAGAAAGDKKKKRTKKSVETYKIYIFKVLKQVHPDIGISSKAMGIMNSFINDIFEKLAQEASRLARYNKKPTITSREIQTAVRLVLPGELAKHAVSEGTKAVTKFTSS

SEQ ID NO: 6932 - DNA, 441 bp, Vitis vinifera
  CDS (1)..(441)
atggcgccaaaggctgagaagaagcccgccgagaagaagccagcggaggagaagaaaaccgtggccgagaagtccccggcggagaagaagcccaaagccggtaagaagctccccaaagaggccggcgcagccactgataagaagaagaagcgcaccaagaagagcgttgagacctacaagatctacatcttcaaggtcttgaaacaggtccatcctgacatcgggatctccagcaaggccatggggatcatgaacagcttcatcaacgacatcttcgagaagcttgctcaggaggcatcgcggctggcgcgttacaacaagaagccgacgatcacttctcgggagatccagacggccgtccgattggtgcttcccggcgagttggccaagcacgccgtttcagagggcaccaaggccgtaacgaagttcaccagttcttga

SEQ ID NO: 6933 - protein, 146 aa, Vitis vinifera
MAPKAEKKPAEKKPAEEKKTVAEKSPAEKKPKAGKKLPKEAGAATDKKKKRTKKSVETYKIYIFKVLKQVHPDIGISSKAMGIMNSFINDIFEKLAQEASRLARYNKKPTITSREIQTAVRLVLPGELAKHAVSEGTKAVTKFTSS

SEQ ID NO: 6934 - DNA, 447 bp, Populus trichocarpa
  CDS (1)..(447)
atggcaccaagagcagagaaaaagccagcggagaagaagccggcggaggagaagaagacagtggcagagaaagcccctgcagagaagaagccaaaggcaggcaagaagctcccaaaagaaggcggagcagcagtagctggagacaagaagaagaagagggtgaagaagagcacagagacctacaagatctacatcttcaaggtcctgaaacaagttcatccagatattgggatttcaagcaaggcgatgggtatcatgaattcgttcattaatgatattttcgagaagcttgctcaggaatcctcaagacttgctaggtataacaagaagcccacgattacctcgagggagatccagactgctgtcaggttggtcttgcctggagagttggctaagcatgctgtttctgagggaactaaagcggtcactaagttcactagttcttga

SEQ ID NO: 6935 - protein, 148 aa, Populus trichocarpa
MAPRAEKKPAEKKPAEEKKTVAEKAPAEKKPKAGKKLPKEGGAAVAGDKKKKRVKKSTETYKIYIFKVLKQVHPDIGISSKAMGIMNSFINDIFEKLAQESSRLARYNKKPTITSREIQTAVRLVLPGELAKHAVSEGTKAVTKFTSS

SEQ ID NO: 6936 - DNA, 423 bp, Populus trichocarpa
  CDS (1)..(423)
atggctcccaaggccgcagagaagaagccggctgagaaaaagccagcggcggcagagaaagccccagcggagaagaagccaagggcagagaagaagatacccaaagaaggagcgattgacaagaagaagaagaggtcaaagaagaacgtcgagacctacaagatctatatctttaaggtcctgaaacaggtccatcctgacattgggatctcaagcaaggcaatgggtatcatgaacagttttatcaacgatatctttgagaaactcgctcaagaggcttcaaggctcgctaggtataacaagaagcccaccattacttctcgggagatccagactgctgtcagattggttttgcctggagagcttgcgaaacatgctgtttctgaagggaccaaggctgttaccaagtttacaagctcttag

SEQ ID NO: 6937 - protein, 140 aa, Populus trichocarpa
MAPKAAEKKPAEKKPAAAEKAPAEKKPRAEKKIPKEGAIDKKKKRSKKNVETYKIYIFKVLKQVHPDIGISSKAMGIMNSFINDIFEKLAQEASRLARYNKKPTITSREIQTAVRLVLPGELAKHAVSEGTKAVTKFTSS

SEQ ID NO: 6938 - DNA, 423 bp, Populus trichocarpa
  CDS (1)..(423)
atggctcccaaggccgcagagaagaagccggctgagaaaaagccagcggcggcagagaaagccccagcggagaagaagccaagggcagagaagaagatacccaaagaaggagcgattgacaagaagaagaagaggtcaaagaagaacgtcgagacctacaagatctatatctttaaggtcctgaaacaggtccatcctgacattgggatctcaagcaaggcaatgggtatcatgaacagttttatcaacgatatctttgagaaactcgctcaagagtcatcgaggcttgcaaggtacaacaagaagcctaccattacttctcgggagatccagacagctgtcagactggttttgcctggagagcttgcgaaacatgctgtctctgaagggaccaaggctgttaccaagtttaccagttcgtag

SEQ ID NO: 6939 - protein, 140 aa, Populus trichocarpa
MAPKAAEKKPAEKKPAAAEKAPAEKKPRAEKKIPKEGAIDKKKKRSKKNVETYKIYIFKVLKQVHPDIGISSKAMGIMNSFINDIFEKLAQESSRLARYNKKPTITSREIQTAVRLVLPGELAKHAVSEGTKAVTKFTSS

SEQ ID NO: 6940 - DNA, 426 bp, Aspergillus flavus NRRL3357
  CDS (1)..(426)
atggcacccaaggctgctgagaagaagcccagcactggcggcaaggcccctgctggcggcaaggcccctgctgagaagaaggaagctggcaagaagaccgcggctgctgcctctggtgacaagaagaagcgtggaaagaccaggaaggagacttactcttcttacatctacaaggtcctgaagcaggtccaccccgatactggaatctccactcgtgccatgtctattctgaactcctttgtcaatgacatcttcgagcgtgtcgcaaccgaggcctccaaactggccgcttataacaagaagtccactatctcgtcaagggagattcagacctctgtcagacttatcctgccaggtgaattggcgaagcatgctgtgtcggaaggcaccaaggctgttacgaagtactcctcttctgccaaataa

SEQ ID NO: 6941 - protein, 141 aa, Aspergillus flavus NRRL3357
MAPKAAEKKPSTGGKAPAGGKAPAEKKEAGKKTAAAASGDKKKRGKTRKETYSSYIYKVLKQVHPDTGISTRAMSILNSFVNDIFERVATEASKLAAYNKKSTISSREIQTSVRLILPGELAKHAVSEGTKAVTKYSSSAK

SEQ ID NO: 6942 - DNA, 375 bp, Anopheles gambiae str. PEST
  CDS (1)..(375)
atggccccgaagaccagcggcaaggcagctaagaagtccggcaaggcgcagaagaacatctccaagtcggacaagaagaagaagcgcaagacccgcaaggagagctacgccatctacatctacaaggtgctgaagcaggtgcacccggacaccggcatttcctccaaggcgatgagcatcatgaacagcttcgtgaacgacatcttcgagcggatcgcggcggaagcgtcccgcctggcgcactacaacaagcgctccaccatcacgtcccgcgagatccagacggcggtgcgactgttgctccccggcgagctggccaagcacgccgtgtccgagggcaccaaggccgtcaccaagtacaccagttccaagtaa

SEQ ID NO: 6943 - protein, 124 aa, Anopheles gambiae str. PEST
MAPKTSGKAAKKSGKAQKNISKSDKKKKRKTRKESYAIYIYKVLKQVHPDTGISSKAMSIMNSFVNDIFERIAAEASRLAHYNKRSTITSREIQTAVRLLLPGELAKHAVSEGTKAVTKYTSSK

SEQ ID NO: 6944 - DNA, 414 bp, Magnaporthe grisea 70-15
  CDS (1)..(414)
atgccccccaaggccgctgacaagaagcccgcctccaaggccccggctactgcctccaaggctcccgagaagaaggatgccggcaagaagactgccgcctctggcgacaagaagaagaggaccaagacccgcaaggagacttactcttcatacatctacaaggtcctcaagcaggtccaccccgacactggtatctccaaccgtgccatgtccatcctgaactctttcgtcaacgacatcttcgagcgtgttgctaccgaagcttccaagcttgccgcctacaacaagaagtcaaccatctcatctcgtgagatccagacctcggtcaggcttatcttgcccggtgagcttgccaagcacgccgtgtctgagggtaccaaggctgttaccaagtactcttcaagcaccaaataa

SEQ ID NO: 6945 - protein, 137 aa, Magnaporthe grisea 70-15
MPPKAADKKPASKAPATASKAPEKKDAGKKTAASGDKKKRTKTRKETYSSYIYKVLKQVHPDTGISNRAMSILNSFVNDIFERVATEASKLAAYNKKSTISSREIQTSVRLILPGELAKHAVSEGTKAVTKYSSSTK

SEQ ID NO: 6946 - DNA, 414 bp, Gibberella zeae PH-1
  CDS (1)..(414)
atggctcccaaggctgctgacaagaagcccgcctccaaggctcccgctactgcctccaaggctcctgagaagaaggatgccggcaagaagactgccgcttctggtgacaagaagaagcgctccaagagccgcaaggagacttactcttcttacatctacaaggtcctcaagcaggtccaccccgacactggtatctccaaccgtgccatgtccatcctgaactctttcgtcaacgacattttcgagcgtgtcgcttctgaggcttccaagcttgccgcctacaacaagaagtccaccatctcttcccgagagattcagacctctgtccgcctcatcctccccggtgagcttgccaagcacgccgtctccgagggtaccaaggccgttaccaagtactcttcctcgacgaaatag

SEQ ID NO: 6947 - protein, 137 aa, Gibberella zeae PH-1
MAPKAADKKPASKAPATASKAPEKKDAGKKTAASGDKKKRSKSRKETYSSYIYKVLKQVHPDTGISNRAMSILNSFVNDIFERVASEASKLAAYNKKSTISSREIQTSVRLILPGELAKHAVSEGTKAVTKYSSSTK

SEQ ID NO: 6948 - DNA, 390 bp, Candida glabrata CBS 138
  CDS (1)..(390)
atgtctgctgaaaagaagcctgcctccaaagccccagctgagaagaagccagctgccaagaagaccgctccatctgctgacggtaagaagagaaccaaggccagaaaggagacttactcctcatacatctacaaggtcttgaagcaaactcacccagacaccggtatttctcaaaagtccatgtctattctaaactctttcgtcaacgatatcttcgaaagaatcgcttctgaagcttccaagttggctgcttacaacaagaagtctaccatctccgctagagaaatccaaaccgccgtcagattgattttgccaggtgagttggctaagcacgccgtctctgaaggtactagagctgtcaccaagtactcttcttccactcaagcttag

SEQ ID NO: 6949 - protein, 129 aa, Candida glabrata CBS 138
MSAEKKPASKAPAEKKPAAKKTAPSADGKKRTKARKETYSSYIYKVLKQTHPDTGISQKSMSILNSFVNDIFERIASEASKLAAYNKKSTISAREIQTAVRLILPGELAKHAVSEGTRAVTKYSSSTQA

SEQ ID NO: 6950 - DNA, 396 bp, Candida glabrata CBS 138
  CDS (1)..(396)
atgtctgctaaagccgaaaagaagcctgcctccaaagccccagctgagaagaagccagctgccaagaagactgctccatcttccgatggtaagaagagaactaaggctagaaaggagacttactcctcttacatctacaaagttttgaagcaaactcacccagacaccggtatctctcaaaagtccatgtctattctaaactccttcgttaacgatatcttcgaaagaatcgcttccgaagcctccaagttggctgcttacaacaagaagtctaccatctccgctagagaaatccaaaccgccgttagattgatcttgccaggtgaattggctaagcacgccgtctctgaaggtactagagctgttaccaagtactcttcttccactcaagcttaa

SEQ ID NO: 6951 - protein, 131 aa, Candida glabrata CBS 138
MSAKAEKKPASKAPAEKKPAAKKTAPSSDGKKRTKARKETYSSYIYKVLKQTHPDTGISQKSMSILNSFVNDIFERIASEASKLAAYNKKSTISAREIQTAVRLILPGELAKHAVSEGTRAVTKYSSSTQA

SEQ ID NO: 6952 - DNA, 399 bp, Kluyveromyces lactis NRRL Y-1140
  CDS (1)..(399)
atggctccaaaagctgaaaagaaacctgcttccaaggctcctgccgaaaagaaacctgctgccaagaagacttcttcttctgttgatccatcaaagaagagaaccaaggctagaaaggaaacttactcttcttacatctacaaggttttgaagcaaacccatccagacactggtatttcccaaaagtctatgtctatcttgaactctttcgttaacgatatctttgaaagaattgctaccgaatcgtccaagttggctgcttacaacaagaagtctaccatctctgctagagaaattcaaactgctgttagattgatcttgccaggtgaattggctaagcacgctgtttctgaaggtactagagctgttaccaagtactcttcctccactcaagcttaa

SEQ ID NO: 6953 - protein, 132 aa, Kluyveromyces lactis NRRL Y-1140
MAPKAEKKPASKAPAEKKPAAKKTSSSVDPSKKRTKARKETYSSYIYKVLKQTHPDTGISQKSMSILNSFVNDIFERIATESSKLAAYNKKSTISAREIQTAVRLILPGELAKHAVSEGTRAVTKYSSSTQA

SEQ ID NO: 6954 - DNA, 399 bp, Kluyveromyces lactis NRRL Y-1140
  CDS (1)..(399)
atgtctgctaaagcatccaaggccccagcatccaaggctccagctgaaaagaagccagctgctaagaagacttcctcttctaccgatccatctaagaagagaactaaggctagaaaggaaacttactcctcttacatctacaaggttttgaagcaaacccatccagacactggtatttcccaaaagtctatgtccatcttgaactctttcgttaacgatatctttgaaagaatcgctactgaatcttccaagttggctgcttacaacaagaaatctactatttctgctagagaaatccaaacagctgtcagattgatcttgccaggtgaattggccaagcacgctgtttctgaaggtaccagagctgttaccaagtactcttcttctactcaagcttaa

SEQ ID NO: 6955 - protein, 132 aa, Kluyveromyces lactis NRRL Y-1140
MSAKASKAPASKAPAEKKPAAKKTSSSTDPSKKRTKARKETYSSYIYKVLKQTHPDTGISQKSMSILNSFVNDIFERIATESSKLAAYNKKSTISAREIQTAVRLILPGELAKHAVSEGTRAVTKYSSSTQA

SEQ ID NO: 6956 - DNA, 393 bp, Debaryomyces hansenii CBS767
  CDS (1)..(393): transl_table=12
atggcaccaaaagctgaaaagaaacctgcttccaaggcaccagccgaaaagaaaccagcagcaaagaagactgcttccgctactggaactaagaagagatcaaagaccagaaaggaaacttactcctcttacatctacaaggttttgaagcaaacacatccagacactggtatttctcaaaaggctatgtctatcatgaactctttcgttaacgatatttttgaaagaattgctggtgaagcctccaagttggctgcttacaacaagaagtcaaccatttctgctagagaaatccaaactgctgttagattgatcttaccaggtgaattagctaagcatgctgtttcggaaggtaccagagctgttaccaaatattcttctgctgctaattaa

SEQ ID NO: 6957 - protein, 130 aa, Debaryomyces hansenii CBS767
MAPKAEKKPASKAPAEKKPAAKKTASATGTKKRSKTRKETYSSYIYKVLKQTHPDTGISQKAMSIMNSFVNDIFERIAGEASKLAAYNKKSTISAREIQTAVRLILPGELAKHAVSEGTRAVTKYSSAAN

SEQ ID NO: 6958 - DNA, 390 bp, Debaryomyces hansenii CBS767
  CDS (1)..(390): transl_table=12
atggccccaaaagctgaaaagaaacctgcctcaaaagccccagctgaaaagaaacctgctgctaagaagactgctacttctggaaccaagaagagatctaagaccagaaaggaaacttactcttcttacatttacaaggttttaaagcaaactcaccctgatactggtatctcgcaaaaggctatgtctatcatgaactcttttgttaacgatattttcgaaagaattgctggtgaagcatccaagttagctgcttacaacaagaaatctactatttctgctagagaaattcaaactgctgttagattaatcttacctggtgaattagctaagcatgctgtttctgaaggtaccagagctgttactaaatactcttcagctgctaactaa

SEQ ID NO: 6959 - protein, 129 aa, Debaryomyces hansenii CBS767
MAPKAEKKPASKAPAEKKPAAKKTATSGTKKRSKTRKETYSSYIYKVLKQTHPDTGISQKAMSIMNSFVNDIFERIAGEASKLAAYNKKSTISAREIQTAVRLILPGELAKHAVSEGTRAVTKYSSAAN

SEQ ID NO: 6960 - DNA, 420 bp, Yarrowia lipolytica CLIB122
  CDS (1)..(420)
atggcccctaaagttgctgagaagaagccctcccttgccggaaaggcccctgccggaaaggcccctgctgagaagaaggaggctggcaagaagaccaccaccgccaccggcgagaagaagaagcgaactaaggcccgaaaggagacttactcttcttacatctacaaggtgctgaagcagacccaccctgacactggtatctccacccgagccatgtctatcatgaactcctttgtcaacgacatctttgagcgagtcgccaccgaggcctccaagctggccacctacaccaagaagtccaccatcacttctcgagagatccagaccgctgtccgactcattctccccggtgagctcgccaagcacgccactggtgacggtactcgagctgttgccaagtactctacctttgacaactaa

SEQ ID NO: 6961 - protein, 139 aa, Yarrowia lipolytica CLIB122
MAPKVAEKKPSLAGKAPAGKAPAEKKEAGKKTTTATGEKKKRTKARKETYSSYIYKVLKQTHPDTGISTRAMSIMNSFVNDIFERVATEASKLATYTKKSTITSREIQTAVRLILPGELAKHATGDGTRAVAKYSTFDN

SEQ ID NO: 6962 - DNA, 423 bp, Aspergillus nidulans FGSC A4
  CDS (1)..(423)
atgcctcccaaagctgccgagaagaagcctagcactggcggcaaagcccctgctggcaaggccccagctgagaagaaggaagctggaaagaagaccgccgctgctgcctctggcgagaagaagaagcgcggaaagaccaggaaggagacctactcttcttacatctacaaggtcctcaagcaagtgcacccggacactggtatctccacccgtgctatgtctattctgaactctttcgtcaatgatatctttgagcgcgttgcgacggaggcgtccaagctcgctgcttataacaagaagtccaccatatcatctcgagaaatccagacctctgtgaggctgattctgcccggagaactcgccaagcacgctgtgtctgagggcaccaaggccgttacgaagtattcctcatctgccaaatag

SEQ ID NO: 6963 - protein, 140 aa, Aspergillus nidulans FGSC A4
MPPKAAEKKPSTGGKAPAGKAPAEKKEAGKKTAAAASGEKKKRGKTRKETYSSYIYKVLKQVHPDTGISTRAMSILNSFVNDIFERVATEASKLAAYNKKSTISSREIQTSVRLILPGELAKHAVSEGTKAVTKYSSSAK

SEQ ID NO: 6964 - DNA, 393 bp, Candida albicans SC5314
  CDS (1)..(393): transl_table=12
atggccccaaaagcagaaaagaaaccagcttccaaagctccagctgaaaagaaaccagctgctaagaaaaccgcttccaccgatggtgctaaaaagagaaccaaagctagaaaagaaacttattcctcatatatatataaagttttgaaacaaacacatccagacactggtatctcccaaaaggccatgtcaattatgaattcgtttgttaacgatattttcgaaagaattgccaccgaagcctccaaattagctgcttacaataaaaaatccacaatttccgctagagaaatccaaactgctgttagattaattttgccaggtgaattggccaaacatgccgtttccgaaggtaccagagccgtcacaaaatactcatctgcttctagttag

SEQ ID NO: 6965 - protein, 130 aa, Candida albicans SC5314
MAPKAEKKPASKAPAEKKPAAKKTASTDGAKKRTKARKETYSSYIYKVLKQTHPDTGISQKAMSIMNSFVNDIFERIATEASKLAAYNKKSTISAREIQTAVRLILPGELAKHAVSEGTRAVTKYSSASS

SEQ ID NO: 6966 - DNA, 393 bp, Candida albicans SC5314
  CDS (1)..(393): transl_table=12
atggccccaaaagcagaaaagaaaccagcttctaaagctccagctgaaaaaaaaccagccgctaaaaaaaccgcttccactgatggtgctaaaaagagaactaaagctagaaaagaaacttattcttcatacatttacaaagttttgaaacaaactcacccagatactggtatctcccaaaaagctatgtctattatgaactcatttgttaatgatatctttgaaagaattgcttctgaagcttctaaattggctgcttacaataaaaaatctaccatttctgctagagaaatccaaactgctgttagattgatcttaccaggtgaattggctaaacatgctgtttctgaaggtactagagctgttaccaaatactcttctgcttctaattaa

SEQ ID NO: 6967 - protein, 130 aa, Candida albicans SC5314
MAPKAEKKPASKAPAEKKPAAKKTASTDGAKKRTKARKETYSSYIYKVLKQTHPDTGISQKAMSIMNSFVNDIFERIASEASKLAAYNKKSTISAREIQTAVRLILPGELAKHAVSEGTRAVTKYSSASN

SEQ ID NO: 6968 - DNA, 429 bp, Ustilago maydis 521
  CDS (1)..(429)
atgccccccaagcccgccgagaagaagccctcctccaccgccggcaaggcgcctgcctcgtccgctggcaaggcccctgctgaggccgccaagaagacctcgaaggcccccgccaagtctggcgaaaagaagaaggccaccaaggttcgcaaggagacctactcgacctacatctaccgtgtgctcaagcaggttcaccctgacactggtatctcgaacaaggccatggccattcttaactcgttcgtccaggacatctttgagcgcatcgcaactgaggcgtcgaagctcgcttcgtacaacaagaagtcgaccatctcgtcgcgagagatccagacggctgtccgcctcattcttcccggtgagctttccaagcacgccatctcggaaggtaccaagtcggtcaccaagttctcttcgtccaagtaa

SEQ ID NO: 6969 - protein, 142 aa, Ustilago maydis 521
MPPKPAEKKPSSTAGKAPASSAGKAPAEAAKKTSKAPAKSGEKKKATKVRKETYSTYIYRVLKQVHPDTGISNKAMAILNSFVQDIFERIATEASKLASYNKKSTISSREIQTAVRLILPGELSKHAISEGTKSVTKFSSSK

SEQ ID NO: 6970 - DNA, 420 bp, Cryptococcus neoformans var. neoformans B-3501A
  CDS (1)..(420)
atggctcccaagtctgttgcttccaaggctcctgcttcccaggcctccaaggcccccgctgccgcgtccaaggctcccgccaaggccgctaagacttctgctgctcccaaggacggtgccaagaagaggtccaagaagagggtcgagtcttactcttcttacatctacaaggtcctcaagcaggtccaccccgacactggtatctctaacaaggccatggctatccttaactctttcgtctctgacattttcgagcgaattgccactgaggcttccaagcttgcttcttacaaccaccgatctaccatctcttctcgagagatccagacctctgtccgactcatccttcctggtgaactctctaagcacgccatctctgagggtaccaaggctgtcaccaagtactcttcttccaagtaa

SEQ ID NO: 6971 - protein, 139 aa, Cryptococcus neoformans var. neoformans B-3501A
MAPKSVASKAPASQASKAPAAASKAPAKAAKTSAAPKDGAKKRSKKRVESYSSYIYKVLKQVHPDTGISNKAMAILNSFVSDIFERIATEASKLASYNHRSTISSREIQTSVRLILPGELSKHAISEGTKAVTKYSSSK

SEQ ID NO: 6972 - DNA, 381 bp, Strongylocentrotus purpuratus
  CDS (1)..(381)
atgcctcccaaaggtgctgctgcgaaaggcgagaagaaggcggtcaagtccaaatcaatggcagtcggtcgtactggggataagaagagaagacgaaggcgtctagaatcctacaacatctacatctataaagtcctcaaacaagttcatccagacacgggaatatccagcaaggcgatgtcgatcatgaatagctttgtcaatgatatttttgaacggatcgcatcagaggcgtcaagactggcacagtacaacaagaagagcactatcagtagccgagaggttcagaccgcagtccgtcttctcctgcccggtgagctggctaaacacgccgtgtcggagggcacaaaggccgttaccaaatacaccacttcgcggtag

SEQ ID NO: 6973 - protein, 126 aa, Strongylocentrotus purpuratus
MPPKGAAAKGEKKAVKSKSMAVGRTGDKKRRRRRLESYNIYIYKVLKQVHPDTGISSKAMSIMNSFVNDIFERIASEASRLAQYNKKSTISSREVQTAVRLLLPGELAKHAVSEGTKAVTKYTTSR

SEQ ID NO: 6974 - DNA, 372 bp, Strongylocentrotus purpuratus
  CDS (1)..(372)
atgcctgccaagactagcggaaagggagccaagaaggccgggaaggcaaaggtcagcggtaccgctggagataagaagaggaagaggaagcgaaaggaaagttacggaatctacatctacaaggttctgaagcaggtccaccccgacactggtatctccagcaaggccatgtccatcatgaacagcttcgtcaacgatgtcttcgagcgcattgccggtgaatcttcccgtcttgccaagtacaacaagaagtccaccatcagcagccgagagatccagaccgctgtccgtctcctcctccccggagagctggccaagcatgccgtctctgagggcaccaaggctgtcaccaagtacaccacctccaagtaa

SEQ ID NO: 6975 - protein, 123 aa, Strongylocentrotus purpuratus
MPAKTSGKGAKKAGKAKVSGTAGDKKRKRKRKESYGIYIYKVLKQVHPDTGISSKAMSIMNSFVNDVFERIAGESSRLAKYNKKSTISSREIQTAVRLLLPGELAKHAVSEGTKAVTKYTTSK

SEQ ID NO: 6976 - DNA, 372 bp, Strongylocentrotus purpuratus
  CDS (1)..(372)
atgcctgccaagactagtggaaagggagcgaagaaggccggtaaggcaaaggccagccgtgcagcaggagataagaagaggaagaggcgccgaaaggagagctacggaatctacatctacaaagttctgaagcaagttcaccccgacactggtatctccagcaaggccatgtccatcatgaacagcttcgtcaacgatgtcttcgagcgtatcgccggtgaggcttcccgccttgcaggctacaacaagaaggccaccatcagcagccgagagatccagaccgctgtccgtctcctcctccccggagagctggccaagcacgccgtctctgagggcaccaaggctgtcaccaagtacaccacctccaagtaa

SEQ ID NO: 6977 - protein, 123 aa, Strongylocentrotus purpuratus
MPAKTSGKGAKKAGKAKASRAAGDKKRKRRRKESYGIYIYKVLKQVHPDTGISSKAMSIMNSFVNDVFERIAGEASRLAGYNKKATISSREIQTAVRLLLPGELAKHAVSEGTKAVTKYTTSK

SEQ ID NO: 6978 - DNA, 414 bp, Neurospora crassa OR74A
  CDS (1)..(414)
atgcctcccaagcccgccgacaagaagcctgcctccaaggcccccgctactgcctccaaggcccccgagaagaaggatgccggaaagaagactgccgcctctggcgacaagaagaagcgcaccaaggcccgcaaggagacctactcctcctacatctacaaggtcctcaagcaggtccaccctgataccggtatctccaaccgcgccatgtctatcctgaactcgtttgtcaacgatatcttcgagcgcgttgccaccgaggcttccaagcttgctgcctacaacaagaagtccaccatctcctctcgtgagatccagacctctgttcgcctcatcctccccggcgagcttgccaagcacgctgtatcggaaggcactaaggccgttaccaagtactcttccagcacgaaataa

SEQ ID NO: 6979 - protein, 137 aa, Neurospora crassa OR74A
MPPKPADKKPASKAPATASKAPEKKDAGKKTAASGDKKKRTKARKETYSSYIYKVLKQVHPDTGISNRAMSILNSFVNDIFERVATEASKLAAYNKKSTISSREIQTSVRLILPGELAKHAVSEGTKAVTKYSSSTK

SEQ ID NO: 6980 - DNA, 378 bp, Chlamys farreri
  CDS (1)..(378)
atggcacccaaagtagcaggaggatcgaaaggagctaagaaggccgccacgaaggcaaaggccaaccgtggggctgacaagaaaaggaggaggaagaggagggaatcctacagcatctacatctacaaggtgttgaaacaggtgcaccccgacactggtgtgtccagcaaggctatgtccatcatgaacagctttgtcaacgacatcttcgagagaatctcagctgaggcttcccgtctcgctcactacaacaagaggtccacaatcaccagtcgggagatccagaccgctgtccgtctccttcttcccggtgaattggccaagcacgccgtcagtgagggtaccaaggctgtcaccaagtacaccagctccaagtag

SEQ ID NO: 6981 - protein, 125 aa, Chlamys farreri
MAPKVAGGSKGAKKAATKAKANRGADKKRRRKRRESYSIYIYKVLKQVHPDTGVSSKAMSIMNSFVNDIFERISAEASRLAHYNKRSTITSREIQTAVRLLLPGELAKHAVSEGTKAVTKYTSSK

SEQ ID NO: 6982 - DNA, 444 bp, Nicotiana benthamiana
  CDS (1)..(444)
atggcaccaaaagccgagaagaaacccgccgagaagaagccagcagctgagaaggcaccagtagcagcaggtgcagcggagaagaagccaaaggctgggaagaagcttcccaaggacggtgccggagcagctgcaggagacaagaagaagaagaggttaaagaagtctgttgaaacttacaagatctacatcttcaaggtgttgaaacaggttcatcctgatattggtatctctagtaaggctatggggatcatgaacagctttattaatgacattttcgagaagctggctcaggaatcttctagattggcccgttacaacaagaagcctactatcacttctcgggagattcagactgctgtgaggcttgtgcttcctggtgaattggctaagcacgctgtttctgagggtaccaaggctgttactaaatttactagctcttaa

SEQ ID NO: 6983 - protein, 147 aa, Nicotiana benthamiana
MAPKAEKKPAEKKPAAEKAPVAAGAAEKKPKAGKKLPKDGAGAAAGDKKKKRLKKSVETYKIYIFKVLKQVHPDIGISSKAMGIMNSFINDIFEKLAQESSRLARYNKKPTITSREIQTAVRLVLPGELAKHAVSEGTKAVTKFTSS

SEQ ID NO: 6984 - DNA, 438 bp, Vitis vinifera
  CDS (1)..(438)
atggcgcccaaggcagagaagaagcccgcggagaagaagccagccggtggcggggagaagaaggccgagaaggctccggcggagaagaagccaagggctgagaagaagctaccaaaggacgcgtcttctactgataagaagaagaagaggacgaggaaaaatgtggagacctataagatctacatcttcaaggtgttgaagcaggttcatcctgacatcgggatttccagcaaggctatgggcatcatgaacagcttcatcaatgacatctttgagaaactcgctcaggaggcctccaggctcgcgaggtacaacaagaagccgaccatcacctccagggagattcagaccgctgtgaggcttgttctgcccggtgagcttgcgaagcacgctgtttctgaggggaccaaggcggtcaccaagtttactagctcttag

SEQ ID NO: 6985 - protein, 145 aa, Vitis vinifera
MAPKAEKKPAEKKPAGGGEKKAEKAPAEKKPRAEKKLPKDASSTDKKKKRTRKNVETYKIYIFKVLKQVHPDIGISSKAMGIMNSFINDIFEKLAQEASRLARYNKKPTITSREIQTAVRLVLPGELAKHAVSEGTKAVTKFTSS

SEQ ID NO: 6986 - DNA, 438 bp, Vitis vinifera
  CDS (1)..(438)
atggcgcccaaggcagagaagaagcccgcggagaagaagccggccggcggcgaggagaagaaggccgagaaggctccggcggagaagaagccaagggctgagaagaagctaccaaaggacgcgtcttctactgataagaagaagaagaggacgaagaaaaatgtggagacctataagatctacatcttcaaggtgttgaagcaggttcatcctgacatcgggatttccagcaaggctatgggcatcatgaacagcttcatcaatgacatctttgagaaactcgctcaggaggcctccaggctcgcgaggtacaacaagaagccgaccatcacctccagggagatccagaccgctgtgaggcttgttctgcccggtgagcttgcgaagcacgctgtttctgaggggaccaaggcggtcaccaagtttactagttcttag

SEQ ID NO: 6987 - protein, 145 aa, Vitis vinifera
MAPKAEKKPAEKKPAGGEEKKAEKAPAEKKPRAEKKLPKDASSTDKKKKRTKKNVETYKIYIFKVLKQVHPDIGISSKAMGIMNSFINDIFEKLAQEASRLARYNKKPTITSREIQTAVRLVLPGELAKHAVSEGTKAVTKFTSS

SEQ ID NO: 6988 - DNA, 456 bp, Vitis vinifera
  CDS (1)..(456)
atgtatacggcatctcgaccaatatctgatggcgccaaaggcagagaagaagcccgccgagaagaagccggcagaggagaagaagcgccggcggagaagaagcccaaggccgggaagaagctacccaaggaaggcggcgccggccctggagacaagaagaagaagcgcacgaagaagagcgttgagacctacaagatctacatcttcaaggtcttgaagcaggttcatcccgatatcgggatctctagcaaggccatgggtattatgaacagcttcatcaacgatatctttgagaagcttgctcaggaatcctcgcggctcgctcgctacaacaagaagcccacgattacttcgcgggagatccagactgccgtgcgattggtgcttcctggagagttggccaagcacgcggtctccgagggaaccaaggctgtgacgaaatttacaagttcttga

SEQ ID NO: 6989 - protein, 151 aa, Vitis vinifera
MYTASRPISDGAKGREEARREEAGRGEEAPAEKKPKAGKKLPKEGGAGPGDKKKKRTKKSVETYKIYIFKVLKQVHPDIGISSKAMGIMNSFINDIFEKLAQESSRLARYNKKPTITSREIQTAVRLVLPGELAKHAVSEGTKAVTKFTSS

SEQ ID NO: 6990 - DNA, 414 bp, Vitis vinifera
  CDS (1)..(414)
atggcgccaaaggctgagaagaagcccgccgagaagaagccagcggaggagaagaaaaccaagcccaaagccggtaagaagctccccaaagaggccggcgcagccactgataagaagaagaagcgcaccaagaagagcgttgagacctacaagatctacatcttcaaggtcttgaaacaggtccatcctgacatcgggatctccagcaaggccatggggatcatgaacagcttcatcaacgacatcttcgagaagcttgctcaggaggcatcgcggctggcgcgttacaacaagaagccgacgatcacttctcgggagatccagacggccgtccgattggtgcttcccggcgagttggccaagcacgccgtttcagagggcaccaaggccgtaacgaagttcaccagttcttga

SEQ ID NO: 6991 - protein, 137 aa, Vitis vinifera
MAPKAEKKPAEKKPAEEKKTKPKAGKKLPKEAGAATDKKKKRTKKSVETYKIYIFKVLKQVHPDIGISSKAMGIMNSFINDIFEKLAQEASRLARYNKKPTITSREIQTAVRLVLPGELAKHAVSEGTKAVTKFTSS

SEQ ID NO: 6992 - DNA, 453 bp, Vitis vinifera
  CDS (1)..(453)
atgttgacctcgataatccttgcatgtgccgaagagaacctcatgcagagaagaagcccgcggagaagaagccagccggccgagaaggctccggcggagaagaagccaagggctgagaagaagctaccaaaggacgcgtcttctactgataagaagaagaagaggacgaggaaaaatgtggagacctataagatctacatcttcaaggtgttgaagcaggttcatcctgacatcgggatttccagcaaggctatgggcatcatgaacagcttcatcaatgacatctttgagaaactcgctcaggaggcctccaggctcgcgaggtacaacaagaagccgaccatcacctccagggagattcagaccgctgtgaggcttgttctgcccggtgagcttgcgaagcacgctgtttctgaggggaccaaggcggtcaccaagtttactagctcttag

SEQ ID NO: 6993 - protein, 150 aa, Vitis vinifera
MLTSIILACAEENLMQRRSPRRRSQPAEKAPAEKKPRAEKKLPKDASSTDKKKKRTRKNVETYKIYIFKVLKQVHPDIGISSKAMGIMNSFINDIFEKLAQEASRLARYNKKPTITSREIQTAVRLVLPGELAKHAVSEGTKAVTKFTSS

SEQ ID NO: 6994 - DNA, 426 bp, Nicotiana tabacum
  CDS (1)..(426)
atggctcctaaggcagagaagaagcccgccgagaagaagccggctgaggagaaagctccggcggagaagaagccaaaggccgggaagaagctaccggcgaaggacggcgccagtggtgctgacaagaagaaaaagaaggctaaaaagagtgttgaaacctacaagatctacatctttaaggtgctcaagcaagttcatccggatattggtatctcaagcaaggctatgggaattatgaacagttttatcaatgatatttttgagaaattggctcaggaatcttctagacttgccaggtataataagaaaccgactattacttccagggaaattcagaccgcggtcagattggtgctacccggtgaattggctaagcatgctgtttctgaaggaaccaaggctgtgactaagtttaccagttcttaa

SEQ ID NO: 6995 - protein, 141 aa, Nicotiana tabacum
MAPKAEKKPAEKKPAEEKAPAEKKPKAGKKLPAKDGASGADKKKKKAKKSVETYKIYIFKVLKQVHPDIGISSKAMGIMNSFINDIFEKLAQESSRLARYNKKPTITSREIQTAVRLVLPGELAKHAVSEGTKAVTKFTSS

SEQ ID NO: 6996 - DNA, 372 bp, Anthonomus grandis
  CDS (1)..(372)
atgccaccaaaaactagcggaaaagctgccaagaaagccggaaaggctcagaaaaacatctctaaaactgataagaagaagaagcgcaggaggaaggaaacgtacgcaatctacatttacaaagtattgaagcaagtacatcctgataccggtatttccagcaaagccatgtcgattatgaattcattcgttaacgatatttttgagaggattgctgccgaagcatctcgtctggctcactacaacaaaagatctaccatcacaagtagggagattcaaaccgctgtgagacttttgttgcctggtgaattagctaagcacgctgtatccgaaggtaccaaagctgttaccaagtataccagctccaagtaa

SEQ ID NO: 6997 - protein, 123 aa, Anthonomus grandis
MPPKTSGKAAKKAGKAQKNISKTDKKKKRRRKETYAIYIYKVLKQVHPDTGISSKAMSIMNSFVNDIFERIAAEASRLAHYNKRSTITSREIQTAVRLLLPGELAKHAVSEGTKAVTKYTSSK

SEQ ID NO: 6998 - DNA, 668 bp, Picea sitchensis
  CDS (73)..(480)
ggagtgtttgttttctatcgatagtttgcgaaaatctagaagcggtgccatatcgagctttgaattctagcaatggctccgaaggcagagaagaaacctgctgagaagaagcctgtagcagagaagaagcctgctcccaaggctgagaaaaagcttccaaaggaaggcggagaaaagaaggggaagaagaagcataagaagagcgttgagacctacaagatctatatctttaaggttctgaagcaagttcacccagatatcggcatttctagcaaagcaatggggataatgaacagcttcatcaatgatatctttgagaaattggcgagcgaatcatcgaaactcgcccgctacaacaagaagcccacgattacctcccgggagattcagaccgctgtaaggcttgcccttccaggagagcttgccaagcacgccgtttcagagggtaccaaggctgttactaagttcaccagtgcttgaatttgatattttcttttatttaaattcaatggtgtcttttgacaccacataagctatgggacttttaacatattcttcgaggttaattatgtgtacatgtttttttattttgtttttaaatttactgttcttatatttttccttcctaatagtgggttggaggcaattgcggaaaaaaaaaaaaaaaa

SEQ ID NO: 6999 - protein, 135 aa, Picea sitchensis
MAPKAEKKPAEKKPVAEKKPAPKAEKKLPKEGGEKKGKKKHKKSVETYKIYIFKVLKQVHPDIGISSKAMGIMNSFINDIFEKLASESSKLARYNKKPTITSREIQTAVRLALPGELAKHAVSEGTKAVTKFTSA

SEQ ID NO: 7000 - DNA, 426 bp, Picea sitchensis
  CDS (1)..(426)
atggcgcccaaggcagcagagaagaagcccgcggagaagaagcccgtcgcagagaaagctcctgcagagaagaagcctgctcccaaggccgagaagaagctccccaaggaaggcggagacaagaagggaaagaagaggcataagaagagcgtggagacctacaagatctatatcttcaaggttctcaagcaggtccaccctgatattggtatttctagcaaggccatgggaatcatgaacagcttcatcaatgatatctttgagaaattggcgagcgaggcatcgaagctcgcccgctacaacaagaagccaaccatcacttcccgggagattcagaccgctgtaaggcttgctcttccaggggagctcgcaaagcacgctgtctcggagggaaccaaggccgtcaccaagtttaccagcgcttga

SEQ ID NO: 7001 - protein, 141 aa, Picea sitchensis
MAPKAAEKKPAEKKPVAEKAPAEKKPAPKAEKKLPKEGGDKKGKKRHKKSVETYKIYIFKVLKQVHPDIGISSKAMGIMNSFINDIFEKLASEASKLARYNKKPTITSREIQTAVRLALPGELAKHAVSEGTKAVTKFTSA

SEQ ID NO: 7002 - DNA, 426 bp, Picea sitchensis
  CDS (1)..(426)
atggctcccaaggcagagaagaaaccagctgagaagaagcccgtcgcagagaaaacacctgctgagaagaagcccgctcctcccaaggccgggaagaagctgccgaaggaaggcggtgagaagaagggaaagaagaaacacaagaagagcgtggaaacgtacaagatctatattttcaaggttctgaaacaggtccatcctgatatcggcatttcgagcaaggccatggggataatgaacagcttcatcaatgacatcttcgagaagttggccagcgagtcatcgaagctcgcccgctacaacaagaagcccaccattacttcccgggagatccagactgctgtaaggctcgctcttccaggggagctcgcgaagcacgctgtgtccgagggtaccaaagcggttaccaagttcaccagcgcctga

SEQ ID NO: 7003 - protein, 141 aa, Picea sitchensis
MAPKAEKKPAEKKPVAEKTPAEKKPAPPKAGKKLPKEGGEKKGKKKHKKSVETYKIYIFKVLKQVHPDIGISSKAMGIMNSFINDIFEKLASESSKLARYNKKPTITSREIQTAVRLALPGELAKHAVSEGTKAVTKFTSA

SEQ ID NO: 7004 - DNA, 758 bp, Picea sitchensis
  CDS (114)..(536)
gatctctgcatcgagaacagcacaagatttgccctacgtagagttttgttttcttattcaaaattttcaagccgtccgtgcccgtttgagagtattttctgtcggaagcagtaatggcaccaaaggcagagaagaaacccgctgagaaaaagcctgttgcagagaaaacccctgcagaaaagaagcccgctgcgaaggccgaaaagaagctgcctaaggagggtggagacaagaagggcaagaagaagcacaagaagagcgttgagacgtacaagatttatatcttcaaggttctcaagcaagttcatccagatatcggtatttctagcaaggccatgggaatcatgaattccttcatcaacgacatctttgagaagttggcgagcgaagcatcgagactggcccggtacaacaagaagcctactattacctcccgagagattcagaccgcagtaaggcttgctcttccaggggaactcgccaaacatgccgtctcagagggtaccaaagcagttacaaagtttacgagcgcttgatcttggtatttattctgaattaacttaaatggtgtcttttgataccacctatgccattgaactgttagcacgttatttgagttgaattggattcgagagtccacttccttattagggttgtccgactttgagtcgatgtcatatatattgatatacctgaacatggttgatggtgttataatttatgttttttttttttgttctttaaaaaaaaaaaaaaaa

SEQ ID NO: 7005 - protein, 140 aa, Picea sitchensis
MAPKAEKKPAEKKPVAEKTPAEKKPAAKAEKKLPKEGGDKKGKKKHKKSVETYKIYIFKVLKQVHPDIGISSKAMGIMNSFINDIFEKLASEASRLARYNKKPTITSREIQTAVRLALPGELAKHAVSEGTKAVTKFTSA

SEQ ID NO: 7006 - DNA, 426 bp, Picea sitchensis
  CDS (1)..(426)
atggcgcccaagggagagaagaagcccgccgagaagaagcccgttgcggagaaagccccggctgcagagaagaagcccgctgccaaggccgaaaagaagctgcctaaggacggtggagacaagaagggcaagaagaggcacaagaagagcgttgagacatacaagatttacatcttcaaggttctcaagcaagttcatccagatattggcatttccagcaaggccatgggaataatgaattccttcattaacgatatctttgagaaattggcgagtgaagcatcgagactcgcccgctacaacaagaagcccaccattacctcccgggagattcagactgctgtaaggcttgctcttccaggggaacttgccaagcatgccgtctcagagggtaccaaggcggttaccaagtttaccagtgcttaa

SEQ ID NO: 7007 - protein, 141 aa, Picea sitchensis
MAPKGEKKPAEKKPVAEKAPAAEKKPAAKAEKKLPKDGGDKKGKKRHKKSVETYKIYIFKVLKQVHPDIGISSKAMGIMNSFINDIFEKLASEASRLARYNKKPTITSREIQTAVRLALPGELAKHAVSEGTKAVTKFTSA

SEQ ID NO: 7008 - DNA, 599 bp, Picea sitchensis
  CDS (58)..(483)
ggacatagttttgcgaagaagtagaagctttggtctcgtcagattcgaactctagcaatggctcccaaggcagagaagaaacccgctgagaagaagcccgccgcagagaaatctcctgctgcagagaagaaacccgccccgaaggccgagaaaaagctgccgaaggaaagcggagataagaagggaaagaagaggcataagaagaatgttgagacctacaagatttatattttcaaggtcttgaaacaggttcatcccgatatcggaatttcaagcaaggccatgggaattatgaactccttcattaatgatatttttgagaaattggcgagcgaggcatcgaagctcgctcgctacaacaagaagcctactattacctcccgggaaattcagaccgctgtgaggcttgctcttccaggggagctcgccaagcatgccgtttcagagggtacaaaggctgtcaccaagttcaccagcgcttgaatttggtattttccttgaattgaatttattggtgttttttgacaccacctctgcttttgaattttgaacatgctctttgaggttaatcaagtttgtctgcaaaaaaaaaaaaaaaa

SEQ ID NO: 7009 - protein, 141 aa, Picea sitchensis
MAPKAEKKPAEKKPAAEKSPAAEKKPAPKAEKKLPKESGDKKGKKRHKKNVETYKIYIFKVLKQVHPDIGISSKAMGIMNSFINDIFEKLASEASKLARYNKKPTITSREIQTAVRLALPGELAKHAVSEGTKAVTKFTSA

SEQ ID NO: 7010 - DNA, 426 bp, Picea sitchensis
  CDS (1)..(426)
atggcgcccaaggcagcagagaagaagcccgcagagaagaagcctgtcgcagagaaagctcctgcggagaagaagcccgctcccaaggccgagaagaagctgcccaaggatggcggagacaagaagggtaagaaaaggcataagaagagcgtggagacctacaagatctatatcttcaaggttctcaagcaagttcaccctgacattggtatttccagcaaggcaatgggaatcatgaacagtttcatcaatgatatctttgagaaattggcgagcgaggcatcgaagctcgcccgctacaacaagaagcccactattacttcacgggagattcagaccgctgtaaggcttgctcttccaggggagcttgcaaagcacgccgtctcagagggcacaaaggccgtaaccaagttcaccagcgcttga

SEQ ID NO: 7011 - protein, 141 aa, Picea sitchensis
MAPKAAEKKPAEKKPVAEKAPAEKKPAPKAEKKLPKDGGDKKGKKRHKKSVETYKIYIFKVLKQVHPDIGISSKAMGIMNSFINDIFEKLASEASKLARYNKKPTITSREIQTAVRLALPGELAKHAVSEGTKAVTKFTSA

SEQ ID NO: 7012 - DNA, 426 bp, Picea sitchensis
  CDS (1)..(426)
atggcgcccaaggcagcagagaagaagcccgcggagaagaagcccgtcgcagagaaagctcctgcagagaagaagcccgctcccaaggccgaggagaagctccccaaggaaggcggagacaagaagggaaagaagaggcataagaagagcgtggagacctacaagatctatatcttcaaggttctcaagcaggtccaccctgatattggtatttctagcaaggccatgggaatcatgaacagcttcatcaatgatatctttgagaaattggcgagcgaggcatcgaagctcgcccgctacaacaagaagccaaccatcacttcccgggagattcagaccgctgtaaggcttgctcttccaggggagctcgcaaagcacgctgtctcggagggaaccaaggccgtcaccaagtttaccagcgcttga

SEQ ID NO: 7013 - protein, 141 aa, Picea sitchensis
MAPKAAEKKPAEKKPVAEKAPAEKKPAPKAEEKLPKEGGDKKGKKRHKKSVETYKIYIFKVLKQVHPDIGISSKAMGIMNSFINDIFEKLASEASKLARYNKKPTITSREIQTAVRLALPGELAKHAVSEGTKAVTKFTSA

SEQ ID NO: 7014 - DNA, 429 bp, Picea sitchensis
  CDS (1)..(429)
atggctcccaaggcagataagaaaccagctgagaagaagccggtcgcagagaaatcccccgctgcagagaaaaagcctgctcctcccaaggccggcaagaagctgcccaaggaaggcggcgaaaagaagggcaagaagaagcacaagaagagcgtggaaacgtacaagatctatctcttcaaggtcctgaagcagggtcatcctgatatcggtatttccagcaaggccatggggataatgaacagtttcatcaatgatatctttgagaagctggccggagaggcatcgaaactcgcccgctacaacaagaagccgaccatcacctcccgggagatccagactgctgtaaggctcgctcttccaggggagcttgcaaagcacgctgtgtccgagggaacgaaagcggttaccaagttcaccagcgcctaa

SEQ ID NO: 7015 - protein, 142 aa, Picea sitchensis
MAPKADKKPAEKKPVAEKSPAAEKKPAPPKAGKKLPKEGGEKKGKKKHKKSVETYKIYLFKVLKQGHPDIGISSKAMGIMNSFINDIFEKLAGEASKLARYNKKPTITSREIQTAVRLALPGELAKHAVSEGTKAVTKFTSA

SEQ ID NO: 7016 - DNA, 853 bp, Picea sitchensis
  CDS (23)..(511)
gagtagaattcggttgtgaagaatggcaccaaaggcagagaagaagccggcggagaagaaacccgcaggcggagaggaagagcggaagacggtcggagagaagacgcccgtcggaaaggcggcggccgcggcgaaagagaaggcggctcctcctgcgaaggcggagaagactacgaagaagaagatatctaaagaagggggcgataagaagaagaagaagagagccaagaagagcgtggagacatacaggatatatgtgtacaaggtgctgaagcaggtgcatcctgacattggcatctccagcaaggccatgtctattatgaattcttttgttaatgatatatttgagaaagtggcggcagaatcctcgaagcttactcgctacggcaagagggatacgctctcctctagggaggtgcagactgctgtaaagcttgttcttccgggtgagctagctaagcacgccgtttctgaaggcaccaaggccgtgaccaaattcacctcaacctgagcccagttcttttctgctctgtgtattctgcattatggtatcctatttacggtgtctcttgacaccaccttttcttacggattttgggccctttttctcctcatctgttgatcagggtttgctttctcagcactttgggtgaaagatttatttcgttgttcaggttttagcaaagccttgtgttttcccctttttccaagatatatttccatgttaatggttgtggcaaaaactttatgagatggttgtggcaaaaatttcttaggttctataatttggcttgttctaattgtcgttcatacattgtaaacaatgttctttttcctaaaaaaaaaaaaaaaa

SEQ ID NO: 7017 - protein, 162 aa, Picea sitchensis
MAPKAEKKPAEKKPAGGEEERKTVGEKTPVGKAAAAAKEKAAPPAKAEKTTKKKISKEGGDKKKKKRAKKSVETYRIYVYKVLKQVHPDIGISSKAMSIMNSFVNDIFEKVAAESSKLTRYGKRDTLSSREVQTAVKLVLPGELAKHAVSEGTKAVTKFTST

SEQ ID NO: 7018 - DNA, 610 bp, Picea sitchensis
  CDS (75)..(482)
gatctctgagtgttttctatcgatacttttcgaaaatccagaagcggtgctctcgccagctttgaattccagcaatggctccgaaggcagagaagaaacccgctgagaagaagcccgtagcagagaagaagtctgctcccaaggccgagaaaaagcttccaaaggaaggcggggacaagaaggggaagaagaagcataagaagagcgttgagacctacaagatctatatctttaaggttttgaagcaggttcacccagatatcggcatttctagcaaagcgatggggataatgaacagcttcatcaatgatatcttcgagaaattggcgagcgaatcatcgaaactcgcccgctacaacaagaagcccacgattacctcccgggagattcagaccgctgtaaggcttgcccttccaggggagcttgctaagcacgccgtctccgagggtaccaaggctgttaccaagttcacaagtgcttgaattttatgttttatattttattttactttgaatggtgtcttttgacaccacacatgctatggaactcttaacatattcttcgaggttaaatgtgtacgcattttttgtttttaaaaaaaaaaaaaaaa

SEQ ID NO: 7019 - protein, 135 aa, Picea sitchensis
MAPKAEKKPAEKKPVAEKKSAPKAEKKLPKEGGDKKGKKKHKKSVETYKIYIFKVLKQVHPDIGISSKAMGIMNSFINDIFEKLASESSKLARYNKKPTITSREIQTAVRLALPGELAKHAVSEGTKAVTKFTSA

SEQ ID NO: 7020 - DNA, 731 bp, Picea sitchensis
  CDS (92)..(517)
ccccgagggttcatttgcgctgagtttaatttaggagtttgaagtctccgggttccagtgtctttttctgttgtgtttgttcgcagtagcaatggcgcccaaggcagcagagaagaagcccgctgagaagaagcccgtcgcagagaaagctccggcagagaagaaacccgctcccaaggccgagaagaagctgccaaaggaaggcggggacaagaagggaaagaagaggcataagaagagtgtggagacctacaagatctatatcttcaaggtcctcaagcaggtccaccctgacgttggtatttccagcaaggccatgggaatcatgaactccttcattaatgatatttttgagaaattggcgagcgaggcatcgaaactcgcccgctacaataaaaagccaaccattacttcacgggagattcagaccgccgtgaggcttgctcttccaggggagcttgcaaagcacgccgtgtcagagggtaccaaggccgtcacaaagttcaccagtgcttgattttggtactttttctcagttaaattcaatggtgtcttttgatgccacctatgcttgtggaattttaaggttttcctttaggtcttccagtgaattttaaattcacggttttggtgtgggtagtttatttttcatcagcttttttgatcaactacgttttaattttatgggctgtgaatgttaaatttataggtatcgaaaaaaaaaaaaaaaa

SEQ ID NO: 7021 - protein, 141 aa, Picea sitchensis
MAPKAAEKKPAEKKPVAEKAPAEKKPAPKAEKKLPKEGGDKKGKKRHKKSVETYKIYIFKVLKQVHPDVGISSKAMGIMNSFINDIFEKLASEASKLARYNKKPTITSREIQTAVRLALPGELAKHAVSEGTKAVTKFTSA

SEQ ID NO: 7022 - DNA, 949 bp, Picea sitchensis
  CDS (85)..(579)
cgatcagttctgttgtagtgcacacgggtactctgagtctgactttgcctgttcattagttccagtagaattcggttgtgaagaatggcgccaaaggcagagaagaagccggcggagaagaagcccgcgggcggagaggaagagcggaagaccgtcggagagaagacgccagtcggaaaggctgcagccgcggcaaaggagaaagcagctcctcctgccgcctccaaggcggaaaagaccacgaagaagaagatatctaaagaaggaggtgataagaagaagaagaagagggcaaagaaggcggtggagacatatagaatatatgtgtacaaggtgctgaagcaggttcaccctgaaatcggtatctccagcaaggccatgtccatcatgaattcttttgtcaatgacatttttgagaaagtggcggcagagtcgtcgaagctcactcgctatggcaagagggatacgctctcttccagggaggttcagactgctgttaagcttgttcttcccggtgagctcgccaagcatgccgtctccgagggcactaaggccgtcaccaaattcacctccacctgagctgggctcttttctgttccatgcgttttgagttttggaattacacttacggtgtttcttgacaccacctctttttacagaatttgggcccttttccttctctatctcttgattagggtttgcctaacattttgggtgtatgattatggtttgcctaacattttgggtgtatgattatggtttgcctctttaacattttgggtgaatggctctagaattctatcatttttcgggtctcggcaaattcttgtattttcccccttttccaagggtttttccatagatagattttgtggtgttctacaaaggaaatcaatccaaaaaacagtgagagatgaagcgcgattagcttgcaaaaaaaaaaaaaaaa

SEQ ID NO: 7023 - protein, 164 aa, Picea sitchensis
MAPKAEKKPAEKKPAGGEEERKTVGEKTPVGKAAAAAKEKAAPPAASKAEKTTKKKISKEGGDKKKKKRAKKAVETYRIYVYKVLKQVHPEIGISSKAMSIMNSFVNDIFEKVAAESSKLTRYGKRDTLSSREVQTAVKLVLPGELAKHAVSEGTKAVTKFTST

SEQ ID NO: 7024 - DNA, 426 bp, Picea sitchensis
  CDS (1)..(426)
atggctcccaagggtgagaagaagcctgctgagaagaagcccgtcgcagagaaatctccggccgcagagaagaagcctgctcccaaggccgagaagaagctccccaaagaaagcggagacaagaagggaaagaaaaggcataaaaagaatgtcgagacttacaagatctatatcttcaaggttctcaagcaggttcatccagatatcggtatatccagcaaggccatgggaatcatgaattcctttataaatgatatttttgagaaattggcgagcgaggcgtcgaagctcgctcggtacaacaagaagccgaccattacgtcccgggagattcagaccgctgtcagacttgctcttccaggggagcttgccaagcatgctgtctcagagggcaccaaggccgtgactaagttcaccagtgcttag

SEQ ID NO: 7025 - protein, 141 aa, Picea sitchensis
MAPKGEKKPAEKKPVAEKSPAAEKKPAPKAEKKLPKESGDKKGKKRHKKNVETYKIYIFKVLKQVHPDIGISSKAMGIMNSFINDIFEKLASEASKLARYNKKPTITSREIQTAVRLALPGELAKHAVSEGTKAVTKFTSA

SEQ ID NO: 7026 - DNA, 802 bp, Populus trichocarpa
  CDS (80)..(499)
ccgatccatcaaaaattctcctaagaaaaaaaatcttcctctcccctctatattaatctctctttttcaagagtcccaaatggcacccaaggccgagaagaagccggcggagaagaagccagccgcagcagagaaggcaccagcggagaagaagccgagggcagagaagaaattgcccaaagaaggagctagcgagaagaagaagaagaggaccaagaagaatgtggagacttacaagatctacatcttcaaggtcttgaaacaagtccaccctgatattgggatctcaagcaaagctatgggtatcatgaacagtttcatcaatgatatctttgagaagcttgctcaagagtcttcgaggcttgctaggtataacaagaagcccaccattacctctcgggagatccagactgctgtcagattggttttgcctggagagcttgctaagcatgctgtttctgaagggactaaggctgttaccaagttcactagctcttaggtggttagtgcttgttgggcttttgtggaattaggatttatgtttgatgtaaaggttgtttaggtcctgatctgaacaaaatccatgtagtttcttttgttctaatcaatgaagcttagtcttagctcctatatcgtctttatacctgttttgaatgatttgcttatcttccccgtcccattctgtgctttgattgtttggagatagttagggttggaggatttggggtttttccttgactgggtcatttgtggcaggacagcaacctaaagaattttccgtaaaaacaaaaaaaaaaaaaaa

SEQ ID NO: 7027 - protein, 139 aa, Populus trichocarpa
MAPKAEKKPAEKKPAAAEKAPAEKKPRAEKKLPKEGASEKKKKRTKKNVETYKIYIFKVLKQVHPDIGISSKAMGIMNSFINDIFEKLAQESSRLARYNKKPTITSREIQTAVRLVLPGELAKHAVSEGTKAVTKFTSS

SEQ ID NO: 7028 - DNA, 669 bp, Populus trichocarpa
  CDS (108)..(527)
gatcctatcctcataaataattctcaaaagaagtaatcccccaatttttctcttaaaaagaagaagaaaaaaattccttcttagtcccacattttcaggaatccaaaatggctcccaaggcagagaagaagccggccgagaagaagcctgccgcagcagagaaagccccagcggagaagaagcccagagctgagaagaagttgcccaaagaaggagtgagcgaaaagaagaagaagaaggcaaagaagagcgttgagacctacaagatctacatcttcaaagtcttgaaacaggtacaccctgatattgggatctcaagcaaggcaatgggtatcatgaacagtttcatcaatgatatctttgagaagcttgctcaagagtcttcaaggctcgctaggtacaacaagaagcctaccattacttctcgggagatccagactgcagtcagattggttttgcctggagaacttgctaagcatgctgtctctgaagggactaaggccgttaccaagttcactagctcttaggtggatagtttgtttgggtcttttgtgggtttggcggagttaatctttgtgtgtgatgtaaaggttgtttggattctgatctgaacaaaatttaatgaaactttattttagttcataaattggctgaaaaaaaaaaaaaaaa

SEQ ID NO: 7029 - protein, 139 aa, Populus trichocarpa
MAPKAEKKPAEKKPAAAEKAPAEKKPRAEKKLPKEGVSEKKKKKAKKSVETYKIYIFKVLKQVHPDIGISSKAMGIMNSFINDIFEKLAQESSRLARYNKKPTITSREIQTAVRLVLPGELAKHAVSEGTKAVTKFTSS

SEQ ID NO: 7030 - DNA, 654 bp, Populus trichocarpa
  CDS (79)..(498)
gatcaaatctttcgaaaagacctcctcaaccaccctctcttaaagaaactctctcaatttctttctcaagaatcccaaatggcccctaaggcagagaagaagccggctgagaaaaagccagcggcggcagagaaagccccagctgagaagaagccaagagcagagaagaagatacccaaagaaggagcgattgacaagaagaagaagaggtcaaagaagaacgtcgagacctacaagatctatatctttaaggtcctgaaacaggtccatcctgacattgggatctccagcaaggcaatgggtatcatgaacagtttcatcaacgatatctttgagaaactcgctcaagagtcatcgaggcttgcaaggtacaacaagaagcctaccattacttctcgggagatccagacagctgtcagactggttttgcctggagagcttgcgaaacatgctgtctctgaagggaccaaggctgttaccaagtttacaagctcttagcggctagggtttgttgggttttttgtgggttctgtttaattagtgcttctgtcctatgtaaagtctttttagattctgatctgaatgaatctgatgtaggttttttctttcattgaatggaattaaagttttcggtcctgaaaaaaaaaaaaaaaa

SEQ ID NO: 7031 - protein, 139 aa, Populus trichocarpa
MAPKAEKKPAEKKPAAAEKAPAEKKPRAEKKIPKEGAIDKKKKRSKKNVETYKIYIFKVLKQVHPDIGISSKAMGIMNSFINDIFEKLAQESSRLARYNKKPTITSREIQTAVRLVLPGELAKHAVSEGTKAVTKFTSS

SEQ ID NO: 7032 - DNA, 845 bp, Populus trichocarpa
  CDS (66)..(497)
gactacaccaaactctagacgtaaatttctcgatttcgccctcaaatcacaaaaggaatctcaaaatggctcccaaggcagaaaagaagccagccgagaaaaagccagccgagaaaaagccagccgcagccgagaaagcgccggcggagaagccaagggcagagaagaaattgcctaaagaaggagcgattgacaagaagaggaagaaggctaagaagagcgtggagacctacaagatttacatcttcaaggttttgaaacaagtccatcctgatattgggatctcaagcaaagcaatgggtatcatgaatagtttcatcaatgatatctttgaaaagcttgctcaagaagcttcgaggctcgctcggtataacaagaagcctaccattacgtcccgggagatccagactgctgttagactggttttgcctggagagcttgcgaaacatgccgtttctgaagggactaaggctgttaccaagtttaccagctcttaggcggccagggtttgttgggttctggatggtgggtattttgcgaggttcgatctatcaattagggtttgtgttcatgtatagtttcaggtttcgattttagtcgaattgatgtagctgcttggttttttacaatgatacatggatcttgttcgtaaattgttcttgattattgggtttttttgtttcttctcactcattttactttcagtttgggtttttgattcgctttgttgatttgggttccttttcttgtggtttcgtgcattttttgtatctgaaattgttctagattgtttcattggttgcaattcgactggaacttaattgagttcaaaaaaaaaaaaaaaa

SEQ ID NO: 7033 - protein, 143 aa, Populus trichocarpa
MAPKAEKKPAEKKPAEKKPAAAEKAPAEKPRAEKKLPKEGAIDKKRKKAKKSVETYKIYIFKVLKQVHPDIGISSKAMGIMNSFINDIFEKLAQEASRLARYNKKPTITSREIQTAVRLVLPGELAKHAVSEGTKAVTKFTSS

SEQ ID NO: 7034 - DNA, 414 bp, Medicago truncatula
  CDS (1)..(414)
atggcaccaaagggagagaagaagcccgctgagaagaagccagcagaaaaagctcccgcagagaaaaccaaagcggagaagaagatcccaaaggaagcttcctctgccgacaagaagaaaaagagaaacaagaagagcgtagaaacctacaagatctacatcttcaaggttctcaagcaggttcatcctgacattggaatctccagcaaggctatggggatcatgaacagtttcatcaatgacatctttgagaagctcgctcaggaatcatccagactcgctcgctacaacaagaaacctaccatcacctctcgtgagattcagactgctgttcgtctcgttcttcccggcgaacttgccaagcacgctgtctccgagggaaccaaagcagtcactaaatttacaagctcttga

SEQ ID NO: 7035 - protein, 137 aa, Medicago truncatula
MAPKGEKKPAEKKPAEKAPAEKTKAEKKIPKEASSADKKKKRNKKSVETYKIYIFKVLKQVHPDIGISSKAMGIMNSFINDIFEKLAQESSRLARYNKKPTITSREIQTAVRLVLPGELAKHAVSEGTKAVTKFTSS

SEQ ID NO: 7036 - DNA, 453 bp, Zea mays
  CDS (1)..(453)
atggcgcccaaggcggagaaaaagccggcggcgaagaagcccgcggaggaggagcccgcgaccgagaaggcggagaaggctccggcagggaagaagccgaaggcggagaaacgcctccccgcgggcaagtccggcgccggcgagggcaagaagggcaagaagaaagccaagaagagcgtggagacctacaagatctacatcttcaaggtgctcaagcaggtgcaccccgacatcggcatctcgtccaaggccatgtccatcatgaattccttcatcaacgacatcttcgagaagctcgccgcggaggccgccaagctcgcccgctacaacaagaagcccaccatcacctcccgcgagatccagacctccgtccgcctcgtcctacccggcgagctcgccaagcacgccgtctctgaaggcacaaaggcggtcaccaagttcacttcgtcttag

SEQ ID NO: 7037 - protein, 150 aa, Zea mays
MAPKAEKKPAAKKPAEEEPATEKAEKAPAGKKPKAEKRLPAGKSGAGEGKKGKKKAKKSVETYKIYIFKVLKQVHPDIGISSKAMSIMNSFINDIFEKLAAEAAKLARYNKKPTITSREIQTSVRLVLPGELAKHAVSEGTKAVTKFTSS

SEQ ID NO: 7038 - DNA, 447 bp, Zea mays
  CDS (1)..(447)
atggcgcccaaggcggagaagaagccagcggagaagaagccggcggccgaggagaaggcggagaagacgaccgcagggaagaagcccaaggccgagaagcggctgcccgcgtccaagtcctccggcaaggagggcggcgagaagaaggggaagaagaaggccaagaagagcgtggagacctacaagatctacatcttcaaggtgctgaagcaggtgcaccccgacatcggcatatcctccaaggccatgtccatcatgaactccttcatcaacgacatctttgagaagctggccggcgaggccgccaagctggcgcggtacaacaagaagcccaccatcacgtcccgcgagatccagacctccgtgcgcctagtcctccccggagagctcgccaagcacgccgtctccgagggaaccaaggccgtcaccaagttcaccagcaactga

SEQ ID NO: 7039 - protein, 148 aa, Zea mays
MAPKAEKKPAEKKPAAEEKAEKTTAGKKPKAEKRLPASKSSGKEGGEKKGKKKAKKSVETYKIYIFKVLKQVHPDIGISSKAMSIMNSFINDIFEKLAGEAAKLARYNKKPTITSREIQTSVRLVLPGELAKHAVSEGTKAVTKFTSN

SEQ ID NO: 7040 - DNA, 387 bp, Philodina roseola
  CDS (1)..(387)
atgccaccaaaagctcaaaccccatcaaaaggttcgaaaaaagctgttaccaaaacaagcaaaggagcagctggaccaaaaggtgacaaaaaacaaaaacgtcgacgaaaggaaacctattccatctacatctacaaggttcttaaacaagttcacccagatactggtatttcatcgaaagcaatgtcgatcatgaactcgttcgtgaacgatatcttcgaacgtattgctgctgaagcttcacgattgtcgcattacaacaaacgatcgacaatttcatcacgtgaaattcaaacagccgtccgacttttattacctggtgaattggccaaacacgccgtttcagaaggtacaaaagccgtgacaaaatacacaagtgccaaataa

SEQ ID NO: 7041 - protein, 128 aa, Philodina roseola
MPPKAQTPSKGSKKAVTKTSKGAAGPKGDKKQKRRRKETYSIYIYKVLKQVHPDTGISSKAMSIMNSFVNDIFERIAAEASRLSHYNKRSTISSREIQTAVRLLLPGELAKHAVSEGTKAVTKYTSAK

SEQ ID NO: 7042 - DNA, 375 bp, Amblyomma americanum (lone star tick)
  CDS (1)..(375)
  misc_feature (330)..(330): r is g or a
atgccacctcaacccagtggaaaagcgattaagaaggccggcaaggcacagaaggccgtccgcaccactgacaagaagaaaaagaagcgcaggaggaaggagagcttcagcatttacatctacaaggttctgaagcaagtccacccggacaccggcgtctccagcaaggcgatgtcgatcatgaacagcttcgtcaacgacatcttcgaacgaatcgccgctgaagcctcgcgcctcgcacactacaacaagcggtcaaccatcaccagccgcgaggtccagaccgctgtccgccttctgctgcctggtgagctcgccaagcacgcggtrtccgaaggcacaaaggccgtcaccaagtacacttcctccaagtga

SEQ ID NO: 7043 - protein, 124 aa, Amblyomma americanum (lone star tick)
MPPQPSGKAIKKAGKAQKAVRTTDKKKKKRRRKESFSIYIYKVLKQVHPDTGVSSKAMSIMNSFVNDIFERIAAEASRLAHYNKRSTITSREVQTAVRLLLPGELAKHAVSEGTKAVTKYTSSK

SEQ ID NO: 7044 - DNA, 426 bp, Penicillium chrysogenum (strain ATCC 28089 / DSM 1075 / Wisconsin 54-1255)
  CDS (1)..(426)
atgccccccaaggccgctgagaagaagccctccaccggtggcaaggcccccgttggcggcaaggcccctgctgagaagaaggaggctggcaagaagactgccaccgctgccactggcgagaagaagaagcgcggcaagacccgtaaggagacgtactcttcttacatctacaaggtcctcaagcaggtccaccctgacactggtatctccactcgtgccatgtccatcttgaactcctttgtcaatgacattttcgagcgtgtcgctacggaggcctccaagctggctgcgtacaacaagaagtctaccatctcctcccgggagatccagacctcggtccgcctgatcctccccggtgagctggccaagcacgccgtctctgagggcaccaaggctgtgaccaagtactcttcttccgccaaataa

SEQ ID NO: 7045 - protein, 141 aa, Penicillium chrysogenum (strain ATCC 28089 / DSM 1075 / Wisconsin 54-1255)
MPPKAAEKKPSTGGKAPVGGKAPAEKKEAGKKTATAATGEKKKRGKTRKETYSSYIYKVLKQVHPDTGISTRAMSILNSFVNDIFERVATEASKLAAYNKKSTISSREIQTSVRLILPGELAKHAVSEGTKAVTKYSSSAK

SEQ ID NO: 7046 - DNA, 423 bp, Penicillium marneffei (strain ATCC 18224 / CBS 334.59 / QM 7333)
  CDS (1)..(423)
atgcctcccaaagctgccgagaagaagcccagcactggtggcaaggccccagctggaaaggctcctgctgagaagaaggaggctggcaagaagactgccaccgctgccactggcgagaagaagaagcgtggcaagacccgcaaggagacctactcttcctacatctacaaggtcctgaagcaggtccaccctgacactggtatctctactcgtgccatgtccatcctcaactctttcgtcaacgatatcttcgagcgcgttgccaccgaggcctccaagcttgcttcatacaacaagaaatctaccatttcttcccgagagatccagacttcagtccgtctgatccttcctggtgaattggccaaacacgccgtttcggaaggtaccaaggctgtcaccaagtactcttcctccgccaaataa

SEQ ID NO: 7047 - protein, 140 aa, Penicillium marneffei (strain ATCC 18224 / CBS 334.59 / QM 7333)
MPPKAAEKKPSTGGKAPAGKAPAEKKEAGKKTATAATGEKKKRGKTRKETYSSYIYKVLKQVHPDTGISTRAMSILNSFVNDIFERVATEASKLASYNKKSTISSREIQTSVRLILPGELAKHAVSEGTKAVTKYSSSAK

SEQ ID NO: 7048 - DNA, 453 bp, Zea mays
  CDS (1)..(453)
atggcgcccaaggccgagaagaagcccgcggcgaagaagccggcggaggaggagcccgcggctgagaaggcgcccgccgggaagaagccgaaggcggagaagcgggtccccgctggcaagtccgctgccaaggagggcggcgagggcaagaggggcaggaagaagggcaagaagagcgtggagacctacaagatctacatcttcaaggtgctgaagcaggtgcacccggacattggcatctcctccaaggccatgtcgatcatgaactccttcattaacgatatcttcgagaagctagctgctgaggccgccaagctcgcgcgctataacaagaagccaaccatcacctcccgtgagatacagacttccgtgcgcctcgtccttcccggggagctcgccaagcacgccgtctccgagggcaccaaggccgtcaccaagttcacctcggcctag

SEQ ID NO: 7049 - protein, 150 aa, Zea mays
MAPKAEKKPAAKKPAEEEPAAEKAPAGKKPKAEKRVPAGKSAAKEGGEGKRGRKKGKKSVETYKIYIFKVLKQVHPDIGISSKAMSIMNSFINDIFEKLAAEAAKLARYNKKPTITSREIQTSVRLVLPGELAKHAVSEGTKAVTKFTSA

SEQ ID NO: 7050 - DNA, 453 bp, Zea mays
  CDS (1)..(453)
atggcgcccaaggccgagaagaaacccgcggcgaagaagccggcggaggaggagcccgcggccgagaaggcgcccgccgggaagaagccgaaggcggagaagcgggtccccgctggcaagtccgctgccaaggaaggcggcgagggcaagaggggcaagaagaagggcaagaagagcgtggagacctacaagatctacatcttcaaggtgctgaagcaggtgcacccggacattggcatctcctccaaggccatgtccatcatgaactccttcattaacgatatcttcgagaagctcgctgctgaggccgccaagctcgcgcgctataacaagaagcctaccatcacctcccgtgagatccagacctccgtgcgcctcgtccttcccggggagctcgccaagcacgccgtctccgagggcaccaaggccgtcaccaagttcacctcggcctag

SEQ ID NO: 7051 - protein, 150 aa, Zea mays
MAPKAEKKPAAKKPAEEEPAAEKAPAGKKPKAEKRVPAGKSAAKEGGEGKRGKKKGKKSVETYKIYIFKVLKQVHPDIGISSKAMSIMNSFINDIFEKLAAEAAKLARYNKKPTITSREIQTSVRLVLPGELAKHAVSEGTKAVTKFTSA

SEQ ID NO: 7052 - DNA, 453 bp, Zea mays
  CDS (1)..(453)
atggcgcccaaggccgagaagaagcccgcggcgaagaagccggcggaggaggagcccgcggcggagaagacgaccgccgggaagaagcccaaggcggagaagcgggtccccgcgggcaagtccgccggcaaggagggcggcgagggcaagcgtggcaagaagaagggcaagaagagcgtggagacgtacaagatctacatcttcaaggtgctgaagcaggtgcacccggacatcggcatctcctccaaggccatgtccatcatgaactccttcatcaacgacatcttcgagaagctggccggcgaggccgccaagctcgcgcgctacaacaagaagcccaccatcacgtcccgcgagatccagacctccgtgcgcctcgtgctccccggcgagctcgccaagcacgccgtctctgagggcaccaaggccgtcaccaagttcacctcctcctag

SEQ ID NO: 7053 - protein, 150 aa, Zea mays
MAPKAEKKPAAKKPAEEEPAAEKTTAGKKPKAEKRVPAGKSAGKEGGEGKRGKKKGKKSVETYKIYIFKVLKQVHPDIGISSKAMSIMNSFINDIFEKLAGEAAKLARYNKKPTITSREIQTSVRLVLPGELAKHAVSEGTKAVTKFTSS

SEQ ID NO: 7054 - DNA, 450 bp, Zea mays
  CDS (1)..(450)
atggcgcctaaggcggagaagaagccggctgcgaagaagccagcggaggaggagcccgctgccgcgaaggccccggcggggaagaagcccaaggccgagaagcgcctcccggcggccaagtcgtccggcaaagaaggcggcgacaagaagggtaagaagaaggcgaagaagtcggtggagacctacaagatctacatcttcaaggtgctgaagcaggtccacccggacatcggcatctcttccaaggccatgtccatcatgaactccttcatcaacgacatcttcgagaagctcgccggcgaggctgccaagcttgcgcgctacaacaagaagcccaccatcacctctcgggagattcaaacctctgtccgccttgtccttcccggcgagctcgccaagcacgcggtctccgagggcaccaaggccgtcactaagttcacatcatcttag

SEQ ID NO: 7055 - protein, 149 aa, Zea mays
MAPKAEKKPAAKKPAEEEPAAAKAPAGKKPKAEKRLPAAKSSGKEGGDKKGKKKAKKSVETYKIYIFKVLKQVHPDIGISSKAMSIMNSFINDIFEKLAGEAAKLARYNKKPTITSREIQTSVRLVLPGELAKHAVSEGTKAVTKFTSS

SEQ ID NO: 7056 - DNA, 465 bp, Zea mays
  CDS (1)..(465)
atggcgcccaaggcggagaagaagccggcggcgaagaaggtggcggaggaggagccctcggagaaggcggctccggcggagaaggcccccgcggggaagaaggccaaggcggagaagcggctacctgcgggcaagtccgccggcaaggagggcggcgacaagaaggggaggaagaaggcgaagaagagcgtggagacctacaagatctacatcttcaaggtcctgaagcaggtgcaccccgacatcggcatctcctccaaggccatgtccatcatgaactccttcatcaacgacatcttcgagaagctcgccgcggaggccgccaagctcgcccggtacaacaagaagcccaccatcacctcccgcgagatccagacctccgtccgcctcgtcctccccggcgagctcgccaagcacgccgtctcggagggtaccaaggccgtcaccaagttcacctcgtcttag

SEQ ID NO: 7057 - protein, 154 aa, Zea mays
MAPKAEKKPAAKKVAEEEPSEKAAPAEKAPAGKKAKAEKRLPAGKSAGKEGGDKKGRKKAKKSVETYKIYIFKVLKQVHPDIGISSKAMSIMNSFINDIFEKLAAEAAKLARYNKKPTITSREIQTSVRLVLPGELAKHAVSEGTKAVTKFTSS

SEQ ID NO: 7058 - DNA, 459 bp, Zea mays
  CDS (1)..(459)
  misc_feature (99)..(99): s is g or c
  misc_feature (101)..(101): s is g or c
  misc_feature (102)..(102): k is g or t
  misc_feature (103)..(103): r is g or a
atggcacccaaggcggagaagaagccggcggcgaagaagcccgcagaggaggagcccgcggccccggcggagaaggctcccgctgggaagaagccgaasgskragaagcggctcccggcgggaaaatccgccggcaaggaaggcggtgttgacaagaaggggcggaagaaggccaagaagagcgtggagacgtacaagatctacatcttcaaggtgctgaagcaggtgcacccggacatcggcatctcctccaaggccatgtccatcatgaactccttcatcaacgacatcttcgagaagctcgccggcgaggcggccaagctcgcccgttacaacaagaagcccaccatcacctcccgggagatccagacctccgtccgcctcgttctacccggcgagctcgccaagcacgccgtctcggagggcaccaaggccgtcaccaagttcacctcgtcctaa

SEQ ID NO: 7059 - protein, 152 aa, Zea mays
  misc_feature (33)..(33): The Xaa at location 33 stands for Asn, or Lys.
  misc_feature (34)..(34): The Xaa at location 34 stands for Ala, or Gly.
  misc_feature (35)..(35): The Xaa at location 35 stands for Glu, or Lys.
MAPKAEKKPAAKKPAEEEPAAPAEKAPAGKKPXXXKRLPAGKSAGKEGGVDKKGRKKAKKSVETYKIYIFKVLKQVHPDIGISSKAMSIMNSFINDIFEKLAGEAAKLARYNKKPTITSREIQTSVRLVLPGELAKHAVSEGTKAVTKFTSS

SEQ ID NO: 7060 - DNA, 447 bp, Zea mays
  CDS (1)..(447)
atggcgcccaaggccgagaagaagccagcggagaagaagccggcggccgaggagaaggcggagaagacgaccgcaggtaagaagcccaagtccgagaagcgcctgcccgcctcgaagtcctccggcaaggagggcggcgagaagaaggggaagaagaaggccaagaagagcgtggagacctacaaaatctacatcttcaaggtcctgaagcaggtgcaccccgacatcggcatctcctccaaggccatgtccatcatgaactccttcatcaacgacatcttcgagaagctcgccggcgaggccgctaagctcgcccggtacaacaagaagcccaccatcacctcccgcgagatccagacctccgtgcgcctcgtcctcccaggagagctcgccaaacacgccgtctccgagggaaccaaggccgtcaccaagttcaccagcaattga

SEQ ID NO: 7061 - protein, 148 aa, Zea mays
MAPKAEKKPAEKKPAAEEKAEKTTAGKKPKSEKRLPASKSSGKEGGEKKGKKKAKKSVETYKIYIFKVLKQVHPDIGISSKAMSIMNSFINDIFEKLAGEAAKLARYNKKPTITSREIQTSVRLVLPGELAKHAVSEGTKAVTKFTSN

SEQ ID NO: 7062 - DNA, 378 bp, Zea mays
  CDS (1)..(378)
atggcgcccaaggccgagaagaagcccgcggagaagaagccgacggaggagaaggccgagaagaagcccagggcggagaagcgcgtgccgggcaaggagggcggcgagacgtacaagatctacatcttcaaggtgctcaagcaggtgcacccggacattggtatctcgtccaaggccatgtccatcatgaactccttcatcaacgacatcttcgagaagctggctgccgaggccgccaagctcgcccgctacaacaagaagcccaccataacctcccgggagatccagacttcggtgcgcctcgtccttcctggcgagctcgccaagcacgccgtctccgagggcaccaaggccgttaccaagtttacttcctcttag

SEQ ID NO: 7063 - protein, 125 aa, Zea mays
MAPKAEKKPAEKKPTEEKAEKKPRAEKRVPGKEGGETYKIYIFKVLKQVHPDIGISSKAMSIMNSFINDIFEKLAAEAAKLARYNKKPTITSREIQTSVRLVLPGELAKHAVSEGTKAVTKFTSS

SEQ ID NO: 7064 - DNA, 456 bp, Zea mays
  CDS (1)..(456)
atggcacccaaggcggagaagaagccggcggccaagaagcccgcggaggaggagcccgcgacagagaaggtggagaaggctccggcggggaagaagcccaaggccgagaagcgcctcccggcgggcaagtccaaggagggcggcgagggcaagaaggggaaaaagaaggcgaagaagtccgtggagacctacaagatctacatcttcaaggtgctgaagcaggtgcaccccgacatcggcatctcgtccaaggccatgtccatcatgaactccttcatcaacgacatcttcgagaagctcgcggctgagtccgccaagctggcgcgctacaacaagaagcccaccatcacctcccgcgagatccagacctcggtgcgcctcgtcctccccggcgagctcgccaagcacgccgtctccgagggcactaaggttgttacgaagttcacctcgtcttag

SEQ ID NO: 7065 - protein, 151 aa, Zea mays
MAPKAEKKPAAKKPAEEEPATEKVEKAPAGKKPKAEKRLPAGKSKEGGEGKKGKKKAKKSVETYKIYIFKVLKQVHPDIGISSKAMSIMNSFINDIFEKLAAESAKLARYNKKPTITSREIQTSVRLVLPGELAKHAVSEGTKVVTKFTSS

SEQ ID NO: 7066 - DNA, 447 bp, Medicago truncatula
  CDS (1)..(447)
atggcgccaaagggagagaagaagccagcagagaagaaacccgcagaggagaagaagtccaccgtcgccgagaaggctcctgctgagaagaagccaaaggcaggaaagaagctaccaaaggaaggtggttccgctgcgggagagaagaagaagaagagaagcaagaagaatgttgaaacatacaagatctatatcttcaaggttctgaaacaagttcacccagacattggtatctcaagcaaagccatgggtatcatgaacagtttcatcaatgatatcttcgagaaacttgctcaagaatcatccagacttgctcgttacaacaagaagccaacaatcacttcaagggaaattcagactgctgtcagacttgttcttcctggtgaattggccaagcatgctgtttctgagggtaccaaagctgtgaccaagttcactagttcttag

SEQ ID NO: 7067 - protein, 148 aa, Medicago truncatula
MAPKGEKKPAEKKPAEEKKSTVAEKAPAEKKPKAGKKLPKEGGSAAGEKKKKRSKKNVETYKIYIFKVLKQVHPDIGISSKAMGIMNSFINDIFEKLAQESSRLARYNKKPTITSREIQTAVRLVLPGELAKHAVSEGTKAVTKFTSS

SEQ ID NO: 7068 - DNA, 426 bp, Picea sitchensis
  CDS (1)..(426)
atggctccgaaggcagagaagaaaccagctgagaagaagcccgtcgcagagaaaacacctgctgagaagaagcccgctcctcccaaggccgggaagaagctgccgaaggaaggcggtgagaagaagggaaagaagaaacacaagaagagcgtggaaacgtacaagatctatattttcaaggtcctgaaacaggttcatcctgatatcggcatttcgagcaaggccatggggataatgaacagcttcatcgatgacatcttcgagaagttggccagcgagtcatcgaagctcgcccgctacaacaagaagcccaccattacctcccgggagatccagactgctgtaagactcgctcttccaggggagctcgcgaagcacgctgtgtccgagggtaccaaagcggttaccaagttcaccagcgcctga

SEQ ID NO: 7069 - protein, 141 aa, Picea sitchensis
MAPKAEKKPAEKKPVAEKTPAEKKPAPPKAGKKLPKEGGEKKGKKKHKKSVETYKIYIFKVLKQVHPDIGISSKAMGIMNSFIDDIFEKLASESSKLARYNKKPTITSREIQTAVRLALPGELAKHAVSEGTKAVTKFTSA

SEQ ID NO: 7070 - DNA, 423 bp, Talaromyces stipitatus (strain ATCC 10500 / CBS 375.48 / QM 6759 / NRRL 1006)
  CDS (1)..(423)
atgcctcccaaagccgctgagaagaagcccagcactggtggcaaggccccagctggtaaggctcctgctgagaagaaggaagctggcaagaagactgccaccgctgcctctggcgagaagaagaagcgtggcaagacccgaaaggagacctactcttcttacatctacaaggtcctcaagcaggtccaccctgacactggtatctctactcgcgccatgtccattctcaactctttcgtcaatgacatcttcgagcgcgttgctactgaggcttccaagcttgcttcctacaacaagaaatccaccatctcttcccgagagatccagacttcggttcgcctgatcctccccggtgaattggccaagcacgccgtttcggaaggaaccaaggctgtcaccaagtactcttcatccgccaaataa

SEQ ID NO: 7071 - protein, 140 aa, Talaromyces stipitatus (strain ATCC 10500 / CBS 375.48 / QM 6759 / NRRL 1006)
MPPKAAEKKPSTGGKAPAGKAPAEKKEAGKKTATAASGEKKKRGKTRKETYSSYIYKVLKQVHPDTGISTRAMSILNSFVNDIFERVATEASKLASYNKKSTISSREIQTSVRLILPGELAKHAVSEGTKAVTKYSSSAK

SEQ ID NO: 7072 - DNA, 426 bp, Ricinus communis
  CDS (1)..(426)
atggcaccaaaacaagagaaaaagccagcagagaagaaaccggtggcggagaaagctccggccgagaagaagccaagagcggaaaagaagctgccgaaagaaggccctggcgccggcgcagacaagaaaaagaagcgtgcaaagaagagcattgagacttacaagatttacatattcaaggtgttgaagcaagtgcaccctgatattgggatatcaagcaaagcaatgggaatcatgaacagttttataaatgatatatttgagaaactggcgcaagaagcagcaagacttgctaggtataacaagaaacccactattacttcaagggagattcaaactgctgttagattggtgttgcctggtgaacttgctaagcatgctgtctctgagggtactaaagcagttactaagtttactagttcctag

SEQ ID NO: 7073 - protein, 141 aa, Ricinus communis
MAPKQEKKPAEKKPVAEKAPAEKKPRAEKKLPKEGPGAGADKKKKRAKKSIETYKIYIFKVLKQVHPDIGISSKAMGIMNSFINDIFEKLAQEAARLARYNKKPTITSREIQTAVRLVLPGELAKHAVSEGTKAVTKFTSS

SEQ ID NO: 7074 - DNA, 426 bp, Ricinus communis
  CDS (1)..(426)
atggcaccgaagccagcggagaagaagccagcggagaagaaaccggcggagaaagcaccggccgaaaagaagccaagggcggagaagaagttgcctaaagaaggaggatcggccgcaacggataagaagaggaagaaggcaaagaagagtgtggagacgtacaagatttacatattcaaggttttgaaacaagtgcatcctgatattggtatctcaagcaaggctatgggtattatgaacagtttcattaatgatatatttgaaaagcttgctcaagagtcatctagacttgctaggtataacaagaagcctaccattacctctcgggagatccagactgctgtcaggcttgttttgcctggagagttggctaaacatgctgtttctgaagggactaaggctgttaccaagttcactagctcttag

SEQ ID NO: 7075 - protein, 141 aa, Ricinus communis
MAPKPAEKKPAEKKPAEKAPAEKKPRAEKKLPKEGGSAATDKKRKKAKKSVETYKIYIFKVLKQVHPDIGISSKAMGIMNSFINDIFEKLAQESSRLARYNKKPTITSREIQTAVRLVLPGELAKHAVSEGTKAVTKFTSS

SEQ ID NO: 7076 - DNA, 426 bp, Ricinus communis
  CDS (1)..(426)
atggcaccaaaggcagcagagaagaagccagcggagaagaaaccggcggagaaggcaccagcggagaagaagccaagggcagagaagaagctaccgaaagaaggaggatcggccggagcagataagaagagaaagaaggcaaagaagagcgtggagacatacaagatttacattttcaaggttttgaaacaggttcatcctgatattgggatatcaagcaaggctatgggtattatgaacagttttattaatgatatttttgaaaagcttgctcaagaatcttctaggcttgctaggtataacaagaagcctactattacctctcgggagatccagactgctgttaggcttgttctgcctggggagttggctaagcacgctgtttctgaagggactaaggctgttaccaagttcactagttcttag

SEQ ID NO: 7077 - protein, 141 aa, Ricinus communis
MAPKAAEKKPAEKKPAEKAPAEKKPRAEKKLPKEGGSAGADKKRKKAKKSVETYKIYIFKVLKQVHPDIGISSKAMGIMNSFINDIFEKLAQESSRLARYNKKPTITSREIQTAVRLVLPGELAKHAVSEGTKAVTKFTSS

SEQ ID NO: 7078 - DNA, 441 bp, Ricinus communis
  CDS (1)..(441)
atggcaccaaagacggagaagaaaccagcagagaagaagccagcggaggagaaaaagacggtggcggagaaagcaccggcagagaagaaaccaaaggccggaaagaaactaccaaaggaaggaggagcagcggcggctggggacaagaaaaagaagagaacgaagaagagcatagaaacatacaagatctatatattcaaggtgttgaaacaagtgcatcctgatattgggatctcaagcaaggctatgggaattatgaactcatttataaatgatatattcgagaagcttgcacaagaagcatcgaggcttgcgaggtataacaagaagccaactatcacttctagggagattcagactgctgttagattggtgttgccgggtgaattggcgaagcacgcagtatctgagggttggatctacccgatcctgaattcctga

SEQ ID NO: 7079 - protein, 146 aa, Ricinus communis
MAPKTEKKPAEKKPAEEKKTVAEKAPAEKKPKAGKKLPKEGGAAAAGDKKKKRTKKSIETYKIYIFKVLKQVHPDIGISSKAMGIMNSFINDIFEKLAQEASRLARYNKKPTITSREIQTAVRLVLPGELAKHAVSEGWIYPILNS

SEQ ID NO: 7080 - DNA, 408 bp, Ricinus communis
  CDS (1)..(408)
atggcacaaaaggcagagaagaagccagcggagaaagcaccggctgagaagaagccaagggcggagaagaaattgccgaaagaaggaggatcggccgccacagataagaagaaaaagaaggcaaagaagagcgtagagacatacaagatttacatattcaaggttttgaaacaggttcatccggatattggtatatcaagcaaggctatgggtattatgaacagtttcatcaatgatatatttgaaaagcttgcccaggagtcatctaggcttgctaggtataacaagaagcccaccattacctctcgggagatccagactgctgttaggcttgttttgcctggcgaattggctaaacatgctgtttctgaagggactaaggctgttaccaagttcactagctcttag

SEQ ID NO: 7081 - protein, 135 aa, Ricinus communis
MAQKAEKKPAEKAPAEKKPRAEKKLPKEGGSAATDKKKKKAKKSVETYKIYIFKVLKQVHPDIGISSKAMGIMNSFINDIFEKLAQESSRLARYNKKPTITSREIQTAVRLVLPGELAKHAVSEGTKAVTKFTSS

SEQ ID NO: 7082 - DNA, 393 bp, Candida dubliniensis (strain CD36 / CBS 7987 / NCPF 3949 / NRRL Y-17841)
  CDS (1)..(393): transl_table=12
atggctccaaaagcagaaaagaaaccagcttctaaagctccagctgaaaagaaaccagctgctaaaaaaaccgcttcaactgatggtgctaaaaagagaactaaaactagaaaagaaacttattcttcatatatttataaagtcttaaaacaaactcatccagatactggtatttctcaaaaagctatgtctattatgaattcatttgttaatgatatttttgaaagaattgcttctgaagcttctaaattggctgcttataataaaaaatctaccatttctgctagagaaattcaaactgctgttagattgatcttaccaggtgaattggctaaacatgctgtttctgaaggtactagagctgttactaaatactcttctgcttctaattag

SEQ ID NO: 7083 - protein, 130 aa, Candida dubliniensis (strain CD36 / CBS 7987 / NCPF 3949 / NRRL Y-17841)
MAPKAEKKPASKAPAEKKPAAKKTASTDGAKKRTKTRKETYSSYIYKVLKQTHPDTGISQKAMSIMNSFVNDIFERIASEASKLAAYNKKSTISAREIQTAVRLILPGELAKHAVSEGTRAVTKYSSASN

SEQ ID NO: 7084 - DNA, 393 bp, Candida dubliniensis (strain CD36 / CBS 7987 / NCPF 3949 / NRRL Y-17841)
  CDS (1)..(393): transl_table=12
atggccccaaaagcagaaaagaaaccagcttctaaagctccagctgaaaagaaaccagctgctaagaaaaccgcttccaccgatggtgctaagaagagaactaaaactagaaaagaaacctactcctcatatatatacaaggttttgaaacaaacacatccagacacaggtatttcccaaaaggccatgtccatcatgaattcatttgttaacgatatttttgaaagaattgccactgaagcttctaaattggctgcttacaataaaaaatccacaatttctgccagagaaatccaaactgctgttagattgattttgccaggtgaattggccaaacatgccgtttcagaaggtaccagagccgttacaaaatactcatctgcttctagttag

SEQ ID NO: 7085 - protein, 130 aa, Candida dubliniensis (strain CD36 / CBS 7987 / NCPF 3949 / NRRL Y-17841)
MAPKAEKKPASKAPAEKKPAAKKTASTDGAKKRTKTRKETYSSYIYKVLKQTHPDTGISQKAMSIMNSFVNDIFERIATEASKLAAYNKKSTISAREIQTAVRLILPGELAKHAVSEGTRAVTKYSSASS

SEQ ID NO: 7086 - DNA, 653 bp, Caligus rogercresseyi
  CDS (65)..(442)
gggggatctcagttacaattcttcccccttgcgctttagactccgtgtttctcatattctcatcatgccccccaagtccgttggtaaagctgtgaagaaggccggcaaggcccagaagaacatcaccaagtctgatggagtaaagaaaaagtcccataagcggaaggagtcctatgccatttacatttacaaggtcctgaagcaggtccaccccgacacgggagtctcttccaaggccatgagcattatgaactccttggtcaatgacatcttcgagcggattgccgcagagtcttcccgacttgcgcactacaacaagcgttccaccattacttcccgggaaattcaaactgctgtcaggttgctcctgcctggtgaactggccaagcacgctgtctctgagggaaccaaggccgtcaccaagtacacgtcttctaagtaaaatgaattcttccctctgaagaccaacctttctagtagcaaggaggatatgctaagcagcctcacgatctcagttccttgtattatcacacaaatctatatttcctatcgtatatacttgcgcattaagtattaaaccacaatggttatctgtaaccacaatgacataaattatgaacgttgaatacagaaatatatattaattatatatc

SEQ ID NO: 7087 - protein, 125 aa, Caligus rogercresseyi
MPPKSVGKAVKKAGKAQKNITKSDGVKKKSHKRKESYAIYIYKVLKQVHPDTGVSSKAMSIMNSLVNDIFERIAAESSRLAHYNKRSTITSREIQTAVRLLLPGELAKHAVSEGTKAVTKYTSSK

SEQ ID NO: 7088 - DNA, 372 bp, Lepeophtheirus salmonis (salmon louse)
  CDS (1)..(372)
atgcctcccaaaattactggtaaagccgcaaagaaggctggaaaagctcaaaaggtcatcaccaagactgatggaaagaagaggtcccacaaaaggaaggaatcttatgccatctacatttataaggtcttgaagcaagtccaccctgacactggtgtatcctcaaaggctatgagcatcatgaactccttcgttaacgacatcttcgagagaatcgccgccgagtcctctcgtctcgctcattacaacaagagatccaccatcacctccagagaaattcaaaccgctgtgagacttctcctgcccggcgagttggccaaacacgctgtctctgaaggaacgaaggctgtgacaaaatacacttcctcctag

SEQ ID NO: 7089 - protein, 123 aa, Lepeophtheirus salmonis (salmon louse)
MPPKITGKAAKKAGKAQKVITKTDGKKRSHKRKESYAIYIYKVLKQVHPDTGVSSKAMSIMNSFVNDIFERIAAESSRLAHYNKRSTITSREIQTAVRLLLPGELAKHAVSEGTKAVTKYTSS

SEQ ID NO: 7090 - DNA, 375 bp, Caligus clemensi
  CDS (1)..(375)
atgcctcctaagtcagttggaaaggccgctaagaaggcaggcaagactcagaagaaaatcactaagtctgatgggaagaagaagtcccataagcgcaaggagtcctatgccatttatatctacaaggtcctaaagcaggttcaccccgacactggtgtttcctccaaggccatgagcatcatgaattctttcgtcaatgacatcttcgagcgaatcgctgcggagtcctctcgacccgctcattacaacaagcgttccacgatcacctcccgggagattcaaaccgccgtacgactccttctacccggtgaactcgccaagcacgccgtctctgaaggcacaaaagccgtcaccaagtacacttcatcaaagtag

SEQ ID NO: 7091 - protein, 124 aa, Caligus clemensi
MPPKSVGKAAKKAGKTQKKITKSDGKKKSHKRKESYAIYIYKVLKQVHPDTGVSSKAMSIMNSFVNDIFERIAAESSRPAHYNKRSTITSREIQTAVRLLLPGELAKHAVSEGTKAVTKYTSSK

SEQ ID NO: 7092 - DNA, 351 bp, Micromonas sp. RCC299
  CDS (1)..(351)
atggccaagcccacctccaagaagcccgccaagaagaccgtcgccaagggcggctccaaggccaagaagtccaagaccgagacctacaagatctacatctacaaggttctcaagcaggtccaccccgacaccggcatctcctccaaggccatgtccatcatgaactccttcatcaacgacatcttcgagaagatcgccaccgaggcttccaagctcgcccgctacaacaagaagcccaccgtcacctccagggagatccagaccgctgtgcgcctcatcctccccggtgagctcgccaagcacgccgtctccgagggcaccaaggccgtgaccaagttcacctccaactaa

SEQ ID NO: 7093 - protein, 116 aa, Micromonas sp. RCC299
MAKPTSKKPAKKTVAKGGSKAKKSKTETYKIYIYKVLKQVHPDTGISSKAMSIMNSFINDIFEKIATEASKLARYNKKPTVTSREIQTAVRLILPGELAKHAVSEGTKAVTKFTSN

SEQ ID NO: 7094 - DNA, 351 bp, Micromonas sp. RCC299
  CDS (1)..(351)
atggccaagcccacctccaagaagcccgccaagaagaccgtcaagggcgccggcggcaaggccaagaagtccaagaccgagacctacaagatctacatctacaaggtccttaagcaggtgcaccccgacaccggcatctcctccaaggccatgtccatcatgaactccttcatcaacgacatcttcgagaagatcgccaccgaggcttccaagctcgcccgctacaacaagaagcccaccgtcacctccagggagatccagaccgccgtgcgcctcatcctccccggtgagctcgccaagcacgccgtctccgagggcaccaaggccgtgaccaagttcacctccaactaa

SEQ ID NO: 7095 - protein, 116 aa, Micromonas sp. RCC299
MAKPTSKKPAKKTVKGAGGKAKKSKTETYKIYIYKVLKQVHPDTGISSKAMSIMNSFINDIFEKIATEASKLARYNKKPTVTSREIQTAVRLILPGELAKHAVSEGTKAVTKFTSN

SEQ ID NO: 7096 - DNA, 351 bp, Micromonas pusilla CCMP1545
  CDS (1)..(351)
atggccaagcccacctccaagaagcccgccaagaagtccctcaagggcggcaagaagggcggcaagaagtccaagaccgagacgtacaagatctacatctacaaggtcctcaagcaggtgcaccccgacaccgggatctcctccaaggcgatgtccatcatgaactccttcatcaacgacatcttcgagaagatcgccaccgaggcgtccaagctcgcccgctacaacaagaagccgacggtcacgtcccgcgagatccagaccgcggtccgcctcatcctccccggtgagctcgccaagcacgccgtctccgagggcaccaaggcggtcaccaagttcacctccgcgtaa

SEQ ID NO: 7097 - protein, 116 aa, Micromonas pusilla CCMP1545
MAKPTSKKPAKKSLKGGKKGGKKSKTETYKIYIYKVLKQVHPDTGISSKAMSIMNSFINDIFEKIATEASKLARYNKKPTVTSREIQTAVRLILPGELAKHAVSEGTKAVTKFTSA

SEQ ID NO: 7098 - DNA, 372 bp, Chaetopterus variopedatus
  CDS (1)..(372)
atgccacccaaagtaagctccaagggcgccaagaaggccgtttccaagtctaaagccccacgatctggggacaagaagaaacgcagaaagaggagagaaagctacagcatctacgtgtacaaagtcatgaagcaagtgcaccctgacactggtatctccagcaaggccatgagcatcatgaacagcttcgtcaacgatctgttcgagcgtatcgccagcgaagcatctcgcctggctcactacaacaaacgctcaaccatcaccagccgggagatccagaccgctgtgcgccttctcctgcccggtgaattggccaagcacgctgtcagcgagggtactaaagccgtgactaagtacactagctccaagtaa

SEQ ID NO: 7099 - protein, 123 aa, Chaetopterus variopedatus
MPPKVSSKGAKKAVSKSKAPRSGDKKKRRKRRESYSIYVYKVMKQVHPDTGISSKAMSIMNSFVNDLFERIASEASRLAHYNKRSTITSREIQTAVRLLLPGELAKHAVSEGTKAVTKYTSSK

SEQ ID NO: 7100 - DNA, 384 bp, Psammechinus miliaris
  CDS (1)..(384)
atgccagccaaaggagcagctacaaaaggagagaagaagcaggccgtcaagtccaaggcaatggcttctagtcgtactggtgacaagaagagacgacgaaggcgtctagaatcatataacatctacatctacaaagttctgaaacaggtccatccagacactggtatttcgagcaaagcgatgtccatcatgaacagcttcgtgaatgatatctttgaacggatcgccgcagaggcgtcacgtctagcccagtacaacaagaagagtactatcagcagtcgagaagtccaaaccgctgtccggctcctcctgcctggagaactggccaaacacgcagtatcagaaggcacaaaggctgtaaccaaatacacaacgtcgcggtag

SEQ ID NO: 7101 - protein, 127 aa, Psammechinus miliaris
MPAKGAATKGEKKQAVKSKAMASSRTGDKKRRRRRLESYNIYIYKVLKQVHPDTGISSKAMSIMNSFVNDIFERIAAEASRLAQYNKKSTISSREVQTAVRLLLPGELAKHAVSEGTKAVTKYTTSR

SEQ ID NO: 7102 - DNA, 417 bp, Ostreococcus tauri
  CDS (1)..(417)
atgactcgaagagagcccgctcgtgaactcaccggaaacgacgaagttgcgcgcgcctgcacgccgattcgtcacaacttgacacgcaagcccgctcaaaagaagccgtccggcgccaagaagggtggccgcaagtccaagacggagacctacaagatctacatctacaaggtcctcaagcaagtgcacccagacaccggcatctcctccaaggccatgtccatcatgaactcgttcatcaacgacatcttcgagaagatcgcgaccgaggccgccaagctcgcgcgatacaacaagaagccgacggtgacgtcccgcgagatccaaacggccgtccgactcatcctcccgggtgagctcgcgaagcacgccgtgtccgaagggaccaaggcggtgaccaagttcacctccgcgtaa

SEQ ID NO: 7103 - protein, 138 aa, Ostreococcus tauri
MTRREPARELTGNDEVARACTPIRHNLTRKPAQKKPSGAKKGGRKSKTETYKIYIYKVLKQVHPDTGISSKAMSIMNSFINDIFEKIATEAAKLARYNKKPTVTSREIQTAVRLILPGELAKHAVSEGTKAVTKFTSA

SEQ ID NO: 7104 - DNA, 378 bp, Ostreococcus tauri
  CDS (1)..(378)
atggatcatgactcaatagtgaccactacattcaaaatggccggtaagaagcccgctcaaaagaagccgtccggcgccaagaagggtggccgcaagtccaagacggagacctacaagatctacatctacaaggtcctcaagcaagtgcacccggacaccggcatctcctccaaggccatgtccatcatgaactcgttcatcaacgacatcttcgagaagatcgcgaccgaagccgccaagctcgcgcgatacaacaagaagccgaccgtcacctcccgtgaaatccaaacggctgtccgactcatcctcccgggtgaactcgccaagcacgccgtctctgaaggcaccaaggctgtcaccaagttcacctccgcgtaa

SEQ ID NO: 7105 - protein, 125 aa, Ostreococcus tauri
MDHDSIVTTTFKMAGKKPAQKKPSGAKKGGRKSKTETYKIYIYKVLKQVHPDTGISSKAMSIMNSFINDIFEKIATEAAKLARYNKKPTVTSREIQTAVRLILPGELAKHAVSEGTKAVTKFTSA

SEQ ID NO: 7106 - DNA, 438 bp, Arabidopsis thaliana
  CDS (1)..(438)
atggcgaaggcagataagaaaccagcggagaagaaaccggcagagaaaactccggcagccggaccagcagcagcggcagagaagaaaccaaaagccggaaagaaactcccgaaggaaccagccggcgccggagacaagaagaagaagagatcaaagaagaacgttgagacatacaagatctacatcttcaaggtgttgaagcaagttcatccagatatcggaatctccagcaaagccatgggaatcatgaacagtttcatcaatgatatctttgagaaacttgctggtgagtcttcgaagcttgcgaggtacaacaagaagccgacgattacttctagggagattcagactgcggtgagacttgtgttgcctggagagttggcgaaacatgctgtttctgaagggactaaggcggttacgaagtttacgagttcttag

SEQ ID NO: 7107 - protein, 145 aa, Arabidopsis thaliana
MAKADKKPAEKKPAEKTPAAGPAAAAEKKPKAGKKLPKEPAGAGDKKKKRSKKNVETYKIYIFKVLKQVHPDIGISSKAMGIMNSFINDIFEKLAGESSKLARYNKKPTITSREIQTAVRLVLPGELAKHAVSEGTKAVTKFTSS

SEQ ID NO: 7108 - DNA, 372 bp, Psammechinus miliaris
  CDS (1)..(372)
atgcctgctaaagcacaagccgctggaaagaagggatcgaagaaggccaaggcccccaggcctagcggcgacaagaagaggcgcagaaagcgcaaggaatcctacggaatctacatctacaaggttctgaagcaggtccacccagacactggtatctccagccgtgccatgtccatcatgaacagtttcgtcaacgatgtcttcgagcgcattgccgccgaagcttcccgtcttgcccactacaacaaaaagtccaccatcaccagtcgtgaggtccagaccgctgtcagacttctccttcccggagaattggccaagcacgccgtctctgagggcaccaaggctgtgaccaagtacaccacctccaagtaa

SEQ ID NO: 7109 - protein, 123 aa, Psammechinus miliaris
MPAKAQAAGKKGSKKAKAPRPSGDKKRRRKRKESYGIYIYKVLKQVHPDTGISSRAMSIMNSFVNDVFERIAAEASRLAHYNKKSTITSREVQTAVRLLLPGELAKHAVSEGTKAVTKYTTSK

SEQ ID NO: 7110 - DNA, 441 bp, Solanum tuberosum
  CDS (1)..(441)
atggcaccaaaggcagagaagaagccagcagaaaagaagccggcggaggagaagaagtccaccgtcgccgagaaagctccggcggagaagaagccaaaggccgggaagaagctaccaaaggacgccgcttccggcgagaagaagaagaagaaggccaagaagagcgttgagacctacaagatctacatctttaaggtgctaaaacaggtgcatcctgatatcgggatttccagcaaagctatggggatcatgaacagcttcatcaatgacatttttgagaagctggctcaggaatcttctagattggcccgttacaacaagaagccaactattacttctcgggagatccagactgctgtgagacttgtgcttcctggtgaattggctaagcatgctgtttctgagggcaccaaggctgttaccaagtttactagctcttga

SEQ ID NO: 7111 - protein, 146 aa, Solanum tuberosum
MAPKAEKKPAEKKPAEEKKSTVAEKAPAEKKPKAGKKLPKDAASGEKKKKKAKKSVETYKIYIFKVLKQVHPDIGISSKAMGIMNSFINDIFEKLAQESSRLARYNKKPTITSREIQTAVRLVLPGELAKHAVSEGTKAVTKFTSS

SEQ ID NO: 7112 - DNA, 432 bp, Solanum tuberosum
  CDS (1)..(432)
atggcaccaaagacaggagggaaaaagcctgctgagaagaaaccagtagaggagaagaaggccgaggaagttccggcagagaagaagccgaaagccggaaagaagctcccgaaggatgccgccgtcgacaagaagaagaagaggacaaagaagagcgttgaaacctacaagatctacatcttcaaggtgctcaagcaggtgcatcctgatatcggtatttccagcaagtctatgggaataatgaacagtttcattaatgatatatttgaaaagcttgctcaggaagcatctagattggctaggattaataagaagcctacaattacatctagggaaattcagactgctgtaagacttgttttgcctggtgaattggctaagcatgctgtttctgagggaactaaggctgttactaagttcactagcaactag

SEQ ID NO: 7113 - protein, 143 aa, Solanum tuberosum
MAPKTGGKKPAEKKPVEEKKAEEVPAEKKPKAGKKLPKDAAVDKKKKRTKKSVETYKIYIFKVLKQVHPDIGISSKSMGIMNSFINDIFEKLAQEASRLARINKKPTITSREIQTAVRLVLPGELAKHAVSEGTKAVTKFTSN

SEQ ID NO: 7114 - DNA, 375 bp, Ixodes scapularis
  CDS (1)..(375)
atgccaccccagccgagcggaaaagccatcaagaaggccggcaaggcccaaaaagccgtccgcacgtccgacaagaagaagaaaaagcgcaggaggaaggaaagcttcagcatttacatctataaggtcctgaagcaagtgcatccggacaccggcgtctccagcaaagccatgtccatcatgaacagctttgtcaacgacatcttcgagaggatcgcagccgaggcgtcgcgtctggcgcactacaacaagcgttctaccatcaccagccgggaggtccagaccgccgttcgtctgctgctgccaggtgaacttgccaagcacgcagtctccgaggggaccaaggcggtcacgaagtacacctcttcaaagtga

SEQ ID NO: 7115 - protein, 124 aa, Ixodes scapularis
MPPQPSGKAIKKAGKAQKAVRTSDKKKKKRRRKESFSIYIYKVLKQVHPDTGVSSKAMSIMNSFVNDIFERIAAEASRLAHYNKRSTITSREVQTAVRLLLPGELAKHAVSEGTKAVTKYTSSK

SEQ ID NO: 7116 - DNA, 369 bp, Schistosoma japonicum
  CDS (1)..(369)
atgccccctaaagttgtgtctggcaaagctgcgaagaaggcctcaaaggtcaagttaccaaaggttgacaagaagaagaagaggaggaggaaggaaagttatgccatctatatttacaaggttttgcgtcaagtccaccctgatactggtatttcgtcaaaggcaatgtcaatcatgaactcgttcgtgaatgatatatttgaacgtattgcggctgaagcgagcagactgtcacactacaacaagaagtctacaatctctagtcgagaggttcagactgcagttcgtttattgttgcccggtgaattggcgaaacacgctgtatctgagggcacaaaggcagtgacgaaatacagtggttcaaagtaa

SEQ ID NO: 7117 - protein, 122 aa, Schistosoma japonicum
MPPKVVSGKAAKKASKVKLPKVDKKKKRRRKESYAIYIYKVLRQVHPDTGISSKAMSIMNSFVNDIFERIAAEASRLSHYNKKSTISSREVQTAVRLLLPGELAKHAVSEGTKAVTKYSGSK

SEQ ID NO: 7118 - DNA, 369 bp, Schistosoma japonicum
  CDS (1)..(369)
atgcctcccaaagttgtttctgggaaagcagctaaaaagtcatctaaagtcaaagcccctaagtctgaaaaaaagaaaaaacgaaggaggaaagagagttatgccatatacatatataaggtcttacgacaagtccatcctgacacggggatttcgtcgaaggcaatgtctattatgaattcatttgtgaatgatatcttcgaaaggattgcagcagaagctagtcgtctggcacattataataaaaaatccactataaccagtcgtgaggttcaaactgcagtccggttgctattacctggtgaacttgctaaacatgctgtttctgagggcacaaaagctgttactaaatacagtggatcaaagtaa

SEQ ID NO: 7119 - protein, 122 aa, Schistosoma japonicum
MPPKVVSGKAAKKSSKVKAPKSEKKKKRRRKESYAIYIYKVLRQVHPDTGISSKAMSIMNSFVNDIFERIAAEASRLAHYNKKSTITSREVQTAVRLLLPGELAKHAVSEGTKAVTKYSGSK

SEQ ID NO: 7120 - DNA, 375 bp, Oryza sativa subsp. japonica
  CDS (1)..(375)
atggtgccgaaggcggagaagaagccggcagagaagaagccagcagaggagaagggtggcaccggtgacaagaaggggaagaagaaggcgaagaaaagcgtggagacctataaaatctacatcttcaaggtgctcaagcaggtgcatccagacataggaatctcctccaaggccatgtccatcatgaattccttcgtcaacgacattttcgagaagctcgagcaggaggccgcgaggcttgccaggtacaacaagaagcccacaatcacctcccgcgagatccagacctctgttcgtctcgtcctccccggcgagcttgccaagcacgccgtctccgagggcaccaaggccgtcaccaagttcacctcctcctaa

SEQ ID NO: 7121 - protein, 124 aa, Oryza sativa subsp. japonica
MVPKAEKKPAEKKPAEEKGGTGDKKGKKKAKKSVETYKIYIFKVLKQVHPDIGISSKAMSIMNSFVNDIFEKLEQEAARLARYNKKPTITSREIQTSVRLVLPGELAKHAVSEGTKAVTKFTSS

SEQ ID NO: 7122 - DNA, 375 bp, Mytilus chilensis
  CDS (1)..(375)
atgccaccaaaagttggaaccaaaggagccaaaaaggccgtaacaaaggcaaagactgcccgacccggcggtgacaagaaaaggaggaggaagaggagagaatcctatgccatctacatctacgaagtcttgagacaggttcacccagacactggagtatcctcaaaggctatgtctatcatgaacagttttgtcaacgatatcttcgagagaatcgctgcagaagcttcccgtctcgctcactacaacaagagatcaaccatcacatctcgggagattcagactgcagttcgtctgctcttacccggtgagttggccaagcacgctgtcagtgaaggtaccaaagccgtcacaaagtacaccagcagcaagtaa

SEQ ID NO: 7123 - protein, 124 aa, Mytilus chilensis
MPPKVGTKGAKKAVTKAKTARPGGDKKRRRKRRESYAIYIYEVLRQVHPDTGVSSKAMSIMNSFVNDIFERIAAEASRLAHYNKRSTITSREIQTAVRLLLPGELAKHAVSEGTKAVTKYTSSK

SEQ ID NO: 7124 - DNA, 375 bp, Mytilus edulis
  CDS (1)..(375)
atgccaccaaaagttggaaccaaaggagccaaaaaggccgtaacaaaggcaaagactgcccgacccggcggtgacaagaaaaggaggaggaagaggagagaatcctatgccatctacatctacaaagtcttgagacaggttcacccagacaccggagtatcctcaaaggctatgtctatcatgaacagttttgtcaacgatatctttgagagaatcgctgcagaagcttcccgtctcgctcactacatcaagagatctaccatcacatctcgggagatccagactgcagttcgtctgctcctacccggtgaattggccaagcacgctgtcagtgaaggtaccaaagccgtcacaaagtacaccagcagcaagtaa

SEQ ID NO: 7125 - protein, 124 aa, Mytilus edulis
MPPKVGTKGAKKAVTKAKTARPGGDKKRRRKRRESYAIYIYKVLRQVHPDTGVSSKAMSIMNSFVNDIFERIAAEASRLAHYIKRSTITSREIQTAVRLLLPGELAKHAVSEGTKAVTKYTSSK

SEQ ID NO: 7126 - DNA, 375 bp, Mytilus californianus
  CDS (1)..(375)
atgccacaaaaagttggaaccaaaggagccaaaaaggccgtaacaaaggcaaagactgcccgacccggcggtgacaagaaaaggaggaggaagaggagagaatcctatgccatctacatctacaaagtcctgagacaggttcacccagacactggagtatcctcaaaggctatgtctatcatgaacagttttgtcaacgatatctttgagagaatcactgcaggagcttcccgtctcgctcactacaacaagagatctaccatcacatctcgggaggtccagactgcagttcgtctgctcttacccggtgaattggccaagcacgctgtcagtgaaggtaccaaagccgtcacaaagtacaccagcagcaagtaa

SEQ ID NO: 7127 - protein, 124 aa, Mytilus californianus
MPQKVGTKGAKKAVTKAKTARPGGDKKRRRKRRESYAIYIYKVLRQVHPDTGVSSKAMSIMNSFVNDIFERITAGASRLAHYNKRSTITSREVQTAVRLLLPGELAKHAVSEGTKAVTKYTSSK

SEQ ID NO: 7128 - DNA, 375 bp, Mytilus galloprovincialis
  CDS (1)..(375)
atgccaccaaaagttggaaccaaaggagccaaaaaggccgtaacaaaggcaaagactgcccgacccggcggtgacaagaaaaggaggaggaagaggagagaatcctatgccatctacatctacaaagtcttgagacaggttcacccagacactggagtatcctcaaaggctatgtctatcatgaacagttttgtcaacgatatctttgagagaatcgctgcagaagcttcccgtctcgctcactacaacaagagatctaccatcacatctcgggagatccagactgcagttcgtctgctcttacccggtgaattggccaagcacgctgtcagtgaaggtaccgaagccgtcacaaagtacaccagcagcaagtaa

SEQ ID NO: 7129 - protein, 124 aa, Mytilus galloprovincialis
MPPKVGTKGAKKAVTKAKTARPGGDKKRRRKRRESYAIYIYKVLRQVHPDTGVSSKAMSIMNSFVNDIFERIAAEASRLAHYNKRSTITSREIQTAVRLLLPGELAKHAVSEGTEAVTKYTSSK

SEQ ID NO: 7130 - DNA, 372 bp, Drosophila sechellia
  CDS (1)..(372)
atgcctccgaaaactagtggaaaggcagccaagaaggctggcaaggctcagaagaacatcaccaagaacgacaagaaaaagaaacgcaagaggaaggagagctatgccatctacatttacaaggttctcaagcaggtccatcctgacaccggaatttcgttgaaggcgatgagcataatgaacagctttgtaaatgatattttcgagcgaattgctgccgaagcgtctcgtctagctcactacaacaagcgctcgaccatcaccagtcgggaaatccaaacggctgttcgcctgcttctgcctggagagttggccaagcatgctgtcagtgagggaaccaaggctgttaccaagtacaccagctccaaataa

SEQ ID NO: 7131 - protein, 123 aa, Drosophila sechellia
MPPKTSGKAAKKAGKAQKNITKNDKKKKRKRKESYAIYIYKVLKQVHPDTGISLKAMSIMNSFVNDIFERIAAEASRLAHYNKRSTITSREIQTAVRLLLPGELAKHAVSEGTKAVTKYTSSK

SEQ ID NO: 7132 - DNA, 360 bp, Drosophila sechellia
  CDS (1)..(360)
atgcctccgaaaactagtggaaaggcagccaagaaggctggcaaggctcagaagaacatcaccaagaacgacaagaaaaagaaacgcaagaggaaggagagctatgccatctacatttacaaggttctcactgacacaggaatttcgtcgaaggcgatgagcataatgaacagctttgtaaatgatattttcgagcgaattgctgccgaagcgtctcgtctagctcactacaacaagcgctcgaccatcaccagtcgggaaatccaaacggctgttcgcctgcttctgcctggagagttggccaagcatgctgtcagtgagggaaccaaggctgttaccaagtacaccagctccaaataa

SEQ ID NO: 7133 - protein, 119 aa, Drosophila sechellia
MPPKTSGKAAKKAGKAQKNITKNDKKKKRKRKESYAIYIYKVLTDTGISSKAMSIMNSFVNDIFERIAAEASRLAHYNKRSTITSREIQTAVRLLLPGELAKHAVSEGTKAVTKYTSSK

SEQ ID NO: 7134 - DNA, 426 bp, Pinus pinaster
  CDS (1)..(426)
atggcgcccaaggcagcagaaaagaaaccagcagagaagaagcctgtggcggagaaagctcccgctgagaagaagccggctcccaaggccgagaagaagttgcccaaggaaggaggagacaagaagggcaagaaaaagcataagaagagcgtggagacctacaagatctatatctttaaggttctcaagcaggtccaccctgatattggtatttccagtaaggccatggggataatgaatagctttatcaatgatatcttcgagaaattagcgagcgaggcatcgaaacttgcccgctacaacaagaagcccacaattacttcacgggagattcagaccgctgtaaggcttgctcttccaggggagctcgcgaagcatgccgtctcagagggcacaaaggccgtcaccaagttcacaagtgcttga

SEQ ID NO: 7135 - protein, 141 aa, Pinus pinaster
MAPKAAEKKPAEKKPVAEKAPAEKKPAPKAEKKLPKEGGDKKGKKKHKKSVETYKIYIFKVLKQVHPDIGISSKAMGIMNSFINDIFEKLASEASKLARYNKKPTITSREIQTAVRLALPGELAKHAVSEGTKAVTKFTSA

SEQ ID NO: 7136 - DNA, 375 bp, Mytilus edulis
  CDS (1)..(375)
atgccacccaaagtaggaactaaaggagccaagaaggccgtcaccaaggcaaagactgccagacccggcggtgacaagaaaaggaggaggaagagacgtgaatcctatgctatctacatctacaaagtcttgagacaagttcaccccgacaccggagtgtcctcaaaggcaatgtccatcatgaacagcttcgtcaacgatatcttcgagagaatcgcagcagaggcctcccgattggcacactacaacaaaagatctaccatcacatcccgggagatccagaccgctgtccgtcttctcttacccggagaattggccaagcacgctgtcagtgaaggtaccaaagccgtcactaaatacaccagcagcaagtaa

SEQ ID NO: 7137 - protein, 124 aa, Mytilus edulis
MPPKVGTKGAKKAVTKAKTARPGGDKKRRRKRRESYAIYIYKVLRQVHPDTGVSSKAMSIMNSFVNDIFERIAAEASRLAHYNKRSTITSREIQTAVRLLLPGELAKHAVSEGTKAVTKYTSSK

SEQ ID NO: 7138 - DNA, 372 bp, Rhynchosciara americana
  CDS (1)..(372)
atgccacctaagacaagcggaaaagctgcgaagaaggccggtaaggcacaaaagaacatttcgaaaggtgacaagaaaaagaaacgcaagcgtaaggaatcttatgctatctacatatacaaagtgttgaaacaagtgcatccagacactggtatttcgagcaaagccatgagcatcatgaacagttttgttaatgatattttcgagcgcattgctgccgaagcatcccgtttggctcactacaataaacgatcgaccatcaccagtcgggaaattcaaaccgctgttcgactattgttgcccggtgaattggccaagcacgctgtcagcgaaggcacaaaagccgtcaccaaatataccagctctaaataa

SEQ ID NO: 7139 - protein, 123 aa, Rhynchosciara americana
MPPKTSGKAAKKAGKAQKNISKGDKKKKRKRKESYAIYIYKVLKQVHPDTGISSKAMSIMNSFVNDIFERIAAEASRLAHYNKRSTITSREIQTAVRLLLPGELAKHAVSEGTKAVTKYTSSK

SEQ ID NO: 7140 - DNA, 420 bp, Cicer arietinum
  CDS (1)..(420)
atggctcccgcaaaggcagagaagaaaccggcagagaagaaaccagccgccgagaaagcaccagccgagaaaaaacctaaagccgaaaagaagatctcgaaggaaggaacaagcgataagaagaagaagcgcgttaagaagagcgttgaaacctacaagatttacatcttcaaggttttgaaacaggtccatcctgatattggtatttcaagcaaagctatggggattatgaacagttttattaacgatatttttgagaaactcgctcaggaagcttctagattggcgcgttataacaagaagccgactattacttcacgggagattcaaacagcggttcgtttggttcttcctggtgaattggcgaaacatgccgtgtctgaaggaactaaggcggttaccaaatttactagctcgtag

SEQ ID NO: 7141 - protein, 139 aa, Cicer arietinum
MAPAKAEKKPAEKKPAAEKAPAEKKPKAEKKISKEGTSDKKKKRVKKSVETYKIYIFKVLKQVHPDIGISSKAMGIMNSFINDIFEKLAQEASRLARYNKKPTITSREIQTAVRLVLPGELAKHAVSEGTKAVTKFTSS

SEQ ID NO: 7142 - DNA, 372 bp, Asellus aquaticus
  CDS (1)..(372)
  misc_feature (359)..(359): y is t or c
atggcaccaaagacttcgggtaaagccgccaagaaggccggaaaggctcaaaaatctatcaccaagggtgacaagaagaagaaaaggaggaggaaggaaagttacagcatctacatttacaaggttttgaagcaagtccaccccgacaccggaatttcttccaaagctatgtcaatcatgaactcgttcgtgaatgatatcttcgaaagaatcgccgctgaagcttctcgcctcgctcactacaacaagagatccaccatcacatctcgcgaaatccaaaccgccgtcaggctccttttgccaggagaactcgccaaacacgcagtctttgaaggaacaaaggcagttaccaaatataytttttcaaagtaa

SEQ ID NO: 7143 - protein, 123 aa, Asellus aquaticus
  misc_feature (120)..(120): The Xaa at location 120 stands for Ile, or Thr.
MAPKTSGKAAKKAGKAQKSITKGDKKKKRRRKESYSIYIYKVLKQVHPDTGISSKAMSIMNSFVNDIFERIAAEASRLAHYNKRSTITSREIQTAVRLLLPGELAKHAVFEGTKAVTKYXFSK

SEQ ID NO: 7144 - DNA, 462 bp, Oryza sativa subsp. indica
  CDS (1)..(462)
atggcgcccaaggcggagaagaagccggccgcgaagaagcccgcggaggaggagcccgcggcagagaaggccgagaaggcccccgcggggaagaagcccaaggcggagaagcgtctccccgccggcaaggccgagaagagcagcggcgaggggaagaaggcggggcggaagaaggcgaagaagagcgtcgagacctacaagatctacatcttcaaggtgctcaagcaggtccaccccgacatcggcatctcctccaaggccatgtccatcatgaactccttcatcaacgacatcttcgagaagctcgccggggagtccgccaagctcgcgcgctacaacaagaagcccaccatcacctcacgggagatccagacctccgtccgcctcgtcctccccggcgagctcgccaagcacgccgtctccgagggcaccaaggctgtgaccaagttcacctccgcttag

SEQ ID NO: 7145 - protein, 153 aa, Oryza sativa subsp. indica
MAPKAEKKPAAKKPAEEEPAAEKAEKAPAGKKPKAEKRLPAGKAEKSSGEGKKAGRKKAKKSVETYKIYIFKVLKQVHPDIGISSKAMSIMNSFINDIFEKLAGESAKLARYNKKPTITSREIQTSVRLVLPGELAKHAVSEGTKAVTKFTSA

SEQ ID NO: 7146 - DNA, 462 bp, Chlamydomonas reinhardtii
  CDS (1)..(462)
atggcccccaagaaggacgagaagcccccgactcaggaggccggcgccgaggcccctgccaaggccgagcgcaagcccaaggccgagaaggccgccaagaaggccaagaaggagccctccaagaaggctgccaaggagcccaagggcagtggcgagaagaaggacaagaagaagaagaagagcgccgtggagacctacaagctgtacatctacaaggtgctcaagcaggtgcaccccgacaccggcatcagcagcaaggccatgtctatcatgaacagcttcatcaacgacatctttgagaaggtggccaccgaggcctccaagctgagccgctacaacaagaagcccaccgtgacctcccgtgagatccagaccgccgtgcgcctggtgctgcctggcgagctggccaagcacgcggtgtcggagggcaccaaggccgtgaccaagttcacctcgggctaa

SEQ ID NO: 7147 - protein, 153 aa, Chlamydomonas reinhardtii
MAPKKDEKPPTQEAGAEAPAKAERKPKAEKAAKKAKKEPSKKAAKEPKGSGEKKDKKKKKSAVETYKLYIYKVLKQVHPDTGISSKAMSIMNSFINDIFEKVATEASKLSRYNKKPTVTSREIQTAVRLVLPGELAKHAVSEGTKAVTKFTSG

SEQ ID NO: 7148 - DNA, 447 bp, Medicago truncatula
  CDS (1)..(447)
atggcgccaaaaggagagaagaagccagcagagaagaaaccagcagaggagaagaagtccaccgtcgctgagaaagctccggcggagaagaagccaaaggccggaaagaagcttccaaaggaaggtggttcagccgccggagagaagaagaagaagagaagcaagaagagcgttgaaacatacaagatctacatcttcaaggttctgaaacaagttcacccagacattggtatctcaagcaaagccatgggtatcatgaacagtttcatcaatgatatcttcgagaaactcgctcaagaatcatccagacttgctcgttacaacaagaagccaacaatcacttcaagggaaattcagaccgcggtcaggcttgttctgcccggtgaattggccaagcatgctgtttctgagggtaccaaggctgtcactaagtttactagttcttag

SEQ ID NO: 7149 - protein, 148 aa, Medicago truncatula
MAPKGEKKPAEKKPAEEKKSTVAEKAPAEKKPKAGKKLPKEGGSAAGEKKKKRSKKSVETYKIYIFKVLKQVHPDIGISSKAMGIMNSFINDIFEKLAQESSRLARYNKKPTITSREIQTAVRLVLPGELAKHAVSEGTKAVTKFTSS

SEQ ID NO: 7150 - DNA, 459 bp, Oryza sativa subsp. indica
  CDS (1)..(459)
atggcgcccaaggcagagaagaagccggcggagaagaagcccgcagccggcgaggagaagtcggcggagaaggcgccggcggggaagaagcccaaggcggagaagcggctgccggcgtcgaaggcgtcgtccaaggagggcggcgccggcgacaagaaggggaggaagaaggcgaagaagagcgtcgagacctacaagatctacatcttcaaggtcctgaagcaggtgcacccggacatcggaatctcctccaaggccatgtcgatcatgaactccttcatcaacgacatcttcgagaagctcgcgcaggaggccgcccgcctcgcccgctacaacaagaagcccaccatcacctcccgcgagatccagacctccgtccgcctcgtcctccccggcgagctcgccaagcacgccgtctccgagggcaccaaggcggtcaccaagttcaccagcaactag

SEQ ID NO: 7151 - protein, 152 aa, Oryza sativa subsp. indica
MAPKAEKKPAEKKPAAGEEKSAEKAPAGKKPKAEKRLPASKASSKEGGAGDKKGRKKAKKSVETYKIYIFKVLKQVHPDIGISSKAMSIMNSFINDIFEKLAQEAARLARYNKKPTITSREIQTSVRLVLPGELAKHAVSEGTKAVTKFTSN

SEQ ID NO: 7152 - DNA, 429 bp, Solanum lycopersicum
  CDS (1)..(429)
atggcaccaaaggcaggaaagaagccagctgagaagaaaccagttgaggagaagaaggctgaagaagttcctgctgagaaaaagccaaaggccggaaagaagctacctaaggatgccggcgccgacaagaagaagaagaagtcaaagaagagcgttgaaacctacaagatctatatcttcaaggttttgaagcaggtgcatcccgatatcggtatctccagcaagtctatgggtatcatgaacagctttattaatgacatttttgagaagcttgctcaggaatcatcaagattggctaggatcaacaagaagccaactattacttctagggaaattcagactgctgtcaggcttgtgctgcctggtgaattggcaaagcatgccgtttctgaaggaactaaggcagtcaccaagtttactagcaattag

SEQ ID NO: 7153 - protein, 142 aa, Solanum lycopersicum
MAPKAGKKPAEKKPVEEKKAEEVPAEKKPKAGKKLPKDAGADKKKKKSKKSVETYKIYIFKVLKQVHPDIGISSKSMGIMNSFINDIFEKLAQESSRLARINKKPTITSREIQTAVRLVLPGELAKHAVSEGTKAVTKFTSN

SEQ ID NO: 7154 - DNA, 372 bp, Tigriopus californicus
  CDS (1)..(372)
atgcctcccaaagtctctggaaaagctgccaagaaggccggcaaagcccaaaagaacatcaccaagggcgacaagaagaagaaccgcaagcgcaaggagtcctacgctatctacatctacaaggtgttgaagcaggtccatcccgacaccggcatttcctccaaagccatgtcaatcatgaactcgtttgtgaatgacatctttgagcgtattgcctccgaggcttctcgcttggctcactacaacaagcggtctaccatcacctcccgggagatccaaaccgccgtgcgtctcctcctgcccggagagttggccaagcatgccgtctctgagggaaccaaagccgttaccaaatacacctcctccaagtaa

SEQ ID NO: 7155 - protein, 123 aa, Tigriopus californicus
MPPKVSGKAAKKAGKAQKNITKGDKKKNRKRKESYAIYIYKVLKQVHPDTGISSKAMSIMNSFVNDIFERIASEASRLAHYNKRSTITSREIQTAVRLLLPGELAKHAVSEGTKAVTKYTSSK

SEQ ID NO: 7156 - DNA, 459 bp, Triticum aestivum
  CDS (1)..(459)
atggcgcccaaggccgagaagaagccggcggcgaagaagcccgcggaggaggagcccgcggcggagaaggcggagaagacgcccgccgggaagaagcccaaggcggagaagcggctgccggcggggaagtccgccgccaaggagggcggcgacaagaagggcaagaagaaggccaagaagagcgtggagacgtacaagatctacatcttcaaggtgctgaagcaggttcaccccgacatcggcatctcctccaaggccatgtccatcatgaactccttcatcaacgacatcttcgagaagctcgccggcgaggccgccaagctggcgcggtacaacaagaagcccaccatcacgtcccgggagatccagacctccgtccgcctcgtcctccccggcgagctcgccaagcacgccgtctccgagggcaccaaggccgtcaccaagttcacctcctcgtag

SEQ ID NO: 7157 - protein, 152 aa, Triticum aestivum
MAPKAEKKPAAKKPAEEEPAAEKAEKTPAGKKPKAEKRLPAGKSAAKEGGDKKGKKKAKKSVETYKIYIFKVLKQVHPDIGISSKAMSIMNSFINDIFEKLAGEAAKLARYNKKPTITSREIQTSVRLVLPGELAKHAVSEGTKAVTKFTSS

SEQ ID NO: 7158 - DNA, 471 bp, Chlamydomonas reinhardtii
  CDS (1)..(471)
atggctcccaagaaggacgagaagcccgcgacccgtgccgcgacccaggaggcgggcgtcgaggccactgcaaaggctgaggccaagcccaaggccgagaaggccgcgaagaaggccaagaaggagcctgccaagaaggccgccaaggagcccaagggcgatggcgagaagaaggacaagaagaagaagagcgccgtggagacctacaagctgtacatatacaaggtgctcaagcaggtgcaccccgacaccggcatcagcagcaaggccatgtccatcatgaacagcttcatcaacgacatctttgagaaggtggccaccgaggcctccaagctgagccgctacaacaagaagcccaccgtgacctctcgcgagatccagaccgccgtgcgcctggtgctgcccggtgagctggctaagcacgcggtgtcagagggcaccaaggccgtgaccaagttcacctcaggctaa

SEQ ID NO: 7159 - protein, 156 aa, Chlamydomonas reinhardtii
MAPKKDEKPATRAATQEAGVEATAKAEAKPKAEKAAKKAKKEPAKKAAKEPKGDGEKKDKKKKSAVETYKLYIYKVLKQVHPDTGISSKAMSIMNSFINDIFEKVATEASKLSRYNKKPTVTSREIQTAVRLVLPGELAKHAVSEGTKAVTKFTSG

SEQ ID NO: 7160 - DNA, 447 bp, Medicago truncatula
  CDS (1)..(447)
atggcgccaaaaggagagaagaagccagcagagaagaaaccagcagaggagaagaagtccaccgtcgctgagaaagctccggcggagaagaagccgaaggccggaaagaagcttccaaaggaaggtggttcagccgccggagagaagaagaagaagagaagcaagaagagcgttgaaacatacaagatctacatcttcaaggttctgaaacaagttcacccagacattggtatctcaagcaaagccatgggtatcatgaacagtttcatcaatgatatcttcgagaaactcactcaagaatcttccagacttgctcgttacaacaagaagccaacaatcacttcaagggaaattcagaccgcggtcaggcttgttctgcccggtgaattggccaagcatgatgtttctgagggtaccaaggctgtcactaagtttaccagttcttag

SEQ ID NO: 7161 - protein, 148 aa, Medicago truncatula
MAPKGEKKPAEKKPAEEKKSTVAEKAPAEKKPKAGKKLPKEGGSAAGEKKKKRSKKSVETYKIYIFKVLKQVHPDIGISSKAMGIMNSFINDIFEKLTQESSRLARYNKKPTITSREIQTAVRLVLPGELAKHDVSEGTKAVTKFTSS

SEQ ID NO: 7162 - DNA, 619 bp, Solanum lycopersicum
  CDS (78)..(500)
accaacaaactcaattttctcaattcaaatctctttttcactcacaacccattttcagattctcaatttcagttccaatggcaccaaaagcagagaaaaagccagcagagaagaagccagctgaggagaaaaaggctgaaaaaaccccaaaagcagggaagaagttaccaaaagaatcaggttcttctggtgctgataagaagaagaagaaatctaagaagagtattgaaacctacaagatctatatcttcaaggttctgaaacaagttcacccagatattggtatctcaagcaaatctatggggattatgaacagtttcatcaatgatatatttgagaaacttgctcaggagtcatcaagattggctaggattaacaagaagcctacaattacttcaagggaaattcagactgctgttaggcttgttttgcctggtgagttggctaaacatgctgtttctgaaggaactaaagctgttactaagtttactagttcttagatgtaatgggtgcttttcggttattggtaatttggagaatgtaaaggtagttgctttttgttgtacttgaatttaacagtaatgaatatgaatggatgtgtttttctccaaaaaaaaaa

SEQ ID NO: 7163 - protein, 140 aa, Solanum lycopersicum
MAPKAEKKPAEKKPAEEKKAEKTPKAGKKLPKESGSSGADKKKKKSKKSIETYKIYIFKVLKQVHPDIGISSKSMGIMNSFINDIFEKLAQESSRLARINKKPTITSREIQTAVRLVLPGELAKHAVSEGTKAVTKFTSS

SEQ ID NO: 7164 - DNA, 462 bp, Zea mays
  CDS (1)..(462)
atggcacccaaggcggacaagaagccggcggcgaagaagcctgcagaggaggagcccgcgacagagaaggcggagaaggctccggcggggaagaagcccaaggccgagaagcgcctcccggcgggcaagtccgccggtaaggagggcggcgagggcaagaaggggaaaaagaaagcgaagaagtccgtggagacctacaagatctacatcttcaaggtgctgaagcaggtgcaccccgacatcggcatctcgtccaaggccatgtccatcatgaactccttcatcaacgacatcttcgagaagctcgcggccgagtccgccaagctggcgcgctataacaagaagcccaccgtcacctcccgcgagatccagacctcggtgcgcctcgtcctccccggcgagcttgccaagcacgccgtctccgagggcaccaaggccgtcaccaagttcacctcttcttaa

SEQ ID NO: 7165 - protein, 153 aa, Zea mays
MAPKADKKPAAKKPAEEEPATEKAEKAPAGKKPKAEKRLPAGKSAGKEGGEGKKGKKKAKKSVETYKIYIFKVLKQVHPDIGISSKAMSIMNSFINDIFEKLAAESAKLARYNKKPTVTSREIQTSVRLVLPGELAKHAVSEGTKAVTKFTSS

SEQ ID NO: 7166 - DNA, 417 bp, Medicago truncatula
  CDS (1)..(417)
atgcctccaacaaaggcagagaagaaacccgcggagaagaagcccgcagagaaagctccagccgagaagaaaccaaaagcggagaagaagatctcaaaggaaggaagcagcgacaagaagaagaagagaacgaagaaaagcgttgaaacctacaagatatacatcttcaaggttctgaaacaggttcatcctgatatcggtgtttcaagcaaggctatgggaatcatgaacagtttcattaacgatatctttgagaaactcgctcaggaatcgtctcgtttggctaggtataacaagaagccgacgattacttctagggagattcaaactgctgttagattggttcttcctggagaattggctaaacatgctgtttctgaagggactaaggctgttaccaaattcaccagctcttga

SEQ ID NO: 7167 - protein, 138 aa, Medicago truncatula
MPPTKAEKKPAEKKPAEKAPAEKKPKAEKKISKEGSSDKKKKRTKKSVETYKIYIFKVLKQVHPDIGVSSKAMGIMNSFINDIFEKLAQESSRLARYNKKPTITSREIQTAVRLVLPGELAKHAVSEGTKAVTKFTSS

SEQ ID NO: 7168 - DNA, 462 bp, Oryza sativa subsp. indica
  CDS (1)..(462)
atggcgcccaaggcagagaagaagccggccgcgaagaagcccgcggaggaggagcccgcggcggagaaggccgagaaggccctcgcggggaagaagcccaaggcggagaagcgtctccccgccggcaaggccgagaagggcagcggcgaggggaggaaggcggggcggaagaaggcgaagaagagcgtcgagacctacaagatctacatcttcaaggtgctcaagcaggtccaccccgatatcggcatctcctccaaggccatgtccatcatgaactccttcatcaatgacatcttcgagaagctcgccggggagtccgccaagctcgcccgctacaacaagaagcccaccatcacctcccgcgagatccagacctccgtccgcctcgtcctccccggcgagctcgccaagcacgccgtctccgagggcaccaaggccgtcaccaaattcacctccgcttag

SEQ ID NO: 7169 - protein, 153 aa, Oryza sativa subsp. indica
MAPKAEKKPAAKKPAEEEPAAEKAEKALAGKKPKAEKRLPAGKAEKGSGEGRKAGRKKAKKSVETYKIYIFKVLKQVHPDIGISSKAMSIMNSFINDIFEKLAGESAKLARYNKKPTITSREIQTSVRLVLPGELAKHAVSEGTKAVTKFTSA

SEQ ID NO: 7170 - DNA, 372 bp, Tigriopus californicus
  CDS (1)..(372)
atgcctcccaaagtgtctggaaaagcagccaaaaaggctggcaaagcccaaaagaacatctcgaagggcgacaagaagaagaatcgcaagcgcaaagaatcttatgctatctacatctacaaggtgttgaaacaggtccatcccgacactggtatctcttccaaggcaatgagcatcatgaattcatttgtgaatgatatctttgagcgcattgcttcagaggcttcccgtttggctcattacaacaagcgctccaccatcacgtcccgggagatccagaccgctgtgagactcctcctgcccggagagttggccaaacacgctgtgtctgaggggaccaaggctgtcaccaagtacacttcttccaagtaa

SEQ ID NO: 7171 - protein, 123 aa, Tigriopus californicus
MPPKVSGKAAKKAGKAQKNISKGDKKKNRKRKESYAIYIYKVLKQVHPDTGISSKAMSIMNSFVNDIFERIASEASRLAHYNKRSTITSREIQTAVRLLLPGELAKHAVSEGTKAVTKYTSSK

SEQ ID NO: 7172 - DNA, 474 bp, Volvox carteri
  CDS (1)..(474)
atggccccgaagaaggaggagaagcccgcatcccaggccgctgaggctcctgaggttaaggctgaggctaagcccaaggctgtgaaggctcccaagaagaaggagaagaaggcgccggctaagaaggtcgccaaggagccttccgctggtggggaggatggcgacaagaagtccaaaaagaaggccaaggttgccaagagtgagacctacaagctgtacatctataaggtgctgaagcaggtgcaccctgacaccggcatcagctccaaggcgatgagcatcatgaacagcttcatcaacgacatatttgagaaggtcgccaccgaggcttcaaagcttagccgttacaacaagaagccgaccgtcacgtctcgcgaaatccagactgccgtgcgccttgtcctgccaggcgagctggccaagcacgctgtgtccgagggaaccaaggctgtcaccaagttcacgtccgcttaa

SEQ ID NO: 7173 - protein, 157 aa, Volvox carteri
MAPKKEEKPASQAAEAPEVKAEAKPKAVKAPKKKEKKAPAKKVAKEPSAGGEDGDKKSKKKAKVAKSETYKLYIYKVLKQVHPDTGISSKAMSIMNSFINDIFEKVATEASKLSRYNKKPTVTSREIQTAVRLVLPGELAKHAVSEGTKAVTKFTSA

SEQ ID NO: 7174 - DNA, 417 bp, Triticum aestivum
  CDS (1)..(417)
atggcccccaaggcggagaagaagccggtggcggagaaggccgagaagacgacggcggcgaagaagaccaaggccgagaagcggccgccggcgtccaaggagggcggcgacaagaaggggaagaagaagtcgaagaagagcgtggagacgtacaagatctacatcttcaaggtgctgaagcaggtgcaccccgacatcggcatctcctccaaggccatgtccatcatgaactccttcatcaacgacatcttcgagaagctcgccggcgagtccgccaagctcgcccgctacaacaagaagcccaccatcacctcccgggagatccagacctccgtccgcctcgtcctccccggcgagctcgccaagcacgccgtctccgagggcaccaaggccgtcaccaagttcacctccgcttag

SEQ ID NO: 7175 - protein, 138 aa, Triticum aestivum
MAPKAEKKPVAEKAEKTTAAKKTKAEKRPPASKEGGDKKGKKKSKKSVETYKIYIFKVLKQVHPDIGISSKAMSIMNSFINDIFEKLAGESAKLARYNKKPTITSREIQTSVRLVLPGELAKHAVSEGTKAVTKFTSA

SEQ ID NO: 7176 - DNA, 468 bp, Volvox carteri
  CDS (1)..(468)
atggccccaaagaccaaggaggagaagcccgcatcggaggctgtcgagcccaaggccgaggctaagcccaaggctgagaaggctcccaagaagaaggagaagaaggcgccggctaagaagtccgccaaggagcccgctgccggcgatgccgctgagggggacaagaagaagaagaaggccaaggtcgccaagagcgagacctacaagctttacatttacaaggtgttgaagcaggtgcaccccgataccggcatcagctcgaaggccatgtcgattatgaacagcttcatcaacgacatctttgagaaggttgccaccgaggcctccaagctgagccgctacaacaagaagcccaccgtgacgtcgcgcgaaattcagactgctgtgcgcctggttcttccgggcgagctggccaagcacgccgtgtccgagggcaccaaggctgtcaccaagttcacgtcggcctaa

SEQ ID NO: 7177 - protein, 155 aa, Volvox carteri
MAPKTKEEKPASEAVEPKAEAKPKAEKAPKKKEKKAPAKKSAKEPAAGDAAEGDKKKKKAKVAKSETYKLYIYKVLKQVHPDTGISSKAMSIMNSFINDIFEKVATEASKLSRYNKKPTVTSREIQTAVRLVLPGELAKHAVSEGTKAVTKFTSA

SEQ ID NO: 7178 - DNA, 408 bp, Triticum aestivum
  CDS (1)..(408)
atggcgccgaaggctgccgagaagaagccggtggagaagacccccgcggtcaagaagcccaaggcggagaagaaggtgccgacgtccaaggagggcggcgagaagaaggggaagaagaagtccaagaagagcatggagacgtacaagatctacatcttcaaggtgctgaagcaggtgcacccggacatcggcatctcctccaaggccatgtccatcacgaactccttcatcaacgacatcttcgagaagctcgccggcgagtccgccaagctggcgcggtacaacaagaagcccaccatcacatcccgggagatccagacctccgtccgcctcgtcctcccaggcgagctcgccaagcacgccgtctccgagggcaccaaggccgtcaccaagttcacctccgcctga

SEQ ID NO: 7179 - protein, 135 aa, Triticum aestivum
MAPKAAEKKPVEKTPAVKKPKAEKKVPTSKEGGEKKGKKKSKKSMETYKIYIFKVLKQVHPDIGISSKAMSITNSFINDIFEKLAGESAKLARYNKKPTITSREIQTSVRLVLPGELAKHAVSEGTKAVTKFTSA

SEQ ID NO: 7180 - DNA, 411 bp, Triticum aestivum
  CDS (1)..(411)
atggcgcccaaggccgagaagaagcccgccgcggagaagaagccggtggagacggagaagaagcccaaggccgagaagcgcgtgcccggcaaggacggcggcgccgacaagaagaagaagaaggccaagaagagcgtcgagacgtacaagatctacatcttcaaggtgctcaagcaggtgcaccccgacatcggcatctcctccaaggccatgtccatcatgaactccttcatcaacgacatcttcgagaagctcgccggcgagtcggccaagctggcgcgctacaacaagaagcccaccatcacctcccgggagatccagaccgccgtgcgcctcgtcctccccggcgagctcgccaagcacgccgtctccgagggcaccaaggccgtcaccaagttcacctcctcctag

SEQ ID NO: 7181 - protein, 136 aa, Triticum aestivum
MAPKAEKKPAAEKKPVETEKKPKAEKRVPGKDGGADKKKKKAKKSVETYKIYIFKVLKQVHPDIGISSKAMSIMNSFINDIFEKLAGESAKLARYNKKPTITSREIQTAVRLVLPGELAKHAVSEGTKAVTKFTSS

SEQ ID NO: 7182 - DNA, 462 bp, Oryza sativa subsp. indica
  CDS (1)..(462)
atggcgcccaaggcggagaagaagccggccgcgaagaagcccgcggaggaggagcccgcggcggagaaggccgagaaggcccccgcggggaagaagcccaaggcggagaagcgtctccccgccggcaagggcgagaagggcagcggcgaggggaagaaggcggggcggaagaaggggaagaagagcgtcgagacctacaagatctacatcttcaaggtgctcaagcaggtccaccccgacatcggcatctcctccaaggccatgtccatcatgaactccttcatcaacgacatcttcgagaagctcgccggagagtccgccaagctcgcccgctacaacaagaagcccaccatcacctcccgcgagatccagaccgccgtccgcctcgtcctccccggcgagcttgccaagcacgccgtctccgagggcaccaaggccgtcaccaagttcacttcctcttag

SEQ ID NO: 7183 - protein, 153 aa, Oryza sativa subsp. indica
MAPKAEKKPAAKKPAEEEPAAEKAEKAPAGKKPKAEKRLPAGKGEKGSGEGKKAGRKKGKKSVETYKIYIFKVLKQVHPDIGISSKAMSIMNSFINDIFEKLAGESAKLARYNKKPTITSREIQTAVRLVLPGELAKHAVSEGTKAVTKFTSS

SEQ ID NO: 7184 - DNA, 366 bp, Triticum aestivum
  CDS (1)..(366)
atggcacccaaggccgagaagaagcccaaggtggagaagcgcgtgcccgggaaggagggcgagactagcaagaagaaggccaagaagagcaacgagacgtacaagatctacatcttcaaggtgctcaagcagattgacccgaacatgggtatctcctccaaatcaatgtccatcatcaactccatcatcaacgacatcttcgagaagctcgccggagagtcggcaaagctcgcacgctacaacaagaagcccaccatcacctctcgggagatccagactgccgtgcgccttgtctttccaggcgagcttgccaagcacgccgtctccgagggaaccaaggccgttaccagattcaccgtgtattag

SEQ ID NO: 7185 - protein, 121 aa, Triticum aestivum
MAPKAEKKPKVEKRVPGKEGETSKKKAKKSNETYKIYIFKVLKQIDPNMGISSKSMSIINSIINDIFEKLAGESAKLARYNKKPTITSREIQTAVRLVFPGELAKHAVSEGTKAVTRFTVY

SEQ ID NO: 7186 - DNA, 372 bp, Psammechinus miliaris
  CDS (1)..(372)
atggctccaacaggtcaggtcgctaagaaaggctccaagaaagcagtcaaaccacctcgtgctagcggtggcaagaagaggcataggaaaaggaaggagagctacggtatctacatctacaaagtcctcaagcaggttcaccctgacactggtgtctccagccgggccatgacaatcatgaacagctttgtcaacgatatcttcgagcggatcgccggcgaagcctcccgtctcacccagtacaacaagaagtcaaccatcagtagccgggagattcagaccgccgtgcgccttcttctcccaggagagttggccaagcacgccgtgagtgaggggaccaaagcagtgaccaagtacaccaccgccaagtaa

SEQ ID NO: 7187 - protein, 123 aa, Psammechinus miliaris
MAPTGQVAKKGSKKAVKPPRASGGKKRHRKRKESYGIYIYKVLKQVHPDTGVSSRAMTIMNSFVNDIFERIAGEASRLTQYNKKSTISSREIQTAVRLLLPGELAKHAVSEGTKAVTKYTTAK

SEQ ID NO: 7188 - DNA, 372 bp, Psammechinus miliaris
  CDS (1)..(372)
atggctccaacagctcaagttgctaagaaaggctccaagaaggcagtcaaggcccctcggcccagcggtggcaagaagaggaacaggaaaaggaaggagagttatggaatctacatctacaaagtcctcaagcaggttcatccagataccggcatctccagtcgggccatgatcatcatgaacagcttcgtcaacgacatcttcgagcgaattgccggcgaatcttcccgcctcgctcagtacaacaaaaagtcaaccatcagcagtcgcgagattcagaccgccgtccgcctcattctccccggagagctggcaaagcacgctgtgagcgagggtaccaaggcagtgacgaaatacactacctccaagtag

SEQ ID NO: 7189 - protein, 123 aa, Psammechinus miliaris
MAPTAQVAKKGSKKAVKAPRPSGGKKRNRKRKESYGIYIYKVLKQVHPDTGISSRAMIIMNSFVNDIFERIAGESSRLAQYNKKSTISSREIQTAVRLILPGELAKHAVSEGTKAVTKYTTSK

SEQ ID NO: 7190 - DNA, 375 bp, Psammechinus miliaris
  CDS (1)..(375)
atgcctgccaaacagaccagcggaaagggagcaaagaaggccggtaaggccaagggacgcccagccggcgccagcaagacccgtcgccgtaagcgcaaggaaagctacggaatctacatctacaaggttctgaagcaggtccaccccgacactggcatctccagcaaagccatgtccatcatgaacagcttcgtcaacgatgtcttcgagcgcatcgccggtgaggcttcccgtcttgcccactacaacaagaagtccaccatcagcagccgtgaggtccagaccgctgtcagacttctcctccccggtgaactcgccaagcacgccgtctctgagggcaccaaggccgtcaccaagtacaccacctccaagtaa

SEQ ID NO: 7191 - protein, 124 aa, Psammechinus miliaris
MPAKQTSGKGAKKAGKAKGRPAGASKTRRRKRKESYGIYIYKVLKQVHPDTGISSKAMSIMNSFVNDVFERIAGEASRLAHYNKKSTISSREVQTAVRLLLPGELAKHAVSEGTKAVTKYTTSK

SEQ ID NO: 7192 - DNA, 375 bp, Psammechinus miliaris
  CDS (1)..(375)
atgcctgccaagcaaaccagtggaaagggagccaagaaggccggtaaggccaagggacgcccaagtggcgcctccaagacccgtcgccgtaagcgcaaggaaagctacggaatctacatctacaaggttctgaagcaggtccaccccgacactggcatctccagcaaagccatgtccatcatgaacagcttcgtcaacgatgtcttcgagcgcatcgccggtgaggcttcccgtcttagccagtacaacaagaagtccaccatcagcagccgtgaggtccagaccgctgtcagacttctcctcccaggagaactcgccaagcacgccgtctctgagggcaccaaggctgtcaccaagtacaccacctccaagtaa

SEQ ID NO: 7193 - protein, 124 aa, Psammechinus miliaris
MPAKQTSGKGAKKAGKAKGRPSGASKTRRRKRKESYGIYIYKVLKQVHPDTGISSKAMSIMNSFVNDVFERIAGEASRLSQYNKKSTISSREVQTAVRLLLPGELAKHAVSEGTKAVTKYTTSK

SEQ ID NO: 7194 - DNA, 378 bp, Acropora formosa
  CDS (1)..(378)
atggcgcccaaggtacgtgccgctaagaaaggggaaaagagagttggcaaggccaagtccgggacggccgagactgccaagaggagacggggaaagagaaaggaaagctatgcgatctacatatataaagtgttgaagcaggttcatccggacacgggaatttccagcaaagccatgggtatcatgaattctttcgtgaacgatattttcgaacgcatagccgtggagtcttcacgtctttcgctttacaacaagaaggccaccattagttcaagagagatccaaacagcgataagacttttgcttcccggtgaacttgcaaaacacgctgtcagcgaggggacgaaggccgtgaccaagtataccagcagcaagtga

SEQ ID NO: 7195 - protein, 125 aa, Acropora formosa
MAPKVRAAKKGEKRVGKAKSGTAETAKRRRGKRKESYAIYIYKVLKQVHPDTGISSKAMGIMNSFVNDIFERIAVESSRLSLYNKKATISSREIQTAIRLLLPGELAKHAVSEGTKAVTKYTSSK

SEQ ID NO: 7196 - DNA, 432 bp, Agaricus bisporus
  CDS (1)..(432)
atggcacccaaacctgcttccactgctggaaaggctcctgcttccacagcctcgaaagcccctgtaaagtctgacgcagccaaaactgccagcaagagcaaggtatcgagtggtgctgatggtgaaaagaagaagcgtaagaagactcgcaaggagacttacagctcgtatatctacaaagtgcttaaacaagttcaccctgataccggtatctccaacaaggctatggctattctcaactctttcgtcaatgatatctttgaacgcattgctaccgaagcttccaagcttgcttcctactccaaaaagtcgaccatttcttctcgtgagatccaaacaagtgttcgtctcattctccctggtgaacttgccaagcatgctatctccgaaggtaccaaatctgtcaccaagttttcttcgggcggcaaatag

SEQ ID NO: 7197 - protein, 143 aa, Agaricus bisporus
MAPKPASTAGKAPASTASKAPVKSDAAKTASKSKVSSGADGEKKKRKKTRKETYSSYIYKVLKQVHPDTGISNKAMAILNSFVNDIFERIATEASKLASYSKKSTISSREIQTSVRLILPGELAKHAISEGTKSVTKFSSGGK

SEQ ID NO: 7198 - DNA, 438 bp, Capsicum annuum
  CDS (1)..(438)
atggcaccaaaggcagcagcagggaaaaagccagctgagaagaagccagtagaggagaagaaggccgaggaagttcctgctgagaagaagcccaaagccgggaagaagctcccaaaggacgctggcaggcccgacaagaagaagaagagggcaaagaagagcattgaaacctacaagatctacatcttcaaggtgctgaagcaggtgcatccagatatcggcatttccagcaaatcaatgggtataatgaacagtttcattaatgatatatttgagaagcttgctcaggaatcatctagattggctaggtacaacaagaagcctactatcacttcaagggaaatccagactgctgtgaggcttgtgttgcctggtgaattggctaagcacgctgtttctgaaggaaccaaggcagttaccaagtttactagctcttag

SEQ ID NO: 7199 - protein, 145 aa, Capsicum annuum
MAPKAAAGKKPAEKKPVEEKKAEEVPAEKKPKAGKKLPKDAGRPDKKKKRAKKSIETYKIYIFKVLKQVHPDIGISSKSMGIMNSFINDIFEKLAQESSRLARYNKKPTITSREIQTAVRLVLPGELAKHAVSEGTKAVTKFTSS

SEQ ID NO: 7200 - DNA, 378 bp, Chironomus thummi thummi
  CDS (1)..(378)
atggcaccaccaaaaaccagcggaaaagctgcaaagaaagccggaaaggcccaaaaagcaatctctaaggatgacaagaaaaagagacgtcataagcgtaaggaatcatacgcaatctacatcttcaaagtcttgaaacaagtccatccagacactggtgtttcctcaaaggcaatgagcatcatgaacagtttcgtcaatgatatcttcgaacgtattgcagctgaagcctcaagattggctcactacaacaaacgctcaacaatcacaagtcgcgagatccaaactgctgttcgtttactcttacctggtgaattggctaagcacgctgtctcagaaggaacaaaagccgtcacaaaatacacatcatccaagtaa

SEQ ID NO: 7201 - protein, 125 aa, Chironomus thummi thummi
MAPPKTSGKAAKKAGKAQKAISKDDKKKRRHKRKESYAIYIFKVLKQVHPDTGVSSKAMSIMNSFVNDIFERIAAEASRLAHYNKRSTITSREIQTAVRLLLPGELAKHAVSEGTKAVTKYTSSK

SEQ ID NO: 7202 - DNA, 372 bp, Drosophila yakuba
  CDS (1)..(372)
atgccgccgaaaactagtggaaaggcagccaagaaggctggcaaggctcagaagaatatcaccaagaccgacaagaaaaagaagcgcaggaggaaggagagctatgccatctacatttacaaggttctcaagcaggtccatcctgacaccggcatttcatctaaggcgatgagcatcatgaacagctttgtaaatgatattttcgagcgcattgctgccgaggcgtctcgtctggctcactacaacaagcgctcgaccatcaccagtcgagaaatccaaacggctgttcgcctgcttctgccgggagagttggccaagcatgctgtcagtgagggaaccaaggctgtcaccaagtacaccagctccaaataa

SEQ ID NO: 7203 - protein, 123 aa, Drosophila yakuba
MPPKTSGKAAKKAGKAQKNITKTDKKKKRRRKESYAIYIYKVLKQVHPDTGISSKAMSIMNSFVNDIFERIAAEASRLAHYNKRSTITSREIQTAVRLLLPGELAKHAVSEGTKAVTKYTSSK

SEQ ID NO: 7204 - DNA, 444 bp, Gossypium hirsutum
  CDS (1)..(444)
atggcaccaaaagctgaaaaaaagccagccgagaagaagcctgcggaggagaagaaagccgtagctgagaaagccccggcagagaagaagcctaaggctgggaaaaagcttcccaaggaaggcggagcggctgccggagacaagaagaagaagagagttaagaagagcgtcgagacctacaagatctacatcttcaaggtcctgaagcaagttcaccctgacatcgggatctctagcaaagctatggggatcatgaacagtttcatcaatgatatcttcgagaagcttgctcaagaagcctctaggctcgcgaggtacaacaagaaacccaccatcacttccagggaaattcagaccgctgttaggcttgtacttcctggtgagcttgccaagcacgccgtttctgaaggtaccaaggccgtgaccaagtttacttcatcttga

SEQ ID NO: 7205 - protein, 147 aa, Gossypium hirsutum
MAPKAEKKPAEKKPAEEKKAVAEKAPAEKKPKAGKKLPKEGGAAAGDKKKKRVKKSVETYKIYIFKVLKQVHPDIGISSKAMGIMNSFINDIFEKLAQEASRLARYNKKPTITSREIQTAVRLVLPGELAKHAVSEGTKAVTKFTSS

SEQ ID NO: 7206 - DNA, 372 bp, Holothuria tubulosa
  CDS (1)..(372)
atggcacctaaagcaccaggaaagggcgctaagaaagccgcaaagtcaaaggcaccccgtgccccaggggacaggaagaggaagaggaccaggagagagtcctacagcatctacatctacaaagtgatgaagcaggttcatcccgacactggtatctcaagccgtgctatgtctatcatgaacagctttgtcaacgacatcttcgagcgcatcgctgccgaggcatcccgtttggcccactacaacaggaagtccaccatcaccagtcgggaggtccagaccgccgtcagactcttgctgccaggtgaactcgccaaacacgccgtctctgagggcaccaaggccgtcaccaagtacaccacttccaagtaa

SEQ ID NO: 7207 - protein, 123 aa, Holothuria tubulosa
MAPKAPGKGAKKAAKSKAPRAPGDRKRKRTRRESYSIYIYKVMKQVHPDTGISSRAMSIMNSFVNDIFERIAAEASRLAHYNRKSTITSREVQTAVRLLLPGELAKHAVSEGTKAVTKYTTSK

SEQ ID NO: 7208 - DNA, 372 bp, Platynereis dumerilii
  CDS (1)..(372)
atgccacccaaagttgcatccaagggagccaagaaggccgccagcaaggccaaggccgcaaggtctggtgagaagaagaagaagaggaggaggagggaatcctactccatctacatctacaaagtcttgaagcaagtgcaccccgacactggaatcagctccaaggccatgtccatcatgaactcctttgtcaacgacatcttcgagcgcatcgctgctgaagcttcccgtctggcccactacaacaaaaggagcaccatcacctccagagagatccagactgctgtccgtcttctcttgcccggagagttggccaagcacgccgtgtccgagggaaccaaggctgtgaccaagtacaccagctccaagtaa

SEQ ID NO: 7209 - protein, 123 aa, Platynereis dumerilii
MPPKVASKGAKKAASKAKAARSGEKKKKRRRRESYSIYIYKVLKQVHPDTGISSKAMSIMNSFVNDIFERIAAEASRLAHYNKRSTITSREIQTAVRLLLPGELAKHAVSEGTKAVTKYTSSK

SEQ ID NO: 7210 - DNA, 411 bp, Rosellinia necatrix
  CDS (1)..(411)
atgcctcccaaagctgccgacaagaagcccgccgctaaggctcctgttgcctccaaggcacccgagaagaaggacgctggaaagaagaccgcctccactggcgagaagaagaagcgtaccaaggcgcgtcgggagacatactcttcttacatttacaaggtcctcaagcaggtccaccccgatactggtatttccaaccgcgccatgagcatcctgaactctttcgtcaacgatattttcgagcgtgttgccacagaagcctccaagctggccgcatacaacaagaagagcaccatttcttcgcgtgaaatccagacctccgtccgcctcatcctccccggcgaacttgccaagcatgctgtctccgaaggtaccaaggccgtcaccaagtactcttcatcaacgaaataa

SEQ ID NO: 7211 - protein, 136 aa, Rosellinia necatrix
MPPKAADKKPAAKAPVASKAPEKKDAGKKTASTGEKKKRTKARRETYSSYIYKVLKQVHPDTGISNRAMSILNSFVNDIFERVATEASKLAAYNKKSTISSREIQTSVRLILPGELAKHAVSEGTKAVTKYSSSTK

SEQ ID NO: 7212 - DNA, 441 bp, Nicotiana tabacum
  CDS (1)..(441)
atggcaccaagggcggataagaaacccgccgagaagaagccgggcgctgagaaaaccccggtcgccgagaaagcaccagcagagaagaagcccagggccggaaagaagctcccaagggacgccggtgctgccggagacaagaagaagaagagggcggagatgtctgttgagacctacaagatctacatcttcagggttctgaagcatgttcatcctgatatcggtatttcgagcaaagctatgggtatcatgaacagtttcattaacgatatctttgagaagcttgctcgggaatcttctagacttgctgggtacaacaagaagcctactatctcttctcgggagattcagactgctgtgagacttgtacttcctggtgaactggctaagcatgctgtctctgaaggaactaaggctgttaccaaattcactagctcttga

SEQ ID NO: 7213 - protein, 146 aa, Nicotiana tabacum
MAPRADKKPAEKKPGAEKTPVAEKAPAEKKPRAGKKLPRDAGAAGDKKKKRAEMSVETYKIYIFRVLKHVHPDIGISSKAMGIMNSFINDIFEKLARESSRLAGYNKKPTISSREIQTAVRLVLPGELAKHAVSEGTKAVTKFTSS

SEQ ID NO: 7214 - DNA, 372 bp, Urechis caupo
  CDS (1)..(372)
atgccacctaaagccgcgtccaagggagctaagaaggccgccagcaaggcaaaggccgcccgttctaccgataagaagaagaggaggaggaggagggagtcttactccatctacatctacaaagtgctgaagcaggtccaccccgacactggcatcagcagcaaggccatgagcatcatgaactcgttcgtgaacgacatcttcgagcgcatcgccgccgaggcttctcgtctggcccactacaaccgccgttccacaatcaccagccgggaaatccagaccgctgtcaggcttctgctgcccggtgagctggccaagcacgccgtcagtgagggaaccaaggccgtcacgaaatacactcagtccaagtaa

SEQ ID NO: 7215 - protein, 123 aa, Urechis caupo
MPPKAASKGAKKAASKAKAARSTDKKKRRRRRESYSIYIYKVLKQVHPDTGISSKAMSIMNSFVNDIFERIAAEASRLAHYNRRSTITSREIQTAVRLLLPGELAKHAVSEGTKAVTKYTQSK

SEQ ID NO: 7216 - DNA, 435 bp, Brassica napus
  CDS (1)..(435)
atggccaaggcagacaagaaaccagcagagaagaaaccggcggcagaaaccaacaccgccgcagcagcagcggagaagaagccaaaggctggaaagaagcttccgaaagatccctccgccgtcgccggagacaagaagaagaagcggtccaagaagagcgtcgagacgtacaagatctacatcttcaaggtgctgaagcaggttcatcccgacgtcgggatctcgagcaaagccatggggatcatgaacagcttcatcaacgacatcttcgagaagcttgccggtgagtcttccaagctcgcgaggtacaacaaaaagccgacgattacttccagggagattcagacggcggtgagattagtcttgcctggagagttggcgaaacacgccgtctcggaagggaccaaggcggttaccaagttcacgagttcttag

SEQ ID NO: 7217 - protein, 144 aa, Brassica napus
MAKADKKPAEKKPAAETNTAAAAAEKKPKAGKKLPKDPSAVAGDKKKKRSKKSVETYKIYIFKVLKQVHPDVGISSKAMGIMNSFINDIFEKLAGESSKLARYNKKPTITSREIQTAVRLVLPGELAKHAVSEGTKAVTKFTSS

SEQ ID NO: 7218 - DNA, 426 bp, Linum usitatissimum
  CDS (1)..(426)
atggcacccaaagcagagaagaagccagcggagaagaaacccgccgagaaggctcccgttgccgagaagaagcccagagccgagaagaagctccccaaagaagccggagccgctggcgctgacaagaagaagaagaagaacaagaagagcgtcgagacttacaagatctacatcttcaaggttctgaagcaggtccacccggacatcgggatctccagcaaggccatggggatcatgaacagcttcatcaacgacatcttcgagaagctagctgctgagtcctccaggcttgcgaggtacaacaagaagccgacgattacttccagggagatccagactgctgtgaggcttgttcctccaggggagttggcgaagcatgctgtttcggaaggtaccaaggctgtgaccaagttcaccagctcttag

SEQ ID NO: 7219 - protein, 141 aa, Linum usitatissimum
MAPKAEKKPAEKKPAEKAPVAEKKPRAEKKLPKEAGAAGADKKKKKNKKSVETYKIYIFKVLKQVHPDIGISSKAMGIMNSFINDIFEKLAAESSRLARYNKKPTITSREIQTAVRLVPPGELAKHAVSEGTKAVTKFTSS

SEQ ID NO: 7220 - DNA, 447 bp, Linum usitatissimum
  CDS (1)..(447)
atggcgcccaaagcagagaagaagccagcggagaagaagcccgcagaggagaagaaaaccgtcgccgagaaagctcccgccgagaagaaacccaaggccgggaagaagctccccaaagaagccggcgcagctgctgcaggcgacaagaagaagaagaagtcaaagaagagcgtcgagacctacaagatctacatcttcaaggttctcaagcaggtccatcccgatatcggtatctccagcaaggctatggggatcatgaactccttcatcaacgacattttcgagaaactagctcaggagtcctccagactcgctcgctacaacaagaagccgacgattacctccagggagatccagactgccgtccgattggtgcttccgggagaattggccaaacatgccgtgtctgaagggaccaaggctgttaccaagttcaccagctcttga

SEQ ID NO: 7221 - protein, 148 aa, Linum usitatissimum
MAPKAEKKPAEKKPAEEKKTVAEKAPAEKKPKAGKKLPKEAGAAAAGDKKKKKSKKSVETYKIYIFKVLKQVHPDIGISSKAMGIMNSFINDIFEKLAQESSRLARYNKKPTITSREIQTAVRLVLPGELAKHAVSEGTKAVTKFTSS

SEQ ID NO: 7222 - DNA, 423 bp, Linum usitatissimum
  CDS (1)..(423)
atggctcccaaggcagacaaaaagccagcagagaagaagccggcggagaagtctccggccgcagcagagaagaagcctcgcgccgagaagaagctgccgaaagacggaggctctatcgacaagaagaagaagaaggccaagaagagcgttgagacgtacaagatctacatcttcaaggtcctgaagcaggtccaccctgacatcgggatctccagcaaggccatggggattatgaacagcttcatcaacgatatcttcgagaagctcgcccaggagtcttccaggcttgcgaggtacaacaagaagcccaccatcacgtcgagggagatccagaccgctgtcaggcttgttcttccaggagagctcgctaagcacgctgtctccgaaggaacgaaggctgttaccaagtttactagctcttag

SEQ ID NO: 7223 - protein, 140 aa, Linum usitatissimum
MAPKADKKPAEKKPAEKSPAAAEKKPRAEKKLPKDGGSIDKKKKKAKKSVETYKIYIFKVLKQVHPDIGISSKAMGIMNSFINDIFEKLAQESSRLARYNKKPTITSREIQTAVRLVLPGELAKHAVSEGTKAVTKFTSS

SEQ ID NO: 7224 - DNA, 408 bp, Hordeum vulgare
  CDS (1)..(408)
atgcctccaaaatctgctgaaaaaaaaccatctgcttcgaaggcgccagctaaagcacctgcgtcaaaagaggctggaaaaaagacagcttcttctggtgacaaaaagaaacgaacaaaaaccaggaaagaaacatactcttcatatatttacaaagtactcaaacaagttcacccggatacgggtatttcaaacagggctatgtctatattaaattcattcgtcaacgatatttttgagagggtcgcaactgaggcatccaaacttgctgcatacaacaagaaatcaaccatttcttcaagggagatacaaacatctgtgcgattaatccttcccggtgaacttgcaaaacatgccgtctcggaaggaacaaaggctgtaacgaagtacagctcatcaacaaagtga

SEQ ID NO: 7225 - protein, 135 aa, Hordeum vulgare
MPPKSAEKKPSASKAPAKAPASKEAGKKTASSGDKKKRTKTRKETYSSYIYKVLKQVHPDTGISNRAMSILNSFVNDIFERVATEASKLAAYNKKSTISSREIQTSVRLILPGELAKHAVSEGTKAVTKYSSSTK

SEQ ID NO: 7226 - DNA, 453 bp, Hordeum vulgare
  CDS (1)..(453)
atggcgcccaaggccgagaagaagccggcggcgaagaagccggtggaggaggagcccgcggcggagaaggccgagaagacgaccgccgggaagaagcccaaggccgagaagcggctgccggcgggcaagtcggcggccaaggagggcggcaaggccaagaagaaggccaagaagagcgtggagacgtacaagatctacatcttcatggtgctgaaacaggtgcaccccgacatcggcatctcctccaaggccatgtccatcatgaactccttcatcaacgacatcttcgagaagctcgccggcgaggccgccaagctcgcccgctacaacaagaagcccaccatcacgtcccgggagatccagacctccgtccgcctcgtcctccccggcgagctcgccaagcacgccgtctccgagggcaccaaggccgtcaccaagttcacctcttcctag

SEQ ID NO: 7227 - protein, 150 aa, Hordeum vulgare
MAPKAEKKPAAKKPVEEEPAAEKAEKTTAGKKPKAEKRLPAGKSAAKEGGKAKKKAKKSVETYKIYIFMVLKQVHPDIGISSKAMSIMNSFINDIFEKLAGEAAKLARYNKKPTITSREIQTSVRLVLPGELAKHAVSEGTKAVTKFTSS

SEQ ID NO: 7228 - DNA, 411 bp, Hordeum vulgare
  CDS (1)..(411)
atggcccccaaggcagccgagaagaagccggtggagaagaccccggcgggcaagaagcccaaggcggagaagaaggtgccggcgtccaaggagggcggcggcgacaagaagggcaagaagaagtccaagaagagcgtggagacgtacaagatctacatcttcaaggtgctcaagcaggtgcaccccgacatcggcatctcctccaaggccatgtccatcatgaactccttcatcaacgacatctttgagaagctcgccggcgagtcggccaagctggcgcggtacaacaagaagcccaccatcacgtcccgggagatccagacctccgtgcgcctcgtcctccctggcgagctcgccaagcacgccgtctccgagggcaccaaggccgtcaccaagttcacctctgcctaa

SEQ ID NO: 7229 - protein, 136 aa, Hordeum vulgare
MAPKAAEKKPVEKTPAGKKPKAEKKVPASKEGGGDKKGKKKSKKSVETYKIYIFKVLKQVHPDIGISSKAMSIMNSFINDIFEKLAGESAKLARYNKKPTITSREIQTSVRLVLPGELAKHAVSEGTKAVTKFTSA

SEQ ID NO: 7230 - DNA, 429 bp, Helianthus annuus
  CDS (1)..(429)
atggcgccaaaggcagcagaaaagaagccagccgagaagaaaccagcagctgaaaaagccccagcggagaagaagccgaaagccggaaagaagctcccaaaggaagccggggccggagcggctgacaagaagaagaagaggagcaagaagagtgtggagacatacaagatatacatatttaaggtgttgaagcaggtgcatccggatatcgggatatcgagcaaggcgatggggattatgaacagttttattaatgatatttttgagaagcttgctcaggagagttcgaggcttgcgaggtataataagaagccgacgattacgtctagggagattcagactgctgtgaggttggtgttgcctggtgagttggcgaaacatgcggtttcggaggggacaaaggcggttactaagtttactagctcttag

SEQ ID NO: 7231 - protein, 142 aa, Helianthus annuus
MAPKAAEKKPAEKKPAAEKAPAEKKPKAGKKLPKEAGAGAADKKKKRSKKSVETYKIYIFKVLKQVHPDIGISSKAMGIMNSFINDIFEKLAQESSRLARYNKKPTITSREIQTAVRLVLPGELAKHAVSEGTKAVTKFTSS

SEQ ID NO: 7232 - DNA, 426 bp, Brassica napus
  CDS (1)..(426)
atggcgcccaaggcagcagagaagaagcccgcggagaagaagacggctgagaaagcaccggcggagaagaagccaaaggccggtaagaagctcccgaaggatccctccgccgtcgccggagacaagaagaagaagcggtccaagaagagcgtcgagacgtacaagatctacatcttcaaggtgctgaagcaggtccacccagacatcgggatctcgagcaaagccatggggatcatgaacagcttcatcaacgacatcttcgagaagctcgccggcgagtcttccaagctcgcgaggtacaacaagaagcccacgatcacttcccgggagattcagacggctgtgagactcgtcttgcctggtgagctggcgaaacacgctgtttccgaagggaccaaggcggtgactaagttcacgagctcctga

SEQ ID NO: 7233 - protein, 141 aa, Brassica napus
MAPKAAEKKPAEKKTAEKAPAEKKPKAGKKLPKDPSAVAGDKKKKRSKKSVETYKIYIFKVLKQVHPDIGISSKAMGIMNSFINDIFEKLAGESSKLARYNKKPTITSREIQTAVRLVLPGELAKHAVSEGTKAVTKFTSS

SEQ ID NO: 7234 - DNA, 450 bp, Brassica napus
  CDS (1)..(450)
atggcaccaaaggcaggaaagaagccagcagagaagaaacccgccgccgccgccgagaagccagccgaggaggtagccgagaaagccccggcggagaagaaaccaaaggccgggaagaagctgccgaaggaggccggggctatcgacaagaagaagaagcggaacaagaagagcatcgagacgtacaagatctacatcttcaaggtgctgaagcaggtccaccctgacatcgggatctcgagcaaggccatggggatcatgaacagcttcatcaacgacatcttcgagaagctcgcccaggaggcctcgaagctcgctaggtacaacaagaagcccacgattacttcgagggagatccagactgctgttaggcttgttctccccggtgagctcgcgaagcacgctgtgtctgaaggaaccaaggccgtgactaagtttactagctcttga

SEQ ID NO: 7235 - protein, 149 aa, Brassica napus
MAPKAGKKPAEKKPAAAAEKPAEEVAEKAPAEKKPKAGKKLPKEAGAIDKKKKRNKKSIETYKIYIFKVLKQVHPDIGISSKAMGIMNSFINDIFEKLAQEASKLARYNKKPTITSREIQTAVRLVLPGELAKHAVSEGTKAVTKFTSS

SEQ ID NO: 7236 - DNA, 456 bp, Brassica napus
  CDS (1)..(456)
atggcaccaaaggcaggaaagaaaccagcagagaagaaacccgccgccgcagagaagccagtggaggaagagaaggtagcggagaaagcaccagctgagaagaagcccaaggccggaaagaagctacctaaggaagccatcggcgcgaccgacaagaagaagaagcgcagcaagaagaacatcgagacgtacaagatatacatcttcaaggttcttaagcaagtccacccagacatcggaatctcgagtaaggccatggggatcatgaacagcttcatcaacgacatcttcgagaagcttgctcaggaagcgtcgaaactcgcaaggtacaacaagaagccgaccattacttctcgcgagatccagacagctgttagacttgttcttcctggtgagcttgctaagcacgccgtgtctgaaggaaccaaggctgtgactaagtttactagctcttga

SEQ ID NO: 7237 - protein, 151 aa, Brassica napus
MAPKAGKKPAEKKPAAAEKPVEEEKVAEKAPAEKKPKAGKKLPKEAIGATDKKKKRSKKNIETYKIYIFKVLKQVHPDIGISSKAMGIMNSFINDIFEKLAQEASKLARYNKKPTITSREIQTAVRLVLPGELAKHAVSEGTKAVTKFTSS

SEQ ID NO: 7238 - DNA, 414 bp, Brassica napus
  CDS (1)..(414)
atggctcccaaggcggcagagaagaaaccggcagagaagaagccagcggagaaatcaccggccgagaagcgaccaaaggcggagaagaagatctcgaaggaaggcggaagcgagaagaagaagaagtcgaagaagagcatcgagacatacaagatctacatcttcaaggtcctcaagcaggttcatcccgacatcggaatctccggaaaagcgatggggatcatgaacagtttcatcaacgacatcttcgagaaactcgcccaggaatcttcgaagctcgctaggtacaacaagaagccgacgatcacgtctcgggagatccagacggcggttaggcttgtgttgcccggagagctcgcgaagcacgccgtttccgaagggacgaaggcggttaccaaattcacaagcaattag

SEQ ID NO: 7239 - protein, 137 aa, Brassica napus
MAPKAAEKKPAEKKPAEKSPAEKRPKAEKKISKEGGSEKKKKSKKSIETYKIYIFKVLKQVHPDIGISGKAMGIMNSFINDIFEKLAQESSKLARYNKKPTITSREIQTAVRLVLPGELAKHAVSEGTKAVTKFTSN

SEQ ID NO: 7240 - DNA, 429 bp, Brassica napus
  CDS (1)..(429)
atggcgcccaaggcagagaagaagcccgcggaggagaaatcgaaagcggagaaggctccggcggagaagaaaccaaaggccgggaagaagctcccgaaggaggccggagcaggcgcaggcggagacaagaagaagaagatgaagaagaagagcgtggagacgtacaagatctacatcttcaaggtgctgaagcaggtccacccggacatcggaatctcgagcaaggccatggggatcatgaacagcttcatcaacgatatcttcgagaagctcgctggcgaggcctcgaagctcgcgaggtacaacaagaagcccaccatcacttctagggagattcagaccgcggtgaggctcgtgcttcccggagagttggcgaaacacgctgtctcggaaggtacaaaggctgtcacgaagttcaccagctcctag

SEQ ID NO: 7241 - protein, 142 aa, Brassica napus
MAPKAEKKPAEEKSKAEKAPAEKKPKAGKKLPKEAGAGAGGDKKKKMKKKSVETYKIYIFKVLKQVHPDIGISSKAMGIMNSFINDIFEKLAGEASKLARYNKKPTITSREIQTAVRLVLPGELAKHAVSEGTKAVTKFTSS

SEQ ID NO: 7242 - DNA, 465 bp, Brassica napus
  CDS (1)..(465)
atggcgccaaagacaggaaagaaacccgcagagaagaaacccgccgctgccgccgccgcagagaagccagtggaggaagagaaggtagctgagaaagctccagcggagaagaagccgaaggccggaaagaagctacctaaggaagccatcggcgggaccgacaagaagaagaagcgcagcaagaagaacatcgagacgtacaagatctacatcttcaaggttcttaagcaagtccacccagacatcggaatctcgagcaaggccatggggatcatgaacagcttcatcaacgacatcttcgagaagcttgctcaggaagcgtccaaactcgcaaggtacaacaagaagccgaccattacttctcgcgagatccagacagctgttagacttgttcttcccggtgagcttgctaagcacgccgtgtctgaaggaaccaaggctgttactaagtttactagctcttga

SEQ ID NO: 7243 - protein, 154 aa, Brassica napus
MAPKTGKKPAEKKPAAAAAAEKPVEEEKVAEKAPAEKKPKAGKKLPKEAIGGTDKKKKRSKKNIETYKIYIFKVLKQVHPDIGISSKAMGIMNSFINDIFEKLAQEASKLARYNKKPTITSREIQTAVRLVLPGELAKHAVSEGTKAVTKFTSS

SEQ ID NO: 7244 - DNA, 426 bp, Brassica napus
  CDS (1)..(426)
atggcaaaggctgacaagaaaccagcagagaagaagccggcggaaaccaccaccgcggcggccgcagagaagaagccaaaagccgggaagaagctaccgaaggatcccgccgtggccggagacaagaagaagaagcggaccaagaagagcgtggagacctacaagatctacatcttcaaggtgctgaagcaggttcaccccgacatcggaatctcgagcaaagccatggggatcatgaacagcttcatcaacgacatctttgagaagcttgccggcgagtcttccaagcctgcgaggtacaacaagaagccgacaatcacttcgagggagattcagacggcggtgagactcgtcttgcctggagagttggcgaaacacgctgtttctgaaggtaccaaggcggtgaccaagttcacgagttcttag

SEQ ID NO: 7245 - protein, 141 aa, Brassica napus
MAKADKKPAEKKPAETTTAAAAEKKPKAGKKLPKDPAVAGDKKKKRTKKSVETYKIYIFKVLKQVHPDIGISSKAMGIMNSFINDIFEKLAGESSKPARYNKKPTITSREIQTAVRLVLPGELAKHAVSEGTKAVTKFTSS

SEQ ID NO: 7246 - DNA, 453 bp, Brassica napus
  CDS (1)..(453)
atggcaccaaaggcaggaaagaagccagcagagaagaaacccgccgccgccgccgagaagccagcggaggaggtagccgagaaagccccggcggagaagaaacccaaggcggggaagaagctgccgaaggaagccatcggggcgacggacaagaagaagaagaggagcaagaagagcatcgagacgtacaagatctacatcttcaaggtgctgaagcaggtccacccggacatcgggatctcgagcaaggccatggggatcatgaacagcttcatcaacgacatcttcgagaagctcgcccaggaggcctcgaagctcgctaggtacaacaagaagcccacgattacctcccgcgagatccagaccgctgttaggcttgttctccccggtgagctcgctaagcacgccgtctctgaaggaaccaaggccgtgactaagtttactagctcttga

SEQ ID NO: 7247 - protein, 150 aa, Brassica napus
MAPKAGKKPAEKKPAAAAEKPAEEVAEKAPAEKKPKAGKKLPKEAIGATDKKKKRSKKSIETYKIYIFKVLKQVHPDIGISSKAMGIMNSFINDIFEKLAQEASKLARYNKKPTITSREIQTAVRLVLPGELAKHAVSEGTKAVTKFTSS

SEQ ID NO: 7248 - DNA, 426 bp, Brassica napus
  CDS (1)..(426)
atggcgcccaaggcagcagagaagaagcccgcggagaagaagccggccgagaaagcaccggcggagaagaagccaaaggccgggaagaagctcccgaaggatccctccgccgtcgccggagacaagaagaagaagcggtccaagaagagcgtcgagacgtacaagatctacatcttcaaggtgctgaagcaggtccacccagacatcgggatctcgagcaaagccatggggatcatgaacagcttcatcaacgacatcttcgagaagctcgccggcgagtcttccaagctcgcgaggtacaacaagaagcccacgatcacttcccgggagattcagacggctgtgagactcgtcttgcctggtgagctggcgaaacacgctgtttccgaagggaccaaggcggtgactaagttcacgagctcctga

SEQ ID NO: 7249 - protein, 141 aa, Brassica napus
MAPKAAEKKPAEKKPAEKAPAEKKPKAGKKLPKDPSAVAGDKKKKRSKKSVETYKIYIFKVLKQVHPDIGISSKAMGIMNSFINDIFEKLAGESSKLARYNKKPTITSREIQTAVRLVLPGELAKHAVSEGTKAVTKFTSS

SEQ ID NO: 7250 - DNA, 429 bp, Brassica napus
  CDS (1)..(429)
atggccaaggcagagaagaaaccagcagagaagaaaccggcggcagaaaccaccaccgccgcagcagaaaagaagccaaaagccggtaagaagcttccgaaggatccctccgccgtcgccggagacaagaagaagaagcgttcgaagaagagcgtcgagacgtacaagatctacatcttcaaggtgctgaagcaggtccaccccgacatcgggatctcgagcaaagcgatggggatcatgaacagtttcatcaacgacatcttcgagaagctcgccggcgagtcttccaagcttgcgaggtacaacaagaagcccacgatcacttccagggagattcagacggcggtgagactcgtcttgcctggagagttggcgaaacacgctgtttcggaaggtaccaaggcggtgaccaagttcacgagttcttag

SEQ ID NO: 7251 - protein, 142 aa, Brassica napus
MAKAEKKPAEKKPAAETTTAAAEKKPKAGKKLPKDPSAVAGDKKKKRSKKSVETYKIYIFKVLKQVHPDIGISSKAMGIMNSFINDIFEKLAGESSKLARYNKKPTITSREIQTAVRLVLPGELAKHAVSEGTKAVTKFTSS

SEQ ID NO: 7252 - DNA, 453 bp, Brassica napus
  CDS (1)..(453)
atggcgcccaaggcagagaagaagcccgcggagaagaaaccagcctccgagaagccggcggaggagaaatccaaagccgagaaagctccggcggagaagaaaccaaaggccgggaagaagctccccaaggaagccggcgcaggcggtgacaagaagaagaagatgaagaagaagagcgtcgagacttacaagatctacatcttcaaggtcctgaagcaggttcaccccgacatcggaatctcgagcaaagcgatggggatcatgaacagcttcatcaacgacatcttcgagaagctcgctggcgagtcttccaagcttgcgaggtacaacaagaagcctaccatcacttctagggagattcagaccgcggtgaggcttgtgctgcctggagagttggcgaagcacgctgtctcggagggaaccaaggcggtcacgaagttcacgagctcttga

SEQ ID NO: 7253 - protein, 150 aa, Brassica napus
MAPKAEKKPAEKKPASEKPAEEKSKAEKAPAEKKPKAGKKLPKEAGAGGDKKKKMKKKSVETYKIYIFKVLKQVHPDIGISSKAMGIMNSFINDIFEKLAGESSKLARYNKKPTITSREIQTAVRLVLPGELAKHAVSEGTKAVTKFTSS

SEQ ID NO: 7254 - DNA, 414 bp, Glycine max
  CDS (1)..(414)
atggccaagggagagaaaaaacctgcagagaagaagcccgaagcggagaaggctccggcggagaaaacaaaagccgagaagaagatcccgaaggacgcaacctccggcgaaaagaagaagaagaggacaaagaagagcatggagacgtacaagatctacatcttcaaggtgctgaagcaggttcaccctgacatcgggatctccagcaagtccatggggatcatgaacagcttcatcaacgacatcttcgagaagctcgctcaagaatcttccagactcgcgcgctacaacaagaagcctaccatcacctctcgcgaaatccagactgcggttcgtcttgtgctccctggtgagctcgccaagcacgctgtctccgaaggcaccaaggctgtaaccaagttcactagctcttga

SEQ ID NO: 7255 - protein, 137 aa, Glycine max
MAKGEKKPAEKKPEAEKAPAEKTKAEKKIPKDATSGEKKKKRTKKSMETYKIYIFKVLKQVHPDIGISSKSMGIMNSFINDIFEKLAQESSRLARYNKKPTITSREIQTAVRLVLPGELAKHAVSEGTKAVTKFTSS

SEQ ID NO: 7256 - DNA, 414 bp, Glycine max
  CDS (1)..(414)
atggccaagggagagaaaaaacctgcagagaagaagcccgcggcggagaaggctccggcggagaaaacaaaagccgagaagaagatcccgaaggacgcagcctccggcgagaagaagaagaagaggacgaagaagagcgtggagacgtacaagatctacatcttcaaggtgctgaagcaggttcaccctgacatcgggatctccagcaagtccatggggatcatgaacagcttcatcaacgacatcttcgagaagctcgctcaagaatcttccagactcgcgcgctacaacaagaagcctaccatcacctctcgcgaaatccagactgcggttcgtcttgtgctccctggtgagctcgccaagcacgctgtctccgaaggcaccaaggctgtaaccaagttcactagctcttga

SEQ ID NO: 7257 - protein, 137 aa, Glycine max
MAKGEKKPAEKKPAAEKAPAEKTKAEKKIPKDAASGEKKKKRTKKSVETYKIYIFKVLKQVHPDIGISSKSMGIMNSFINDIFEKLAQESSRLARYNKKPTITSREIQTAVRLVLPGELAKHAVSEGTKAVTKFTSS

SEQ ID NO: 7258 - DNA, 426 bp, Helianthus annuus
  CDS (1)..(426)
atggcaccaaaggcagagaagaagcccgccgagaagaagccggcagaagagaaagcaccggcggagaagaagccaaaggcaggcaagaaactgccaaaagaagccggatctgcagccgctgataagaagaagaagagaacgaagaagagcgtggagacgtacaagatctacatcttcaaggtgctgaagcaggttcatcctgacatcggaatctccagcaaggccatgggaatcatgaacagtttcatcaacgacatattcgagaaactcgctcaggagagttccaggcttgcaaggtacaacaagaagcccaccatcacgtctcgggagatccagactgccgtacgccttgttcttcccggtgaattagccaaacatgctgtttctgaaggcacgaaggcggtcaccaaatttaccagctcttag

SEQ ID NO: 7259 - protein, 141 aa, Helianthus annuus
MAPKAEKKPAEKKPAEEKAPAEKKPKAGKKLPKEAGSAAADKKKKRTKKSVETYKIYIFKVLKQVHPDIGISSKAMGIMNSFINDIFEKLAQESSRLARYNKKPTITSREIQTAVRLVLPGELAKHAVSEGTKAVTKFTSS

SEQ ID NO: 7260 - DNA, 426 bp, Helianthus annuus
  CDS (1)..(426)
atggcactaaaggcagagaagaagcccgccgagaagaagccggcagaagagaaagcaccggcggagaagaagccaaaggccggaaagaaactgccaaaagaagccggatctgcagccgctgataagaagaagaagagaacgaagaagagcgtggagacgtacaagatctacatcttcaaggtgttgaagcaggttcatcctgacatcggaatctccagcaaggccatgggaatcatgaacagtttcatcaacgacatattcgagaaactcgctcaggagagttccaggctcgcccgctacaacaagaagcccaccatcacgtctcgggagatccagactgccgtacgccttgttcttcctggtgaattggccaaacatgctgtttccgaaggcacaaaggcggttacgaaatttacaagctcttag

SEQ ID NO: 7261 - protein, 141 aa, Helianthus annuus
MALKAEKKPAEKKPAEEKAPAEKKPKAGKKLPKEAGSAAADKKKKRTKKSVETYKIYIFKVLKQVHPDIGISSKAMGIMNSFINDIFEKLAQESSRLARYNKKPTITSREIQTAVRLVLPGELAKHAVSEGTKAVTKFTSS

SEQ ID NO: 7262 - DNA, 426 bp, Helianthus annuus
  CDS (1)..(426)
atggcgccaaaggcagagaagaagcccgccgagaagaagccagcggaagagaaagcaccggcggagaagaagccaaaggccgggaagaaactgccgaaagaagccggagccgcctctgcagataagaagaagaagagaacgaagaagagcgtggagacgtacaagatctacatcttcaaggtgttgaagcaggttcatcctgacatcggaatctccagcaaggccatgggaatcatgaacagtttcatcaacgacatcttcgagaagctcgctcaggagagttccaggctcgcccgctacaacaagaagcccaccatcacatctcgggagatccagactgctgtgcggcttgttcttcctggtgaattggccaaacatgctgtttctgaaggcacaaaggccgtcaccaaattcactagctcttag

SEQ ID NO: 7263 - protein, 141 aa, Helianthus annuus
MAPKAEKKPAEKKPAEEKAPAEKKPKAGKKLPKEAGAASADKKKKRTKKSVETYKIYIFKVLKQVHPDIGISSKAMGIMNSFINDIFEKLAQESSRLARYNKKPTITSREIQTAVRLVLPGELAKHAVSEGTKAVTKFTSS

SEQ ID NO: 7264 - DNA, 462 bp, Hordeum vulgare
  CDS (1)..(462)
atggcccccaaggcagacaagaagccggccgccgagaacaaggtggagaaggcagcagagaagaccccggcaggcaagaagcccaaggccgagaagcggctaccggcgggcaagacggcgtccaaggaggccggcggcgaggcgaagacgaggggccggaagaagggcagcaaggccaagaagagcgtcgagacgtacaagatctacatcttcaaggtgctcaagcaggtccaccccgacatcggcatctcctccaaggccatgtccatcatgaactccttcatcaacgacatcttcgagaagctcgccggcgagtccgccaagctcgcccgctacaacaagaagcccaccatcacctccagggagatccagacctccgtccgcctcgtcctccccggcgagctcgccaagcacgccgtctccgagggcaccaaggccgtcaccaaattcacctcctactag

SEQ ID NO: 7265 - protein, 153 aa, Hordeum vulgare
MAPKADKKPAAENKVEKAAEKTPAGKKPKAEKRLPAGKTASKEAGGEAKTRGRKKGSKAKKSVETYKIYIFKVLKQVHPDIGISSKAMSIMNSFINDIFEKLAGESAKLARYNKKPTITSREIQTSVRLVLPGELAKHAVSEGTKAVTKFTSY

SEQ ID NO: 7266 - DNA, 441 bp, Linum usitatissimum
  CDS (1)..(441)
atggcgcccaaggcagcagagaagaagccggcagagaagaagccagcagaggagaagaaagccgagaaggctccggcggagaagaagcccagagccgagaagaaactcccgaaagaaggaggcgccgctgccgccgacaagaagaagaagcgcaacaagaagaacgtcgagacctacaagatctacatcttcaaggtcctgaagcaagtccaccctgacatcggcatctccagcaaagccatgggaatcatgaacagcttcatcaacgacatattcgagaagctcgctgcagagtcctccaggctcgcaaggtacaacaagaagccaaccataacttccagggaaatccagaccgccgtccgcttggtgctccccggcgagctcgccaagcacgccgtctctgaagggaccaaggccgttaccaaattcaccagctcttaa

SEQ ID NO: 7267 - protein, 146 aa, Linum usitatissimum
MAPKAAEKKPAEKKPAEEKKAEKAPAEKKPRAEKKLPKEGGAAAADKKKKRNKKNVETYKIYIFKVLKQVHPDIGISSKAMGIMNSFINDIFEKLAAESSRLARYNKKPTITSREIQTAVRLVLPGELAKHAVSEGTKAVTKFTSS

SEQ ID NO: 7268 - DNA, 429 bp, Linum usitatissimum
  CDS (1)..(429)
atggcacccaaagcagagaagaagccagcggagaagaaacccgccgagaaagctcccgttgccgagaagaagcccagagccgagaagaagctccccaaagaagccggagccgccgccgccgccgacaagaagaagaagaagaacaagaagagcgtcgagacttacaagatctacatcttcaaggtcctgaagcaggttcatccggacatcgggatctccagcaaggccatggggatcatgaacagcttcatcaacgacatcttcgagaagctagctgctgagtcctccaggcttgcgaggtacaacaagaagccgacgattacttccagggagatccagactgctgtgaggcttgttcttccaggggagttggcgaagcatgctgtttcggaaggtaccaaggctgtggccaagttccccagctcttag

SEQ ID NO: 7269 - protein, 142 aa, Linum usitatissimum
MAPKAEKKPAEKKPAEKAPVAEKKPRAEKKLPKEAGAAAAADKKKKKNKKSVETYKIYIFKVLKQVHPDIGISSKAMGIMNSFINDIFEKLAAESSRLARYNKKPTITSREIQTAVRLVLPGELAKHAVSEGTKAVAKFPSS

SEQ ID NO: 7270 - DNA, 447 bp, Linum usitatissimum
  CDS (1)..(447)
atggcgcccaaagcagagaagaagccagcggagaagaagcccgcagaggagaagaagaccgtcgccgaaaaagcccccgccgagaagaagcccaaggccgggaagaagctccccaaggaatctggcgctgctgctgcaggcgacaagaagaagaagaggtcaaagaagaacgtcgagacctacaagatctacatcttcaaggttctcaagcaggtccatccggacatcggaatctccagcaaggctatggggatcatgaactccttcatcaacgacatcttcgagaagctagctcaggagtcctccagactcgctcgctacaacaagaagccgacgattacctccagggagatccagactgccgtccgattggtgcttccgggagaattggccaaacatgccgtgtctgaagggaccaaggctgttaccaagttcaccagctcttga

SEQ ID NO: 7271 - protein, 148 aa, Linum usitatissimum
MAPKAEKKPAEKKPAEEKKTVAEKAPAEKKPKAGKKLPKESGAAAAGDKKKKRSKKNVETYKIYIFKVLKQVHPDIGISSKAMGIMNSFINDIFEKLAQESSRLARYNKKPTITSREIQTAVRLVLPGELAKHAVSEGTKAVTKFTSS

SEQ ID NO: 7272 - DNA, 420 bp, Oryza sativa
  CDS (1)..(420)
atggcgcccaacgcggagacgaatcccgctgataagaatccggcggaggagatcgccgagaataagcccactgccgagaagcgggtgccgggcgccaaggagggcggcggcgagaagaaggggaagaagaaggccaagaagagcgtcgaaacttataagatctacattttcaaggtcctcaagcaggtgcatcccgatatcgggatatcgtccaaggccatgtcgatcatgaactcgttcatcaacgatatcttcgagaagctcgcccaggaggccgcccgtctcgcccgctacaacaagaagccgaccatcacctcccgcgagatccagacctcggtgcgcctcgtcctccccggcgagctcgccaagcacgccgtctctgagggcaccaaggccgtcaccaagttcacgtcgtcttaa

SEQ ID NO: 7273 - protein, 139 aa, Oryza sativa
MAPNAETNPADKNPAEEIAENKPTAEKRVPGAKEGGGEKKGKKKAKKSVETYKIYIFKVLKQVHPDIGISSKAMSIMNSFINDIFEKLAQEAARLARYNKKPTITSREIQTSVRLVLPGELAKHAVSEGTKAVTKFTSS

SEQ ID NO: 7274 - DNA, 459 bp, Oryza sativa
  CDS (1)..(459)
atggcgcccaaggcggagaagaagccggcggcgaagaagcccgcggaggaggagcccgcggcggagaaggccccggcggcggggaagaagcccaaggcggagaagcggctccccgcggggaagggcgagaagggcggcgccggcgaggggaagaaggcggggaggaagaaggggaagaagagcgtcgagacctacaagatctacatcttcaaggtgctcaagcaggtccaccccgacatcggcatctcctccaaggccatgtccatcatgaactccttcatcaacgacatcttcgagaagctcgccgccgaggccgccaagctcgcccgctacaacaagaagcccaccatcacctcccgggagatccagaccgccgtccgcctcgtcctccccggcgagctcgccaagcacgccgtctccgagggcaccaaggccgttaccaagttcacttcctcctag

SEQ ID NO: 7275 - protein, 152 aa, Oryza sativa
MAPKAEKKPAAKKPAEEEPAAEKAPAAGKKPKAEKRLPAGKGEKGGAGEGKKAGRKKGKKSVETYKIYIFKVLKQVHPDIGISSKAMSIMNSFINDIFEKLAAEAAKLARYNKKPTITSREIQTAVRLVLPGELAKHAVSEGTKAVTKFTSS

SEQ ID NO: 7276 - DNA, 438 bp, Triticum aestivum
  CDS (1)..(438)
atggcacccaaggcggcggagaagaagccggtggcggtggccgcggagaagacggcggcggggaagaagcccaaggcggagaagcgggcggcggcgaccaaggaggccggcggcgaggggaagacgaggggccggaagaagggcagcaaggccaagaagggcgtggagacgtacaagatctacatcttcaaggtgctcaagcaggtgcacccggacgtcggcatctcctccaaggccatgtccatcatgaactccttcatcaacgacatcttcgagaagctcgccggcgagtccgccaagctggcgcgatacaacaagaagcccaccatcacgtcccgggagatccagacctccgtccgcctcgtcctccccggcgagctcgccaagcacgccgtctccgagggcaccaaggccgtcaccaagttcacatcatcatag

SEQ ID NO: 7277 - protein, 145 aa, Triticum aestivum
MAPKAAEKKPVAVAAEKTAAGKKPKAEKRAAATKEAGGEGKTRGRKKGSKAKKGVETYKIYIFKVLKQVHPDVGISSKAMSIMNSFINDIFEKLAGESAKLARYNKKPTITSREIQTSVRLVLPGELAKHAVSEGTKAVTKFTSS

SEQ ID NO: 7278 - DNA, 435 bp, Triticum aestivum
  CDS (1)..(435)
atggcacccaaggcggcggaaaagaagccggtggccacggccgagaagacgacggcggggaagaagcccaaggcggagaagcgggcgccggcgtccaaggaggccggcggcgaggggaagcagcggggcaggaagaagggcagcaaggccaagaagggcgtggagacgtacaagatctacatcttcaaggtgctcaagcaggtgcaccccgacgtgggcatctcctccaaggccatgtccatcatgaactccttcatcaacgacatcttcgagaagctcgccggcgagtccgccaagctggcgaggtacaacaagaagcccaccatcacgtcccgggagatccagacctccgtccgcctcgtcctccccggcgagctcgccaagcacgccgtctccgagggcaccaaggccgtcaccaagttcacctcatcctag

SEQ ID NO: 7279 - protein, 144 aa, Triticum aestivum
MAPKAAEKKPVATAEKTTAGKKPKAEKRAPASKEAGGEGKQRGRKKGSKAKKGVETYKIYIFKVLKQVHPDVGISSKAMSIMNSFINDIFEKLAGESAKLARYNKKPTITSREIQTSVRLVLPGELAKHAVSEGTKAVTKFTSS

SEQ ID NO: 7280 - DNA, 435 bp, Triticum aestivum
  CDS (1)..(435)
atggcacccaaggcggcagagaagaagccggtggcggcggcggagaagaccccggccgggaaaaagcccaaggcggagaagcgggcgccggcgtccaaggaggccggtggcgaggggaagacgaggggcaggaagaagggcagcaaggccaagaagggcgtggagacgtacaagatctacatcttcaaggtgctcaagcaggtgcaccccgacatcggcatctcctccaaggccatgtccatcatgaactccttcatcaacgacatcttcgagaagctcgccggggagtccgccaagctcgcccgctacaacaagaagcccaccatcacgtcccgggagatccagacctccgtccgcctcgtcctccccggcgagctcgccaagcacgccgtctcagagggcaccaaggccgtcaccaagttcacctcatcctag

SEQ ID NO: 7281 - protein, 144 aa, Triticum aestivum
MAPKAAEKKPVAAAEKTPAGKKPKAEKRAPASKEAGGEGKTRGRKKGSKAKKGVETYKIYIFKVLKQVHPDIGISSKAMSIMNSFINDIFEKLAGESAKLARYNKKPTITSREIQTSVRLVLPGELAKHAVSEGTKAVTKFTSS

SEQ ID NO: 7282 - DNA, 459 bp, Triticum aestivum
  CDS (1)..(459)
atggcgcccaaggcggagaagaagccggcggcgaagaagcccgcggaggaggagccggcggcggagaaggccccggtcccggccgggaagaagcccaaggccgagaagcggctgccggcggggaagaccgccgccggcaaggagggtggcgacaagaagggcaagaagaaggccaagaagagcgtggagacgtacaagatctacatcttcaaggtgctgaagcaggtgcaccccgacatcggcatctcctccaaggccatgtccatcatgaactccttcatcaacgacatcttcgagaagctcgccggcgaggccgccaagctggcgcgctacaacaagaagcccaccatcacgtcccgggagatccagacctccgtccgcctcgtcctgcccggcgagctcgccaagcacgccgtgtcagagggcaccaaggccgtcaccaagttcacctcctcctag

SEQ ID NO: 7283 - protein, 152 aa, Triticum aestivum
MAPKAEKKPAAKKPAEEEPAAEKAPVPAGKKPKAEKRLPAGKTAAGKEGGDKKGKKKAKKSVETYKIYIFKVLKQVHPDIGISSKAMSIMNSFINDIFEKLAGEAAKLARYNKKPTITSREIQTSVRLVLPGELAKHAVSEGTKAVTKFTSS

SEQ ID NO: 7284 - DNA, 438 bp, Triticum aestivum
  CDS (1)..(438)
atggcacccaaggcggcggagaagaagccggtggcggtggccgcggagaagacggcggcggggaagaagcccaaggcggagaagcgggcggcggcgaccaaggaggccggcggcgaggggaagacgaggggccggaagaagggcagcaaggccaagaagggcgtggagacgtacaagatctacatcttcaaggtgctcaagcaggtgcacccggacgtcggcatctcctccaaggccatgtccatcatgaactccttcatcaacgacatcttcgagaagctcgccggcgagtccgccaagctggcgcgatacaacaagaagccccccctcccgtcccgggagatccagacctccgtccgcctcgtcctccccggcgagctcgccaagcacgccgtctccgagggcaccaaggccgtcaccaagttcacatcatcatag

SEQ ID NO: 7285 - protein, 145 aa, Triticum aestivum
MAPKAAEKKPVAVAAEKTAAGKKPKAEKRAAATKEAGGEGKTRGRKKGSKAKKGVETYKIYIFKVLKQVHPDVGISSKAMSIMNSFINDIFEKLAGESAKLARYNKKPPLPSREIQTSVRLVLPGELAKHAVSEGTKAVTKFTSS

SEQ ID NO: 7286 - DNA, 417 bp, Triticum aestivum
  CDS (1)..(417)
atggcccccaaggcggagaagaagccggtggcggagaaggccgagaagacgacggcggcgaagaagaccaaggccgagaagcggccgccggcgtccaaggagggcggcgagaagaaggggaagaagaagtcgaagaagagcgtggagacgtacaagatctacatcttcaaggtgctgaagcaggtgcaccccgacatcggcatctcctccaaggccatgtccatcatgaactccttcatcaacgacatcttcgagaagctcgccggcgagtccgccaagctcgcccgctacaacaagaagcccaccatcacctcccgggagatccagacctccgtccgcctcgtcctccccggcgagctcgccaagcacgccgtctccgagggcaccaaggccgtcaccaagttcacctccgcttag

SEQ ID NO: 7287 - protein, 138 aa, Triticum aestivum
MAPKAEKKPVAEKAEKTTAAKKTKAEKRPPASKEGGEKKGKKKSKKSVETYKIYIFKVLKQVHPDIGISSKAMSIMNSFINDIFEKLAGESAKLARYNKKPTITSREIQTSVRLVLPGELAKHAVSEGTKAVTKFTSA

SEQ ID NO: 7288 - DNA, 417 bp, Triticum aestivum
  CDS (1)..(417)
atggcccccaaggcggagaagaagccggtggcggagaaggccgagaagacgacggcagccaagaagaccaaggccgagaagcggccgccggcgtccaaggagggcggcgagaagaaggggaagaagaagtccaagaagagcgtggagacgtacaagatctacatcttcaaggtgctgaagcaggtgcacccggacatcggcatctcctccaaggccatgtccatcatgaactccttcatcaacgacatcttcgagaagctcgccggcgagtcggccaagcttgcgaggtacaataagaagcccaccatcacgtcccgggagatccagacctccgtccgcctcgtcctccccggcgagctcgccaagcacgccgtctccgagggcaccaaggctgtcaccaagttcacctcctcctag

SEQ ID NO: 7289 - protein, 138 aa, Triticum aestivum
MAPKAEKKPVAEKAEKTTAAKKTKAEKRPPASKEGGEKKGKKKSKKSVETYKIYIFKVLKQVHPDIGISSKAMSIMNSFINDIFEKLAGESAKLARYNKKPTITSREIQTSVRLVLPGELAKHAVSEGTKAVTKFTSS

SEQ ID NO: 7290 - DNA, 435 bp, Triticum aestivum
  CDS (1)..(435)
atggcacccaaggcagcggagaagaagccggtggccacggccgagaagaccaccgcggggaagaagcccaaggcggagaagcgggcgccggcgaccaaggaggccggcggcgaggggaagacgaggggcaggaagaagggcagcaaggccaagaagggcgtggagacgtacaagatctacatcttcaaggtgctcaaacaggtgcacccggacatcggcatctcctccaaggccatgtccatcatgaactccttcatcaacgacatcttcgagaagctcgccggcgagtccgccaagctggcccgctacaacaagaagcccaccatcacgtcccgggagatccagacctccgtccgcctcgtcctccccggcgagctcgccaagcacgccgtctccgagggcaccaaggccgtcaccaagttcacctcatcctag

SEQ ID NO: 7291 - protein, 144 aa, Triticum aestivum
MAPKAAEKKPVATAEKTTAGKKPKAEKRAPATKEAGGEGKTRGRKKGSKAKKGVETYKIYIFKVLKQVHPDIGISSKAMSIMNSFINDIFEKLAGESAKLARYNKKPTITSREIQTSVRLVLPGELAKHAVSEGTKAVTKFTSS

SEQ ID NO: 7292 - DNA, 438 bp, Triticum aestivum
  CDS (1)..(438)
atggcacccaaggcggcggagaagaagcccgcggcggtggccgcggagaagacgacggcggggaagaagcccaaggcggagaagcgggcgccggcgtccaaggaggccggcggcgaggcgaagcagcggggcaggaagaagggcagcaaggcgaagaagagcgtggagacgtacaagatctacatcttcaaggtgctgaagcaggtgcacccggacgtgggcatctcctccaaggccatgtccatcatgaactccttcatcaacgacatcttcgagaagctcgccggggagtcggccaagctcgcccgctacaacaagaagcccaccatcacgtcccgggagatccagacctccgtccgcctcgtcctccccggggagctcgccaagcacgccgtctccgagggcaccaaggccgtcaccaagttcacctcctcctag

SEQ ID NO: 7293 - protein, 145 aa, Triticum aestivum
MAPKAAEKKPAAVAAEKTTAGKKPKAEKRAPASKEAGGEAKQRGRKKGSKAKKSVETYKIYIFKVLKQVHPDVGISSKAMSIMNSFINDIFEKLAGESAKLARYNKKPTITSREIQTSVRLVLPGELAKHAVSEGTKAVTKFTSS

SEQ ID NO: 7294 - DNA, 435 bp, Triticum aestivum
  CDS (1)..(435)
atggcacccaaggcggcggagaagaagccggtggccacggccgagaagacgacggcggggaagaagcccaaggcggagaagcgggcgccggcgtccaaggaggccggcggcgaggggaagacgaggggcaggaagaagggcagcaaggccaagaagagcgtggagacgtacaagatctacatcttcaaggtgctgaagcaggtgcacccagacgtgggcatctcctccaaggccatgtccatcatgaactccttcatcaacgacatcttcgagaagctcgccggggagtcggccaagctcgcccgctacaacaagaagcccaccatcacgtcccgggagatccagacctccgtccgcctcgtcctccccggggagctcgccaagcacgccgtctccgagggcaccaaggccgtcaccaagttcacctcctcctag

SEQ ID NO: 7295 - protein, 144 aa, Triticum aestivum
MAPKAAEKKPVATAEKTTAGKKPKAEKRAPASKEAGGEGKTRGRKKGSKAKKSVETYKIYIFKVLKQVHPDVGISSKAMSIMNSFINDIFEKLAGESAKLARYNKKPTITSREIQTSVRLVLPGELAKHAVSEGTKAVTKFTSS

SEQ ID NO: 7296 - DNA, 459 bp, Triticum aestivum
  CDS (1)..(459)
atggcgcccaaggccgagaagaagccggcggcgaagaagcccgcggaggaggagcccgcggcggagaaggccgagaagactcccgccgggaagaagcccaaggccgagaagcggctgccggcggggaagtcggccgccaaggagggcggcgacaagaagggcaagaagaaggccaagaagagcgtggagacgtacaagatctacatcttcaaggtgctgaagcaggtgcaccccgacatcggcatctcctccaaggccatgtccatcatgaactccttcatcaacgacatcttcgagaagctcgccgccgaggccgccaagctcgcccgctacaacaagaagcccaccatcacctcccgggagatccagacctccgtccgcctcgtcctccccggggagctcgccaagcacgccgtctccgagggcaccaaggccgtcaccaagttcacctcctcctag

SEQ ID NO: 7297 - protein, 152 aa, Triticum aestivum
MAPKAEKKPAAKKPAEEEPAAEKAEKTPAGKKPKAEKRLPAGKSAAKEGGDKKGKKKAKKSVETYKIYIFKVLKQVHPDIGISSKAMSIMNSFINDIFEKLAAEAAKLARYNKKPTITSREIQTSVRLVLPGELAKHAVSEGTKAVTKFTSS

SEQ ID NO: 7298 - DNA, 435 bp, Triticum aestivum
  CDS (1)..(435)
atggcacccaaggcggcggagaagaagccggtggtggccgcggagaagaccccggcggggaagaagcccaaggcggagaagcgggcgccggcgtccaaggaggccggcggcgagggcaagacgaggggcaggaagaagggcagcaaggccaagaagggcgtggagacgtacaagatttacatcttcaaggtgctgaagcaggtgcacccggacgtaggcatctcctccaaggccatgtccatcatgaactccttcatcaacgacatcttcgagaagctcgccggggagtcggccaagctggcgcggtacaacaagaagcccaccatcacgtcccgggagatccagacctccgtccgcctcgtcctccctggggagctcgccaagcacgccgtctccgagggcaccaaggccgtcaccaagttcacttcatcctag

SEQ ID NO: 7299 - protein, 144 aa, Triticum aestivum
MAPKAAEKKPVVAAEKTPAGKKPKAEKRAPASKEAGGEGKTRGRKKGSKAKKGVETYKIYIFKVLKQVHPDVGISSKAMSIMNSFINDIFEKLAGESAKLARYNKKPTITSREIQTSVRLVLPGELAKHAVSEGTKAVTKFTSS

SEQ ID NO: 7300 - DNA, 456 bp, Triticum aestivum
  CDS (1)..(456)
atggcgcccaaggcggagaagaagccggcggcgaagaagcccgcggaggaggagcccgcggcggagaaggcccccgcggcgaagaagcccaagggcgagaagcggctgccggcggggaagacttccgccggcaaggagggcggcgagaagaagggcgggaagaagaaggccaagaagagcgtggagacgtacaagatctacatcttcaaggtgctgaagcaggtgcaccccgacatcggcatctcctccaaggccatgtccatcatgaactccttcatcaacgacatcttcgagaagctcgccggcgaggcggccaagctcgcccgctacaacaagaagcccaccatcacgtcccgggagatccagacctccgtccgcctcgtcctccccggcgagctcgccaagcacgccgtctccgagggcaccaaggccgtcaccaagttcacctcctcttag

SEQ ID NO: 7301 - protein, 151 aa, Triticum aestivum
MAPKAEKKPAAKKPAEEEPAAEKAPAAKKPKGEKRLPAGKTSAGKEGGEKKGGKKKAKKSVETYKIYIFKVLKQVHPDIGISSKAMSIMNSFINDIFEKLAGEAAKLARYNKKPTITSREIQTSVRLVLPGELAKHAVSEGTKAVTKFTSS

SEQ ID NO: 7302 - DNA, 435 bp, Triticum aestivum
  CDS (1)..(435)
atggcacccaaggcggcggagaagaagccggtggccacggccgagaaggcgacggcggggaagaagcccaaggcggagaagcgggcgccggcgtccaaggaggccggcggcgaggggaagacgaggggcaggaagaagggcagcaaggccaagaagggcgtggagacgtacaagatctacatcttcaaggtgctgaagcaggtgcacccggacgtcggcatctcctccaaggccatgtccatcatgaactccttcatcaacgacatcttcgagaagctcgccggcgagtccgccaagctggcccgctacaacaagaagcccaccatcacgtcccgggagatccagacctccgtccgcctcgtcctccccggggagctcgccaagcacgccgtctccgagggcaccaaggccgtcaccaagttcacctcatcctag

SEQ ID NO: 7303 - protein, 144 aa, Triticum aestivum
MAPKAAEKKPVATAEKATAGKKPKAEKRAPASKEAGGEGKTRGRKKGSKAKKGVETYKIYIFKVLKQVHPDVGISSKAMSIMNSFINDIFEKLAGESAKLARYNKKPTITSREIQTSVRLVLPGELAKHAVSEGTKAVTKFTSS

SEQ ID NO: 7304 - DNA, 450 bp, Triticum aestivum
  CDS (1)..(450)
atggcgcccaaggcggagaagaagccggcggcaaagaagcccgcggaggaggagcccgcggcggagaaggccccggcggcgaagaagcccaaggccgagaagcggctgccggcggggaagtccgccgctggcaaggacggcgacaagaagggcaagaagaaggcgaagaagagcgtggagacgtacaagatctacatcttcaaggtgctgaagcaggtgcacccggacatcggcatctcctccaaggccatgtccatcatgaactccttcatcaacgacatcttcgagaagctcgccggcgaggccgccaagctcgcccgctacaacaagaagcccaccatcacctcccgggagatccagacgtccgtccgcctcgtcctccctggcgagctcgccaagcacgccgtctccgagggcaccaaggccgtcaccaagttcacctcctcctag

SEQ ID NO: 7305 - protein, 149 aa, Triticum aestivum
MAPKAEKKPAAKKPAEEEPAAEKAPAAKKPKAEKRLPAGKSAAGKDGDKKGKKKAKKSVETYKIYIFKVLKQVHPDIGISSKAMSIMNSFINDIFEKLAGEAAKLARYNKKPTITSREIQTSVRLVLPGELAKHAVSEGTKAVTKFTSS

SEQ ID NO: 7306 - DNA, 438 bp, Triticum aestivum
  CDS (1)..(438)
atggcacccaaggcggcagagaagaagctggcgccggccacggcagagaagacgacggcggggaagaagcccaaggcggagaagcgggcgccggcgaccaaggaggccggcggcgagggcaagacgaggggccggaagaagggcagcaaggccaagaagggcgtggagacgtacaagatctacatcttcaaggtgctcaagcaggtgcacccggacgtcggcatctcctccaaggccatgtccatcatgaactccttcatcaacgacatcttcgagaagctcgccggggagtccgccaagctggcgaggtacaacaagaagcccaccatcacgtcccgggagatccagacctccgtccgcctcgtcctccccggggagctcgccaagcacgccgtctccgagggcaccaaggccgtcaccaagttcacatcatcctag

SEQ ID NO: 7307 - protein, 145 aa, Triticum aestivum
MAPKAAEKKLAPATAEKTTAGKKPKAEKRAPATKEAGGEGKTRGRKKGSKAKKGVETYKIYIFKVLKQVHPDVGISSKAMSIMNSFINDIFEKLAGESAKLARYNKKPTITSREIQTSVRLVLPGELAKHAVSEGTKAVTKFTSS

SEQ ID NO: 7308 - DNA, 552 bp, Triticum aestivum
  CDS (1)..(552)
atgctcccggccgccatggccgcgggattagcgtggtcgcggccgaggttcttcatcccccctcacatcccacacctccacacgttcgaaccaccaccaccagaagcagcacccatggcacccaaggcggcagagaagaagctggcgccggccacggcagagaagacgacggcggggaagaagcccaaggcggagaagcgggcgccggcgaccaaggaggccggcggcgagggcaagacgaggggccggaagaagggcagcaaggccaagaagggcgtggagacgtacaagatctacatcttcaaggtgctcaagcaggtgcacccggacgtcggcatctcctccaaggccatgtccatcatgaactccttcatcaacgacatcttcgagaagctcgccggggagtccgccaagctggcgaggtacaacaagaagcccaccatcacgtcccgggagatccagacctccgtccgcctcgtcctccccggggagctcgccaagcacgccgtctccgagggcaccaaggccgtcaccaagttcacatcatcctag

SEQ ID NO: 7309 - protein, 183 aa, Triticum aestivum
MLPAAMAAGLAWSRPRFFIPPHIPHLHTFEPPPPEAAPMAPKAAEKKLAPATAEKTTAGKKPKAEKRAPATKEAGGEGKTRGRKKGSKAKKGVETYKIYIFKVLKQVHPDVGISSKAMSIMNSFINDIFEKLAGESAKLARYNKKPTITSREIQTSVRLVLPGELAKHAVSEGTKAVTKFTSS

SEQ ID NO: 7310 - DNA, 435 bp, Triticum aestivum
  CDS (1)..(435)
atggcacccaaggcagcagagaagaagccggtggccacggcagagaagaccaccgcggggaagaagcccaaggcggagaagcgggcgccggcgtccaaggaggccggcggcgaggggaagacgaggggcaggaagaagggcagcaaggccaagaagggcgtggagacgtacaagatctacatcttcaaggtgctcaagcaggtgcacccggacatcggcatctcctccaaggccatgtccatcatgaactccttcatcaacgacatctttgagaagctggccggggagtccgccaagctcgcccgctacaacaagaagcccaccatcacgtcccgggagatccagacctccgtccgcctcgtcctccccggcgagctcgccaagcacgccgtctccgagggcaccaaggccgtcaccaagttcacctcatcctag

SEQ ID NO: 7311 - protein, 144 aa, Triticum aestivum
MAPKAAEKKPVATAEKTTAGKKPKAEKRAPASKEAGGEGKTRGRKKGSKAKKGVETYKIYIFKVLKQVHPDIGISSKAMSIMNSFINDIFEKLAGESAKLARYNKKPTITSREIQTSVRLVLPGELAKHAVSEGTKAVTKFTSS

SEQ ID NO: 7312 - DNA, 525 bp, Triticum aestivum
  CDS (1)..(525)
atgggccgcgggattagcgtgttcgcggccgaggtctcacgtcccacaccaagccccacgctcgaaccaccaccaccaccagcacccatggcacccaaggcagcggagaagaagccggcggcggccacggccgagaagaccaccgcggggaagaagcccaaggcggagaagcgggcgccggcgtccaaggaggccggcggcgaggggaagacgaggggcaggaagaagggcagcaaggccaagaagggtgtggagacgtacaagatctacatcttcaaggtgctcaagcaggtgcacccggacatcggcatctcctccaaggccatgtccatcatgaactccttcatcaacgacatcttcgagaagctggccggcgagtccgccaagctcgcccgctacaacaagaagcccaccatcacgtcccgggagatccagacctccgtccgccttgtcctccccggcgagctcgccaagcacgccgtctctgagggcaccaaggccgtcaccaagttcacctcatcctag

SEQ ID NO: 7313 - protein, 174 aa, Triticum aestivum
MGRGISVFAAEVSRPTPSPTLEPPPPPAPMAPKAAEKKPAAATAEKTTAGKKPKAEKRAPASKEAGGEGKTRGRKKGSKAKKGVETYKIYIFKVLKQVHPDIGISSKAMSIMNSFINDIFEKLAGESAKLARYNKKPTITSREIQTSVRLVLPGELAKHAVSEGTKAVTKFTSS

SEQ ID NO: 7314 - DNA, 459 bp, Triticum aestivum
  CDS (1)..(459)
atggcgcccaaggccgagaagaagccggcggcgaagaagccagtggaggaggagcccgcggcggagaaggccgagaagaccccggccgggaagaagcccaaggccgagaagcggctgccggcgggcaagtcgtcggcggcggccaaggagggcggcaaggcgaagaagaaggccaagaagagcgtggagacgtacaagatctacatcttcaaggtgctgaagcaggtgcaccccgacatcggcatctcctccaaggccatgtccatcatgaactccttcatcaacgacatcttcgagaagctcgccggcgaggccgctaagctggcgaggtacaacaagaagcccaccatcacgtcccgggagatccagacctccgtccgcctcgtcctccccggcgagctcgccaagcacgccgtctccgagggcaccaaggctgtcaccaagttcacctcctcctga

SEQ ID NO: 7315 - protein, 152 aa, Triticum aestivum
MAPKAEKKPAAKKPVEEEPAAEKAEKTPAGKKPKAEKRLPAGKSSAAAKEGGKAKKKAKKSVETYKIYIFKVLKQVHPDIGISSKAMSIMNSFINDIFEKLAGEAAKLARYNKKPTITSREIQTSVRLVLPGELAKHAVSEGTKAVTKFTSS

SEQ ID NO: 7316 - DNA, 459 bp, Triticum aestivum
  CDS (1)..(459)
atggcgcccaaggccgagaagaagccggcggcgaagaagcccgcggaggaggagcccgcggcggagaaggccgagaagactcccgccgggaagaagcccaaggccgagaagcggctgccggcggggaagtcggccgccaaggagggcggcgacaagaagggcaagaagaaggccaagaagagcgtggagacgtacaagatctacatcttcaaggtgctgaagcaggtgcaccccgacatcggcatctcctccaaggccatgtccatcatgaactccttcatcaacgacatcttcgagaagctcgccggcgaggccgccaagctggcgcggtacaacaagaagccaaccatcacgtcccgcgagatccagacctccgtccggctcgtcctccccggcgagctcgccaagcacgccgtctccgagggcaccaaggctgtcaccaagttccactcctcttag

SEQ ID NO: 7317 - protein, 152 aa, Triticum aestivum
MAPKAEKKPAAKKPAEEEPAAEKAEKTPAGKKPKAEKRLPAGKSAAKEGGDKKGKKKAKKSVETYKIYIFKVLKQVHPDIGISSKAMSIMNSFINDIFEKLAGEAAKLARYNKKPTITSREIQTSVRLVLPGELAKHAVSEGTKAVTKFHSS

SEQ ID NO: 7318 - DNA, 462 bp, Triticum aestivum
  CDS (1)..(462)
atggcccccaaggcagacaagaagcccgccgccgagaacaaggtcgagaaggcggcggagaagacccccgcgggcaagaagcccaaggccgagaagcggctgccggcgggcaagacggcgtccaaggaggccggcggcgaggggaagacccggggccggaagaagggcagcaaggcgaagaagggcgtggagacgtacaagatctacatcttcaaggtgctgaagcaggtgcaccccgacatcggcatctcctccaaggccatgtccatcatgaactccttcatcaacgacatcttcgagaagctcgccggcgagtccgccaagctcgcgcgctacaacaagaagcccaccatcacctcccgggagatccagacctccgtccgcctcgtcctccccggcgagctcgccaagcacgccgtctccgagggcaccaaggccgtcaccaagttcacctcctcctag

SEQ ID NO: 7319 - protein, 153 aa, Triticum aestivum
MAPKADKKPAAENKVEKAAEKTPAGKKPKAEKRLPAGKTASKEAGGEGKTRGRKKGSKAKKGVETYKIYIFKVLKQVHPDIGISSKAMSIMNSFINDIFEKLAGESAKLARYNKKPTITSREIQTSVRLVLPGELAKHAVSEGTKAVTKFTSS

SEQ ID NO: 7320 - DNA, 462 bp, Triticum aestivum
  CDS (1)..(462)
atggcccccaaggcggagaagaagccggcggcgagagaagcccgcggaggaggagccgacgacggagaaggccgagaaggcccggccgcgaagaagcccaaggccgagaagcggctgcccgcgggcaagaccgcctccaaggagggcggcggcgagaagaggggccggaagaagggcaagaagagcgtcgagacctacaagatctacatcttcaaggtgctcaagcaggtgcaccccgacatcggcatctcctccaaggccatgtccatcatgaactccttcatcaacgacatcttcgagaagctcgccggggaggccgccaagctcgcccgctacaacaagaagcccaccatcacctcccgggagatccagacctccgtccgcctcgtcctccccggagagctcgccaagcacgccgtctctgagggcaccaaggccgtcaccaagttcacctcctcttag

SEQ ID NO: 7321 - protein, 153 aa, Triticum aestivum
MAPKAEKKPAAREARGGGADDGEGREGPAAKKPKAEKRLPAGKTASKEGGGEKRGRKKGKKSVETYKIYIFKVLKQVHPDIGISSKAMSIMNSFINDIFEKLAGEAAKLARYNKKPTITSREIQTSVRLVLPGELAKHAVSEGTKAVTKFTSS

SEQ ID NO: 7322 - DNA, 417 bp, Triticum aestivum
  CDS (1)..(417)
atggcccccaaggcggagaagaagccggtggcggagaaggccgagaagacgacgacagcgaagaagaccaaggccgagaagcggccgccggcttccaaggagggcggtgagaagaaggggaagaagaagtccaagaagagcgtggagacgtacaagatctacatcttcaaggtgctgaagcaggtgcacccggacatcggcatctcctccaaggccatgtccatcatgaactccttcatcaacgacatcttcgagaagctcgccggcgagtccgccaagctggcgcgctacaacaagaagcccaccatcacgtcccgggagatccagacctccgtccgcctcgtcctccctggcgagctcgccaagcacgccgtctccgagggcaccaaggcagtcaccaagttcacctcctcctag

SEQ ID NO: 7323 - protein, 138 aa, Triticum aestivum
MAPKAEKKPVAEKAEKTTTAKKTKAEKRPPASKEGGEKKGKKKSKKSVETYKIYIFKVLKQVHPDIGISSKAMSIMNSFINDIFEKLAGESAKLARYNKKPTITSREIQTSVRLVLPGELAKHAVSEGTKAVTKFTSS

SEQ ID NO: 7324 - DNA, 408 bp, Triticum aestivum
  CDS (1)..(408)
atggcacccaaggctgctgagaagaagcctgtggagaagacccccgcgggcaagaagcccaaggcggagaaaaaggtgccggcgtccggggagggcggcgacaagaaggggaagaagaaggccaagaagagcgtcgagacgtacaagatctacatcttcaaggtgctcaagcaggtgcacccggacatcggcatctcctccaaggccatgtccatcatgaactccttcatcaacgacatcttcgagaagcttgccggcgagtctgccaagctcgccaggtacaacaagaagcccaccatcacgtcccgggagatccagacctccgtccgcctcgtcctccccggcgagctcgccaagcacgccgtctccgagggcaccaaggccgtcaccaagttcacctcgtcctag

SEQ ID NO: 7325 - protein, 135 aa, Triticum aestivum
MAPKAAEKKPVEKTPAGKKPKAEKKVPASGEGGDKKGKKKAKKSVETYKIYIFKVLKQVHPDIGISSKAMSIMNSFINDIFEKLAGESAKLARYNKKPTITSREIQTSVRLVLPGELAKHAVSEGTKAVTKFTSS

SEQ ID NO: 7326 - DNA, 417 bp, Triticum aestivum
  CDS (1)..(417)
atggcccccaaggcggagaagaagccggtggcggagaaggccgagaagacgacggcggcgaagaagaccaaggccgagaagcggccgccggcgtccaaggagggcggcgagaagaaggggaagaagaagtcgaagaagagcgtggagacgtacaagatctacatcttcaaggtgctgaagcaggtgcaccccgacatcggcatctcctccaaggccatgtccatcatgaactccttcctcaacgacatcttcgagaagctcgccggcgagtccgccaagctcgcccgctacaacaagaagcccaccatcacctcccgggagatccagacctccgtccgcctcgtcctccccggcgagctcgccaagcacgccgtctccgagggcaccagggccgtcaccaagttcacctccgcttag

SEQ ID NO: 7327 - protein, 138 aa, Triticum aestivum
MAPKAEKKPVAEKAEKTTAAKKTKAEKRPPASKEGGEKKGKKKSKKSVETYKIYIFKVLKQVHPDIGISSKAMSIMNSFLNDIFEKLAGESAKLARYNKKPTITSREIQTSVRLVLPGELAKHAVSEGTRAVTKFTSA

SEQ ID NO: 7328 - DNA, 417 bp, Triticum aestivum
  CDS (1)..(417)
atggcccccaaggcggagaagaagccggtggcggagaaggccgagaagacgacggcaaccaagaagaccaaggccgagaagcggccgccggcgtccaaggagggcggcgagaagaaggggaagaagaagtccaagaagagcgtggagacgtacaagatctacatcttcaaggtgctgttgcaggtgcacccggacatcggcatctcctccaaggccgtgtccatcatgaactccttcatcaacgacatcttcgagaagctcgccggcgagtcggccaagcttgcgaggtacaataagaagcccaccatcacgtcccgggagatccagacctccgtccgcctcgtcctccccggcgagctcgccaagcacgccgtctccgagggcaccaaggctgtcaccaagttcacctcctcctag

SEQ ID NO: 7329 - protein, 138 aa, Triticum aestivum
MAPKAEKKPVAEKAEKTTATKKTKAEKRPPASKEGGEKKGKKKSKKSVETYKIYIFKVLLQVHPDIGISSKAVSIMNSFINDIFEKLAGESAKLARYNKKPTITSREIQTSVRLVLPGELAKHAVSEGTKAVTKFTSS

SEQ ID NO: 7330 - DNA, 438 bp, Triticum aestivum
  CDS (1)..(438)
atggcacccaaggcagcggagaagaagccggcggcggccacggccgagaagaccaccgcggggaagaagcccaaggcggagaagcgggcgccggcgtccaaggaggccggcggcgaggggaagacgaggggcaggaagaagggcagcaaggccaagaagggtgtggagacgtacaagatctacatcttcaaggtgctcaagcaggtgcacccggacatcggcatctcctccaaggccatgtccatcatgaactccttcatcaacgacatcttcgagaagctcgccggcgagtccgccaagctcgcccgctacaacaagaagcccaccatcacgtcccgggagatccagacctccgtccgccttgtcctccccggcgagctcgccaagcacgccgtctctgagggcaccaaggccgtcaccaaggtcacctcatcctag

SEQ ID NO: 7331 - protein, 145 aa, Triticum aestivum
MAPKAAEKKPAAATAEKTTAGKKPKAEKRAPASKEAGGEGKTRGRKKGSKAKKGVETYKIYIFKVLKQVHPDIGISSKAMSIMNSFINDIFEKLAGESAKLARYNKKPTITSREIQTSVRLVLPGELAKHAVSEGTKAVTKVTSS

SEQ ID NO: 7332 - DNA, 432 bp, Triticum aestivum
  CDS (1)..(432)
atggcacccaaggcagcggagaagaagccggtggccacggccgagaagaccaccgcggggaagaagcccaaggcggagaagcgggcgccggcgaccaaggaggccggcggcgaggggaagacgaggggcaggaagaagggcagcaaggccaagaagggcgtggagacgtacaagatctacatcttcaaggtgctcaaacaggtgcacccggacatcggcatctcctccaaggccatgtccatcatgaactccttcatcaacgacatcttcgagaagctcgccggcgagtccgccaagctggcccgctacaacaagaagcccaccatcacgtcccgggagatccagacctccgtccgcctcgtcctccccggcgagctcgccaagcacgccgtctccgagggcaccaatgccgtcaccaagttcaccctctag

SEQ ID NO: 7333 - protein, 143 aa, Triticum aestivum
MAPKAAEKKPVATAEKTTAGKKPKAEKRAPATKEAGGEGKTRGRKKGSKAKKGVETYKIYIFKVLKQVHPDIGISSKAMSIMNSFINDIFEKLAGESAKLARYNKKPTITSREIQTSVRLVLPGELAKHAVSEGTNAVTKFTL

SEQ ID NO: 7334 - DNA, 417 bp, Triticum aestivum
  CDS (1)..(417)
atggcccccaaggcggagaagaagccggtggcggataaggccgagaagacgacgacagcgaagaagaccaaggccgagaagcggccgccggcgtccaaggagggcggcgagaagaaggggaagaagaagtccaagaagagcgtggagacgtacaagatctacgtcttcaaggtgctgaaccaggttcacccggacatcggcatctcctccaaggccatgtccgtcatgaactccttcatcaacgacatcttcgagaagctcgccggcgagtcggccaagctggcgcgctacaacaggaagcccaccatcacgtccagggagatccatacctccgtccgcctcgtcctccccggcgagctcgccaagcacgccgtctccgagggcaccaaggtcgtcaccaagttcacctccgcttag

SEQ ID NO: 7335 - protein, 138 aa, Triticum aestivum
MAPKAEKKPVADKAEKTTTAKKTKAEKRPPASKEGGEKKGKKKSKKSVETYKIYVFKVLNQVHPDIGISSKAMSVMNSFINDIFEKLAGESAKLARYNRKPTITSREIHTSVRLVLPGELAKHAVSEGTKVVTKFTSA

SEQ ID NO: 7336 - DNA, 417 bp, Triticum aestivum
  CDS (1)..(417)
atggcccccaaggcggagaagaagccggtggcggagaaggccgagaagacgacggcagccaagaagaccaaggccgagaagcggccgccggcgtccaaggagggcggcgagaagaaggggaagaagaagtccaagaagagcgtggagacgtacaagatctacatcttcaaggtgctgaagcaggtgcacccggacatcggcatctcctccaaggccatgtccatcatgaactccttcatcaacgacatcttcgagaagctcgccggcgagtcggccaagcttgcgaggtcccataagaagcccaccatcacgtcccgggagatccagacctccgtccgcctcgtcctccccggcgagctcgccaagcacgccgtctccgagggcaccaaggctgtcaccaagttcacctcctcctag

SEQ ID NO: 7337 - protein, 138 aa, Triticum aestivum
MAPKAEKKPVAEKAEKTTAAKKTKAEKRPPASKEGGEKKGKKKSKKSVETYKIYIFKVLKQVHPDIGISSKAMSIMNSFINDIFEKLAGESAKLARSHKKPTITSREIQTSVRLVLPGELAKHAVSEGTKAVTKFTSS

SEQ ID NO: 7338 - DNA, 417 bp, Triticum aestivum
  CDS (1)..(417)
atggcccccaaggcggagaagaagccggtggcggagaaggccgagaagaccactgcggcgaagaagaccaaggccgagaagcggccgccggcgtccaaggagggcggcgagaagaagggcaagaagaagtcgaagaagagcgtggagacgtacaagatctacatcttcaaggtgctgaagcaggtgcacccggacatcggcatctcctccaaggccatgtccatcatgaactccttcatcaacgacatcttcgagaagctcgccggcgagtccgcccacctcgcccgctacaacaagaagcccaccatcacgtcccgggagatccagacctccgtccgcctcgtcctccccggcgagctcgccaagcacgccgtctccgagggcaccaaggccgtcaccaagttcacctccgcttag

SEQ ID NO: 7339 - protein, 138 aa, Triticum aestivum
MAPKAEKKPVAEKAEKTTAAKKTKAEKRPPASKEGGEKKGKKKSKKSVETYKIYIFKVLKQVHPDIGISSKAMSIMNSFINDIFEKLAGESAHLARYNKKPTITSREIQTSVRLVLPGELAKHAVSEGTKAVTKFTSA

SEQ ID NO: 7340 - DNA, 417 bp, Triticum aestivum
  CDS (1)..(417)
atggcccccaaggcggagaagaaaccggtgccggagaaggccgagaagacgacgacagcgaagaagaccaaggccgagaagcgccctccggcttccaaggagggcggtgagaagaaggggaagaagaagtccaagaagagcgtggagacgtacaagatctacatcttcaaggtgctgaagcaggtgcacccggacatcggcatctcctccaaggccatgtccatcatgaactccttcatcaacgacattttcgagaagctcgccggcgagtccgccaagctggcgcgctacaacaagaagcccaccatcacgtcccgggagatccagacctccgtccgcctcgtcctccctggcgagctcgccaagcacgccgtttacgagggccccaaggcagtcaccaagttcacctcctcctag

SEQ ID NO: 7341 - protein, 138 aa, Triticum aestivum
MAPKAEKKPVPEKAEKTTTAKKTKAEKRPPASKEGGEKKGKKKSKKSVETYKIYIFKVLKQVHPDIGISSKAMSIMNSFINDIFEKLAGESAKLARYNKKPTITSREIQTSVRLVLPGELAKHAVYEGPKAVTKFTSS

SEQ ID NO: 7342 - DNA, 408 bp, Triticum aestivum
  CDS (1)..(408)
atggcccccaaggctgctgagaagaagccagtggagaagacccccgggggcaagaagcccaaggcggagaagaaggtgccggcgtccaaggagggcggcgacaagaaggggaagaagaaggccaagaaaagcgtggagacgtacaagatctacatcttggaggtgctcaagcaggtgcaccccgacatcggcatctcctccaaggccatgtccatcatgaactccttcatcaacgacatctttgagaagctcgccggtgagtccgccaagctcgcgcgctacaacaagaagcccaccatcacgtcccgcgagatccagacctccgtccgcctcgtcctccctggcgagctcgccaagcacgccgtctccgagggcaccaaggccgtcaccaagttcacctcgtcctag

SEQ ID NO: 7343 - protein, 135 aa, Triticum aestivum
MAPKAAEKKPVEKTPGGKKPKAEKKVPASKEGGDKKGKKKAKKSVETYKIYILEVLKQVHPDIGISSKAMSIMNSFINDIFEKLAGESAKLARYNKKPTITSREIQTSVRLVLPGELAKHAVSEGTKAVTKFTSS

SEQ ID NO: 7344 - DNA, 417 bp, Triticum aestivum
  CDS (1)..(417)
atggcccccaaggcggagaagaagccggtggcggagaaggccgagaagacgacggcggcgaagaagaccaaggccgagaagcggccgccggcgtccaaggagggcggcgagaagaaggggaagaagaagtcgaagaagagcgtggagacgtacaagatctacatcttcaaggtgctgaagcaggtgcaccccgacatcggcatctcctccaaggccatgtccatcatgaactccttcatcaacgacatcttcgagaagctcgccggcgagccccccacgcccgcccgctacaacaagaagcccaccatcacctcccgggagatccagacctccgtccgcctcgtcctccccggcgagctcgccaagcacgccgtctccgagggcaccaaggccgtcaccaagttcacctccgcttag

SEQ ID NO: 7345 - protein, 138 aa, Triticum aestivum
MAPKAEKKPVAEKAEKTTAAKKTKAEKRPPASKEGGEKKGKKKSKKSVETYKIYIFKVLKQVHPDIGISSKAMSIMNSFINDIFEKLAGEPPTPARYNKKPTITSREIQTSVRLVLPGELAKHAVSEGTKAVTKFTSA

SEQ ID NO: 7346 - DNA, 408 bp, Triticum aestivum
  CDS (1)..(408)
atggcccccaaggctgctgagaagaagccaggggagaagacccccgggggcaagaagcccaaggcggagaagaaggtgccggcgtccaaggagggcggcgacaagaaggggaagaagaaggccaagaaaagcgtggagacgtacaagatctacatggtggaggtgctcaagcaggtgcaccccgacatcggcatctcctccaaggccatgtccatcatgaactccttcatcaacgacatctttgataagctcgccggtgagtccgccaagctcgcgcgctacaacaagaagcccaccatcacgtcccgcgagatccagacctccgtccgtctcgtcctccctggcgagctcggcaagcacgccgtctccgagggcaccaaggccgtcaccaagttgacctcgtcctag

SEQ ID NO: 7347 - protein, 135 aa, Triticum aestivum
MAPKAAEKKPGEKTPGGKKPKAEKKVPASKEGGDKKGKKKAKKSVETYKIYMVEVLKQVHPDIGISSKAMSIMNSFINDIFDKLAGESAKLARYNKKPTITSREIQTSVRLVLPGELGKHAVSEGTKAVTKLTSS

SEQ ID NO: 7348 - DNA, 417 bp, Triticum aestivum
  CDS (1)..(417)
atggcccccaaggcggaaaagaagccggtggcggataaggccgagaagacgactactgccaataagaccaaggccgataagcggccgccggcgtccaaggagggcggcgagaagaaggggaagaagaagtccaagaagagcgtggagacgtacaagatctacatcttcaaggtgctgaaccaggttcacccggacatcggcatctcctccaaggccatgtccatcatgaactccttcatcaacgacatcttcgagaagctcgccggcgagtcggccaagctggcgcgctacagcaagaagcccaccatcacgtgcagggagatccagacctccgtccgcctcgtcctcccgggcgagctcggcaagcacgccgtctccgagggcaccaaggccgtcaccaagttcacctccgcttag

SEQ ID NO: 7349 - protein, 138 aa, Triticum aestivum
MAPKAEKKPVADKAEKTTTANKTKADKRPPASKEGGEKKGKKKSKKSVETYKIYIFKVLNQVHPDIGISSKAMSIMNSFINDIFEKLAGESAKLARYSKKPTITCREIQTSVRLVLPGELGKHAVSEGTKAVTKFTSA

SEQ ID NO: 7350 - DNA, 453 bp, Zea mays
  CDS (1)..(453)
atggcgcccaaggccgagaagaagcccgcggcgaagaagccggcggaggaggagcccgcggcggagaagacgaccgccgggaagaagcccaaggcggagaagcggatccccgctggcaagtccgccggcaaggagggcggcgagggcaagcgtggcaagaagaagggcaagaagagcgtggagacgtacaagatctacatcttcaaggtgctgaagcaggtgcacccggacatcggcatctcctccaaggccatgtccatcatgaactccttcatcaacgacatcttcgagaagctggccggcgaggccgccaagctcgcgcgctacaacaagaagcccaccatcacgtcccgcgagatccagacctccgtgcgcctcgtgctccccggcgagctcgccaagcacgccgtctctgagggcaccaaggccgtcaccaagttcacctcctcctag

SEQ ID NO: 7351 - protein, 150 aa, Zea mays
MAPKAEKKPAAKKPAEEEPAAEKTTAGKKPKAEKRIPAGKSAGKEGGEGKRGKKKGKKSVETYKIYIFKVLKQVHPDIGISSKAMSIMNSFINDIFEKLAGEAAKLARYNKKPTITSREIQTSVRLVLPGELAKHAVSEGTKAVTKFTSS

SEQ ID NO: 7352 - DNA, 450 bp, Zea mays
  CDS (1)..(450)
atggcgcccaaggccgagaagaagcccgccgccaagaagcctgcggaggaggagccggcggcggagaaggccccggcggggaagaagcccaaggccgagaagcggctccctgcgggcaagtccgcgggcaaggagggtggcgagaagaaggggaagaagaaggcgaagaagtcggtggagacgtacaagatctacatcttcaaggtgctgaagcaggtgcacccggatattggcatctcgtccaaggccatgtccatcatgaactccttcatcaacgacatcttcgagaagctggcggcggaggcggccaagctggcgcggtacaacaagaagcctaccattacgtcccgcgagatccagacctccgtccgcctcgtcctccccggcgagctcgccaagcacgccgtctccgagggcaccaaagccgtcaccaagttcactagctcctag

SEQ ID NO: 7353 - protein, 149 aa, Zea mays
MAPKAEKKPAAKKPAEEEPAAEKAPAGKKPKAEKRLPAGKSAGKEGGEKKGKKKAKKSVETYKIYIFKVLKQVHPDIGISSKAMSIMNSFINDIFEKLAAEAAKLARYNKKPTITSREIQTSVRLVLPGELAKHAVSEGTKAVTKFTSS

SEQ ID NO: 7354 - DNA, 459 bp, Zea mays
  CDS (1)..(459)
atgacacacaaggcggacaaaaagccggcgcgaaagaagcctgcagagaagcccgcgacagagaagtcggagaaggctccgccggggaagaagcccaaggccgaaaagcgcctcccggcgggcaagtccgccggtaaggagggcggcgagggcaaaaaggggaaaaagaaagcgaagaagtccgtggagacctacaagatctacatcttcaaggtgctgaagcaggtgcaccccgacatcggcatctcgtccaaggccatgtccatcatgaactccttcatcaacgacatcttcgagaagctcgcggccgagtccgccaagctggcgcgctataacaagaagcccaccgtcacctcccgcgagatccagacctcggtgcgcctcgtcctccccggcgagcttgccaagcacgccgtctccgagggcaccaaggccgtcaccaagttcacctcttcttaa

SEQ ID NO: 7355 - protein, 152 aa, Zea mays
MTHKADKKPARKKPAEKPATEKSEKAPPGKKPKAEKRLPAGKSAGKEGGEGKKGKKKAKKSVETYKIYIFKVLKQVHPDIGISSKAMSIMNSFINDIFEKLAAESAKLARYNKKPTVTSREIQTSVRLVLPGELAKHAVSEGTKAVTKFTSS

SEQ ID NO: 7356 - DNA, 450 bp, Zea mays
  CDS (1)..(450)
atggcgcccaaggcggagaagaagccagcggagaagaagccggcggccgaggagaaggcggagaagacgaccgcagggaagaagcccaaggccgagaagcggctgcccgcgtccaagtcctccggcaaggagggcggcgagaagaaggggaagaagaaggccaagaagagcgtggagacctacaagatctacatcttcaaggtgctgaagcaggtgcaccccgacatcggcatatcctccaaggccatgtccatcatgaactccttcatcaacgacatctttgagaagctggccggcgaggccgccaagctggcgcggtacaacaagaagcccaccatcacgtcccgcgagatccagacctccgtgcgcctagtcctccccggagagctcgccaagcacgccgtctccgagggaaccaagcacgccgtcaccaagttcaccagcaactga

SEQ ID NO: 7357 - protein, 149 aa, Zea mays
MAPKAEKKPAEKKPAAEEKAEKTTAGKKPKAEKRLPASKSSGKEGGEKKGKKKAKKSVETYKIYIFKVLKQVHPDIGISSKAMSIMNSFINDIFEKLAGEAAKLARYNKKPTITSREIQTSVRLVLPGELAKHAVSEGTKHAVTKFTSN

SEQ ID NO: 7358 - DNA, 21 bp, Artificial sequence
  primer
atggcaccgaaggcagagaag

SEQ ID NO: 7359 - DNA, 20 bp, Artificial sequence
  primer
ctaagaactggtgaatttgg

SEQ ID NO: 7360 - protein, 186 aa, Artificial sequence
  consensus sequence
  Variant (2)..(2): Xaa in position 2 is any amino acid
  Variant (5)..(6): Xaa in position 5 to 6 is any amino acid
  Variant (7)..(16): Xaa in position 7 to 16 is any or no amino acid
  Variant (19)..(19): Xaa in position 19 is any amino acid
  Variant (20)..(57): Xaa in position 20 to 57 is any or no amino acid
  Variant (59)..(59): Xaa in position 59 is any amino acid
  Variant (61)..(63): Xaa in position 61 to 63 is any amino acid
  Variant (64)..(81): Xaa in position 64 to 81 is any or no amino acid
  Variant (83)..(85): Xaa in position 83 to 85 is any amino acid
  Variant (86)..(93): Xaa in position 86 to 93 is any or no amino acid
  Variant (95)..(95): Xaa in position 95 is any amino acid
  Variant (97)..(98): Xaa in position 97 to 98 is any amino acid
  Variant (101)..(101): Xaa in position 101 is any amino acid
  Variant (111)..(111): Xaa in position 111 is any amino acid
  Variant (112)..(112): Xaa in position 112 is any or no amino acid
  Variant (120)..(120): Xaa in position 120 is any amino acid
  Variant (126)..(126): Xaa in position 126 is any amino acid
  Variant (128)..(129): Xaa in position 128 to 129 is any amino acid
  Variant (134)..(135): Xaa in position 134 to 135 is any amino acid
  Variant (137)..(137): Xaa in position 137 is any amino acid
  Variant (139)..(141): Xaa in position 139 to 141 is any amino acid
  Variant (144)..(144): Xaa in position 144 is any amino acid
  Variant (148)..(149): Xaa in position 148 to 149 is any amino acid
  Variant (152)..(152): Xaa in position 152 is any amino acid
  Variant (159)..(159): Xaa in position 159 is any amino acid
  Variant (163)..(163): Xaa in position 163 is any amino acid
  Variant (179)..(179): Xaa in position 179 is any amino acid
  Variant (184)..(184): Xaa in position 184 is any amino acid
MXPKXXXXXXXXXXXXKKXXXXXXXXXXXXXXXXXXXXXXXXXXXXXXXXXXXXXXXAXKXXXXXXXXXXXXXXXXXXXXXKXXXXXXXXXXXEXYXXYIXKVLKQVHPDXXGISSKAMXIMNSFXNXXDIFEXXAXEXXXLAXYNKXXTIXSREIQTXVRLXLPGELAKHAVSEGTKXAVTKXTS

SEQ ID NO: 7361 - protein, 22 aa, Artificial sequence
  protein pattern
  Variant (3)..(3): Xaa in position 3 is Ala or Ser
  Variant (7)..(7): Xaa in position 7 is Ile, Leu or Val
QTXVRLXLPGELAKHAVSEGTK

SEQ ID NO: 7362 - protein, 11 aa, Artificial sequence
  protein pattern
  Variant (4)..(4): Xaa in position 4 is Gly or Ser
  Variant (10)..(10): Xaa in position 10 is Ile or Val
KAMXIMNSFXN

SEQ ID NO: 7363 - protein, 8 aa, Artificial sequence
  protein pattern
  Variant (5)..(5): Xaa in position 5 is Phe or Tyr
  Variant (7)..(7): Xaa in position 7 is any or no amino acid
AVTKXTXS

SEQ ID NO: 7364 - DNA, 1959 bp, Arabidopsis thaliana
  CDS (1)..(1959)
atggaaactcccaaaggcactatcattttcaccaccgtcggtcgaactcactacggcttcgacgtcttctctctcaacatagccacctccgtcgaacgccgtttaacagacggcgtttccgtgaacttcaacgctcaattcgtcaacgataaaagcgatgatgtcgtctttgtttcggaaagaaacggatccgccaggatttacaaaacccgatccggaatttctaagcccgagcagattcccggagctccagagagctacttccacgaccgtcctatcatcactcaaaacaacagactctatttcatctctgctcacgagcaacctgatcgttatttcaagaattggtctgcgctttacaccgtggagctcaacagcgcaaagagagaagttacacgtgtcactccaccagacaccgccgactttagtccggcggtttctcaatctggagatttcttagccgttgcttcttatggaactcgctcttggggtggtgagtttcacgagatcaacactgatattactgttttcaaagcatcaaaaccagagacaagagtggttatctgcgagcgtggtggatggccgacttggtccggcgattcaactgttttcttccaccaccaagcagacgacggttggtggagcatcttccgggtagatataccggagaatttcacggaatataccgatttcccaatcacaccaatccgagtcactccatctggactccattgcttcactcctgcagctttccgcgacgggaaacgaatcgccttagcaactcgccgtcgcggcgtcaaccaccgtcacatcgagatttacgaccttgaaaacacaacgtttcagccggtgactgagtcactcaatccgagtttccaccattacaaccctttcgtgtctccagactccgagttcctcggctaccaccgattcagaggcgagtcaactcaaggcgagtcaatcgtacctaacatcgaatccatcgtttcaccaatcaaaaccctccgattactaagaatcaacggatcgtttccatcatcatctcccaacggtgatctaatcgcattgaactccgatttcgacatcaacggtggaatcaaagtatctaaatccgacggttcaaaacgatggacgttgatcaaagaccgtacagctttctacaattcatggagtccaacagagcgtcatgtaatctacacatctctaggtccaatcttctctccggcgagaatcgcggttcagatagctcgaatcaagttcgatccatcagatctcaccgctgataaagaagatcttccatgtgatgtgaagattctcactctagagaacactgggaataacgcttttccgtcttgctctccggacggtaaatcaatcgtgttccgatctggtagatcaggtcataaaaatctctacattgtagacgccgttaacggagaatctaacggcggtggaatacgacggttaacggatgggccatggattgacactatgccttgctggtctccgaaaggagatctcatcggattctcatctaatcgtcataatccagagaacacggccgtgttcggtgcttacgtggtgagacctgacggtactggtttgaggaggattcaaatttcgggaccggaagggtctgaggaagcggcgagggagagagttaatcatgtgagtttcaataaagatggtgattggcttgttttcgcggcgaatttgagcggagtaacggcggagccggtgacgatgccgaatcagtttcagccttatggggatttgtacgttgtgaaattagacggaacgggattgaggaggctgacgtggaatgggtatgaagatgggactcctacgtggcatactgctgatgaattggatttgagtcagttgaatttgaacggtcaagatggtgacaagcttgaaggtcagtttgaggagccgttgtggatttcttgcgatatctga

SEQ ID NO: 7365 - protein, 652 aa, Arabidopsis thaliana
METPKGTIIFTTVGRTHYGFDVFSLNIATSVERRLTDGVSVNFNAQFVNDKSDDVVFVSERNGSARIYKTRSGISKPEQIPGAPESYFHDRPIITQNNRLYFISAHEQPDRYFKNWSALYTVELNSAKREVTRVTPPDTADFSPAVSQSGDFLAVASYGTRSWGGEFHEINTDITVFKASKPETRVVICERGGWPTWSGDSTVFFHHQADDGWWSIFRVDIPENFTEYTDFPITPIRVTPSGLHCFTPAAFRDGKRIALATRRRGVNHRHIEIYDLENTTFQPVTESLNPSFHHYNPFVSPDSEFLGYHRFRGESTQGESIVPNIESIVSPIKTLRLLRINGSFPSSSPNGDLIALNSDFDINGGIKVSKSDGSKRWTLIKDRTAFYNSWSPTERHVIYTSLGPIFSPARIAVQIARIKFDPSDLTADKEDLPCDVKILTLENTGNNAFPSCSPDGKSIVFRSGRSGHKNLYIVDAVNGESNGGGIRRLTDGPWIDTMPCWSPKGDLIGFSSNRHNPENTAVFGAYVVRPDGTGLRRIQISGPEGSEEAARERVNHVSFNKDGDWLVFAANLSGVTAEPVTMPNQFQPYGDLYVVKLDGTGLRRLTWNGYEDGTPTWHTADELDLSQLNLNGQDGDKLEGQFEEPLWISCDI

SEQ ID NO: 7366 - DNA, 2193 bp, Zea mays
  CDS (1)..(2193)
atgggagagagccgcggcagcatcgcctttttcgccacctaccggccaccagtgccgctagacatcttctccgtgcccatcccgccgtcttcgatccgcgacgaggtacacctcacggacggcgtctcctacaactacaactgccgccccatccccaaggacgcgctcaagtccctgctcaagcgccccaagctcgctgccgacggcggcgccaccgacgccgacgtcgacagcggccgcgtctccggccttctcttcgtctccgagcgggacgatggccttgagacgctccgcgtggccctgcatttcaaagactccggcgagcaggcctgcaaggtgttctccctggctgacgtcttcggcgccgccgacttcagcggcgtgcgcctcgaggatagcggctgcgtcggcggcggctacaaggtgggctctcgcaccgtggaccactcgctcatctacgtttccaccaaggagccggtgcaagagcgacgcagcccgtggaccgtcgtgtacaagaccaaccttaggaccggcaagaccgagcgtttgactcccaaaggtcaatttgatctgagcccagctgtgtcgccgtcggggaagaaggtggccatggccacgttccggccggagggctgggagggcgagatcgaggacctgcagactgatatcttcgtgatgaacgtggagaggccgccgatgcggaaacggctgattaggaacggcgggtggccgtcgtgggccagcgaggacgtcatcttcttccacaggaaggtgggcgagacctggggagtcttccgccacgacacgaggacgaacgagacggtgcgggtgacgccggaggccttcgacgcgatgacgccggcagccatcagcgacaccaaggttgcggtagcgaccattcggcagaagtccaagttcagcgacgtccgcgtggaggcgcagtaccgccacatcgagatcttcgacacggcggccgcggcggggcagccgtcggtgcaggtgacccagaagacgaggcccaaggcggaccacttcaaccccttcgtcctggacgacggcgtccgcgtcggctaccaccgcgccaggagcgacctcgtgaaacccggcgacgacgtgctctcgcggaacttcgacaagattgagtcgccggtgaaggacgtgggactgttccgggtgtctggcgtgttcccaaccatctccaaggacgggtcgaagctggcgttcgtggacaacgagttcaaggcggtgtgggtcgccgacagccagggtctgcgcgtggtgtacgagaccaagggccccgacaacattttctcgccgatgtggaaccagaaccccgacaaggacatcctgtacgtgtgcatgggcccctccttcaacgccggcaagccgctggagatctgcgccatccccaacgtgtccagcggcgcgcggcagcgccgacagctcaccaagggcaagttcaacaacgctttcccgtcgagcagccccgacgggaacaggttcgtgttccggtcgaccagggacggcggcgacaagaagcacaagaacctgtacatcgcggagaacgcggaggtgggcgagtatggcgacggcacggtgacgcggctgaccaacggggagtggacggacacgcactgccagtggtcgcccagcggggactggatcgtcttctcgtcaacgcgggacaaacccaaggacgcaccggaactggacaacggcctggatccgggctacttcgcggtgttcatggtgaaggcgagcgacccgacggtggtgatccgggtgatacggagcggcgacgacctcggtgggcacgtgaaccacccggtgttcagcccggacggcaggagcatcgtcgtgacgtccgacctcgccgctgtgtcggccgaccccatctcgctgccgctcttcatccactccgtgcggccctacggcgacatcttcgtggtggacatcgacccggaggatgcgagcaagaacaaggacgtgaagaagttccaccgggtcacgcacagccgctacgagtactcgacgccgacgtggacggtgtttgccacggatgatcccaacgcgcagtggaacatgctggtgaagaaagactcgtacacgccggcgtgcccctacgcgtacccggacggcggcgagagctggcacatgaccgggcacctctgcatccctaggaggtgctgctga

SEQ ID NO: 7367 - protein, 730 aa, Zea mays
MGESRGSIAFFATYRPPVPLDIFSVPIPPSSIRDEVHLTDGVSYNYNCRPIPKDALKSLLKRPKLAADGGATDADVDSGRVSGLLFVSERDDGLETLRVALHFKDSGEQACKVFSLADVFGAADFSGVRLEDSGCVGGGYKVGSRTVDHSLIYVSTKEPVQERRSPWTVVYKTNLRTGKTERLTPKGQFDLSPAVSPSGKKVAMATFRPEGWEGEIEDLQTDIFVMNVERPPMRKRLIRNGGWPSWASEDVIFFHRKVGETWGVFRHDTRTNETVRVTPEAFDAMTPAAISDTKVAVATIRQKSKFSDVRVEAQYRHIEIFDTAAAAGQPSVQVTQKTRPKADHFNPFVLDDGVRVGYHRARSDLVKPGDDVLSRNFDKIESPVKDVGLFRVSGVFPTISKDGSKLAFVDNEFKAVWVADSQGLRVVYETKGPDNIFSPMWNQNPDKDILYVCMGPSFNAGKPLEICAIPNVSSGARQRRQLTKGKFNNAFPSSSPDGNRFVFRSTRDGGDKKHKNLYIAENAEVGEYGDGTVTRLTNGEWTDTHCQWSPSGDWIVFSSTRDKPKDAPELDNGLDPGYFAVFMVKASDPTVVIRVIRSGDDLGGHVNHPVFSPDGRSIVVTSDLAAVSADPISLPLFIHSVRPYGDIFVVDIDPEDASKNKDVKKFHRVTHSRYEYSTPTWTVFATDDPNAQWNMLVKKDSYTPACPYAYPDGGESWHMTGHLCIPRRCC

SEQ ID NO: 7368 - DNA, 2067 bp, Oryza sativa
  CDS (1)..(2067)
atggccactcctttgctcgccgcgctcctcgccgccgcgctgctcgcctcgccggcggcgccggcggcgtcggccagcggcggcaccatcgtcttcaccaccctcggccgcagccgctacgagttcgacatcttctccctccccctcgcgccctccccccataaccccgccgccgccgccgagctccgcctcaccgatggcgtctccgtcaactacaacggcaacttcgcccccgcctccgattccatcctcttcgtctccgagcgcaacggctccctcaacctctacctctccccggttccctcctcccgccgcgaggcgctcgagtcggcgtcgtcgtcgtcgtcttcggcggcggcgacgatctcgccgctcctcccatgggagccaatcgcgctcaaggaccggccgtcgctcacccccgacggctcccgcctcgtctacgtctccaccgccgtccccgccgcggagccgcgcagcagctgggccgccgtgtactccaccgagctgtccaccggccgcacgcgccgcctcacgccgcttggcgttgcggacttcagccccgccgtgtcgccctcgggcgagtggacggccgccgcgtcgcccggcgccgccggttggagcggcgaggtcgaggacctgcgcactgacatctacgtcttccgcaccgccgacgggtcgcgccggtcgctcgccatccgtgacggcggctggccgagctgggccgacgagaccaccgtcttcttccaccgccgggacagcgacggttggtacggcgtctaccgcgccgagatctccgtcaccggcgacggggtcgaagcggcgtccgtggagcgaatcaccccgccggggttccacgccttcacgccggccgcgtcgcccggcgcgccggggctcgtggcggtggcgacacggcgggcgggctccgactaccgccacatcgaggtgatcgacgtgagcagcgacggcaagaacgcctacttcgaggtgaccaggcccgtggcaccgcgcgtgcaccacttcaacccattcatctcgccggacggcgcgcgcgtcgggtaccaccggtgccgggggagagggaacggcgactcgccgctgctgctggagaacatcaagagcccagggtcaccggacacgttctcgctcttcaggatcgacggctcgttcccctccttctcgcacgacggcaagaagatcgcgttcgtcgggctgccggggatgtacgtggtgaactccgacggctccggtggtcgccgcaagatcttctccgggaacgccttctcgacgtcgtgggactggaagaggaaaggcgtggtatacaccagcatcgggccggatttcgccagcgagaccacggaggtggacgtggtggccatctccctcggcgacgacgacgacgagtcaaccatctcgatgaagaagctgaccgtgggaggcgagaacaacgcgttcccgtcgccgtcgccggacgggaagtgggtggtgttccggtcggggagatccgggaacaagaacctgtacatcatcgacgccgaggacggcgaggccggcggcatccggcggctgacggaggggccatggtcggacacgatgtgcaactggtcacccgacggcgagtggatcgccttcgcctccgaccgccatgccccggggagcggcagcttcgccatctacatggtgcaccccaatggcaccgggctgcggcgggtggtgcacagcggcggcagcggccggaccaaccacccatggttcagcccggactccaagagcctcgtcttcacctccgactacgccgccgtctccgccgagccggtctccaaccctcaccattaccagccatacggcgagatcttcaccgtcgacatcgacgggtccaacatccggcggctcacgcacaactcgttcgaggacggcacgccgtcgtggacgccatacttcctggagccccgagacgtcggcgagacgctgcaagcctcgggcaggtgcgcgttccaggattgccactggctcaacatccaagatgctgcccaacctgaagagctcaactatggcaagagctgctga

SEQ ID NO: 7369 - protein, 688 aa, Oryza sativa
MATPLLAALLAAALLASPAAPAASASGGTIVFTTLGRSRYEFDIFSLPLAPSPHNPAAAAELRLTDGVSVNYNGNFAPASDSILFVSERNGSLNLYLSPVPSSRREALESASSSSSSAAATISPLLPWEPIALKDRPSLTPDGSRLVYVSTAVPAAEPRSSWAAVYSTELSTGRTRRLTPLGVADFSPAVSPSGEWTAAASPGAAGWSGEVEDLRTDIYVFRTADGSRRSLAIRDGGWPSWADETTVFFHRRDSDGWYGVYRAEISVTGDGVEAASVERITPPGFHAFTPAASPGAPGLVAVATRRAGSDYRHIEVIDVSSDGKNAYFEVTRPVAPRVHHFNPFISPDGARVGYHRCRGRGNGDSPLLLENIKSPGSPDTFSLFRIDGSFPSFSHDGKKIAFVGLPGMYVVNSDGSGGRRKIFSGNAFSTSWDWKRKGVVYTSIGPDFASETTEVDVVAISLGDDDDESTISMKKLTVGGENNAFPSPSPDGKWVVFRSGRSGNKNLYIIDAEDGEAGGIRRLTEGPWSDTMCNWSPDGEWIAFASDRHAPGSGSFAIYMVHPNGTGLRRVVHSGGSGRTNHPWFSPDSKSLVFTSDYAAVSAEPVSNPHHYQPYGEIFTVDIDGSNIRRLTHNSFEDGTPSWTPYFLEPRDVGETLQASGRCAFQDCHWLNIQDAAQPEELNYGKSC

SEQ ID NO: 7370 - DNA, 1980 bp, Oryza sativa
  CDS (1)..(1980)
atggagcccaccggcacgatcgtcttcgccaccgtcggcgtcaccaacttcggcttcgacgtcttctccgccgccgtgccactgccgccgatggaggaggacgccgagcgccgccacacggacggcgtatccgtgaacttcaacgcgcagttcgtcgacgatggcggggaggaggtggcgttcgtgtcggagcgaggcggcgcggcggggctgttccggtgccggccggggcccgagcagcgggccgagccgctgccgacggtggaggggagcctgttccatgaccgcccgacggtgaggggcgggaggttgtacttcgtctccgcccacgagcagccgccggcgccgttcaggagctgggcggcggtgtacgcgacggagattgggagcaaggagacggtgcgggtgagtcctccgggcgtcgtggacatgagccccgccgtgtcggactccggggagctcgttgccgtcgcgtcgtacggggatcggccgtgggcgttcgacttccgcgtgctggaaacggaggtcgccgtcttccgcgccgccgatccagccaggcgcgtcgtcgtggtggggcgcggtgggtggccgacgtggcacggcgagggcacggtcttcttccaccgcgtcgccgacgacgggtggtggagcgtgttccgggtggacgtctcgcctgagaccctcgagcccaccggcggcgagaggcgagtgacgcctcccgggctgcactgcttcactcccgccgcggtcggccgcggcggcggcgggcggtggatcgccgtggcgacgcggcggaaggggcgcgcgcagcggcacgtcgagctgttcgacctcgagacggagagcttctccccgctcaccgagcgcctcaacccggagctccaccactacaaccccttcttctccccgtccggcgaccgcgtcgggtaccaccgcttccgcggcgccggcgcgcggggggactcggtggtgccctacctgcagccggtgcagagcccggtgagctcgctccggatgctgcgcgtgtacggcacgttcccgtcgttctcgccggacgcggcgcacctcgccatgaacggcgacttcttcaagacgccgggcgtcaccatcctccgatccgacggcgccaagcggtgggtgctcacgcgggagcccaacctgttctacacgtcgtggagccccgccgagagcggggtcatcttcacctccatgggccccatcttcgagaccaccaaagcgacggtgaggatcgcgcggctggagttcgacgccggcgagctcaccaccggccgcgacgaggtcgcggccacgctcaaggtgctcacccggccggaggccggcaacgacgcgttcccggcggtgtcgccgtgcgggaagtgggtggtgttccggtcaggccgctccggccacaagaacctctacatcgtcgacgcggcgcacggcgaggacgtcggcgccggcgaggggacgatccggcggctgaccgacggcgagtggatcgacacgatgccgagctggtcgccggacgggagcctgatcgcgttctcctccaaccgccacgacccgacgaacgccgccgtgttcagcatctacctggtccggccagacggctccgggctccgccgcgtccacgtcgccgggccggcggggagcgcggcggcggacagggagcggatcaaccacgtgtgcttcagcccggactcgcggtggctgctgttcacggccaacttcggcggcgtgatggcggagcccatctcggcgccgaaccagttccagccgtacggcgacctgtacgtgtgccggctcgacggctcggggttggtcaggctcacctgcaacgcctacgagaacggcacgccggcgtggggcccggcgagctcgccggcggcggggctggagtcgctgtcgctgggcccgggcgccggggacgagtcgctgggcgagtttgatgagccgctctggctcacttgcgacgtctga

SEQ ID NO: 7371 - protein, 659 aa, Oryza sativa
MEPTGTIVFATVGVTNFGFDVFSAAVPLPPMEEDAERRHTDGVSVNFNAQFVDDGGEEVAFVSERGGAAGLFRCRPGPEQRAEPLPTVEGSLFHDRPTVRGGRLYFVSAHEQPPAPFRSWAAVYATEIGSKETVRVSPPGVVDMSPAVSDSGELVAVASYGDRPWAFDFRVLETEVAVFRAADPARRVVVVGRGGWPTWHGEGTVFFHRVADDGWWSVFRVDVSPETLEPTGGERRVTPPGLHCFTPAAVGRGGGGRWIAVATRRKGRAQRHVELFDLETESFSPLTERLNPELHHYNPFFSPSGDRVGYHRFRGAGARGDSVVPYLQPVQSPVSSLRMLRVYGTFPSFSPDAAHLAMNGDFFKTPGVTILRSDGAKRWVLTREPNLFYTSWSPAESGVIFTSMGPIFETTKATVRIARLEFDAGELTTGRDEVAATLKVLTRPEAGNDAFPAVSPCGKWVVFRSGRSGHKNLYIVDAAHGEDVGAGEGTIRRLTDGEWIDTMPSWSPDGSLIAFSSNRHDPTNAAVFSIYLVRPDGSGLRRVHVAGPAGSAAADRERINHVCFSPDSRWLLFTANFGGVMAEPISAPNQFQPYGDLYVCRLDGSGLVRLTCNAYENGTPAWGPASSPAAGLESLSLGPGAGDESLGEFDEPLWLTCDV

SEQ ID NO: 7372 - DNA, 2070 bp, Glycine max
  CDS (1)..(2070)
atgaagacacgccacttacttaatgatctgtgtctagtagtgctagtgttagccctaggttgtgcagcggaggaggattccacttccaccgccagcatcatcttcaccacactcggcagagcctcctacgccttcgacatctattccctcccagtcccagttcagcaacaacaacaacaacctctctccccaagccaagaacttctactcaccgatggccactccgttaatttcaacggccacttcctttccaatagttccgctattcaactacccaaacactcccctcctctccaactcgtttacgtcaccgagagaaacggctaccccaccatattctacgacgccatttatagttcttctatggtctcaaacagaatccaaatccctctcttatccaaccacctcagcgacgcttccatcaaagacaagcccagcgtcacccccgatggacaatatttactatacgtgtccagccacgagaacccgggcgttccacgggccagttggaccgcggtttactccactcagctcgagtcaggcctcacccaaagactcaccccttacggtgtcgctgatttcagcccatccctctctccctctggtctctggaccgctgtcgcttcctacgggcctcacggttgggccggtgaagtagaagatctcaccactgacatctacgtcttcctcactcacgacggaactcaccgattcaaaatcgttgagcacggtggctggcccacctgggtcgatgatcgcactctttacttccaccgtcgaggccaagaccactggtggagtatttaccgagccattctcccctccaacgctcctttttcagttgactcggtcttcgtcgaacgagtcaccccaccgggtctccacgcgttcacacccgccacttcccccggcaacaacaacttcatcgccgtcgcaaccagaaggccaggctccaattttcgtcacatcgagctattcgacctcgctagtaacgaattcactgagctgactcggttggtctcgcctaattctcaccacctcaacccgttcatctcgcccgattcaacccgggtcggttaccataaatgcagaggagaacccaacgctcacagtaccccacagtttttcctcgagaatgttcggagccccgtccccggtctaactctcttccgcttcgtcggttctttcccggttttctccccctccggcgaccgaatcgcgtacgtcgagatgcccggagtttatgtcgtgaaccgggacggttcgaacctgcgtaaggtttccaacgcgatggcgttttcaaccgcttgggaccgggttcgacccggtgtcatctacaccgcaattggagaaacatttgctccggagagctcgcaggttgacatcgtgtccatcgacgttgaccatgaaaacagtgtgaagaggttgaccctggacggaaaaaacaacgcgtttccgtcaccctcgccagacggtaaatggatcgtgtttcggtcgggtcgatcggggcataagaacctttacataatggacgcagttgatggtgagaagaaggagcttcgaagattaacggagggtccgtggactgataccatgtgcaactggtcaccggatggagaatggatcgcttttgcgtcggaccggcatgacccgggtagtgggagcttcgagatctacctgatccacccgaacggaaccgggttgaggaaactgattcaaagcgggtcgggtggaagaacaaaccacccgtatttcagccccgatgggaagagcttaacgttcacttcggattatgcgggaatttcggctgagccaatctcgaacccgcaccactaccagccgtatggtgaaatattcaccgttagattggatggttccgggatcaagaggttgactcataactcgtatgaggatggaacacctgcttggtcccccaagtatatgccgccggtgaatgtgccaaagggaggaccctattgctcttttgatgattgtcattggctcaacaatatgcccatttctactgctttcggtgtgtctaaggctaagcctcagtgtgctgctctgtaa

SEQ ID NO: 7373 - protein, 689 aa, Glycine max
MKTRHLLNDLCLVVLVLALGCAAEEDSTSTASIIFTTLGRASYAFDIYSLPVPVQQQQQQPLSPSQELLLTDGHSVNFNGHFLSNSSAIQLPKHSPPLQLVYVTERNGYPTIFYDAIYSSSMVSNRIQIPLLSNHLSDASIKDKPSVTPDGQYLLYVSSHENPGVPRASWTAVYSTQLESGLTQRLTPYGVADFSPSLSPSGLWTAVASYGPHGWAGEVEDLTTDIYVFLTHDGTHRFKIVEHGGWPTWVDDRTLYFHRRGQDHWWSIYRAILPSNAPFSVDSVFVERVTPPGLHAFTPATSPGNNNFIAVATRRPGSNFRHIELFDLASNEFTELTRLVSPNSHHLNPFISPDSTRVGYHKCRGEPNAHSTPQFFLENVRSPVPGLTLFRFVGSFPVFSPSGDRIAYVEMPGVYVVNRDGSNLRKVSNAMAFSTAWDRVRPGVIYTAIGETFAPESSQVDIVSIDVDHENSVKRLTLDGKNNAFPSPSPDGKWIVFRSGRSGHKNLYIMDAVDGEKKELRRLTEGPWTDTMCNWSPDGEWIAFASDRHDPGSGSFEIYLIHPNGTGLRKLIQSGSGGRTNHPYFSPDGKSLTFTSDYAGISAEPISNPHHYQPYGEIFTVRLDGSGIKRLTHNSYEDGTPAWSPKYMPPVNVPKGGPYCSFDDCHWLNNMPISTAFGVSKAKPQCAAL

SEQ ID NO: 7374 - DNA, 1971 bp, Glycine max
  CDS (1)..(1971)
atgttgccgccagcgggaaccatcgtattcaacaccgtcggaagagtccaatacggtttcgacgttttctctgtcgacctcaatcaccaacagcctccgccccacgccaccgcagaccaccgcctcaccgacggtgtctcgattaacttcaacgcacaattcattaacccccaaaacgacgtcgtcttcgtatccgaaagaaccgggtcgccccgcttctacattacaaaacccgacactaaaccccagcctttaccctttctgcccaacgctctcttccacgatcgcccaatcgttaaaaacggaaagctctacttcgtttccacgcacgaagaaaacgacgccgttttcactagctggagcgccgtttactccaccgccatagatgactccaccgccaccgtcaagagactcaccccgcgcggcgaggtggactacagccccgccgtctccctcaccgggaaattcctcggcgtcgcttcttaccgctctcgccgctggcaaaccaacgatttccgcgaactccaaacggagatcgtcgttttccccgagtccgatccaaaaaaccgagtcacggtgagcgagcgcggtggctggccatcgtggtcccaagattcaaccattttcttccaccgaatcgccgaagatggatggtggagcatcttccgcgtcgatttaaccgattccgaactttcagaatctcgaaactcgccgattcgcgtcacgccgccggggttgcactgtttcactccggcagctttccacgacggaaagcgcgtcgcggtcgcaactcgccggagagaaagcaatttaaggcacgtcgaaatcttcgatctcgaatcgcaaacgttccaacgaatcaccgaagacataaaccctaactttaaccattacaacccgttcgtctcgttggactctcgccacctcgggtaccaccgattccgaggcgagtcgattcagggcgagccaatatacccgcacctcgacaaagtcctctctccggttcgcgacctacagttactcagactcaacggttcgtttcccaccttctcccccgacggcgatttcatcgctttcaaccacggcttagacggcaacgttaacggcggcgttaaaatcgttaaatcgaacggttccaaacgctggacgttgctcaaaggacgaacgtgcttccacaacgcgtggagcccaacggagaagaacgtgatatacacctccgtcggtccaatcttcgagtcggtttataaaacggttcaaatcgcgcgcatcgagttcgacccggttcatttaactaacgaccgtgaagaggttccgtttaagttaacgattctcacgagagaagacacagggaacaatgcttttccgtcatgctcccctgacgggaagagcattgtgtttcggtctggaagggaaggatacaagaacttgtacatagttgacgctgttaaaggggagtttgacggcgggataaggaggttgacggagggggagtggatcgatacgatgccgtgttggtcgccgaaaggggatttgatagcgttttcatcgaacaggcatgaccctaagaatagtgaggtgtttgggatatatttggtggggccaaatgggagtgggttgaggagggttgaggtggcaaagggggtcgaaggaatgaaagagaggttgaaccacgtgtgcttcagccgcgacggagagtggttgctgttcacggcgaacttgggtggcgtgagtgcggagccggtggggctgccgaaccagtttcagccgtatggggatttgtatgtggtgaggttggatgggagtgggttgaggaggctgacgtgtaatgcgtatgagaatgggacgcccacgtggcaccatggggatttggcgctgtgtgctcctagagaagatgatggcgaaggaggtcaggattgggataagttgaagggtgagtttcaagaaccactttggatcacgtgtgatatttga

SEQ ID NO: 7375 - protein, 656 aa, Glycine max
MLPPAGTIVFNTVGRVQYGFDVFSVDLNHQQPPPHATADHRLTDGVSINFNAQFINPQNDVVFVSERTGSPRFYITKPDTKPQPLPFLPNALFHDRPIVKNGKLYFVSTHEENDAVFTSWSAVYSTAIDDSTATVKRLTPRGEVDYSPAVSLTGKFLGVASYRSRRWQTNDFRELQTEIVVFPESDPKNRVTVSERGGWPSWSQDSTIFFHRIAEDGWWSIFRVDLTDSELSESRNSPIRVTPPGLHCFTPAAFHDGKRVAVATRRRESNLRHVEIFDLESQTFQRITEDINPNFNHYNPFVSLDSRHLGYHRFRGESIQGEPIYPHLDKVLSPVRDLQLLRLNGSFPTFSPDGDFIAFNHGLDGNVNGGVKIVKSNGSKRWTLLKGRTCFHNAWSPTEKNVIYTSVGPIFESVYKTVQIARIEFDPVHLTNDREEVPFKLTILTREDTGNNAFPSCSPDGKSIVFRSGREGYKNLYIVDAVKGEFDGGIRRLTEGEWIDTMPCWSPKGDLIAFSSNRHDPKNSEVFGIYLVGPNGSGLRRVEVAKGVEGMKERLNHVCFSRDGEWLLFTANLGGVSAEPVGLPNQFQPYGDLYVVRLDGSGLRRLTCNAYENGTPTWHHGDLALCAPREDDGEGGQDWDKLKGEFQEPLWITCDI

SEQ ID NO: 7376 - DNA, 2112 bp, Arabidopsis thaliana
  CDS (1)..(2112)
atgaaactcacaaacgctctcttcttcttcttccttatctgtctcctctctttatcgtcagcttcatcgaacaagcctcagctttcaaatggctcgaccatcttattcacgacgatagggagacccactttcgaattcgacatctttactctccccacgagccaccgtccaccgtcacccgccgatgagcaccgtctcaccgatggcaaatctattaacttcaacggctatttcgcttctccttctacggcgttaatctcacttctacccaaaagaactcagattcaaccacaagacgtgcatctcatctacgtcactgagagagccggaactcctagcttaaactacgacgtcgttcacagcgataacgttggatctagaattcaggttccgttattttccggcgaggaacaacagagtggtatgaatgtaaattccatgaaagacacgcctgttttaacaaacggctatcttgtccacgtgtcgacacatgagaatccgggtaagcccatggcgagttgggccgctgtttactcgactgagttacgaactaagtcgactcggcggcttacaccactgggtatcgctgacttttctccggctgtgtctccgtctgggaagtggactgccgtggcttcgtttggagagaaaggctggacttggagcatggtagagaaagagattagttcagacgtctacgttttcctgactcaggatggaactcagcgagtcaaggtggtcgagcaaggcgggtggccgagatgggtcgatgactcgactctgtatttccaccggaaaagcgacgacggttggatcagcgtgtaccgagcgattttacccaaaaccggaccggttaccaccaaatcggttacgattcaaagagtcacaccaccgggtcttcacgctttcacacccgccacgtcaccaaacaataacaacttcatcgcggtggctacaaggaggcctggatcagaaatccgccacgtggagcttttcgatttaaagaagaacgagttcgtcgagttgactcgtttagtctcgccgaagagtcatcactttaacccgtttctttcccctgactcgtcccgagtcggataccatagctgcagaggtgacgcaactggacgtaaaactcctcggaatctcctccaaagcctcaaaacaacttcaaacgacctctctctcttcagattcgacggtgcgttcccgtctatctcgccggaaggtgacagattcgcgttcgtctctttcacaggcgttttcgtggtgaacccagatggttcaggtctacgtcaattgcttccacaaatgggatttggaacagtttgggatcctattcgacatggaatcgtctacacaagctcaggtccagctttagctccaggaaagtctcaaatcgatattctcgccataaacgtcgatgcacctagtccagcaaccgccgttaaaaaactaacgactaccggtgaaaacaacgcttttccgtggccatcacctgacggtaaacggatcgtgttccgttctgcgcggtccggtactaaaaacctttacataatggacgcagagaaaggtgaatccggtggtttgttccggttaacgaacggaaactggaacgatacgatagctacttggtcacctgatggtaattggattgtgtttgcatccaaccgggaatttcccggtacgttgttgatgaatatatatgtggttcatccggatgggaccggtttaaggaagctggcgcaaaacttgaccggtttggtatcgatgcatccgatgtttagtcccgacagtaagagaatcgtgtttactaccatttatgctggaatctcggcggagcagatcggtaatccgcattttaacgtcccgagtagtgagatttttaccgtgaacttggacggctctggtttgacgaggctaacgcataactcggtggaagatggaccacccatgtggttccctaagatcaaagctactggtgatgtggcttggcctaagaggtttggccctagttgctctatccaagatttcaagacgcaaaatactaccgtgaaaatgaaaatgaataagcccgcaacaatgtcatcaatgtgtgttgttccttcacaatga

SEQ ID NO: 7377 - protein, 703 aa, Arabidopsis thaliana
MKLTNALFFFFLICLLSLSSASSNKPQLSNGSTILFTTIGRPTFEFDIFTLPTSHRPPSPADEHRLTDGKSINFNGYFASPSTALISLLPKRTQIQPQDVHLIYVTERAGTPSLNYDVVHSDNVGSRIQVPLFSGEEQQSGMNVNSMKDTPVLTNGYLVHVSTHENPGKPMASWAAVYSTELRTKSTRRLTPLGIADFSPAVSPSGKWTAVASFGEKGWTWSMVEKEISSDVYVFLTQDGTQRVKVVEQGGWPRWVDDSTLYFHRKSDDGWISVYRAILPKTGPVTTKSVTIQRVTPPGLHAFTPATSPNNNNFIAVATRRPGSEIRHVELFDLKKNEFVELTRLVSPKSHHFNPFLSPDSSRVGYHSCRGDATGRKTPRNLLQSLKTTSNDLSLFRFDGAFPSISPEGDRFAFVSFTGVFVVNPDGSGLRQLLPQMGFGTVWDPIRHGIVYTSSGPALAPGKSQIDILAINVDAPSPATAVKKLTTTGENNAFPWPSPDGKRIVFRSARSGTKNLYIMDAEKGESGGLFRLTNGNWNDTIATWSPDGNWIVFASNREFPGTLLMNIYVVHPDGTGLRKLAQNLTGLVSMHPMFSPDSKRIVFTTIYAGISAEQIGNPHFNVPSSEIFTVNLDGSGLTRLTHNSVEDGPPMWFPKIKATGDVAWPKRFGPSCSIQDFKTQNTTVKMKMNKPATMSSMCVVPSQ

SEQ ID NO: 7378 - DNA, 2121 bp, Arabidopsis thaliana
  CDS (1)..(2121)
atgaatatatctcagattattttcttcgcgtcccttcttctacggcttcacttatcaacggcggaacatcaaaattcaaacgctggtgatggagacaccatcatattcaccactctaggacgatcgcactacgaatttgacatattcgccctctccacgactcaaccgccgtcagtttccggagagctccgaatcaccgatggggaatcggtaaatttcaacggctatttcccgtctccttctccggctctattatctctccttcccgacgaaaccctaattcaaatggaagattcgtctcctctgcatctcatatacgtcaccgagagaaacggtacttctagcttgtactacgatctagtttacggcggtaattctgattttaaaacgaaacgaagatcggtgttagaagcaccgtctcgagtccaagttccgttgttatcccgctttgatcatctgagtggcatgacggtaaattcttttaaagataagcctagtttgagtggtgagtttattgtctacgtgtcaacccatgagagctcaggtgagccgagagcaagctggaccgccgtttactctaccgagttaaaaaccgggttaaccaggcggttaacaccgagtggtgtagctgatttcagcccggcggtatcgccttccggaaatttaacggctgtggcttcatacggagagagaggctggacaggggaagttgaagagctacgtacggacatctatgtattcttgactcgggatgggtctcaccgtgtcaaggtggtggagcacggtggttggccgtgttgggttgatgagtcgactctgtatttccatagaagaagtgaggaggatggttggatcagcgtttaccgagccatcttacctgaaaacggaccgttgactactgagtcggtgacaattcagcgagtcacaccaccgggagttcacgctttcacaccggccacgtcaccaaacaaccacgagttcgttgcggtagctacaaggagaccaggctcggattaccgccacgtggagttgtttgatctaaagaggaatgagtttatagagttgactcgtttggtggcgccaaagagtcatcacttgaatccattcttgtcccctgactcgtctcgagtcggatatcatagttgtagaggcgatgctaatggacggagaagtcctctgctcttccttgaaaatattcaaaccactacaagggacctctctctctttagaattgatggttcgtttccttcgttctcacctggaggtgatcgtatcgcatacgttaagatgcctggtgtgtttgtggtgaagccggatggttcagggcagcgtgaagtgtacaagggaatggcgttttcgacagcttgggatccggttcgacctggaattgtgtactctagctcaggtccaacgtttgctacagagagaacagaggttgatgttatctctattgacgttgatgcagccgataagtcatcttccgtgaggaggctaacgacaaacgggaagaacaatgctttcccttggccatctcctgatggtaagcggatagtgtttcgttcggggcggactggtcacaaaaacctctacataatggatgctgagaaaggagaaagcggtggtctatggaggttaaccgaaggtgcgtggaccgacacaatgtgtaactggtcaccggatggggaatggatcgcgtttgcatcagatcgagaaagccctggctcgggtagttttgagctcttcttgatccaccccaacggaacagggttaaggaagctcatccaaagcgggacgggtgggagaacaaaccacccgatcttcagcccggacagtaaatcattagtcttcacttctgattatgctggaatctcggcggaaccgatctcgaacccgcatcattaccagccatacggtgatatcttcacggtgaaattagatggctctaatgtgaggaggctaacgcataactcttatgaagatgggacaccggcatgggcccctcggttcatccaccccaacaatgtggagctacaaaggaggaatgattctaggtgctcgttcgaagactgtcactggctcaacaagtaccctacactaaaaggccgaaaaatatcttgttaa

SEQ ID NO: 7379 - protein, 706 aa, Arabidopsis thaliana
MNISQIIFFASLLLRLHLSTAEHQNSNAGDGDTIIFTTLGRSHYEFDIFALSTTQPPSVSGELRITDGESVNFNGYFPSPSPALLSLLPDETLIQMEDSSPLHLIYVTERNGTSSLYYDLVYGGNSDFKTKRRSVLEAPSRVQVPLLSRFDHLSGMTVNSFKDKPSLSGEFIVYVSTHESSGEPRASWTAVYSTELKTGLTRRLTPSGVADFSPAVSPSGNLTAVASYGERGWTGEVEELRTDIYVFLTRDGSHRVKVVEHGGWPCWVDESTLYFHRRSEEDGWISVYRAILPENGPLTTESVTIQRVTPPGVHAFTPATSPNNHEFVAVATRRPGSDYRHVELFDLKRNEFIELTRLVAPKSHHLNPFLSPDSSRVGYHSCRGDANGRRSPLLFLENIQTTTRDLSLFRIDGSFPSFSPGGDRIAYVKMPGVFVVKPDGSGQREVYKGMAFSTAWDPVRPGIVYSSSGPTFATERTEVDVISIDVDAADKSSSVRRLTTNGKNNAFPWPSPDGKRIVFRSGRTGHKNLYIMDAEKGESGGLWRLTEGAWTDTMCNWSPDGEWIAFASDRESPGSGSFELFLIHPNGTGLRKLIQSGTGGRTNHPIFSPDSKSLVFTSDYAGISAEPISNPHHYQPYGDIFTVKLDGSNVRRLTHNSYEDGTPAWAPRFIHPNNVELQRRNDSRCSFEDCHWLNKYPTLKGRKISC

SEQ ID NO: 7380 - DNA, 2133 bp, Physcomitrella patens subsp. patens
  CDS (1)..(2133)
atggcggtgttggcgatttgggtcgcgctttttggagcagggattgcatcgggagtttccctgggagacggggacgcaggaggcacaattgggttttccacactgggtcgattgagtttcgctttcgatgtgtacacggtcgtgttttcgcagatgggagtgctgcggggcggtggtggtggagttggggattttcaggagacgcgtgtgacgttgggagagtcggtgaactacaacgcgcagctgctggaagggtcgggatcggatgtgccggagttgcttttgtacgtatcagaagttgaaggcagcccgcaattgtatcttgacgttccgttgacaggtagatttgcaatcgatcgccttccgacaagaagctcgcggcgcattgagttactagcagacagactgaatgctccctcgaaggcttttctcaatgacaggccatcaatgatcggagacgtgtttatattcgtctctaccgaagaagatgttggaaagcctgtccagggttggaacgccgtttattccttgaattttataacctctgtcgtcaaacgcttgactccgccagggatcactgactacagccctgctgtctctccttctggtgagtgggttgcagtgggttccaatgaaggacggggctggcaacgagagatcgaagcattaaatttggatctctatattttcaaagcagaagacggctctcaaagacgaatgatagtaagaaatggaggttggcctacctggatggacgacaacaccgtatacttccaccgcattgcggatgatggatggtggagcatattcaaagttaatgtgtcggatacaagtgcggatcaagccgagagagtaacaccctcaggagtgcatgccttcactcctgcagcttcaaggtccggaaagtggattgcagttgctacccggcgtgcgtcgtttcggcacattgaaatatttgaactggaatcaaagaagtttttcccactgacagctctcatcaaccctaatacgcatcactacaaccccttcgtgtctcctagctcaaataaaattggatatcatagatgcagaggccttgatcaggacgctcagactgtagaccctcaaattgagtatcagaaatcacctctcccaggtgtctccctggcccgaataaaaggtagtttcccctccatttctccagatgggtcgctcgtttcctttgttgacagcgggaatgactcctcaaccttggctgtgatgaagctggacggttcggagaatcgtgtaatccaccggagtaatgtctttggagagagatgggatcccaaagggaagacaatatatgcatcacaggggcgagtctttgcctccgtaaaaactgtagtacgcatagttgcaatccaagattctgacactgcagaccttggcgctgatgagacaagccacaactacaaatacttgacaaaagaaggtacaggaaacaacgcgttcccatgtccttcacctgatggcaagtatgtcgtattccgctctggacggacagggcgcaagaatctttacatcatggatgctgctggaggcgaagagaagtatttgcgacgactcactgaagggcgttggagggatactatgccagcttggtcacccgacaatgaatggattgcattctcgtccaaccgggcgcatccaactggtgagagatcgttttctttgtatctcatccgacccaatggaacggaccttcatatgctgctggacactggagtagggggacttgccatgcacgctgttttcagccctgatagtaagagaatcgcctttacgagcaactgggctggtgtctcagctgagcctatctctttcccccacgcgtaccaaccgtatgggaccattttcgttatcaatattgatggtactgggctcaccaggttgacacacaacgcttacgaagacgggactccgacatggggacggctacctttaccaaagccagctatttcatctgacggtaggaggagttcgtgcgattttgatgatgtctcgtttctaagcccgccaggactccaaacaaagaagcctcgtggtcaatgtccatacagcttgggcacctatgttaatgcagcagctcatgtgacaagtggttacctttaa

SEQ ID NO: 7381 - protein, 710 aa, Physcomitrella patens subsp. patens
MAVLAIWVALFGAGIASGVSLGDGDAGGTIGFSTLGRLSFAFDVYTVVFSQMGVLRGGGGGVGDFQETRVTLGESVNYNAQLLEGSGSDVPELLLYVSEVEGSPQLYLDVPLTGRFAIDRLPTRSSRRIELLADRLNAPSKAFLNDRPSMIGDVFIFVSTEEDVGKPVQGWNAVYSLNFITSVVKRLTPPGITDYSPAVSPSGEWVAVGSNEGRGWQREIEALNLDLYIFKAEDGSQRRMIVRNGGWPTWMDDNTVYFHRIADDGWWSIFKVNVSDTSADQAERVTPSGVHAFTPAASRSGKWIAVATRRASFRHIEIFELESKKFFPLTALINPNTHHYNPFVSPSSNKIGYHRCRGLDQDAQTVDPQIEYQKSPLPGVSLARIKGSFPSISPDGSLVSFVDSGNDSSTLAVMKLDGSENRVIHRSNVFGERWDPKGKTIYASQGRVFASVKTVVRIVAIQDSDTADLGADETSHNYKYLTKEGTGNNAFPCPSPDGKYVVFRSGRTGRKNLYIMDAAGGEEKYLRRLTEGRWRDTMPAWSPDNEWIAFSSNRAHPTGERSFSLYLIRPNGTDLHMLLDTGVGGLAMHAVFSPDSKRIAFTSNWAGVSAEPISFPHAYQPYGTIFVINIDGTGLTRLTHNAYEDGTPTWGRLPLPKPAISSDGRRSSCDFDDVSFLSPPGLQTKKPRGQCPYSLGTYVNAAAHVTSGYL

SEQ ID NO: 7382 - DNA, 2034 bp, Vitis vinifera
  CDS (1)..(2034)
atgatggtgtcactgcgaacgtgtcgctacctatataagacagccttcgcctcctacactcacactcgcaccccacctccaatggaacccactggaaccattgccttcaccacagttggcagacctcactacggcttcgacctcttttctctcaatctcgatcccaatctcatcaaccacacttctgaacgccgcctcaccggcggtacttccatcaatttcaatggccacttcctcgacgaaaaccagaccctggtttacgtctccgagagaagcggctcgcctcgaatttatcaaatccggcccggtgttaccaaacctgaacagctgctctctgttcccggcagtctctaccatgaccgtccgatcgttaagaacggacggctgtacttcgtgtcggctcatgaacggccagagaagcccttcatcagctggtctgctgtttactccactgggcttgatgacaaggcagttgtgcagttgactcctcacggagttgtcgattacagtccagcgatttctcggtccggaaagttcatagctgttgcatcctatgggtctcgtccttggggcggtgaatttcatgagttgcacactgatattgttgttttccgggaatcggagccggaaaagcgtgttgttgtatgcgagcgtggtggttggcccacctggtccggcgattccaacctctactttcaccggcaggctgatgatggatggtggagcattttcagcgtgaatctgccggagggttttcaatcttctagtatttccgaggctcctcgccggataaccccgccacgagttcactgtttcactcctgcggccatgcaaggtagtaagcgaatcgccgtagcgactaggcggaaggggagcaatttccggcacatagagatatttgatattgattcgaagaagttttatccagtgaccgagtcgctgaatccgaatttccatcactacaacccctttgtatctcccgaatgtggttttctcggctaccaccgattccgaggggagtcatcaccgggcgagtcgaccattccacatctcgatcccgtagtgtctccaataaatgaactgcggatgctgcgactcaacggatcgttcccgtccttttctccggccggtgatttgattgctttcaatcacgacttcgaagcgaaaggcggccttaagatcgtgaaatcagacggttcaaagagatggaccgttttgaaagatcgtacggcattctataactcctggagtcctacagaaaagcatgtgatttacacctcggtaggaccgatctttgagtctgtaaaagcgacggtccagatcgcacgaatctcgttcgatccatcgtatctggatgatgatcgtgaagacattccagccgatgtgaagatccttaccagagaagaaaccggcaataacgcatttccttcttgttcgccggacggcaagtccgtggttttcaggtccggccgctccgggaacaagaacctctacattatagacgccgttaacggagaattagaaggcggtatccgtcagttaactgagggaccgtggattgacaccatgcctagctggtcgccagatggaaaactgatcgccttttcgtcgaacaggcacaatcccgacaacttgaatgctttcagcatatacgtcatccggcccgacggctccgatctccgaagagtctacgtggcgggatctgaaggttcagttgacgtggacagggagagaatcaaccacgtgtgtttcagcgctgactgcgagtggcttcttttcgcggctaacttggggggcatgacggctgaaccgatttcgcttcccaatcagtttcaaccgtatggtgacctgttcgtggtgaggttggacggaagtggattgaagaggctgacatggaatggatatgaaaatgggacgccagcatggcacactgggaatgaggtggatatggggcgtatgtgtttggggtcagagaatggagataagttgacaggggagttcgatgaaccattgtggatctcttgtgagctgtga

SEQ ID NO: 7383 - protein, 677 aa, Vitis vinifera
MMVSLRTCRYLYKTAFASYTHTRTPPPMEPTGTIAFTTVGRPHYGFDLFSLNLDPNLINHTSERRLTGGTSINFNGHFLDENQTLVYVSERSGSPRIYQIRPGVTKPEQLLSVPGSLYHDRPIVKNGRLYFVSAHERPEKPFISWSAVYSTGLDDKAVVQLTPHGVVDYSPAISRSGKFIAVASYGSRPWGGEFHELHTDIVVFRESEPEKRVVVCERGGWPTWSGDSNLYFHRQADDGWWSIFSVNLPEGFQSSSISEAPRRITPPRVHCFTPAAMQGSKRIAVATRRKGSNFRHIEIFDIDSKKFYPVTESLNPNFHHYNPFVSPECGFLGYHRFRGESSPGESTIPHLDPVVSPINELRMLRLNGSFPSFSPAGDLIAFNHDFEAKGGLKIVKSDGSKRWTVLKDRTAFYNSWSPTEKHVIYTSVGPIFESVKATVQIARISFDPSYLDDDREDIPADVKILTREETGNNAFPSCSPDGKSVVFRSGRSGNKNLYIIDAVNGELEGGIRQLTEGPWIDTMPSWSPDGKLIAFSSNRHNPDNLNAFSIYVIRPDGSDLRRVYVAGSEGSVDVDRERINHVCFSADCEWLLFAANLGGMTAEPISLPNQFQPYGDLFVVRLDGSGLKRLTWNGYENGTPAWHTGNEVDMGRMCLGSENGDKLTGEFDEPLWISCEL

SEQ ID NO: 7384 - DNA, 2124 bp, Vitis vinifera
  CDS (1)..(2124)
atgaaccgcataacacttctctttttctttctcagtttggtcatcacactcttctctgcagcggcggaccatgacggccccaccaccagcaccaccagcatcatcttcacaacgctggggagatccgactatgccttcgacgttttcagcctcccgactctggggccttctactatcgccgacgagcttcggattaccgatggtcagtccgtgaatttcaacggtcatttcccatcttctccaattatttctcttctagccaatcaaaccctagttgaaagctcaagcgtgaaacgcccagatgagtctctgcaaaccatctatgtcaccgagagaaatgggtcgtcgaatatatatcttgacataatctattatgatactcccacgaactctaggagaagatctgcactggagaccgcagttcgagttgaggttccgctattgggtactaacactgaacagagcgacggtcgaatttcgatgaaagacaggcctagcttagttggtgaggacttggtttacgtatcgactcacgaggactcgggtgtgcccaggaaaagttgggctgctgtctactcgactcatcttccgacggggtcgactaggcggttgacaccgtatggggtggctgattacagcccggctgtatcgccgtcgggggtatggacagcggtggcttcttatggagagagaggctggggtggggaagttgaagagctcagcaccgatatctacgttttcaggactcgtgatgggtctgagaggacgaaagttgtggaacacggtggttggccgtgttgggtcgatgattctactctgtttttccaccgtagaggcagcgatggctggtggagtatctacagagcgattcttactgagtcagtggttatcgagcgagtcactccacctggtctccacgctttcaccccagctacctcgccaggcaacaaaaacttcattgccgtggcgacgagaaggctcaattcagattatcgccacattgagttgtttgaccttctcagtaacgagtttagggaattaactcgtcggatttctccccaaactcaccactttaatccgttcatctcgcccgattctactcgaattggttaccacagatgcagaggcgacagtaacggagggaaaagccctcacctgctgctcgaaaacctcaaaagcccattacctgaaatctctctgtttagatttgacggttcgttcccttcgttttcaccgggcggcgaccggatcgcttacgtcgaattcccgggggtttacgtggtgaaccgggacggttctggccggcgggaggtgttctccggaatcgccttctccaccgcttgggaccataaacggaaaggggttgtatacactagtgcaggtcccacattcgctacagaaagcacaaaagtggatatagtgtctatcaacgttgatgacgttgaccagcctagctacaaaaagttgaccaccggcggtgagaataacgcatttccctcgccatcaccggacgggaaatggatcgcgttccggtcaggccggtctggctataagaatctgtacataatggatgctgtggatggagagagaggtgggatccatcggttaacagagggcccatggacggacacaatgtgtaattggtcaccggacggtgactggattgtctttgcatccgaccgggagaacccgggtggtggtgggtttgaactgtacgtgattcaccctaacgggaccggcctcaggaaggtggttcatagcggttcagctgggaggactaaccacccatggttcagccctgacgggaagagcattgttttcacttcagactatgccgcagtatcagctgagcccatctccaacgcacatcactaccagccttatggcgatatctttgtggtgaatttggatggctcagggcttcatcgattgacacataattcatacgaggatgggactcccgcctgggctcccaaggtcattaggccggttgatgtgaagttgcaggtggacgggccacactgctcctttgaagattgtcactggctcagcaacactccgaatcatggtgttgaggctgcaccctgggtcttggccaagcctcagtgtggtctacgggcctag

SEQ ID NO: 7385 - protein, 707 aa, Vitis vinifera
MNRITLLFFFLSLVITLFSAAADHDGPTTSTTSIIFTTLGRSDYAFDVFSLPTLGPSTIADELRITDGQSVNFNGHFPSSPIISLLANQTLVESSSVKRPDESLQTIYVTERNGSSNIYLDIIYYDTPTNSRRRSALETAVRVEVPLLGTNTEQSDGRISMKDRPSLVGEDLVYVSTHEDSGVPRKSWAAVYSTHLPTGSTRRLTPYGVADYSPAVSPSGVWTAVASYGERGWGGEVEELSTDIYVFRTRDGSERTKVVEHGGWPCWVDDSTLFFHRRGSDGWWSIYRAILTESVVIERVTPPGLHAFTPATSPGNKNFIAVATRRLNSDYRHIELFDLLSNEFRELTRRISPQTHHFNPFISPDSTRIGYHRCRGDSNGGKSPHLLLENLKSPLPEISLFRFDGSFPSFSPGGDRIAYVEFPGVYVVNRDGSGRREVFSGIAFSTAWDHKRKGVVYTSAGPTFATESTKVDIVSINVDDVDQPSYKKLTTGGENNAFPSPSPDGKWIAFRSGRSGYKNLYIMDAVDGERGGIHRLTEGPWTDTMCNWSPDGDWIVFASDRENPGGGGFELYVIHPNGTGLRKVVHSGSAGRTNHPWFSPDGKSIVFTSDYAAVSAEPISNAHHYQPYGDIFVVNLDGSGLHRLTHNSYEDGTPAWAPKVIRPVDVKLQVDGPHCSFEDCHWLSNTPNHGVEAAPWVLAKPQCGLRA

SEQ ID NO: 7386 - DNA, 2043 bp, Vitis vinifera
  CDS (1)..(2043)
atggatcccaccaccagcatcatcttcacaacgctggggagatccgactatgccttcgacgttttcagcctcccgactctggggccttctactatcgccgacgagcttcggattaccgatggtcagtccgtgaatttcaacggtcatttcccatcttctccaattatttctcttctagccaatcaaaccctagttgaaagctcaagcgtgaaacgcccagatgagtctctgcaaaccatctatgtcaccgagagaaatgggtcgtcgaatatatatcttgacataatctattatgatactcccacgaactctaggagaagatctgcactggagaccgcagttcgagttgaggttccgctattgggtactaacactgaacagagcgacggtcgaatttcgatgaaagacaggcctagcttagttggtgaggacttggtttacgtatcgactcacgaggactcgggtgtgcccaggaaaagttgggctgctgtctactcgactcatcttccgacggggtcgactaggcggttgacaccgtatggggtggctgattacagcccggctgtatcgccgtcgggggtatggacagcggtggcttcttatggagagagaggctggggtggggaagttgaagagctcagcaccgatatctacgttttcaggactcgtgatgggtctgagaggacgaaagttgtggaacacggtggttggccgtgttgggtcgatgattctactctgtttttccaccgtagaggcagcgatggctggtggagtatctacagagcgattcttactgagtcagtggttatcgagcgagtcactccacctggtctccacgctttcaccccagctacctcgccaggcaacaaaaacttcattgccgtggcgacgagaaggctcaattcagattatcgccacattgagttgtttgaccttctcagtaacgagtttagggaattaactcgtcggatttctccccaaactcaccactttaatccgttcatctcgcccgattctactcgaattggttaccacagatgcagaggcgacagtaacggagggaaaagccctcacctgctgctcgaaaacctcaaaagcccattacctgaaatctctctgtttagatttgacggttcgttcccttcgttttcaccgggcggcgaccggatcgcttacgtcgaattcccgggggtttacgtggtgaaccgggacggttctggccggcgggaggtgttctccggaatcgccttctccaccgcttgggaccataaacggaaaggggttgtatacactagtgcaggtcccacattcgctacagaaagcacaaaagtggatatagtgtctatcaacgttgatgacgttgaccagcctagctacaaaaagttgaccaccggcggtgagaataacgcatttccctcgccatcaccggacgggaaatggatcgcgttccggtcaggccggtctggctataagaatctgtacataatggatgctgtggatggagagagaggtgggatccatcggttaacagagggcccatggacggacacaatgtgtaattggtcaccggacggtgactggattgtctttgcatccgaccgggagaacccgggtggtggtgggtttgaactgtacgtgattcaccctaacgggaccggcctcaggaaggtggttcatagcggttcagctgggaggactaaccacccatggttcagccctgacgggaagagcattgttttcacttcagactatgccgcagtatcagctgagcccatctccaacgcacatcactaccagccttatggcgatatctttgtggtgaatttggatggctcagggcttcatcgattgacacataattcatacgaggatgggactcccgcctgggctcccaaggtcattaggccggttgatgtgaagttgcaggtggacgggccacactgctcctttgaagattgtcactggctcagcaacactccgaatcatggtgttgaggctgcaccctgggtcttggccaagcctcagtgtggtctacgggcctag

SEQ ID NO: 7387 - protein, 680 aa, Vitis vinifera
MDPTTSIIFTTLGRSDYAFDVFSLPTLGPSTIADELRITDGQSVNFNGHFPSSPIISLLANQTLVESSSVKRPDESLQTIYVTERNGSSNIYLDIIYYDTPTNSRRRSALETAVRVEVPLLGTNTEQSDGRISMKDRPSLVGEDLVYVSTHEDSGVPRKSWAAVYSTHLPTGSTRRLTPYGVADYSPAVSPSGVWTAVASYGERGWGGEVEELSTDIYVFRTRDGSERTKVVEHGGWPCWVDDSTLFFHRRGSDGWWSIYRAILTESVVIERVTPPGLHAFTPATSPGNKNFIAVATRRLNSDYRHIELFDLLSNEFRELTRRISPQTHHFNPFISPDSTRIGYHRCRGDSNGGKSPHLLLENLKSPLPEISLFRFDGSFPSFSPGGDRIAYVEFPGVYVVNRDGSGRREVFSGIAFSTAWDHKRKGVVYTSAGPTFATESTKVDIVSINVDDVDQPSYKKLTTGGENNAFPSPSPDGKWIAFRSGRSGYKNLYIMDAVDGERGGIHRLTEGPWTDTMCNWSPDGDWIVFASDRENPGGGGFELYVIHPNGTGLRKVVHSGSAGRTNHPWFSPDGKSIVFTSDYAAVSAEPISNAHHYQPYGDIFVVNLDGSGLHRLTHNSYEDGTPAWAPKVIRPVDVKLQVDGPHCSFEDCHWLSNTPNHGVEAAPWVLAKPQCGLRA

SEQ ID NO: 7388 - DNA, 2049 bp, Oryza sativa subsp. indica
  CDS (1)..(2049)
atggccactcctttgctcgccgcgctcctcgcggccgcgctgctcgcctcgccggcggcgccggcggtgtcggccagcggcggcaccatcgtcttcaccaccctcggccgcagccgctacgagttcgacatcttctccctccccctcgcgccctccccccacaaccccgccgccgaggagctccgcctcaccgatggcgtctccgtcaactacaacggcaacttcgcccccgcctccgactccatcctcttcgtctccgagcgcaacggctccctcaacctctacctctccccggttccctcctcccgccgcgaggcgctcgagtcggcgtcgtcgtcggcggcgactctctcgccgctcctcccatgggagcccatcgcgctcaaggaccggccgtcgctcacccccgacggctcccgcctcgtctacgtctccaccgccgtccccgccgcggagccgcgcagcagctgggccgccgtgtactccaccgagctgtccaccggccgcacgcgccgcctcacgccgcttggcgttgcggacttcagccccgccgtgtcgccctcgggcgagtggaccgccgccgcgtcgcccggcgccgccggttggagcggggaggtcgaggacctgcgcactgacatctacgtcttccgcaccgccgacgggtcgcgccggtcgctcgccatccgtgacggcggctggccgagctgggccgacgagaccaccgtcttcttccaccgccgggacagcgacggttggtacggcgtctaccgcgccgagatctccgtcaccggcgacggggtcgaagcggcgtccgtcgagcgcatcaccccgccggggttccacgccttcacgccggccgcgtcgcccggcgcgccggggctcgtggcggtggcgaccaggcgggcgggctcggactaccgccacatcgaggtgatcgacgtgagcgacgacggcaagaacgcctacttcgaggtgacgaggcccgtggcgccgcgcgtgcaccacttcaacccattcatctcgccggacggcgcgcgcgtcgggtaccaccggtgccgggggagagggaacggcgattcgccgctgctgctggagaacatcaagagcccagggtcaccggacacgttctcgctcttcaggatcgacggctcgttcccctccttctcgcacgacggcaagaagatcgcgttcgtcgggctgccggggatgtacgtggtgaaccccgacggctccggtggtcgccgtaagatcttctccgggaacgccttctcgacgtcgtgggactggaagaggaatggcgtgatatacaccagcatcgggccggatttcgccagcgagagcacagaggtggacgtggtggcgatctccctcggcgacgacgacgacgaaaccatctcgatgaagaagctgaccgtgggaggcgagaacaacgcgttcccgtcgccgtcgccggacgggaagtgggtggtgttccggtcggggagatccgggaacaagaacctgtacatcatcgacgccgaggacggcgaggccggcggcatccggcggctgacggaggggccatggtcggacacgatgtgcaactggtcacccgacggcgagtggatcgccttcgcctccgaccgccatgccccggggagcggcagcttcgccatctacatggtgcaccccaatggcaccgggttgcggcgggtggtgcacagcggcgacggcggccggaccaaccacccatggttcggcccggactccaagagcctcgtcttcacctccgactacgccgccgtctccgccgagccggtctccaaccctcaccattaccagccatacggcgagatcttcaccgtccacatcgacgggtccaacatccggcggctcactcacaactccttcgaggacggcacgccgtcgtggacgccgtatttgctggagccacgggacgtcggcgagacgctgcaagcctcgggcaggtgcgcgttccaggattgccactggctcaacatccaagatgctgcccaacctgaagagctcatctatggcaagagctgctga

SEQ ID NO: 7389 - protein, 682 aa, Oryza sativa subsp. indica
MATPLLAALLAAALLASPAAPAVSASGGTIVFTTLGRSRYEFDIFSLPLAPSPHNPAAEELRLTDGVSVNYNGNFAPASDSILFVSERNGSLNLYLSPVPSSRREALESASSSAATLSPLLPWEPIALKDRPSLTPDGSRLVYVSTAVPAAEPRSSWAAVYSTELSTGRTRRLTPLGVADFSPAVSPSGEWTAAASPGAAGWSGEVEDLRTDIYVFRTADGSRRSLAIRDGGWPSWADETTVFFHRRDSDGWYGVYRAEISVTGDGVEAASVERITPPGFHAFTPAASPGAPGLVAVATRRAGSDYRHIEVIDVSDDGKNAYFEVTRPVAPRVHHFNPFISPDGARVGYHRCRGRGNGDSPLLLENIKSPGSPDTFSLFRIDGSFPSFSHDGKKIAFVGLPGMYVVNPDGSGGRRKIFSGNAFSTSWDWKRNGVIYTSIGPDFASESTEVDVVAISLGDDDDETISMKKLTVGGENNAFPSPSPDGKWVVFRSGRSGNKNLYIIDAEDGEAGGIRRLTEGPWSDTMCNWSPDGEWIAFASDRHAPGSGSFAIYMVHPNGTGLRRVVHSGDGGRTNHPWFGPDSKSLVFTSDYAAVSAEPVSNPHHYQPYGEIFTVHIDGSNIRRLTHNSFEDGTPSWTPYLLEPRDVGETLQASGRCAFQDCHWLNIQDAAQPEELIYGKSC

SEQ ID NO: 7390 - DNA, 1980 bp, Oryza sativa subsp. indica
  CDS (1)..(1980)
atggagcccaccggcacgatcgtcttcgccaccgtcggcgtcaccaacttcggcttcgacgtcttctccgccgccgtgccactgccgccgatggaggaggacgccgagcgccgccacacggacggcgtatccgtgaacttcaacgcgcagttcgtcgacgatggcggggaggaggtggcgttcgtgtcggagcgaggcggcgcggcggggctgttccggtgccggccggggcccgagcagcgggccgagccgctgccgacggtggaggggagcctgttccatgaccgcccgacggtgaggggcgggaggttgtacttcgtctccgcccacgagcagccgccggcgccgttcaggagctgggcggcggtgtacgcgacggagattgggagcaaggagacggtgcgggtgagtcctccgggcgtcgtggacatgagccccgccgtgtcggactccggggagctcgtcgccgtcgcgtcgtacggggatcggccgtgggcgttcgacttccgcgtgctggaaacggaggtcgccgtcttccgcgccgccgatccagccaggcgcgtcgtcgtggtggggcgcggtgggtggccgacgtggcacggcgagggcacggtcttcttccaccgcgtcgccgacgacgggtggtggagcgtgttccgggtggacgtctcgcccgagaccctcgagcccaccggcggcgagaggcgagtgacgcctcccgggctgcactgcttcactcccgccgcggtcggccgcggcggcggcggtcggtggatcgccggggcgacgcggcggaaggggcgcgcgcagcggcacgtcgagctgttcgacctcgagacggagagcttctccccgctcaccgagcgcctcaacccggagctccaccactacaaccccttcttctccccgtccggcgaccgcgtcgggtaccaccgcttccgcggcgccggcgcgcggggggactcggtggtgccctacctgcagccggtgcggagcccggtgagctcgctccggatgctgcgcgtgtacggcacgttcccgtcgttctcgccggacgcggcgcacctcgccatgaacggcgacttcttcaagacgccgggcgtcaccatcctccgatccgacggcgccaagcggtgggtgctcacgcgggagcccaacctgttctacacgtcgtggagccccgccgagagcggggtcatcttcacctccatgggccccatcttcgagaccaccaaagcgacggtgaggatcgcgcggctggagttcgacgccggcgagctcaccaccggccgcgacgaggtcgcggccacgctcaaggtgctcacccggccggaggccggcaacgacgcgttcccggcggtgtcgccgtgcgggaagtgggtggtgttccggtcaggccgctccggccacaagaacctctacatcgtcgacgcggcgcacggcgaggacgtcggcgccggcgaggggacgatccggcggctgaccgacggcgagtggatcgacacgatgccgagctggtcgccggacgggagcctgatcgcgttctcctccaaccgccacgacccgacgaacgccgccgtgttcagcatctacctggtccggccagacggctccgggctccgccgcgtccacgtcgccgggccggcggggagcgcggcggcggacagggagcggatcaaccacgtgtgcttcagcccggactcgcggtggctgctgttcacggccaacttcggcggcgtgatggcggagcccatctcggcgccgaaccagttccagccgtacggcgacctgtacgtgtgccggctcgacggctcggggttggtcaggctcacctgcaacgcctacgagaacggcacgccggcgtggggcccggcgagctcgccggcggcggggctggagtcgctgtcgctggtcccgggcgccggggacgagtcgctgggcgagtttgatgagccgctctggctcacttgcgacgtctga

SEQ ID NO: 7391 - protein, 659 aa, Oryza sativa subsp. indica
MEPTGTIVFATVGVTNFGFDVFSAAVPLPPMEEDAERRHTDGVSVNFNAQFVDDGGEEVAFVSERGGAAGLFRCRPGPEQRAEPLPTVEGSLFHDRPTVRGGRLYFVSAHEQPPAPFRSWAAVYATEIGSKETVRVSPPGVVDMSPAVSDSGELVAVASYGDRPWAFDFRVLETEVAVFRAADPARRVVVVGRGGWPTWHGEGTVFFHRVADDGWWSVFRVDVSPETLEPTGGERRVTPPGLHCFTPAAVGRGGGGRWIAGATRRKGRAQRHVELFDLETESFSPLTERLNPELHHYNPFFSPSGDRVGYHRFRGAGARGDSVVPYLQPVRSPVSSLRMLRVYGTFPSFSPDAAHLAMNGDFFKTPGVTILRSDGAKRWVLTREPNLFYTSWSPAESGVIFTSMGPIFETTKATVRIARLEFDAGELTTGRDEVAATLKVLTRPEAGNDAFPAVSPCGKWVVFRSGRSGHKNLYIVDAAHGEDVGAGEGTIRRLTDGEWIDTMPSWSPDGSLIAFSSNRHDPTNAAVFSIYLVRPDGSGLRRVHVAGPAGSAAADRERINHVCFSPDSRWLLFTANFGGVMAEPISAPNQFQPYGDLYVCRLDGSGLVRLTCNAYENGTPAWGPASSPAAGLESLSLVPGAGDESLGEFDEPLWLTCDV

SEQ ID NO: 7392 - DNA, 2067 bp, Oryza sativa subsp. japonica
  CDS (1)..(2067)
atggccactcctttgctcgccgggctcctggccgccgcgctgctcgcctcgccggcggccccggcggcgtcggccagcggcggcaccatcgtcttcaccaccctcggccgcagccgctacgagttcgacatcttctccctccccctcgcgccctccccccataaccccgccgccgccgccgagctccgcctcaccgatggcgtctccgtcaactacaacggcaacttcgcccccgcctccgattccatcctcttcgtctccgagcgcaacggctccctcaacctctacctctccccggttccctcctcccgccgcgaggcgctcgagtcggcgtcgtcgtcgtcgtcttcggcggcggcgacgatctcgccgctcctcccatgggagccaatcgcgctcaaggaccggccgtcgctcacccccgacggctcccgcctcgtctacgtctccaccgccgtccccgccgcggagccgcgcagcagctgggccgccgtgtactccaccgagctgtccaccggccgcacgcgccgcctcacgccgcttggcgttgcggacttcagccccgccgtgtcgccctcgggcgagtggacggccgccgcgtcgcccggcgccgccggttggagcggcgaggtcgaggacctgcgcactgacatctacgtcttccgcaccgccgacgggtcgcgccggtcgctcgccatccgtgacggcggctggccgagctgggccgacgagaccaccgtcttcttccaccgccgggacagcgacggttggtacggcgtctaccgcgccgagatctccgtcaccggcgacggggtcgaagcggcgtccgtggagcgaatcaccccgccggggttccacgccttcacgccggccgcgtcgcccggcgcgccggggctcgtggcggtggcgacacggcgggcgggctccgactaccgccacatcgaggtgatcgacgtgagcagcgacggcaagaacgcctacttcgaggtgaccaggcccgtggcaccgcgcgtgcaccacttcaacccattcatctcgccggacggcgcgcgcgtcgggtaccaccggtgccgggggagagggaacggcgactcgccgctgctgctggagaacatcaagagcccagggtcaccggacacgttctcgctcttcaggatcgacggctcgttcccctccttctcgcacgacggcaagaagatcgcgttcgtcgggctgccggggatgtacgtggtgaactccgacggctccggtggtcgccgcaagatcttctccgggaacgccttctcgacgtcgtgggactggaagaggaaaggcgtggtatacaccagcatcgggccggatttcgccagcgagaccacggaggtggacgtggtggccatctccctcggcgacgacgacgacgagtcaaccatctcgatgaagaagctgaccgtgggaggcgagaacaacgcgttcccgtcgccgtcgccggacgggaagtgggtggtgttccggtcggggagatccgggaacaagaacctgtacatcatcgacgccgaggacggcgaggccggcggcatccggcggctgacggaggggccatggtcggacacgatgtgcaactggtcacccgacggcgagtggatcgccttcgcctccgaccgccatgccccggggagcggcagcttcgccatctacatggtgcaccccaatggcaccgggctgcggcgggtggtgcacagcggcggcagcggccggaccaaccacccatggttcagcccggactccaagagcctcgtcttcacctccgactacgccgccgtctccgccgagccggtctccaaccctcaccattaccagccatacggcgagatcttcaccgtcgacatcgacgggtccaacatccggcggctcacgcacaactcgttcgaggacggcacgccgtcgtggacgccatacttcctggagccccgagacgtcggcgagacgctgcaagcctcgggcaggtgcgcgttccaggattgccactggctcaacatccaagatgctgcccaacctgaagagctcaactatggcaagagctgctga

SEQ ID NO: 7393 - protein, 688 aa, Oryza sativa subsp. japonica
MATPLLAGLLAAALLASPAAPAASASGGTIVFTTLGRSRYEFDIFSLPLAPSPHNPAAAAELRLTDGVSVNYNGNFAPASDSILFVSERNGSLNLYLSPVPSSRREALESASSSSSSAAATISPLLPWEPIALKDRPSLTPDGSRLVYVSTAVPAAEPRSSWAAVYSTELSTGRTRRLTPLGVADFSPAVSPSGEWTAAASPGAAGWSGEVEDLRTDIYVFRTADGSRRSLAIRDGGWPSWADETTVFFHRRDSDGWYGVYRAEISVTGDGVEAASVERITPPGFHAFTPAASPGAPGLVAVATRRAGSDYRHIEVIDVSSDGKNAYFEVTRPVAPRVHHFNPFISPDGARVGYHRCRGRGNGDSPLLLENIKSPGSPDTFSLFRIDGSFPSFSHDGKKIAFVGLPGMYVVNSDGSGGRRKIFSGNAFSTSWDWKRKGVVYTSIGPDFASETTEVDVVAISLGDDDDESTISMKKLTVGGENNAFPSPSPDGKWVVFRSGRSGNKNLYIIDAEDGEAGGIRRLTEGPWSDTMCNWSPDGEWIAFASDRHAPGSGSFAIYMVHPNGTGLRRVVHSGGSGRTNHPWFSPDSKSLVFTSDYAAVSAEPVSNPHHYQPYGEIFTVDIDGSNIRRLTHNSFEDGTPSWTPYFLEPRDVGETLQASGRCAFQDCHWLNIQDAAQPEELNYGKSC

SEQ ID NO: 7394 - DNA, 2034 bp, Vitis vinifera
  CDS (1)..(2034)
  misc_feature (272)..(272): w is a or t
  misc_feature (309)..(309): s is g or c
  misc_feature (479)..(479): r is g or a
  misc_feature (513)..(513): r is g or a
  misc_feature (523)..(523): m is a or c
  misc_feature (619)..(619): k is g or t
  misc_feature (752)..(752): r is g or a
  misc_feature (1005)..(1005): y is t or c
  misc_feature (1035)..(1035): r is g or a
  misc_feature (1063)..(1063): r is g or a
  misc_feature (1115)..(1115): w is a or t
  misc_feature (1212)..(1212): y is t or c
  misc_feature (1278)..(1278): y is t or c
  misc_feature (1282)..(1282): r is g or a
  misc_feature (1552)..(1552): w is a or t
  misc_feature (1798)..(1798): r is g or a
atgatggtgtcactgcgaacgtgtcgctacctatataagacagccttcgcctcctacactcacactcgcaccccacctccaatggaacccactggaaccattgccttcaccacagttggcagacctcactacggcttcgacctcttttctctcaatctcgatcccaatctcatcaaccacacttctgaacgccgcctcaccggcggtacttccatcaatttcaatggccacttcctcgacgaaaaccagaccctggtttacgtctccgagawaagcggctcgcctcgaatttatcaaatccggcccggsgttaccaaacctgaacagctgctctctgttcccggcagtctctaccatgaccgtccgatcgttaagaacggacggctgtacttcgtgtcggctcatgaacggccagagaagcccttcatcagctggtctgctgtttactccactgggcttgatgacaaggcagttgtgcrgttgactcctcacggagttgtcgattacagtccrgcgatttctmggtccggaaagttcatagctgttgcatcctatgggtctcgtccttggggcggtgaatttcatgagttgcacactgatattgttgttttccgggaakcggagccggaaaagcgtgttgttgtatgcgagcgtggtggttggcccacctggtctggcgattccaacctctactttcaccggcaggctgatgatggatggtggagcattttcagcgtgactctgccggaggrttttcaatcttctagtatttccgaggctcctcgccggataaccccgccacgagttcactgtttcactcctgcggccatgcaaggtagtaagcgaatcgccgtagcgactaggcggaaggggagcaatttccggcacatagagatatttgatattgattcgaagaagttttatccagtgaccgagtcgctgaatccgaatttccatcactacaacccctttgtatctcccgaatgtggttttctcggctaccaycgattccgaggggagtcatcaccgggcgartcgaccattccacatctcgatcccgtartgtctccaataaatgaactgcggatgctgcgactcaacggatcgttcccgtwcttttctccggccggtgatttgattgctttcaatcacgacttcgaagcgaaaggcggccttaagatcgtgaaatcagacggttcaaagagatggacygttttgaaagatcgtacggcattctataactcctggagtcctacagaaaagcatgtgatttacacytcgrtaggaccgatctttgagtctgtaaaagcgacggtccagatcgcacgaatctcgttcgatccatcgtatctggatgatgatcgtgaagacattccagccgatgtgaagatccttaccagagaagaaaccggcaataacgcatttccttcttgctcgccggacggcaagtccgtggttttcaggtccggccgctccgggaacaagaacctctacattatagacgccgttaacggagaattagaaggcggtatccgtcagttaactgagggawcgtggattgacaccatgcctagctggtcgccagacggaaaactgatcgccttttcgtcgaacaggcacaatcccgacaacttgaatgctttcagcatatacgtcatccggcccgacggctccgatctccgaagagtctacgtggcgggatctgaaggttcagttgacgtggacagggagagaatcaaccacgtgtgtttcagcgctgactgcgagtggcttcttttcgcggctaacttggggggcrtgacggctgaaccgatttcgcttcccaatcagtttcaaccgtatggtgacctgttcgtggtgaggttggacggaagtggattgaagaggctgacatggaatggatatgaaaatgggacgccagcatggcacactgggaatgaggtggatatggggcgtatgtgtttggggtcagagaatggagataagttgacaggggagttcgatgaaccattgtggatctcttgtgagctgtga

SEQ ID NO: 7395 - protein, 677 aa, Vitis vinifera
  misc_feature (91)..(91): The Xaa at location 91 stands for Ile, or Lys.
  misc_feature (160)..(160): The Xaa at location 160 stands for Arg, or Gln.
  misc_feature (207)..(207): The Xaa at location 207 stands for Ala, or Ser.
  misc_feature (251)..(251): The Xaa at location 251 stands for Asp, or Gly.
  misc_feature (355)..(355): The Xaa at location 355 stands for Met, or Val.
  misc_feature (372)..(372): The Xaa at location 372 stands for Phe, or Tyr.
  misc_feature (428)..(428): The Xaa at location 428 stands for Ile, or Val.
  misc_feature (518)..(518): The Xaa at location 518 stands for Ser, or Thr.
  misc_feature (600)..(600): The Xaa at location 600 stands for Met, or Val.
MMVSLRTCRYLYKTAFASYTHTRTPPPMEPTGTIAFTTVGRPHYGFDLFSLNLDPNLINHTSERRLTGGTSINFNGHFLDENQTLVYVSEXSGSPRIYQIRPGVTKPEQLLSVPGSLYHDRPIVKNGRLYFVSAHERPEKPFISWSAVYSTGLDDKAVVXLTPHGVVDYSPAISRSGKFIAVASYGSRPWGGEFHELHTDIVVFREXEPEKRVVVCERGGWPTWSGDSNLYFHRQADDGWWSIFSVTLPEXFQSSSISEAPRRITPPRVHCFTPAAMQGSKRIAVATRRKGSNFRHIEIFDIDSKKFYPVTESLNPNFHHYNPFVSPECGFLGYHRFRGESSPGESTIPHLDPVXSPINELRMLRLNGSFPXFSPAGDLIAFNHDFEAKGGLKIVKSDGSKRWTVLKDRTAFYNSWSPTEKHVIYTSXGPIFESVKATVQIARISFDPSYLDDDREDIPADVKILTREETGNNAFPSCSPDGKSVVFRSGRSGNKNLYIIDAVNGELEGGIRQLTEGXWIDTMPSWSPDGKLIAFSSNRHNPDNLNAFSIYVIRPDGSDLRRVYVAGSEGSVDVDRERINHVCFSADCEWLLFAANLGGXTAEPISLPNQFQPYGDLFVVRLDGSGLKRLTWNGYENGTPAWHTGNEVDMGRMCLGSENGDKLTGEFDEPLWISCEL

SEQ ID NO: 7396 - DNA, 2148 bp, Vitis vinifera
  CDS (1)..(2148)
  misc_feature (47)..(47): k is g or t
  misc_feature (536)..(536): m is a or c
  misc_feature (855)..(855): y is t or c
  misc_feature (1248)..(1248): y is t or c
  misc_feature (1362)..(1362): w is a or t
  misc_feature (1605)..(1605): s is g or c
  misc_feature (1671)..(1671): r is g or a
  misc_feature (1995)..(1995): y is t or c
atggagactccaagccctagagagatgaaccgcataacacttctctktttctttctcagtttggtcatcaccctcttctctgcagcggcggaccatgacggccccaccaccagcaccaccagcatcatcttcacaacgctggggagatccgactatgccttcgacgttttcagcctcccgactctggggccttctactatcgccgacgagcttcggattaccgatggtcagtccgtgaatttcaacggtcatttcccatcttctccaattatttctcttctagccaatcaaaccctacttgaaagctcaagcgtgaaacgcccagatgagtctctgcaaaccatctatgtcaccgagagaaatgggtcgtcgaatatatatcttgacataatctattatgatactcccacgaactctaggagaagatctgcactggagaccgcagttcgagttgaggttccgctattgggtactaacactgaacagagcgacggtcgaatttcgatgaaagacaggcctagcttagttggtgaggmcttggtttacgtatcgactcacgaggactcgggtgtgcccaggaaaagttgggctgctgtctactcgactcatcttccgacggggtcgactaggcggttgacaccgtatggggtggctgattacagcccggctgtatcgccgtcgggggtatggacagcggtggcttcttatggagagagaggctggggtggggaagttgaagagctcagcaccgatatctacgttttcaggactcgtgatgggtctgagaggacgaaagttgtggaacacggtggttggccgtgttgggtcgatgattctactctgtttttccaccgyagaggcagcgatggctggtggagtatctacagagcgattcttactgagtcagtggttatcgagcgagtcactccacctggtctccacgctttcaccccagctacctcgccaggcaacaaaaacttcattgccgtggcgacgagaaggctcaattcagattatcgccacattgagttgtttgaccttctcagtaacgagtttagggaattaactcgtcggatttctccccaaactcaccactttaatccgttcatctcgcccgattctactcgaattggttaccacagatgcagaggcgacagtaacggagggaaaagccctcacctgctgctcgaaaacctcaaaagcccattacctgaaatctctctgtttagatttgacggttcgttcccytcgttttcaccgggcggcgaccggatcgcttacgtcgaattcccgggggtttacgtggtgaaccgggacggttctggccggcgggaggtgttctccggaatcgccttctccacwgcttgggaccataaacggaaaggggttgtatacactagtgcaggtcccacattcgctacagaaagcacaaaagtggatatagtgtctatcaacgttgatgacgttgaccagcctagctacaaaaagttgaccaccggcggtgagaataacgcatttccctcgccatcaccggacgggaaatggatcgcgttccggtcaggccggtctggctataagaatctgtacataatggatgctgtggasggagagagaggtgggatccatcggttaacagagggtccatggacggacacaatgtgtaattggtcrccggacggtgactggattgtctttgcatccgaccgggagaacccgggtggtggtgggtttgaactgtacgtgattcaccctaacgggaccggcctcaggaaggtggttcatagcggttcagctgggaggactaaccacccatggttcagccctgacgggaagagcattgttttcacttcagactatgccgcagtatcagctgagcccatctccaacgcacatcactaccagccttatggcgatatctttgtggtgaatttggatggctcagggcttcatcgattgacacataattcatacgaggatgggactcccgcctgggcycccaaggtcattaggccggttgatgtgaagttgcaggtggacgggccacactgctcctttgaagattgtcactggctcagcaacactccgaatcatggtgttgaggctgcaccctgggtcttggccaagcctcagtgtggtctacgggcctag

SEQ ID NO: 7397 - protein, 715 aa, Vitis vinifera
  misc_feature (16)..(16): The Xaa at location 16 stands for Cys, or Phe.
  misc_feature (179)..(179): The Xaa at location 179 stands for Ala, or Asp.
  misc_feature (535)..(535): The Xaa at location 535 stands for Asp, or Glu.
METPSPREMNRITLLXFFLSLVITLFSAAADHDGPTTSTTSIIFTTLGRSDYAFDVFSLPTLGPSTIADELRITDGQSVNFNGHFPSSPIISLLANQTLLESSSVKRPDESLQTIYVTERNGSSNIYLDIIYYDTPTNSRRRSALETAVRVEVPLLGTNTEQSDGRISMKDRPSLVGEXLVYVSTHEDSGVPRKSWAAVYSTHLPTGSTRRLTPYGVADYSPAVSPSGVWTAVASYGERGWGGEVEELSTDIYVFRTRDGSERTKVVEHGGWPCWVDDSTLFFHRRGSDGWWSIYRAILTESVVIERVTPPGLHAFTPATSPGNKNFIAVATRRLNSDYRHIELFDLLSNEFRELTRRISPQTHHFNPFISPDSTRIGYHRCRGDSNGGKSPHLLLENLKSPLPEISLFRFDGSFPSFSPGGDRIAYVEFPGVYVVNRDGSGRREVFSGIAFSTAWDHKRKGVVYTSAGPTFATESTKVDIVSINVDDVDQPSYKKLTTGGENNAFPSPSPDGKWIAFRSGRSGYKNLYIMDAVXGERGGIHRLTEGPWTDTMCNWSPDGDWIVFASDRENPGGGGFELYVIHPNGTGLRKVVHSGSAGRTNHPWFSPDGKSIVFTSDYAAVSAEPISNAHHYQPYGDIFVVNLDGSGLHRLTHNSYEDGTPAWAPKVIRPVDVKLQVDGPHCSFEDCHWLSNTPNHGVEAAPWVLAKPQCGLRA

SEQ ID NO: 7398 - DNA, 2148 bp, Vitis vinifera
  CDS (1)..(2148)
atggagactccaagccctagagagatgaaccgcataacacttctctttttctttctcagtttggtcatcacactcttctctgcagcggcggaccatgacggccccaccaccagcaccaccagcatcatcttcacaacgctggggagatccgactatgccttcgacgttttcagcctcccgactctggggccttctactatcgccgacgagcttcggattaccgatggtcagtccgtgaatttcaacggtcatttcccatcttctccaattatttctcttctagccaatcaaaccctagttgaaagctcaagcgtgaaacgcccagatgagtctctgcaaaccatctatgtcaccgagagaaatgggtcgtcgaatatatatcttgacataatctattatgatactcccacgaactctaggagaagatctgcactggagaccgcagttcgagttgaggttccgctattgggtactaacactgaacagagcgacggtcgaatttcgatgaaagacaggcctagcttagttggtgaggacttggtttacgtatcgactcacgaggactcgggtgtgcccaggaaaagttgggctgctgtctactcgactcatcttccgacggggtcgactaggcggttgacaccgtatggggtggctgattacagcccggctgtatcgccgtcgggggtatggacagcggtggcttcttatggagagagaggctggggtggggaagttgaagagctcagcaccgatatctacgttttcaggactcgtgatgggtctgagaggacgaaagttgtggaacacggtggttggccgtgttgggtcgatgattctactctgtttttccaccgtagaggcagcgatggctggtggagtatctacagagcgattcttactgagtcagtggttatcgagcgagtcactccacctggtctccacgctttcaccccagctacctcgccaggcaacaaaaacttcattgccgtggcgacgagaaggctcaattcagattatcgccacattgagttgtttgaccttctcagtaacgagtttagggaattaactcgtcggatttctccccaaactcaccactttaatccgttcatctcgcccgattctactcgaattggttaccacagatgcagaggcgacagtaacggagggaaaagccctcacctgctgctcgaaaacctcaaaagcccattacctgaaatctctctgtttagatttgacggttcgttcccttcgttttcaccgggcggcgaccggatcgcttacgtcgaattcccgggggtttacgtggtgaaccgggacggttctggccggcgggaggtgttctccggaatcgccttctccaccgcttgggaccataaacggaaaggggttgtatacactagtgcaggtcccacattcgctacagaaagcacaaaagtggatatagtgtctatcaacgttgatgacgttgaccagcctagctacaaaaagttgaccaccggcggtgagaataacgcatttccctcgccatcaccggacgggaaatggatcgcgttccggtcaggccggtctggctataagaatctgtacataatggatgctgtggatggagagagaggtgggatccatcggttaacagagggcccatggacggacacaatgtgtaattggtcaccggacggtgactggattgtctttgcatccgaccgggagaacccgggtggtggtgggtttgaactgtacgtgattcaccctaacgggaccggcctcaggaaggtggttcatagcggttcagctgggaggactaaccacccatggttcagccctgacgggaagagcattgttttcacttcagactatgccgcagtatcagctgagcccatctccaacgcacatcactaccagccttatggcgatatctttgtggtgaatttggatggctcagggcttcatcgattgacacataattcatacgaggatgggactcccgcctgggctcccaaggtcattaggccggttgatgtgaagttgcaggtggacgggccacactgctcctttgaagattgtcactggctcagcaacactccgaatcatggtgttgaggctgcaccctgggtcttggccaagcctcagtgtggtctacgggcctag

SEQ ID NO: 7399 - protein, 715 aa, Vitis vinifera
METPSPREMNRITLLFFFLSLVITLFSAAADHDGPTTSTTSIIFTTLGRSDYAFDVFSLPTLGPSTIADELRITDGQSVNFNGHFPSSPIISLLANQTLVESSSVKRPDESLQTIYVTERNGSSNIYLDIIYYDTPTNSRRRSALETAVRVEVPLLGTNTEQSDGRISMKDRPSLVGEDLVYVSTHEDSGVPRKSWAAVYSTHLPTGSTRRLTPYGVADYSPAVSPSGVWTAVASYGERGWGGEVEELSTDIYVFRTRDGSERTKVVEHGGWPCWVDDSTLFFHRRGSDGWWSIYRAILTESVVIERVTPPGLHAFTPATSPGNKNFIAVATRRLNSDYRHIELFDLLSNEFRELTRRISPQTHHFNPFISPDSTRIGYHRCRGDSNGGKSPHLLLENLKSPLPEISLFRFDGSFPSFSPGGDRIAYVEFPGVYVVNRDGSGRREVFSGIAFSTAWDHKRKGVVYTSAGPTFATESTKVDIVSINVDDVDQPSYKKLTTGGENNAFPSPSPDGKWIAFRSGRSGYKNLYIMDAVDGERGGIHRLTEGPWTDTMCNWSPDGDWIVFASDRENPGGGGFELYVIHPNGTGLRKVVHSGSAGRTNHPWFSPDGKSIVFTSDYAAVSAEPISNAHHYQPYGDIFVVNLDGSGLHRLTHNSYEDGTPAWAPKVIRPVDVKLQVDGPHCSFEDCHWLSNTPNHGVEAAPWVLAKPQCGLRA

SEQ ID NO: 7400 - DNA, 1953 bp, Vitis vinifera
  CDS (1)..(1953)
atggaacccactggaaccattgccttcaccacagttggcagacctcactacggcttcgacctcttttctctcaatctcgatcccaatctcatcaaccacacttctgaacgccgcctcaccggcggtacttccatcaatttcaatggccacttcctcgacgaaaaccagaccctggtttacgtctccgagagaagcggctcgcctcgaatttatcaaatccggcccggtgttaccaaacctgaacagctgctctctgttcccggcagtctctaccatgaccgtccgatcgttaagaacggacggctgtacttcgtgtcggctcatgaacggccagagaagcccttcatcagctggtctgctgtttactccactgggcttgatgacaaggcagttgtgcagttgactcctcacggagttgtcgattacagtccagcgatttctcggtccggaaagttcatagctgttgcatcctatgggtctcgtccttggggcggtgaatttcatgagttgcacactgatattgttgttttccgggaatcggagccggaaaagcgtgttgttgtatgcgagcgtggtggttggcccacctggtccggcgattccaacctctactttcaccggcaggctgatgatggatggtggagcattttcagcgtgaatctgccggagggttttcaatcttctagtatttccgaggctcctcgccggataaccccgccacgagttcactgtttcactcctgcggccatgcaaggtagtaagcgaatcgccgtagcgactaggcggaaggggagcaatttccggcacatagagatatttgatattgattcgaagaagttttatccagtgaccgagtcgctgaatccgaatttccatcactacaacccctttgtatctcccgaatgtggttttctcggctaccaccgattccgaggggagtcatcaccgggcgagtcgaccattccacatctcgatcccgtagtgtctccaataaatgaactgcggatgctgcgactcaacggatcgttcccgtccttttctccggccggtgatttgattgctttcaatcacgacttcgaagcgaaaggcggccttaagatcgtgaaatcagacggttcaaagagatggaccgttttgaaagatcgtacggcattctataactcctggagtcctacagaaaagcatgtgatttacacctcggtaggaccgatctttgagtctgtaaaagcgacggtccagatcgcacgaatctcgttcgatccatcgtatctggatgatgatcgtgaagacattccagccgatgtgaagatccttaccagagaagaaaccggcaataacgcatttccttcttgttcgccggacggcaagtccgtggttttcaggtccggccgctccgggaacaagaacctctacattatagacgccgttaacggagaattagaaggcggtatccgtcagttaactgagggaccgtggattgacaccatgcctagctggtcgccagatggaaaactgatcgccttttcgtcgaacaggcacaatcccgacaacttgaatgctttcagcatatacgtcatccggcccgacggctccgatctccgaagagtctacgtggcgggatctgaaggttcagttgacgtggacagggagagaatcaaccacgtgtgtttcagcgctgactgcgagtggcttcttttcgcggctaacttggggggcatgacggctgaaccgatttcgcttcccaatcagtttcaaccgtatggtgacctgttcgtggtgaggttggacggaagtggattgaagaggctgacatggaatggatatgaaaatgggacgccagcatggcacactgggaatgaggtggatatggggcgtatgtgtttggggtcagagaatggagataagttgacaggggagttcgatgaaccattgtggatctcttgtgagctgtga

SEQ ID NO: 7401 - protein, 650 aa, Vitis vinifera
MEPTGTIAFTTVGRPHYGFDLFSLNLDPNLINHTSERRLTGGTSINFNGHFLDENQTLVYVSERSGSPRIYQIRPGVTKPEQLLSVPGSLYHDRPIVKNGRLYFVSAHERPEKPFISWSAVYSTGLDDKAVVQLTPHGVVDYSPAISRSGKFIAVASYGSRPWGGEFHELHTDIVVFRESEPEKRVVVCERGGWPTWSGDSNLYFHRQADDGWWSIFSVNLPEGFQSSSISEAPRRITPPRVHCFTPAAMQGSKRIAVATRRKGSNFRHIEIFDIDSKKFYPVTESLNPNFHHYNPFVSPECGFLGYHRFRGESSPGESTIPHLDPVVSPINELRMLRLNGSFPSFSPAGDLIAFNHDFEAKGGLKIVKSDGSKRWTVLKDRTAFYNSWSPTEKHVIYTSVGPIFESVKATVQIARISFDPSYLDDDREDIPADVKILTREETGNNAFPSCSPDGKSVVFRSGRSGNKNLYIIDAVNGELEGGIRQLTEGPWIDTMPSWSPDGKLIAFSSNRHNPDNLNAFSIYVIRPDGSDLRRVYVAGSEGSVDVDRERINHVCFSADCEWLLFAANLGGMTAEPISLPNQFQPYGDLFVVRLDGSGLKRLTWNGYENGTPAWHTGNEVDMGRMCLGSENGDKLTGEFDEPLWISCEL

SEQ ID NO: 7402 - DNA, 2145 bp, Picea sitchensis
  CDS (1)..(2145)
atggattcttatgttatcaggttcctgctaattctcataattgttctgttgagagtggcacccttcaattccttgtatgcatttgcatctgcagacggcagaaacttgcagggcactctcgctttcgcttccgtcggccgagcacactatgccttcgacatatacacgcttcctctccaacctctgcgattctccaccaatttggaggagactctggtgacggacggagagtccgtcaatcacaacgggcagtacctacaaggccctgggatccagacgcttatgcacaggctcaacataaacactacatcgacgcccgtggaaaacgtcatggcgttcgtgagcgagagggacgggttcccagagctctatctcaacatatacctcaaggataacctgccacttttagcagagaaggcagaggaaaatagccggcgcgaggcactggaggatggcaaaagatgtctgacgataaattttgggggtgttttcgaagaaaaagggaagaaggacatgccggatttatctatgaaggacagacccagcatggccgggaacagcatggtctacgtttcgacccgcgggcagacaaaggcctcgagaaaaagctgggccgcggtttactcgacctcgatcaaaacagggcgaacgaggcgcctgacgcccgatgggatcgcagatttgagccccgctgtgtccccctcgggcgagtgggtcatggcagcctccgccggagagcggggatggcagggggaaatacgcgatttggagaccgatctttacgtattcagggcctccgacggttcgggtaggaggcttgttgtgaagcatggcggttggccgtcttgggccgacgataacactgtgttcttccacaggcaggcggaggacggatggtggagcgtatacagagcctcggttaattcctcatccgccctggtggagagaattactccgccgggaatcgacgccttcacaccggctgcgtcccgtaccgggccttggattgctgtcgccacgcgcagacccgggcacgactatcgacacatagagattttcgacctgctgaaaaaaaaattcatccaagtgaccaggttggtttctcccaattctcaccattacaatccctttgtttcttctgataggattgggtatcatagatgcagaggtgggcatgtggggaatagggttcctgtgcttgagcagattaggtcaccgctgcctagtttgtctttgtttcgcatagatgggagtttcccgtcgttttcgcccgatgggtccttgattgcctacatacccaatattgaatacagcggggtttatgtcatgaggcttgatgggtcgggtagaaggaaaattttctccggggctgcttttgggacggcctgggattggaagaggggtgtggtttataccagcgctggccccgggtttgagactgagacgacaactgtggacatagttgccatctataatgctgatagagaaggcacctcagagtcagagatttcatacaagaccttgacaaaggaaggtaataatgccttcccctctccttctccagatgggaaatttgtagtattcaggtctggtaggactggacacaagaatctgtatattatggatgcagaggagggtgaagagggaggcctctggcaattaacagaaggtccctggacagataccatgtgcaattggtcaccagatggtgagtggattgcgtttgcatctgaccgagatagtccagggagtggtggctttgccatgtatttcatacatcccaatggaacaggtctgcatagggtcttgaacagcagtactgctggaagagtgaatcatccctggttcagtccagattccaagagcttggtattcacgtcagactatgcaggggtgtctgcagagccgatttctgtgcctcatcagttccaaccatatggagagattttcatggccagggtggatggctctgagctgcaacggcttactcacaatgcttatgaggatggaactccatcctggggtagaattttcatagctgcttcggatttgacaggagaaggtgagagtgtcaagtgtgattttgatgatgatcactggcttcaaagaatgaatggagagtcagttggatcggtaagctgctga

SEQ ID NO: 7403 - protein, 714 aa, Picea sitchensis
MDSYVIRFLLILIIVLLRVAPFNSLYAFASADGRNLQGTLAFASVGRAHYAFDIYTLPLQPLRFSTNLEETLVTDGESVNHNGQYLQGPGIQTLMHRLNINTTSTPVENVMAFVSERDGFPELYLNIYLKDNLPLLAEKAEENSRREALEDGKRCLTINFGGVFEEKGKKDMPDLSMKDRPSMAGNSMVYVSTRGQTKASRKSWAAVYSTSIKTGRTRRLTPDGIADLSPAVSPSGEWVMAASAGERGWQGEIRDLETDLYVFRASDGSGRRLVVKHGGWPSWADDNTVFFHRQAEDGWWSVYRASVNSSSALVERITPPGIDAFTPAASRTGPWIAVATRRPGHDYRHIEIFDLLKKKFIQVTRLVSPNSHHYNPFVSSDRIGYHRCRGGHVGNRVPVLEQIRSPLPSLSLFRIDGSFPSFSPDGSLIAYIPNIEYSGVYVMRLDGSGRRKIFSGAAFGTAWDWKRGVVYTSAGPGFETETTTVDIVAIYNADREGTSESEISYKTLTKEGNNAFPSPSPDGKFVVFRSGRTGHKNLYIMDAEEGEEGGLWQLTEGPWTDTMCNWSPDGEWIAFASDRDSPGSGGFAMYFIHPNGTGLHRVLNSSTAGRVNHPWFSPDSKSLVFTSDYAGVSAEPISVPHQFQPYGEIFMARVDGSELQRLTHNAYEDGTPSWGRIFIAASDLTGEGESVKCDFDDDHWLQRMNGESVGSVSC

SEQ ID NO: 7404 - DNA, 1857 bp, Ricinus communis
  CDS (1)..(1857)
atggatgttcccaaagggaccatcgttttcaccactgttggccgccaatcctatggcttcgacgtttactccgtcaaacgactccctggaattccagaaagccttttccatgaccgtcccatcataaaagataaccgtctctacttcatttcggctcatcaagagccagataagctttacaaaagctggaacgctctttacgccatagatctgaatcaagaaggaaatagtgttactcgtttgactccttatggtgttattgactatagtcccgctgtttctctatctggaaagtatatagccgttggatcgtacgggtctcgcatttgggatgttgaatttcagatgcttactacggatattgttgttttcaaacaatccgaccccgagaatcgagttgttgtttgtgaaagaggcggttggcctacttggtcaggtgattccactatttatttccatcgcaaggctgatgatggattttggagcatttttcaagttaatttctccgatgatctttctgagcttccatgtgctccggttcgggttactccgccaggtgttcactgtttgactcctgcagctatgcacgatggtaaaagaatcgtcgtcgcgactagacggcggggcaaggttcacaggcatattgagatatttgatattgtctcaaagactttttatcctgttactcagctcatcaacccgagtttccaacactataacccctttgtgtctcaagattcgttgtttatcgggtatcaccgatttagaggtgagtcagctcctggagagaccacaattccaaatttggaacctgtaaaatctccgatcgagggtatacgtttgctgcgactcaacggatcatttgcctcgtattctccagatagtgattatatagcatttaatgctggcttaagccaaggcttacacatcgttagatcaaacggttcaaagcgatggactttattcagcagagaccgcacagctttctacacctcatggagtcccacggagaaaaacgtgatctacacaactctgggtccagtcttcgcgcatgttaatagaacggtgcaaattgcacgtgtaacctttgacccatctgatctgaagcctgatcgtaacgaaatcccatgtgatgtgaagatgctaacgggagaagactcagggaataatgccttcccagcctgctcacccgacggtaagtatctcgtgttccgctctggtcggtctggtcataagaacctctacataatggacgccgtcgagggagagtttaaaggtgatatacgcccgttaacggagggagcatgtattgatacaatgccttgctggtcacctaaaggtgatcttatagcgttttcttcgaacagacataaaccggaacatgctaacccatttagcatctatgtgataaaaccggacggctctggtttaaggagaatccacctggagggatcggaaaggttgagcgaggaggagagggagtggatggagaggataaaccacgtgacgtttagcagcgatggagagtggcttttgttcacagccaacttgggaggcctatctgctgagccagtggcggttccacgtcagattcagccgtacggtgatatatatgttgccaggttggatgggagtggactgaggaggctgacgtggaacggttacgagaatgggacgccagtgtggtacccagggttccatgaggtgcagtcgcacccagagaataagccgcagttgatttcagggaacctgcgtaatctgaaattgcatgaagaggtggggaagaatcttcatagcgtggatgaagaaaaactcagtggccagtttaatgatctaacatggctgagtattgaataa

SEQ ID NO: 7405 - protein, 618 aa, Ricinus communis
MDVPKGTIVFTTVGRQSYGFDVYSVKRLPGIPESLFHDRPIIKDNRLYFISAHQEPDKLYKSWNALYAIDLNQEGNSVTRLTPYGVIDYSPAVSLSGKYIAVGSYGSRIWDVEFQMLTTDIVVFKQSDPENRVVVCERGGWPTWSGDSTIYFHRKADDGFWSIFQVNFSDDLSELPCAPVRVTPPGVHCLTPAAMHDGKRIVVATRRRGKVHRHIEIFDIVSKTFYPVTQLINPSFQHYNPFVSQDSLFIGYHRFRGESAPGETTIPNLEPVKSPIEGIRLLRLNGSFASYSPDSDYIAFNAGLSQGLHIVRSNGSKRWTLFSRDRTAFYTSWSPTEKNVIYTTLGPVFAHVNRTVQIARVTFDPSDLKPDRNEIPCDVKMLTGEDSGNNAFPACSPDGKYLVFRSGRSGHKNLYIMDAVEGEFKGDIRPLTEGACIDTMPCWSPKGDLIAFSSNRHKPEHANPFSIYVIKPDGSGLRRIHLEGSERLSEEEREWMERINHVTFSSDGEWLLFTANLGGLSAEPVAVPRQIQPYGDIYVARLDGSGLRRLTWNGYENGTPVWYPGFHEVQSHPENKPQLISGNLRNLKLHEEVGKNLHSVDEEKLSGQFNDLTWLSIE

SEQ ID NO: 7406 - DNA, 2001 bp, Ricinus communis
  CDS (1)..(2001)
atggataatcctaaaggcactgtcgttttcaccaccgttggccgtccatcctacggcttcgacgtcttctccattaaactcccttctgatcttaacagcttccacttctccaactccgatgagcactgcctcactgacggcacatccatcaactacaacgcccaattcgtcacccaacagcaccatcaaaatcaatcgattgtttacatatctgaaagatctggcttccctgcaatgtacttatcaaaacctaatctttccaaacctgagcaactaccatctgctcccgaaagccttttccacgaccgtccgatcattaagaatgaccgtctctacttcatctcagctcatgaaaagccagaccagcttttcagaagctggtcagctctttactccactgatcttagtcatagtcgtcgagaaggagataatgttactcgtttgaccccttttggtgttgttgatttcagtcctgctatttccctttctggcaatttcatagctgttgcatcttacggctctcgtccttggagtggcgaatttcacgagcttaatacggatattgttgttttcaaagcatcggacccggataaacgagctgttgtttctgagagaggtggttggcccacttggtcgcttgactccgccatttacttccatcgccaagctgaagatggatggtggagcattttccaggtcaaattccctgaaaatatggatgacgtctctgggtctgtaaacgctccgcttcgggttactccgccaggggtacactgtttcactcctgctgctatgcatgacggcaaaagaattgctgtcgcgactcgtcggcctgacaagaagtacaggcatattgagatatttgatcttgcctcagggacattttatcctgttactgagctactcaacccgagtttacatcactataacccttttgtttctgcagattcgttgtttatcgggtaccaccggtttagaggcgggtcgggtcatggagagagaacgatccgtaatcttgaacctgttagatctccgattaaggatcttcgtatgctgagactgaacggatcatttccctcattctctccagatggtaatttgatggcatttaaccctgactttgtcgattcaagtggcgggttaaaagttgttaaatcaaacggttcaaagcgatggactttaatcaaggaccgggtagcgttctgcaactcatggagcccgacagagaaacacgtcatctttacatctcttggtccaatatttgagtcagcaaaaacaactgtgcagattgcacgcgtcacatttaaaccatctgatctcaagtctgatcataatgaagtatcctgtgatgtaaagatcctgacgagagaagatactggtaataacgccttcccatcatgctccccagacggcgagtctctggtgtttcgatctgggcgatctggtcataagaacttgtacataattgacgccgttgagggggagttcaacggtggtatacgtcaattaacagaagggccgtggatcgatacaatgccaagttggtcacctaaaggagacctgatagcgttttcttcgaacagacataatccgaacaacgttaatgcatttagcatttatgttataaggccggacggctctggcttgaagagaatccacgtggcgggatcagaaggatcgagtgaaggggagagagggagaataaaccacgtgtgttttagtcgagatggagagtggcttttgtttacaggcaacttagggagtgttacagctgagccagtgtcgtggcccaatcaattccagccatatggagatttgcatgtgaccaggttggatgggagtggattgagcaggctgacatggaatggttttgagaatggcacgccagcatggcacccaaggagtgagctggagttggatagtttgtgtttggatgaagatgtggaggataagcttacaggtcaatttgatgatccactatggataaattgcgatatctaa

SEQ ID NO: 7407 - protein, 666 aa, Ricinus communis
MDNPKGTVVFTTVGRPSYGFDVFSIKLPSDLNSFHFSNSDEHCLTDGTSINYNAQFVTQQHHQNQSIVYISERSGFPAMYLSKPNLSKPEQLPSAPESLFHDRPIIKNDRLYFISAHEKPDQLFRSWSALYSTDLSHSRREGDNVTRLTPFGVVDFSPAISLSGNFIAVASYGSRPWSGEFHELNTDIVVFKASDPDKRAVVSERGGWPTWSLDSAIYFHRQAEDGWWSIFQVKFPENMDDVSGSVNAPLRVTPPGVHCFTPAAMHDGKRIAVATRRPDKKYRHIEIFDLASGTFYPVTELLNPSLHHYNPFVSADSLFIGYHRFRGGSGHGERTIRNLEPVRSPIKDLRMLRLNGSFPSFSPDGNLMAFNPDFVDSSGGLKVVKSNGSKRWTLIKDRVAFCNSWSPTEKHVIFTSLGPIFESAKTTVQIARVTFKPSDLKSDHNEVSCDVKILTREDTGNNAFPSCSPDGESLVFRSGRSGHKNLYIIDAVEGEFNGGIRQLTEGPWIDTMPSWSPKGDLIAFSSNRHNPNNVNAFSIYVIRPDGSGLKRIHVAGSEGSSEGERGRINHVCFSRDGEWLLFTGNLGSVTAEPVSWPNQFQPYGDLHVTRLDGSGLSRLTWNGFENGTPAWHPRSELELDSLCLDEDVEDKLTGQFDDPLWINCDI

SEQ ID NO: 7408 - DNA, 2175 bp, Ricinus communis
  CDS (1)..(2175)
atggcagagaagagaggtagcattgccttcttcgcaacctatagaccacctgtgccactggacatattctcttgttcggttccaccaagatcaaggcaggatgagctacacatgactgatggattatcctacaattacaactgccaaattattcccccagaggctctcaagaccattatcaagcgcccaatattggcttccgaagccaaagaagctgatgttgattcgggtcgtctaacaggcttgatcttcgtctctgaacgagataacaaccttgagacacttcagattgctcttcgctttaacgacaaccgacccagtgttaaagtcttcagtttcgctgatgtctatggcacattcgatgtagtccgcatggaagacagcggttgcattgccggtggttataagattggtaatcgtattgttgattactctcttatacatgtcaccaccaaggacccgtcaaaggaccgtcgtcagccttggactgtcgtttataaaaccaatcttaggaccggaagaactgagcgcctcaccccaccaggagtaaatgatttaagcccatctgtatcaccttctggaagaaaggtagcagtggcgtcattccaaggaaagggctggaatggcgagattgaagatctacaaactgacatttatgtgatgaacgtagagaagccccccttaggacgcatgagagttataaaaaatggtggatggccaacatggggtagtgacaatattatatttttccatagaaaggtcggagaattttggagtgtgtttcgagccgacatcagcaatggtgaaacatcagaaacccttcgggttactccagatggaattgatgccataactccggcagccattaatgccactaaagtggcagtggcaactatacgtcagaaaccaaagttcaatgacattcgcgtagaagcacagtatcggcacattgagatttttgattcaacagcaccacaacaatccatacaaatcactcaaaagaccagaccaaaggctgaccatttcaacccttttgtaatagatggtgggaagcgcataggttaccatcgctgcaaaagcgagcttctcaagagtggagatgatatccaaagacatttccataagctcaaatctccatatccagatgtaggactgtttagggtgtcgggtgtttttccaacattttccaaagatggctccaagcttgcattcgttgacaatgagttcaaagccgtgtgggtagctgatagcgatggaatgcgcattgttttcgagacgaaaggcccagacaatatcttctcaccagtttggagccaaaatccacaagatgatacactctatgtatgcatgggaccttcttttaacgctggccagacactgcaaatctgcgccatccccaatgtggctagtggtgcacgacggcgtcgacagctcacaagaggattcaataatgcttttccatccactagtccagatgggacaaaattagtttttcgatctacaagagatggaggagataagcaatataaaaatctatacataatggaggatgcaaaagtaggggagtttggggatggaaagataacgaggctaacaaatggaccttggacggacacacattgccaatggtctccaaggggagattggatagtattctcgtcaactcgcgataagcctaaagatgcaccagattcggataatggtctcgatccaggatattttgcagtatttctagtgaaggtcaatgatccttccgtggtaataagagtaataaaaagtggagatgatcttgcaggacatgtgaaccatccatttttcagtccagatggaatgagcattgctgtgacttcagatcttgctgcagtgtctgttgatccaatttctttacctctctttttgcattccgtgaggccttatggagatttattcgttgttgatattgatcctagtgatataaataagaacaaggatgtgaagaagtttaatcgcatcacacatagtagatatgagaattccactcctacttggactatgttttcaactgaggatccgaatgcagaatggaacatgcatttaaccgattcctacaccccgtcatgcccttatgcatatcctgatggaggtgaaagctggcacatgactggccatctttgcatcccaaaaagatgttgttga

SEQ ID NO: 7409 - protein, 724 aa, Ricinus communis
MAEKRGSIAFFATYRPPVPLDIFSCSVPPRSRQDELHMTDGLSYNYNCQIIPPEALKTIIKRPILASEAKEADVDSGRLTGLIFVSERDNNLETLQIALRFNDNRPSVKVFSFADVYGTFDVVRMEDSGCIAGGYKIGNRIVDYSLIHVTTKDPSKDRRQPWTVVYKTNLRTGRTERLTPPGVNDLSPSVSPSGRKVAVASFQGKGWNGEIEDLQTDIYVMNVEKPPLGRMRVIKNGGWPTWGSDNIIFFHRKVGEFWSVFRADISNGETSETLRVTPDGIDAITPAAINATKVAVATIRQKPKFNDIRVEAQYRHIEIFDSTAPQQSIQITQKTRPKADHFNPFVIDGGKRIGYHRCKSELLKSGDDIQRHFHKLKSPYPDVGLFRVSGVFPTFSKDGSKLAFVDNEFKAVWVADSDGMRIVFETKGPDNIFSPVWSQNPQDDTLYVCMGPSFNAGQTLQICAIPNVASGARRRRQLTRGFNNAFPSTSPDGTKLVFRSTRDGGDKQYKNLYIMEDAKVGEFGDGKITRLTNGPWTDTHCQWSPRGDWIVFSSTRDKPKDAPDSDNGLDPGYFAVFLVKVNDPSVVIRVIKSGDDLAGHVNHPFFSPDGMSIAVTSDLAAVSVDPISLPLFLHSVRPYGDLFVVDIDPSDINKNKDVKKFNRITHSRYENSTPTWTMFSTEDPNAEWNMHLTDSYTPSCPYAYPDGGESWHMTGHLCIPKRCC

SEQ ID NO: 7410 - DNA, 2127 bp, Ricinus communis
  CDS (1)..(2127)
atggaacctataattactttcttttttcttttcttactggtagatatatcgagtgcatcggcagaccatggctcatcatcatcaggtcgcaccagcatcatcttcgctacactgggaagcagatcgagtaacgcttttgatatcttcgctctccctactactaccccacctgactcatcaaacgaaatccaaataaccgacggtaaatccttaagtttcaatggtcactttccttcacccacctctctcgtctctctttttcccaaccaaactctaattcattcctctgcccaccaaaactccgcctctatcaccgtcatctacgtcactgaacggggcggatcatcaactatctacctggacgtactttcctatgatactgcgcgtagcgccagatcaaggtcagctcttgaaactcctccccgcgttcaaatcccattgctgaagggcaataatgttggagtttcgtttaaggataagccaactattaatggaaattatttagtttatctgtcaactcatgaagacgcaggtaagccacgagccagttgggctgctgtgtactcaaccgagttgaacaccgggttgactcgtcgtctcactccgtatggagtcgccgattttagtcctgcggtgtctccttcaggggtttatactgctgtggcatcttatggagaagcgggatggaaaggtgaagttgaattattgagtactgatatctatatcttcttgacccgtaacggaactcgccgagttaaaattattgaaaacggaggttggccgagttgggttgacgattcaacactctatttccacagaagtagcgaaaaagacggttggataagtgtttacagagcgacgctaccgagtcatacttccctatcaactgactcagtgattattgaacgagtcacaccgcccggtgtccacgcattcactccagctacttctccaggtaataaaaaattcatagcagtagctacaagaagacccaattcagattataggcatatagagctatttgaccttgctaagaacgagtttgttgagttaactcgtttggtatcgccccaaactcatcattataacccgtttatctcacctgacgctgcccgagttggctaccatagatgtagaggtgcttccaatgataaaaagagcagtacccaattcatgttagagaatataaagagtccagtagctgagatttcgctatttagaattgatgggtcgtttccttcttggtcacctggtggtgatcgtattgctttcgttgaatttccgggtgtttatgttgtaaaccgggacggtacggaccggcgccaggtttatcccgggaatgcatttgggacaacttgggacccggttcgtcctggggttgtgtactccagtgctggtcctgaatttgctagtgagagtactgaggttgatataatctcaattaatgttgatcaagtgggcagctttaaaaagttgactactaatggtaaaaataatgcatttcctgctgtttcacccgatgggaaatggattgttttccgatcgggtcgctccggttataagaacttgtatataatggatgcggttgaaggggagaaaggcggactctataggttgacggagggtccatggggcgatacaatgtgcagttggtcaatagatggtgaatggatagcgtttgcttcagatcgggagaatccgggttctgccagctttgaattgtttctgatccacccgaatggaacagggctgaaaagattggttaaaagcgggttgggtggaagaacaaaccacccgtattttagccctgatgggaagagtatagtatttactacagattatggtggaatatcagcagagccaatctcaaacccacatcactttcaaccttatggagagatctacactgttaaattggacggttctgatttaaaaaggttgacacacaattcatttgaggatgggacccctgcatggggtcctgcatatattgagccagtagatttggagtggccaaaatatggaccgcagtgttcatttgatgactgccattggctcagtgaaatacctaagcatagtgttgggtttaaactgttggagtcgagaaatcctcaatgtcgtgcataa

SEQ ID NO: 7411 - protein, 708 aa, Ricinus communis
MEPIITFFFLFLLVDISSASADHGSSSSGRTSIIFATLGSRSSNAFDIFALPTTTPPDSSNEIQITDGKSLSFNGHFPSPTSLVSLFPNQTLIHSSAHQNSASITVIYVTERGGSSTIYLDVLSYDTARSARSRSALETPPRVQIPLLKGNNVGVSFKDKPTINGNYLVYLSTHEDAGKPRASWAAVYSTELNTGLTRRLTPYGVADFSPAVSPSGVYTAVASYGEAGWKGEVELLSTDIYIFLTRNGTRRVKIIENGGWPSWVDDSTLYFHRSSEKDGWISVYRATLPSHTSLSTDSVIIERVTPPGVHAFTPATSPGNKKFIAVATRRPNSDYRHIELFDLAKNEFVELTRLVSPQTHHYNPFISPDAARVGYHRCRGASNDKKSSTQFMLENIKSPVAEISLFRIDGSFPSWSPGGDRIAFVEFPGVYVVNRDGTDRRQVYPGNAFGTTWDPVRPGVVYSSAGPEFASESTEVDIISINVDQVGSFKKLTTNGKNNAFPAVSPDGKWIVFRSGRSGYKNLYIMDAVEGEKGGLYRLTEGPWGDTMCSWSIDGEWIAFASDRENPGSASFELFLIHPNGTGLKRLVKSGLGGRTNHPYFSPDGKSIVFTTDYGGISAEPISNPHHFQPYGEIYTVKLDGSDLKRLTHNSFEDGTPAWGPAYIEPVDLEWPKYGPQCSFDDCHWLSEIPKHSVGFKLLESRNPQCRA

SEQ ID NO: 7412 - DNA, 2175 bp, Ricinus communis
  CDS (1)..(2175)
atggcagagaagagaggtagcattgccttctttgcaacctacagaccacctgtgccactggacatattctcctgttcggttccaccaacgtcaaggcaggatgagctacacatgactgatggattgtcctacaattacaactgccaactcattccacctgaagctctcaagaccattatcaagcgcccaaagttggcttccgaagccaaaggatctgatgttgactcgggtcgtctctcaggcttgattttcgtatccgaacgagacaacaaccttgagacgcttcatattgctcttcgctttaacgacaatccacccagtgttaaagtcttcagtttcgctgatgtctatggcacattcgatggtgtccgtatggaagacagtggttgcattgccggtggttataaggttggtagtcgtactgccgattgctctcttatatatgtcaccaccaaggacccgtcaaaggatcgtcgtcagccttggactgtcgtttataaaactaatcttaagaccggaaagactgaccgcctcactccgtcaggagtaaatgatttaagcccatctgtatcaccatctggaagaaaagtagcagtggcgtcattccaaggaaagggttggaatggcgagattgaagatctacagactgacattcatgtgatgaacgtagagaagcaacccttaggacgcatgaaagttataaaaaatggtggatggccaacatggggaagtgacaacgttatatttttccatcgaaaggttggggaattctggagtgtattccgagcagacattagcaatggtcaaacatcagaaacccttcgtgtgactccagatggaattgatgccataactccggcagccatcaattccaccaaagtggcggtggcaactatccgtcagaaatcaaagttcagtgacatacgcgtagaagcacagtatcggcacattgagatttttgattcaacagcaccacaacaacccatacaaatcactcagaaaactagaccaaaggctgaccattacaacccctttgtagtagatggtgggaagcgcataggttaccatcgttgcaaaagcgaccttctcaaccatggagatgatatccaaagacatttccataagctcaactcaccacatccagatgtaggactgtttagggtgtcaggtgtatttccaacattttccaaagatggctccaagcttgcattcgttgacaatgagttcaaagccgtgtgggtagctgatagcgatggattgcgcattgttttcgagacgaaaggcccagacaatatcttctcaccagtttggagccaaaatccacaagatgatacactctatgtatgcatgggaccttcttttaacgctggccagacattgcaaatctgcgccatccccaatgtggctagtggtgcccggcggcgtcgacaactcaccaaaggatttaataatgctttcccgtccaccagtccagatggaacaaaattagtttttcgatccacaagagatggaggagataagaaatataagaatctatatataatggaggatgcacaagtgggggagtacggggatggaaaagtaacgaggcttacaaatggaccttggacggacacacattgccaatggtctccaaggggagattggatagtattctcgtcaacccgcgataagcctaaagatgcaccagaaacagataatggtctcgatccaggatattttgcagtgtttttggtgaaggtgaacgatccttccgtggtgataagagtgataaaaggtggagatgatcttgcaggacatgtgaaccatccatttttcagtccagatggaatgagcattgctgtgacttcggatcttgctgcagtgtctgctgatccaatttctttacctctcttcttgcattccgtgaggccttatggagatgtattcactgtcgatattgaccctgatgacataaataagaacaaggatgtgaagaagttcaatcgcatcacacatagtagatatgagaattccactcctacttggaccatgttctcaactgaggatccaaatgcaacatggaacctgcttctaaaggattcctacaccccgtcatgcccttatgcatatcctgatggaggtgaaagttggcacatgactggccacctttgcatcccaagaagatgctgttga

SEQ ID NO: 7413 - protein, 724 aa, Ricinus communis
MAEKRGSIAFFATYRPPVPLDIFSCSVPPTSRQDELHMTDGLSYNYNCQLIPPEALKTIIKRPKLASEAKGSDVDSGRLSGLIFVSERDNNLETLHIALRFNDNPPSVKVFSFADVYGTFDGVRMEDSGCIAGGYKVGSRTADCSLIYVTTKDPSKDRRQPWTVVYKTNLKTGKTDRLTPSGVNDLSPSVSPSGRKVAVASFQGKGWNGEIEDLQTDIHVMNVEKQPLGRMKVIKNGGWPTWGSDNVIFFHRKVGEFWSVFRADISNGQTSETLRVTPDGIDAITPAAINSTKVAVATIRQKSKFSDIRVEAQYRHIEIFDSTAPQQPIQITQKTRPKADHYNPFVVDGGKRIGYHRCKSDLLNHGDDIQRHFHKLNSPHPDVGLFRVSGVFPTFSKDGSKLAFVDNEFKAVWVADSDGLRIVFETKGPDNIFSPVWSQNPQDDTLYVCMGPSFNAGQTLQICAIPNVASGARRRRQLTKGFNNAFPSTSPDGTKLVFRSTRDGGDKKYKNLYIMEDAQVGEYGDGKVTRLTNGPWTDTHCQWSPRGDWIVFSSTRDKPKDAPETDNGLDPGYFAVFLVKVNDPSVVIRVIKGGDDLAGHVNHPFFSPDGMSIAVTSDLAAVSADPISLPLFLHSVRPYGDVFTVDIDPDDINKNKDVKKFNRITHSRYENSTPTWTMFSTEDPNATWNLLLKDSYTPSCPYAYPDGGESWHMTGHLCIPRRCC

SEQ ID NO: 7414 - DNA, 2175 bp, Ricinus communis
  CDS (1)..(2175)
atggcagagaagagaggtagcattgcattcttcgcaacctataggccacctgtgcccctggacatattctcctgtccggttccaccaacgtcaaggcaagatgagctacatatgactgacggattgtcctacaattacaactgccaagtgattcccccagaggctctcaaggtgattatcaagcgcccaaagttggcttccgaagccaaagaatctgatgttgattcgggtcgtctctcaggcttgatcttcatctccgaacgagacaacagcctcgagacacttcatatagctcttcgctttaacgacagcccacccagtgttaaagtcttcagtttcgctgatgtctacggcacatataatggtgttcgcatggaagacggtggttgcattgccggtggttataaggttggtaatcgtactgtcgactactctcttatatatgtcaccaccaaggatccgtcgacagatcgtcgtcagccttggactgtcgtttacaaaactaatcttaagaccggaaaaactgaccgcctcactccatcgggagtaaatgatttaagcccatctgtatcaccatctagaagaaagatagcagtggcgtcatttcaaggaaaaggttggaatggcgagattgaagatctacggactgacatttatgtgatgaacatagagaagccccctttaggacgcatgagagttataaaaaatggtggatggccaacatggggaagtgacaacgttatatttttccatcgaaaggttgggaaattctggagtgtattccgagcagacattagcaatggtcaaacatcagaaaccgtttgtgtgactccagatggaattaatgccataactccggcagccatcaattccaccaaagtggcggtggcaactatccgtcaggaatcaaagttcagtgacatacgcttagaagcacagtatcggcacattgagatttttgattcaacagcaccacaacaatccatacaaatcactcaaaaaactagatcaaaggctgaccatttcaaccctttcataatagatggtgggaagcgcataggttatcatcgttgcaaaagcgaccttgtcaagaatggagatgatattcaaagacatttccacaagctcaattctccacatccagatgtaggactatttagggtgtctggtgtatttccaacattttccgtagatggctccaagcttgcattcgttgacaatgagttcaaagccgtgtgggtcgctgatagcaatggattgcgcatcgtttatgagacgaaaggcccagacaacatcttctcaccagtttggagccaaaatccacaagatgatacactctatgtatgcatgggaccttctttcaatgctggacagtcactgcaaatctgtgccattcccaatgtggctagtggtgcacggcggcgtcgccagctcacgaaaggattcaataatgctttcccatccaccagtccagatgggacaaaattagtttttcgatctacaagagatggaggagataagaaatataagaatttatatataatggaggatgcacaagtgggggagtacggggatggaaaaataacgaggcttacaaatggaccttggacggacacacattgccaatggtctccaaggggagattggatagtattctcgtcaacccgcgataagcctaaagatgcaccagaaacagataatggtctcgatccaggatattttgcagtgtttttggtgaaggtgaacgatccttccgtggtgataagagtgataaaaagtggagatgatcttgcaggacatgtgaaccatccatttttcagtccagatggaatgagcattgctgtgacttcggatcttgctgcagtgtctgctgatccaatttctttacctctcttcttgcactccgtgaggccttatggagatgtattcactgtcgatattgaccctgatgacataaataagaacaaggatgtgaagaagttcaatcgcatcacacatagtagatatgagaattccactcctacttggaccatgttctcaactgaggatccaaatgcaacatggaacctgcttctaaaggattcctacaccccgtcatgcccttatgcatatcctgatggaggtgaaagttggcacatgactggtcacctttgcatcccaaaaagatgctgttga

SEQ ID NO: 7415 - protein, 724 aa, Ricinus communis
MAEKRGSIAFFATYRPPVPLDIFSCPVPPTSRQDELHMTDGLSYNYNCQVIPPEALKVIIKRPKLASEAKESDVDSGRLSGLIFISERDNSLETLHIALRFNDSPPSVKVFSFADVYGTYNGVRMEDGGCIAGGYKVGNRTVDYSLIYVTTKDPSTDRRQPWTVVYKTNLKTGKTDRLTPSGVNDLSPSVSPSRRKIAVASFQGKGWNGEIEDLRTDIYVMNIEKPPLGRMRVIKNGGWPTWGSDNVIFFHRKVGKFWSVFRADISNGQTSETVCVTPDGINAITPAAINSTKVAVATIRQESKFSDIRLEAQYRHIEIFDSTAPQQSIQITQKTRSKADHFNPFIIDGGKRIGYHRCKSDLVKNGDDIQRHFHKLNSPHPDVGLFRVSGVFPTFSVDGSKLAFVDNEFKAVWVADSNGLRIVYETKGPDNIFSPVWSQNPQDDTLYVCMGPSFNAGQSLQICAIPNVASGARRRRQLTKGFNNAFPSTSPDGTKLVFRSTRDGGDKKYKNLYIMEDAQVGEYGDGKITRLTNGPWTDTHCQWSPRGDWIVFSSTRDKPKDAPETDNGLDPGYFAVFLVKVNDPSVVIRVIKSGDDLAGHVNHPFFSPDGMSIAVTSDLAAVSADPISLPLFLHSVRPYGDVFTVDIDPDDINKNKDVKKFNRITHSRYENSTPTWTMFSTEDPNATWNLLLKDSYTPSCPYAYPDGGESWHMTGHLCIPKRCC

SEQ ID NO: 7416 - DNA, 1980 bp, Oryza sativa
  CDS (1)..(1980)
atggagcccaccggcacgatcgtcttcgccaccgtcggcgtcaccaacttcggcttcgacgtcttctccgccgccgtgccactgccgccgatggaggaggacgccgagcgccgccacacggacggcgtatccgtgaacttcaacgcgcagttcgtcgacgatggcggggaggaggtggcgttcgtgtcggagcgaggcggcgcggcggggctgttccggtgccggccggggcccgagcagcgggccgagccgctgccgacggtggaggggagcctgttccatgaccgcccgacggtgaggggcgggaggttgtacttcgtctccgcccacgagcagccgccggcgccgttcaggagctgggcggcggtgtacgcgacggagattgggagcaaggagacggtgcgggtgagtcctccgggcgtcgtggacatgagccccgccgtgtcggactccggggagctcgttgccgtcgcgtcgtacggggatcggccgtgggcgttcgacttccgcgtgctggaaacggaggtcgccgtcttccgcgccgccgatccagccaggcgcgtcgtcgtggtggggcgcggtgggtggccgacgtggcacggcgagggcacggtcttcttccaccgcgtcgccgacgacgggtggtggagcgtgttccgggtggacgtctcgcctgagaccctcgagcccaccggcggcgagaggcgagtgacgcctcccgggctgcactgcttcactcccgccgcggtcggccgcggcggcggcgggcggtggatcgccgtggcgacgcggcggaaggggcgcgcgcagcggcacgtcgagctgttcgacctcgagacggagagcttctccccgctcaccgagcgcctcaacccggagctccaccactacaaccccttcttctccccgtccggcgaccgcgtcgggtaccaccgcttccgcggcgccggcgcgcggggggactcggtggtgccctacctgcagccggtgcagagcccggtgagctcgctccggatgctgcgcgtgtacggcacgttcccgtcgttctcgccggacgcggcgcacctcgccatgaacggcgacttcttcaagacgccgggcgtcaccatcctccgatccgacggcgccaagcggtgggtgctcacgcgggagcccaacctgttctacacgtcgtggagccccgccgagagcggggtcatcttcacctccatgggccccatcttcgagaccaccaaagcgacggtgaggatcgcgcggctggagttcgacgccggcgagctcaccaccggccgcgacgaggtcgcggccacgctcaaggtgctcacccggccggaggccggcaacgacgcgttcccggcggtgtcgccgtgcgggaagtgggtggtgttccggtcaggccgctccggccacaagaacctctacatcgtcgacgcggcgcacggcgaggacgtcggcgccggcgaggggacgatccggcggctgaccgacggcgagtggatcgacacgatgccgagctggtcgccggacgggagcctgatcgcgttctcctccaaccgccacgacccgacgaacgccgccgtgttcagcatctacctggtccggccagacggctccgggctccgccgcgtccacgtcgccgggccggcggggagcgcggcggcggacagggagcggatcaaccacgtgtgcttcagcccggactcgcggtggctgctgttcacggccaacttcggcggcgtgatggcggagcccatctcggcgccgaaccagttccagccgtacggcgacctgtacgtgtgccggctcgacggctcggggttggtcaggctcacctgcaacgcctacgagaacggcacgccggcgtggggcccggcgagctcgccggcggcggggctggagtcgctgtcgctggtcccgggcgccggggacgagtcgctgggcgagtttgatgagccgctctggctcacttgcgacgtctga

SEQ ID NO: 7417 - protein, 659 aa, Oryza sativa
MEPTGTIVFATVGVTNFGFDVFSAAVPLPPMEEDAERRHTDGVSVNFNAQFVDDGGEEVAFVSERGGAAGLFRCRPGPEQRAEPLPTVEGSLFHDRPTVRGGRLYFVSAHEQPPAPFRSWAAVYATEIGSKETVRVSPPGVVDMSPAVSDSGELVAVASYGDRPWAFDFRVLETEVAVFRAADPARRVVVVGRGGWPTWHGEGTVFFHRVADDGWWSVFRVDVSPETLEPTGGERRVTPPGLHCFTPAAVGRGGGGRWIAVATRRKGRAQRHVELFDLETESFSPLTERLNPELHHYNPFFSPSGDRVGYHRFRGAGARGDSVVPYLQPVQSPVSSLRMLRVYGTFPSFSPDAAHLAMNGDFFKTPGVTILRSDGAKRWVLTREPNLFYTSWSPAESGVIFTSMGPIFETTKATVRIARLEFDAGELTTGRDEVAATLKVLTRPEAGNDAFPAVSPCGKWVVFRSGRSGHKNLYIVDAAHGEDVGAGEGTIRRLTDGEWIDTMPSWSPDGSLIAFSSNRHDPTNAAVFSIYLVRPDGSGLRRVHVAGPAGSAAADRERINHVCFSPDSRWLLFTANFGGVMAEPISAPNQFQPYGDLYVCRLDGSGLVRLTCNAYENGTPAWGPASSPAAGLESLSLVPGAGDESLGEFDEPLWLTCDV

SEQ ID NO: 7418 - DNA, 20 bp, Artificial sequence
  primer
atggaaactcccaaaggcac

SEQ ID NO: 7419 - DNA, 20 bp, Artificial sequence
  primer
tcagatatcgcaagaaatcc

SEQ ID NO: 7420 - protein, 753 aa, Artificial sequence
  consensus sequence
  Variant (2)..(2): Xaa in position 2 is any amino acid
  Variant (4)..(4): Xaa in position 4 is any amino acid
  Variant (6)..(6): Xaa in position 6 is any amino acid
  Variant (8)..(8): Xaa in position 8 is any amino acid
  Variant (10)..(13): Xaa in position 10 to 13 is any amino acid
  Variant (16)..(16): Xaa in position 16 is any amino acid
  Variant (19)..(21): Xaa in position 19 to 21 is any amino acid
  Variant (22)..(38): Xaa in position 22 to 38 is any or no amino acid
  Variant (40)..(41): Xaa in position 40 to 41 is any amino acid
  Variant (42)..(42): Xaa in position 42 is any or no amino acid
  Variant (46)..(46): Xaa in position 46 is any amino acid
  Variant (48)..(48): Xaa in position 48 is any amino acid
  Variant (50)..(50): Xaa in position 50 is any amino acid
  Variant (52)..(63): Xaa in position 52 to 63 is any amino acid
  Variant (64)..(90): Xaa in position 64 to 90 is any or no amino acid
  Variant (92)..(92): Xaa in position 92 is any amino acid
  Variant (95)..(95): Xaa in position 95 is any amino acid
  Variant (97)..(106): Xaa in position 97 to 106 is any amino acid
  Variant (107)..(155): Xaa in position 107 to 155 is any or no amino acid
  Variant (157)..(157): Xaa in position 157 is any amino acid
  Variant (159)..(164): Xaa in position 159 to 164 is any amino acid
  Variant (165)..(174): Xaa in position 165 to 174 is any or no amino acid
  Variant (176)..(177): Xaa in position 176 to 177 is any amino acid
  Variant (180)..(190): Xaa in position 180 to 190 is any amino acid
  Variant (192)..(192): Xaa in position 192 is any amino acid
  Variant (196)..(196): Xaa in position 196 is any amino acid
  Variant (198)..(205): Xaa in position 198 to 205 is any amino acid
  Variant (206)..(210): Xaa in position 206 to 210 is any or no amino acid
  Variant (215)..(215): Xaa in position 215 is any amino acid
  Variant (217)..(218): Xaa in position 217 to 218 is any amino acid
  Variant (220)..(220): Xaa in position 220 is any amino acid
  Variant (226)..(226): Xaa in position 226 is any amino acid
  Variant (229)..(231): Xaa in position 229 to 231 is any amino acid
  Variant (236)..(240): Xaa in position 236 to 240 is any amino acid
  Variant (242)..(243): Xaa in position 242 to 243 is any amino acid
  Variant (244)..(245): Xaa in position 244 to 245 is any or no amino acid
  Variant (247)..(249): Xaa in position 247 to 249 is any amino acid
  Variant (251)..(251): Xaa in position 251 is any amino acid
  Variant (254)..(255): Xaa in position 254 to 255 is any amino acid
  Variant (258)..(264): Xaa in position 258 to 264 is any amino acid
  Variant (265)..(265): Xaa in position 265 is any or no amino acid
  Variant (267)..(272): Xaa in position 267 to 272 is any amino acid
  Variant (277)..(277): Xaa in position 277 is any amino acid
  Variant (279)..(285): Xaa in position 279 to 285 is any amino acid
  Variant (289)..(291): Xaa in position 289 to 291 is any amino acid
  Variant (292)..(292): Xaa in position 292 is any or no amino acid
  Variant (296)..(296): Xaa in position 296 is any amino acid
  Variant (298)..(310): Xaa in position 298 to 310 is any amino acid
  Variant (311)..(318): Xaa in position 311 to 318 is any or no amino acid
  Variant (320)..(320): Xaa in position 320 is any amino acid
  Variant (323)..(323): Xaa in position 323 is any amino acid
  Variant (325)..(325): Xaa in position 325 is any amino acid
  Variant (327)..(327): Xaa in position 327 is any amino acid
  Variant (332)..(338): Xaa in position 332 to 338 is any amino acid
  Variant (339)..(342): Xaa in position 339 to 342 is any or no amino acid
  Variant (349)..(351): Xaa in position 349 to 351 is any amino acid
  Variant (352)..(362): Xaa in position 352 to 362 is any or no amino acid
  Variant (365)..(365): Xaa in position 365 is any amino acid
  Variant (367)..(367): Xaa in position 367 is any amino acid
  Variant (370)..(378): Xaa in position 370 to 378 is any amino acid
  Variant (379)..(381): Xaa in position 379 to 381 is any or no amino acid
  Variant (383)..(386): Xaa in position 383 to 386 is any amino acid
  Variant (388)..(390): Xaa in position 388 to 390 is any amino acid
  Variant (392)..(392): Xaa in position 392 is any amino acid
  Variant (396)..(396): Xaa in position 396 is any amino acid
  Variant (398)..(401): Xaa in position 398 to 401 is any amino acid
  Variant (402)..(403): Xaa in position 402 to 403 is any or no amino acid
  Variant (408)..(408): Xaa in position 408 is any amino acid
  Variant (411)..(424): Xaa in position 411 to 424 is any amino acid
  Variant (425)..(428): Xaa in position 425 to 428 is any or no amino acid
  Variant (431)..(437): Xaa in position 431 to 437 is any amino acid
  Variant (438)..(439): Xaa in position 438 to 439 is any or no amino acid
  Variant (441)..(442): Xaa in position 441 to 442 is any amino acid
  Variant (444)..(444): Xaa in position 444 is any amino acid
  Variant (447)..(448): Xaa in position 447 to 448 is any amino acid
  Variant (450)..(451): Xaa in position 450 to 451 is any amino acid
  Variant (453)..(455): Xaa in position 453 to 455 is any amino acid
  Variant (457)..(461): Xaa in position 457 to 461 is any amino acid
  Variant (462)..(467): Xaa in position 462 to 467 is any or no amino acid
  Variant (469)..(474): Xaa in position 469 to 474 is any amino acid
  Variant (477)..(487): Xaa in position 477 to 487 is any amino acid
  Variant (488)..(489): Xaa in position 488 to 489 is any or no amino acid
  Variant (491)..(493): Xaa in position 491 to 493 is any amino acid
  Variant (495)..(501): Xaa in position 495 to 501 is any amino acid
  Variant (502)..(503): Xaa in position 502 to 503 is any or no amino acid
  Variant (505)..(507): Xaa in position 505 to 507 is any amino acid
  Variant (510)..(510): Xaa in position 510 is any amino acid
  Variant (512)..(516): Xaa in position 512 to 516 is any amino acid
  Variant (517)..(517): Xaa in position 517 is any or no amino acid
  Variant (519)..(519): Xaa in position 519 is any amino acid
  Variant (521)..(522): Xaa in position 521 to 522 is any amino acid
  Variant (524)..(533): Xaa in position 524 to 533 is any amino acid
  Variant (534)..(543): Xaa in position 534 to 543 is any or no amino acid
  Variant (546)..(548): Xaa in position 546 to 548 is any amino acid
  Variant (549)..(550): Xaa in position 549 to 550 is any or no amino acid
  Variant (556)..(557): Xaa in position 556 to 557 is any amino acid
  Variant (563)..(564): Xaa in position 563 to 564 is any amino acid
  Variant (571)..(571): Xaa in position 571 is any amino acid
  Variant (573)..(573): Xaa in position 573 is any amino acid
  Variant (574)..(577): Xaa in position 574 to 577 is any or no amino acid
  Variant (583)..(583): Xaa in position 583 is any amino acid
  Variant (586)..(587): Xaa in position 586 to 587 is any amino acid
  Variant (590)..(591): Xaa in position 590 to 591 is any amino acid
  Variant (593)..(595): Xaa in position 593 to 595 is any amino acid
  Variant (596)..(600): Xaa in position 596 to 600 is any or no amino acid
  Variant (603)..(603): Xaa in position 603 is any amino acid
  Variant (605)..(605): Xaa in position 605 is any amino acid
  Variant (607)..(607): Xaa in position 607 is any amino acid
  Variant (611)..(612): Xaa in position 611 to 612 is any amino acid
  Variant (616)..(616): Xaa in position 616 is any amino acid
  Variant (618)..(619): Xaa in position 618 to 619 is any amino acid
  Variant (621)..(621): Xaa in position 621 is any amino acid
  Variant (623)..(623): Xaa in position 623 is any amino acid
  Variant (625)..(625): Xaa in position 625 is any amino acid
  Variant (627)..(628): Xaa in position 627 to 628 is any amino acid
  Variant (630)..(633): Xaa in position 630 to 633 is any amino acid
  Variant (634)..(643): Xaa in position 634 to 643 is any or no amino acid
  Variant (645)..(650): Xaa in position 645 to 650 is any amino acid
  Variant (652)..(652): Xaa in position 652 is any amino acid
  Variant (654)..(655): Xaa in position 654 to 655 is any amino acid
  Variant (657)..(668): Xaa in position 657 to 668 is any amino acid
  Variant (669)..(678): Xaa in position 669 to 678 is any or no amino acid
  Variant (681)..(682): Xaa in position 681 to 682 is any amino acid
  Variant (685)..(685): Xaa in position 685 is any amino acid
  Variant (687)..(691): Xaa in position 687 to 691 is any amino acid
  Variant (694)..(700): Xaa in position 694 to 700 is any amino acid
  Variant (704)..(704): Xaa in position 704 is any amino acid
  Variant (706)..(706): Xaa in position 706 is any amino acid
  Variant (708)..(710): Xaa in position 708 to 710 is any amino acid
  Variant (711)..(713): Xaa in position 711 to 713 is any or no amino acid
  Variant (718)..(724): Xaa in position 718 to 724 is any amino acid
  Variant (728)..(730): Xaa in position 728 to 730 is any amino acid
  Variant (731)..(739): Xaa in position 731 to 739 is any or no amino acid
  Variant (743)..(743): Xaa in position 743 is any amino acid
  Variant (745)..(746): Xaa in position 745 to 746 is any amino acid
  Variant (748)..(748): Xaa in position 748 is any amino acid
  Variant (752)..(752): Xaa in position 752 is any amino acid
IXFXTXGXRXXXXFDXFSXXXXXXXXXXXXXXXXXXXXEXXXTDGXSXNXNXXXXXXXXXXXXXXXXXXXXXXXXXXXXXXXXXXXXXXXVXERXGXXXXXXXXXXXXXXXXXXXXXXXXXXXXXXXXXXXXXXXXXXXXXXXXXXXXXXXXXXXDXPXXXXXXXXXXXXXXXXLXXVSXXXXXXXXXXXWXAVYXTXXXXXXXXXXXXXRLTPXGXXDXSPAVSXSGXXXAVASXXXXXWXXXXEXXXLXTDXXVFXXXXXXXXRXXXXXXGGWPXWXXXXXXXFHRXXXXDGWXSXXXXXXXXXXXXXXXXXXXXXRXTPXGXHXFTPAXXXXXXXXXXXAVATRRXXXXXXXXXXXXXXRHXEXFDXXXXXXXXXXXXTXXXXPXXXHXNPFXSXXXXXXGYHRXRGXXXXXXXXXXXXXXXXXXSPXXXXXXXXXRXXGXFPXXSXXGXXXAXXXXXXXXXXXGXXXXXXDGXXXXXXXXXXXXXFXXXWXXXXXXXXXYXXXGPXFXXXXXXVXIXXIXXXXXXXXXXXXXXXXXXXXLTXXXXXNNAFPXXSPDGKXXVFRSGRXGXXXXXKNLYIXDAXXGEXXGXXXXXXXXLTXGXWXDTMXXWSPXGXXIXFXSXRXXPXXXXXXXXXXXXXXFXXXXXXPXGXXLXXXXXXXXXXXXXXXXXXXXXXNHXXFSXDXXXXXFTXXXXXXXAEPXSXPXXXXXXQPYGXXXXXXXDGSXXXXXXXXXXXXRLTXNXXEXGTPXW

SEQ ID NO: 7421 - protein, 29 aa, Artificial sequence
  protein pattern
  Variant (2)..(4): Xaa in position 2 to 4 is any or no amino acid
  Variant (6)..(6): Xaa in position 6 is Asp, Glu or Asn
  Variant (8)..(8): Xaa in position 8 is Glu, Asn or Pro
  Variant (10)..(10): Xaa in position 10 is any amino acid
  Variant (13)..(13): Xaa in position 13 is any amino acid
  Variant (14)..(14): Xaa in position 14 is Ala, Cys or Pro
  Variant (15)..(15): Xaa in position 15 is any amino acid
  Variant (19)..(19): Xaa in position 19 is any amino acid
  Variant (21)..(22): Xaa in position 21 to 22 is any amino acid
  Variant (24)..(24): Xaa in position 24 is Ala, Gly or Val
  Variant (26)..(26): Xaa in position 26 is Ala or Ser
  Variant (28)..(28): Xaa in position 28 is Asp, Asn or Thr
LXXXTXGXWXDTXXXWSPXGXXIXFXSXR

SEQ ID NO: 7422 - protein, 26 aa, Artificial sequence
  protein pattern
  Variant (3)..(3): Xaa in position 3 is any amino acid
  Variant (4)..(4): Xaa in position 4 is Cys, Pro or Val
  Variant (7)..(7): Xaa in position 7 is Cys or Asp
  Variant (9)..(9): Xaa in position 9 is Glu or Lys
  Variant (10)..(10): Xaa in position 10 is any amino acid
  Variant (11)..(11): Xaa in position 11 is Ile, Leu or Val
  Variant (12)..(12): Xaa in position 12 is Ala or Val
  Variant (18)..(18): Xaa in position 18 is Glu, Ser or Thr
  Variant (20)..(20): Xaa in position 20 is any amino acid
  Variant (26)..(26): Xaa in position 26 is Ile, Met or Val
FPXXSPXGXXXXFRSGRXGXKNLYIX

SEQ ID NO: 7423 - protein, 31 aa, Artificial sequence
  protein pattern
  Variant (2)..(2): Xaa in position 2 is Leu or Val
  Variant (3)..(3): Xaa in position 3 is Ser or Thr
  Variant (5)..(5): Xaa in position 5 is any amino acid
  Variant (6)..(6): Xaa in position 6 is Asp or Gly
  Variant (7)..(8): Xaa in position 7 to 8 is any amino acid
  Variant (10)..(10): Xaa in position 10 is any amino acid
  Variant (13)..(13): Xaa in position 13 is Ala or Ser
  Variant (14)..(14): Xaa in position 14 is Ile, Leu or Val
  Variant (16)..(16): Xaa in position 16 is any amino acid
  Variant (19)..(21): Xaa in position 19 to 21 is any amino acid
  Variant (22)..(22): Xaa in position 22 is any or no amino acid
  Variant (24)..(27): Xaa in position 24 to 27 is any amino acid
  Variant (28)..(30): Xaa in position 28 to 30 is any or no amino acid
RXXPXXXXDXSPXXSXSGXXXXAXXXXXXXG

SEQ ID NO: 7424 - protein, 27 aa, Artificial sequence
  protein pattern
  Variant (2)..(2): Xaa in position 2 is any amino acid
  Variant (3)..(4): Xaa in position 3 to 4 is any or no amino acid
  Variant (6)..(7): Xaa in position 6 to 7 is any amino acid
  Variant (8)..(9): Xaa in position 8 to 9 is any or no amino acid
  Variant (14)..(14): Xaa in position 14 is any amino acid
  Variant (16)..(17): Xaa in position 16 to 17 is any amino acid
  Variant (18)..(18): Xaa in position 18 is Asp or Glu
  Variant (19)..(20): Xaa in position 19 to 20 is any amino acid
  Variant (21)..(21): Xaa in position 21 is Ile, Leu or Val
  Variant (22)..(22): Xaa in position 22 is Phe or Tyr
  Variant (25)..(25): Xaa in position 25 is His or Arg
  Variant (26)..(26): Xaa in position 26 is any amino acid
  Variant (27)..(27): Xaa in position 27 is Ala, Gly, Ser or Val
RXXXVXXXXGGWPXWXXXXXXXFHXXX

SEQ ID NO: 7425 - protein, 12 aa, Artificial sequence
  protein pattern
  Variant (3)..(3): Xaa in position 3 is Asp, Glu or Thr
  Variant (4)..(4): Xaa in position 4 is Ile or Leu
  Variant (5)..(5): Xaa in position 5 is Phe, His or Tyr
  Variant (6)..(8): Xaa in position 6 to 8 is any amino acid
  Variant (9)..(9): Xaa in position 9 is Ile, Leu or Val
  Variant (12)..(12): Xaa in position 12 is Ser or Thr
YGXXXXXXXDGX

SEQ ID NO: 7426 - protein, 14 aa, Artificial sequence
  protein pattern
  Variant (4)..(4): Xaa in position 4 is any amino acid
  Variant (6)..(6): Xaa in position 6 is Ala, Gly or Ser
  Variant (7)..(7): Xaa in position 7 is Phe or Tyr
  Variant (9)..(9): Xaa in position 9 is Asp or Asn
  Variant (13)..(13): Xaa in position 13 is Ala, Ser, Thr or Val
RLTXNXXEXGTPXW

SEQ ID NO: 7427 - protein, 13 aa, Artificial sequence
  protein pattern
  Variant (2)..(2): Xaa in position 2 is any or no amino acid
  Variant (4)..(4): Xaa in position 4 is any or no amino acid
  Variant (6)..(6): Xaa in position 6 is Phe, Ile, Leu or Val
  Variant (7)..(7): Xaa in position 7 is Asp or His
  Variant (8)..(8): Xaa in position 8 is Ala or Cys
  Variant (9)..(9): Xaa in position 9 is Phe, Ile or Leu
  Variant (13)..(13): Xaa in position 13 is Ala or Thr
TXPXGXXXXTPAX

SEQ ID NO: 7428 - protein, 16 aa, Artificial sequence
  protein pattern
  Variant (2)..(2): Xaa in position 2 is Glu, Gln or Arg
  Variant (3)..(3): Xaa in position 3 is any amino acid
  Variant (4)..(4): Xaa in position 4 is Ile, Leu or Val
  Variant (5)..(5): Xaa in position 5 is Ala, Asn or Ser
  Variant (7)..(9): Xaa in position 7 to 9 is any amino acid
  Variant (11)..(11): Xaa in position 11 is any amino acid
  Variant (15)..(15): Xaa in position 15 is Phe, Ile, Leu or Val
TXXXXPXXXHXNPFXS

SEQ ID NO: 7429 - protein, 22 aa, Artificial sequence
  protein pattern
  Variant (2)..(2): Xaa in position 2 is any or no amino acid
  Variant (4)..(5): Xaa in position 4 to 5 is any amino acid
  Variant (6)..(8): Xaa in position 6 to 8 is any or no amino acid
  Variant (10)..(10): Xaa in position 10 is Ala, Ser or Val
  Variant (13)..(14): Xaa in position 13 to 14 is any amino acid
  Variant (16)..(16): Xaa in position 16 is any amino acid
  Variant (17)..(17): Xaa in position 17 is Ala, Asp, Glu, Gly, Asn or Ser
  Variant (19)..(20): Xaa in position 19 to 20 is any amino acid
  Variant (21)..(21): Xaa in position 21 is Phe, Ile, Leu or Met
LXRXXXXXGXFPXXSXXGXXXA

SEQ ID NO: 7430 - protein, 15 aa, Artificial sequence
  protein pattern
  Variant (4)..(4): Xaa in position 4 is any amino acid
  Variant (5)..(5): Xaa in position 5 is Asp, Glu, Gly or Asn
  Variant (6)..(8): Xaa in position 6 to 8 is any amino acid
  Variant (11)..(11): Xaa in position 11 is Ile or Val
  Variant (13)..(13): Xaa in position 13 is Ile, Leu or Val
  Variant (14)..(14): Xaa in position 14 is any amino acid
TRRXXXXXRHXEXXD

SEQ ID NO: 7431 - protein, 22 aa, Artificial sequence
  protein pattern
  Variant (2)..(6): Xaa in position 2 to 6 is any or no amino acid
  Variant (9)..(9): Xaa in position 9 is any amino acid
  Variant (11)..(11): Xaa in position 11 is Ala, Glu or Asn
  Variant (12)..(12): Xaa in position 12 is Ala, Ser or Thr
  Variant (13)..(19): Xaa in position 13 to 19 is any amino acid
  Variant (20)..(20): Xaa in position 20 is Ala, Ile or Val
  Variant (21)..(21): Xaa in position 21 is any amino acid
  Variant (22)..(22): Xaa in position 22 is Ile, Leu, Pro or Val
VXXXXXGPXFXXXXXXXXXXXX

SEQ ID NO: 7432 - protein, 14 aa, Artificial sequence
  protein pattern
  Variant (2)..(4): Xaa in position 2 to 4 is any amino acid
  Variant (6)..(6): Xaa in position 6 is Asp or Gly
  Variant (8)..(8): Xaa in position 8 is any amino acid
  Variant (10)..(10): Xaa in position 10 is any amino acid
  Variant (12)..(12): Xaa in position 12 is Phe or Tyr
  Variant (14)..(14): Xaa in position 14 is Ala, Cys or Gly
EXXXTXGXSXNXNX

SEQ ID NO: 7433 - protein, 14 aa, Artificial sequence
  protein pattern
  Variant (2)..(2): Xaa in position 2 is Ala, Glu, Gly or Ser
  Variant (3)..(3): Xaa in position 3 is any amino acid
  Variant (4)..(4): Xaa in position 4 is Phe or Tyr
  Variant (5)..(5): Xaa in position 5 is Phe, Leu, Met or Val
  Variant (6)..(6): Xaa in position 6 is Ile or Val
  Variant (7)..(7): Xaa in position 7 is any amino acid
  Variant (9)..(9): Xaa in position 9 is Asp or Asn
  Variant (11)..(11): Xaa in position 11 is Ser or Thr
  Variant (12)..(12): Xaa in position 12 is Asp or Gly
  Variant (14)..(14): Xaa in position 14 is His, Lys or Arg
FXXXXXXPXGXXLX

SEQ ID NO: 7434 - DNA, 1059 bp, Arabidopsis thaliana
  CDS (1)..(1059)
atggccgttacttcgcttctcgataccgttttccgacgtagaaagaagaagtctactgagtttataagctcagttttcgaattcgacttggacaccattaaagctgcaacaaatgatttctcagaactggttggtcgtggcggatttggttttgtttacaagggtaggcttcaaaatggacaagaaatagcagtcaagattttgtctacaagttcaattagaactgagagacagtttcataacgaacttattattttgtctaagcttaaacacaagaatctgatcaatcttcttggtttctgcactaaacgagaccaacatggtcttgtttacgagttcatgcctaactcaagcctcgattgttttatactcgacccacacagagctgctcagctaaattgggagatgtgccgaaacattattgatggcatagctcgagggctacgttaccttcatgaagaatccgggttatgggtcgttcaccgcgacattaaacctggaaacattctattggattcagatttgaaaccgaaaatagtgggatttgaattggcgaggacgatgcaacaaggtgaaaacgcagctgaaacaactgaaattgtcggtaccgtagggtatttagatccggagtacatacgaagcggacgtgtttccgtcaaatctgacgtttatgcctttggagttacaatcttgacgatcattagcagaaggaaggcttggagtgtggacggagactctctaatcaaatatgttaggagatgctggaacagaggagaagccatagatgtgatccatgaagtgatgagggaagaagaaagagaatattcgataagcgaaatcttgagatacattcacattgctttgctatgtgtggatgagaatgctgagagaaggccgaatattgataaagttctgcattggtttagttgtttctctactcctttacctgatccaacatttggtaatagatttcttgtagaggaagaaacaaattggccctggtcgccatctttatctcctggtcacagctctgtcacgtcacccatatcttcacgttaa

SEQ ID NO: 7435 - protein, 352 aa, Arabidopsis thaliana
MAVTSLLDTVFRRRKKKSTEFISSVFEFDLDTIKAATNDFSELVGRGGFGFVYKGRLQNGQEIAVKILSTSSIRTERQFHNELIILSKLKHKNLINLLGFCTKRDQHGLVYEFMPNSSLDCFILDPHRAAQLNWEMCRNIIDGIARGLRYLHEESGLWVVHRDIKPGNILLDSDLKPKIVGFELARTMQQGENAAETTEIVGTVGYLDPEYIRSGRVSVKSDVYAFGVTILTIISRRKAWSVDGDSLIKYVRRCWNRGEAIDVIHEVMREEEREYSISEILRYIHIALLCVDENAERRPNIDKVLHWFSCFSTPLPDPTFGNRFLVEEETNWPWSPSLSPGHSSVTSPISSR

SEQ ID NO: 7436 - DNA, 1245 bp, Zea mays
  CDS (1)..(1245)
atggcgcagcgccggctgttgggcacggcgccggcgcccgcgggcgatgcggcgtcgcacggctcgggctccagccccgacgcgatgcggatcatggtgggcgtgctggtaacggtcatcgtctgcacgctgctctactgcgtctactgctggcggtggcggaagcgcaatgccatccggagatccctgctggacagcctatggcggcggtcgagctcggacctgccgctcatggacctcgcctccatcctcgctgccaccgacaacttctccaaggccaacaagctcggcgagggcggcttcggccccgtctacagaggcgtgctgagcggcggctccgagatcgccgtgaagcgtctgtcagcgcggtcgcggcagggcgcggcggagttccggaacgaggtggagctcatcgccaagctgcagcaccgcaacctagtgcggctgctgggctggtgcgccgagcgcgaggagaagctgctggtgtacgagtacctccccaaccgcagcctcgacgccttcctcttcgatccgagcaagagtgcgcagcttgggtggagcacccggcacaacgtgatcctgggcatcgcccgcggcctgctgtacctccacgaggactcgctgctgaaggtggtccaccgggacctcaaggccagcaacgtgctgctcgaccacaagatgagcccaaagatctccgacttcggcatggccaagatcttcgaggacgactccgacgcgattaacacgggccgcgtcgtcgggacctacgggtacatggcgcccgagttcgcgttggacggcgtcttctcggtgaagtcggacgtgttcagtttcggggtcctcctgctggagatcttgagcgggcaacggaacggcgccttgtacctcgaggaacaccagcagtccctcatccaagacgcatggaagctgtggagtgaagaccgcgcggccgagttcatggaccagtcgctggggcggtcctactccaaggacgaggcgtggcggtgctaccacgtcggcctgctctgcgtgcaggaggaccccgacgtccgcccgaccatgtccaacgtcctgctcatgctcatcagcgaccacaccaagttacccgagccagccatgccgcccttgttcgcgcggctcaggaacatctccttgctggcgccgccactcaccaccaaaaccgagtccaccacgtctccgctgtcgatcaacgacgtctccatcaccatgatcgaaccgcgatga

SEQ ID NO: 7437 - protein, 414 aa, Zea mays
MAQRRLLGTAPAPAGDAASHGSGSSPDAMRIMVGVLVTVIVCTLLYCVYCWRWRKRNAIRRSLLDSLWRRSSSDLPLMDLASILAATDNFSKANKLGEGGFGPVYRGVLSGGSEIAVKRLSARSRQGAAEFRNEVELIAKLQHRNLVRLLGWCAEREEKLLVYEYLPNRSLDAFLFDPSKSAQLGWSTRHNVILGIARGLLYLHEDSLLKVVHRDLKASNVLLDHKMSPKISDFGMAKIFEDDSDAINTGRVVGTYGYMAPEFALDGVFSVKSDVFSFGVLLLEILSGQRNGALYLEEHQQSLIQDAWKLWSEDRAAEFMDQSLGRSYSKDEAWRCYHVGLLCVQEDPDVRPTMSNVLLMLISDHTKLPEPAMPPLFARLRNISLLAPPLTTKTESTTSPLSINDVSITMIEPR

SEQ ID NO: 7438 - DNA, 1236 bp, Zea mays
  CDS (1)..(1236)
atggcgcagcgccggctgttgggcacggcgccggcgcccgcgggcgatgcggcgtcgcacggctcgggctccagccccgacgcgatgcggatcatggtgggcgtgctggtaacggtcatcgtctgcacgctgctctactgcgtctactgctggcggtggcggaagcgcaatgccatccggagatccctgctggacagcctatggcggcggtcgagctcggacctgccgctcatggacctcgcctccatcctcgctgccaccgacaacttctccaaggccaacaagctcggcgagggcggcttcggccccgtctacagaggcgtgctgagcggcggctccgagatcgccgtgaagcgtctgtcagcgcggtcgcggcagggcgcggcggagttccggaacgaggtggagctcatcgccaagctgcagcaccgcaacctagtgcggctgctgggctggtgcgccgagcgcgaggagaagctgctggtgtacgagtacctccccaaccgcagcctcgacgccttcctcttcgatccgagcaagagtgcgcagcttgggtggagcacccggcacaacgtgatcctgggcatcgcccgcggcctgctgtacctccacgaggactcgctgctgaaggtggtccaccgggacctcaaggccagcaacgtgctgctcgaccacaagatgagcccaaagatctccgacttcggcatggccaagatcttcgaggacgactccgacgcgattaacacgggccgcgtcgtcgggacctacgggtacatggcgcccgagttcgcgttggacggcgtcttctcggtgaagtcggacgtgttcagtttcggggtcctcctgctggagatcttgagcgggcaacggaacggcgccttgtacctcgaggaacaccagcagtccctcatccaagacctgtggagtgaagaccgcgcggccgagttcatggaccagtcgctggggcggtcctactccaaggacgaggcgtggcggtgctaccacgtcggcctgctctgcgtgcaggaggaccccgacgtccgcccgaccatgtccaacgtcctgctcatgctcatcagcgaccacaccaagttacccgagccagccatgccgcccttgttcgcgcggctcaggaacatctccttgctggcgccgccactcaccaccaaaaccgagtccaccacgtctccgctgtcgatcaacgacgtctccatcaccatgatcgaaccgcgatga

SEQ ID NO: 7439 - protein, 411 aa, Zea mays
MAQRRLLGTAPAPAGDAASHGSGSSPDAMRIMVGVLVTVIVCTLLYCVYCWRWRKRNAIRRSLLDSLWRRSSSDLPLMDLASILAATDNFSKANKLGEGGFGPVYRGVLSGGSEIAVKRLSARSRQGAAEFRNEVELIAKLQHRNLVRLLGWCAEREEKLLVYEYLPNRSLDAFLFDPSKSAQLGWSTRHNVILGIARGLLYLHEDSLLKVVHRDLKASNVLLDHKMSPKISDFGMAKIFEDDSDAINTGRVVGTYGYMAPEFALDGVFSVKSDVFSFGVLLLEILSGQRNGALYLEEHQQSLIQDLWSEDRAAEFMDQSLGRSYSKDEAWRCYHVGLLCVQEDPDVRPTMSNVLLMLISDHTKLPEPAMPPLFARLRNISLLAPPLTTKTESTTSPLSINDVSITMIEPR

SEQ ID NO: 7440 - DNA, 1128 bp, Oryza sativa
  CDS (1)..(1128)
atggagaggctacgatcaggagcaactcagccatattccagcaactctgctgaatcggagaatatttcaagtgtggagtcgatgcttatcgacatttcgactttacgagctgctacagggtgttttgcagaacgcaacaagcttggcgaaggtggatttggtgcagtgtacaagggtactctgcctgatggcgatgaaatagcagtgaagagattatcgaagagttcagcacaaggagtgggagagctgaagaacgagctcgcattggttgcaaagctccagcacaagaatcttgtcaggcttgtcggtgtctgcctggagcaagaggagaggcttctcgtctatgagtttgttcccaaccgcagcctcgatcagatcctctttgacgccgacaagcgtcaacagcttgattggggaaagaggtacaagatcatcaacggcattgctcgtggcctgcaatacctccacgaggactcgcagctcaaggtagtccaccgtgatctcaaagcgagcaacatcttgctcgacatgaacatgaacccgaagatctctgactttgggctcgcgaggctcttcgggcgagaccagacgcagggggtcaccaacctcgtcatcggcacatatgggtacatgtcaccggaatatgcgatgcgaggcaactactccctcaagtccgacgtgttcagcttcggcgtcatggtgctggagatcgtgacggggaagaagaacaacgactgctacaactccctgcaatccgaagacctcttaacccttgtgagcactaaccatatgatcctactcgtctgttcatggaaaaatgaggtgtgggagcagtggacggcgagggcggtgtcggaggcggtcgacccggtgatgggcggcggtttctcgtggagcgacgtgatgcggtgcatccacatcggtctgctctgcgtgcaggagaaccctgcggatcggccggtgatgtcgtcggtggtgatgatgctcggcagcgacacggtgtcgctcagggcgccgtccaagccggcgttctgtgccaggaggaacggcggcaccggcggtgccggtgccagctcggggggcacgtcgtctggtacgtcgacggcggcgtcggtgcaaggcaagtaa

SEQ ID NO: 7441 - protein, 375 aa, Oryza sativa
MERLRSGATQPYSSNSAESENISSVESMLIDISTLRAATGCFAERNKLGEGGFGAVYKGTLPDGDEIAVKRLSKSSAQGVGELKNELALVAKLQHKNLVRLVGVCLEQEERLLVYEFVPNRSLDQILFDADKRQQLDWGKRYKIINGIARGLQYLHEDSQLKVVHRDLKASNILLDMNMNPKISDFGLARLFGRDQTQGVTNLVIGTYGYMSPEYAMRGNYSLKSDVFSFGVMVLEIVTGKKNNDCYNSLQSEDLLTLVSTNHMILLVCSWKNEVWEQWTARAVSEAVDPVMGGGFSWSDVMRCIHIGLLCVQENPADRPVMSSVVMMLGSDTVSLRAPSKPAFCARRNGGTGGAGASSGGTSSGTSTAASVQGK

SEQ ID NO: 7442 - DNA, 1044 bp, Glycine max
  CDS (1)..(1044)
atgattaccggagaccaaaaacaaattaaactggaagagctgccactgtttgaattcgaaaagctatcaactgctacaaacaactttcacttggccaatatgcttggcaagggaggttttggtccggtatacaaggggcaattggataacggacaagaaattgccgtgaaaagactttcaaaagcatctggacaaggattggaagaatttatgaatgaagttgttgtgatttctaaacttcaacatcgcaatctagtgagacttcttggttgttgtatagaacgagatgaacaaatgttggtatatgagtttatgccaaataaaagtttggattcatttctatttgatccactccaaaggaaaatactagattggaaaaaacgcttcaacataattgaaggaatagctagaggaatactttatcttcatagagactcaagactaaggattatacacagagatcttaaagcaagcaacatcttactagatgatgagatgcatcccaaaatatcagactttggtttagctagaattgttagaagtggtgatgatgatgaagctaacacgaaaagggttgttggaacttatggttatatgccgcctgaatatgcaatggagggaattttctcagaaaaatcagatgtctatagctttggagtgttgttgctagagattgtaagcggacgaagaaacactagcttttataacaatgagcaatcacttagccttgttggatatgcatggaaactatggaatgaaggcaacatcaagtctataatagatctagagatacaggatccaatgttcgaaaagagtatattgaggtgcatacatataggacttctatgtgtgcaagaacttacaaaagaaagaccaactatctccactgtggttttgatgctcataagtgagattacacatcttcctcctccaaggcaagttgcatttgttcagaaacaaaattgtcaaagttcagagtcttctcaaaaaagtcaatttaattcaaacaacaatgtaactataagtgaaattcaaggtagataa

SEQ ID NO: 7443 - protein, 347 aa, Glycine max
MITGDQKQIKLEELPLFEFEKLSTATNNFHLANMLGKGGFGPVYKGQLDNGQEIAVKRLSKASGQGLEEFMNEVVVISKLQHRNLVRLLGCCIERDEQMLVYEFMPNKSLDSFLFDPLQRKILDWKKRFNIIEGIARGILYLHRDSRLRIIHRDLKASNILLDDEMHPKISDFGLARIVRSGDDDEANTKRVVGTYGYMPPEYAMEGIFSEKSDVYSFGVLLLEIVSGRRNTSFYNNEQSLSLVGYAWKLWNEGNIKSIIDLEIQDPMFEKSILRCIHIGLLCVQELTKERPTISTVVLMLISEITHLPPPRQVAFVQKQNCQSSESSQKSQFNSNNNVTISEIQGR

SEQ ID NO: 7444 - DNA, 1284 bp, Glycine max
  CDS (1)..(1284)
atggacaaacataatggagagaaactatggtatgagaagatggataaaagctttgtggagaaaactaaaagagaactcgggaagaataagaaggctaatgacacaagaggtcttgtggcaataaatacaccaattgatgaaatggatttatctacatctaaggatgctaaagttgaggcaatatgcaatgaattgattggtacttttatagataactcggaaggaaatcagcctcaaaacttgattactggtgaccaaaaacaaattaaactggaagagctgcctctatttgaatttgaaatgctagcaactgctacaaataactttcacttggccaatatgcttggcaagggaggttttggtccagtatacaaggggcaattggataacggacaagaaattgctgtaaaaagactttcaaaagcatctggacaaggattggaagaatttatgaatgaagtagtagtgatttctaaacttcaacatcgcaatcttgtaagacttcttggttgttgtatagaacgagacgaacagatgttggtatatgagtttatgccaaataaaagtttggattcgtttctctttgatccactccaaaggaaaatactagattggaaaaaacgcttcaacataattgaaggaatagctcgaggagtactttatcttcatcgagactcaagactaaggattatacatagagatcttaaagcaagcaacatcttactagatgatgagatgaatcccaaaatatcagactttggtttagctagaattgttagaggcggcgatgatgatgaagctaacacgaaaagggttgttggaacttatggttatatgccgcctgagtatgcaatggagggaattttctcagaaaaatcggatgtttatagctttggagtgttattgctagaaattgtaagcggacgaagaaacaccagcttttataacaatgagcaatcacttagccttgttggatatgcatggaaactatggaatgaagacaacattatgtctataatagatcctgagatacatgatccaatgttcgaaaagagtatattgaggtgcatacatataggacttctatgtgtgcaagaacttacaaaagaaagacccacaatatccactgtggttttgatgctcataagtgagattacacatcttcctcctccaagacaagttgcatttgttcagaaacaaaattgtcaaagttcagagtcttctcagaaaagccaatttaactcaaacaacgatgtaactataagtgaaattcaaggtagataa

SEQ ID NO: 7445 - protein, 427 aa, Glycine max
MDKHNGEKLWYEKMDKSFVEKTKRELGKNKKANDTRGLVAINTPIDEMDLSTSKDAKVEAICNELIGTFIDNSEGNQPQNLITGDQKQIKLEELPLFEFEMLATATNNFHLANMLGKGGFGPVYKGQLDNGQEIAVKRLSKASGQGLEEFMNEVVVISKLQHRNLVRLLGCCIERDEQMLVYEFMPNKSLDSFLFDPLQRKILDWKKRFNIIEGIARGVLYLHRDSRLRIIHRDLKASNILLDDEMNPKISDFGLARIVRGGDDDEANTKRVVGTYGYMPPEYAMEGIFSEKSDVYSFGVLLLEIVSGRRNTSFYNNEQSLSLVGYAWKLWNEDNIMSIIDPEIHDPMFEKSILRCIHIGLLCVQELTKERPTISTVVLMLISEITHLPPPRQVAFVQKQNCQSSESSQKSQFNSNNDVTISEIQGR

SEQ ID NO: 7446 - DNA, 942 bp, Arabidopsis thaliana
  CDS (1)..(942)
atgatttctcagaactggttggtcgtggcggatttggttttgtttacaaggcttcaaaatggacaagaaatagcagtcaagattttgtctacaagttcaattagaactgagagacagtttcataacgaacttattattttgtctaagcttaaacacaagaatctgatcaatcttcttggtttctgcactaaacgagaccaacatggtcttgtttacgagttcatgcctaactcaagcctcgattgttttatactcgacccacacagagctgctcagctaaattgggagatgtgccgaaacattattgatggcatagctcgagggctacgttaccttcatgaagaatccgggttatgggtcgttcaccgcgacattaaacctggaaacattctattggattcagatttgaaaccgaaaatagtgggatttgaattggcgaggacgatgcaacaaggtgaaaacgcagctgaaacaactgaaattgtcggtaccgtagggtatttagatccggagtacatacgaagcggacgtgtttccgtcaaatctgacgtttatgcctttggagttacaatcttgacgatcattagcagaaggaaggcttggagtgtggacggagactctctaatcaaatatgttaggagatgctggaacagaggagaagccatagatgtgatccatgaagtgatgagggaagaagaaagagaatattcgataagcgaaatcttgagatacattcacattgctttgctatgtgtggatgagaatgctgagagaaggccgaatattgataaagttctgcattggtttagttgtttctctactcctttacctgatccaacatttggtaatagatttcttgtagaggaagaaacaaattggccctggtcgccatctttatctcctggtcacagctctgtcacgtcacccatatcttcacgttaa

SEQ ID NO: 7447 - protein, 313 aa, Arabidopsis thaliana
MISQNWLVVADLVLFTRLQNGQEIAVKILSTSSIRTERQFHNELIILSKLKHKNLINLLGFCTKRDQHGLVYEFMPNSSLDCFILDPHRAAQLNWEMCRNIIDGIARGLRYLHEESGLWVVHRDIKPGNILLDSDLKPKIVGFELARTMQQGENAAETTEIVGTVGYLDPEYIRSGRVSVKSDVYAFGVTILTIISRRKAWSVDGDSLIKYVRRCWNRGEAIDVIHEVMREEEREYSISEILRYIHIALLCVDENAERRPNIDKVLHWFSCFSTPLPDPTFGNRFLVEEETNWPWSPSLSPGHSSVTSPISSR

SEQ ID NO: 7448 - DNA, 1095 bp, Zea mays
  CDS (1)..(1095)
atggtgaaactgcgctctgctgccatccggagatccctgctggacagcctatggcggcggtcgagctcggacctgccgctcatggacctcgcctccatcctcgctgccaccgacaacttctccaaggccaacaagctcggcgagggcggcttcggccccgtctacagaggcgtgctgagcggcggctccgagatcgccgtgaagcgtctgtcagcgcggtcgcggcagggcgcggcggagttccggaacgaggtggagctcatcgccaagctgcagcaccgcaacctagtgcggctgctgggctggtgcgccgagcgcgaggagaagctgctggtgtacgagtacctccccaaccgcagcctcgacgccttcctcttcgatccgagcaagagtgcgcagcttgggtggagcacccggcacaacgtgatcctgggcatcgcccgcggcctgctgtacctccacgaggactcgctgctgaaggtggtccaccgggacctcaaggccagcaacgtgctgctcgaccacaagatgagcccaaagatctccgacttcggcatggccaagatcttcgaggacgactccgacgcgattaacacgggccgcgtcgtcgggacctacgggtacatggcgcccgagttcgcgttggacggcgtcttctcggtgaagtcggacgtgttcagtttcggggtcctcctgctggagatcttgagcgggcaacggaacggcgccttgtacctcgaggaacaccagcagtccctcatccaagacgcatggaagctgtggagtgaagaccgcgcggccgagttcatggaccagtcgctggggcggtcctactccaaggacgaggcgtggcggtgctaccacgtcggcctgctctgcgtgcaggaggaccccgacgtccgcccgaccatgtccaacgtcctgctcatgctcatcagcgaccacaccaagttacccgagccagccatgccgcccttgttcgcgcggctcaggaacatctccttgctggcgccgccactcaccaccaaaaccgagtccaccacgtctccgctgtcgatcaacgacgtctccatcaccatgatcgaaccgcgatga

SEQ ID NO: 7449 - protein, 364 aa, Zea mays
MVKLRSAAIRRSLLDSLWRRSSSDLPLMDLASILAATDNFSKANKLGEGGFGPVYRGVLSGGSEIAVKRLSARSRQGAAEFRNEVELIAKLQHRNLVRLLGWCAEREEKLLVYEYLPNRSLDAFLFDPSKSAQLGWSTRHNVILGIARGLLYLHEDSLLKVVHRDLKASNVLLDHKMSPKISDFGMAKIFEDDSDAINTGRVVGTYGYMAPEFALDGVFSVKSDVFSFGVLLLEILSGQRNGALYLEEHQQSLIQDAWKLWSEDRAAEFMDQSLGRSYSKDEAWRCYHVGLLCVQEDPDVRPTMSNVLLMLISDHTKLPEPAMPPLFARLRNISLLAPPLTTKTESTTSPLSINDVSITMIEPR

SEQ ID NO: 7450 - DNA, 1059 bp, Arabidopsis thaliana
  CDS (1)..(1059)
atgctttctgctgcagatgatattacaacttcaggttcacttcaattcgattttaaagcaattgaagctgcaacaaataattttcagaagagtaacaagcttggtcatggtggatttggtgaaggaacttttccgaatggaacagaagttgctgtgaagaggctgtctaaaatttcaggtcaaggtgaagaagagtttaagaacgaggtgcttcttgtagcaaagctccaacatagaaatctcgttagacttctggggttctctgttgaaggagaagaaaagatacttgtctacgagtatatgccaaataaaagtcttgactattttctctttgaccatagaaggaggggtcagctggattggagaacacgatacaacataatcaggggagtgactcgagggattttatatctccatcaagattcacggcttacaatcatacaccgtgacctcaaagcgggtaacattctcttagatgtcgatatgaacccgaaaatcgcggattttggtgtggctaggaattttagagtggaccaaactgaagctaccacaggaagagtagttggaacattcggttacatgcctcccgaatatgtggcgaacgggcagttctcgatgaaatctgatgtttatagttttggagtattgattctggagattattgttggcaaaaagagtagtagcttccatgagattgatggttcagtaggaaacttggtcacatatgtttggaggctttggaacaacgaatcattcttggaacttgtagacccggccatgggggagagttatgataaagatgaagtcatcagatgcatccatataagcttattgtgcgttcaagaaaatcctgcagatcgtccaacaatgtccacagtgtttcagatgctcactaatacttttcttactctgcccgtgcctcaattacctggatttgttttcagggtcagatccgagccaaacccattagccgagagacttgagcctggtccgtctactaccatgtcgtttgcttgttccattgatgatgcatcgatcacgagtgttgatcttcgttga

SEQ ID NO: 7451 - protein, 352 aa, Arabidopsis thaliana
MLSAADDITTSGSLQFDFKAIEAATNNFQKSNKLGHGGFGEGTFPNGTEVAVKRLSKISGQGEEEFKNEVLLVAKLQHRNLVRLLGFSVEGEEKILVYEYMPNKSLDYFLFDHRRRGQLDWRTRYNIIRGVTRGILYLHQDSRLTIIHRDLKAGNILLDVDMNPKIADFGVARNFRVDQTEATTGRVVGTFGYMPPEYVANGQFSMKSDVYSFGVLILEIIVGKKSSSFHEIDGSVGNLVTYVWRLWNNESFLELVDPAMGESYDKDEVIRCIHISLLCVQENPADRPTMSTVFQMLTNTFLTLPVPQLPGFVFRVRSEPNPLAERLEPGPSTTMSFACSIDDASITSVDLR

SEQ ID NO: 7452 - DNA, 1056 bp, Arabidopsis thaliana
  CDS (1)..(1056)
atggccgttacttcgcttctcgataccgttttccgacgtagaaagaagaagtctactgagtttataagctttttcgaattcgacttggacaccattaaagctgcaacaaatgatttctcagaactggttggtcgtggcggatttggttttgtttacaagggtaggcttcaaaatggacaagaaatagcagtcaagattttgtctacaagttcaattagaactgagagacagtttcataacgaacttattattttgtctaagcttaaacacaagaatctgatcaatcttcttggtttctgcactaaacgagaccaacatggtcttgtttacgagttcatgcctaactcaagcctcgattgttttatactcgacccacacagagctgctcagctaaattgggagatgtgccgaaacattattgatggcatagctcgagggctacgttaccttcatgaagaatccgggttatgggtcgttcaccgcgacattaaacctggaaacattctattggattcagatttgaaaccgaaaatagtgggatttgaattggcgaggacgatgcaacaaggtgaaaacgcagctgaaacaactgaaattgtcggtaccgtagggtatttagatccggagtacatacgaagcggacgtgtttccgtcaaatctgacgtttatgcctttggagttacaatcttgacgatcattagcagaaggaaggcttggagtgtggacggagactctctaatcaaatatgttaggagatgctggaacagaggagaagccatagatgtgatccatgaagtgatgagggaagaagaaagagaatattcgataagcgaaatcttgagatacattcacattgctttgctatgtgtggatgagaatgctgagagaaggccgaatattgataaagttctgcattggtttagttgtttctctactcctttacctgatccaacatttggtaatagatttcttgtagaggaagaaacaaattggccctggtcgccatctttatctcctggtcacagctctgtcacgtcacccatatcttcacgttaa

SEQ ID NO: 7453 - protein, 351 aa, Arabidopsis thaliana
MAVTSLLDTVFRRRKKKSTEFISFFEFDLDTIKAATNDFSELVGRGGFGFVYKGRLQNGQEIAVKILSTSSIRTERQFHNELIILSKLKHKNLINLLGFCTKRDQHGLVYEFMPNSSLDCFILDPHRAAQLNWEMCRNIIDGIARGLRYLHEESGLWVVHRDIKPGNILLDSDLKPKIVGFELARTMQQGENAAETTEIVGTVGYLDPEYIRSGRVSVKSDVYAFGVTILTIISRRKAWSVDGDSLIKYVRRCWNRGEAIDVIHEVMREEEREYSISEILRYIHIALLCVDENAERRPNIDKVLHWFSCFSTPLPDPTFGNRFLVEEETNWPWSPSLSPGHSSVTSPISSR

SEQ ID NO: 7454 - DNA, 1065 bp, Arabidopsis thaliana
  CDS (1)..(1065)
atggccgttacttcgcttctcgataccgttttccgacgtagaaagaagaagtctactgagtttataagctatacagcagttttcgaattcgacttggacaccattaaagctgcaacaaatgatttctcagaactggttggtcgtggcggatttggttttgtttacaagggtaggcttcaaaatggacaagaaatagcagtcaagattttgtctacaagttcaattagaactgagagacagtttcataacgaacttattattttgtctaagcttaaacacaagaatctgatcaatcttcttggtttctgcactaaacgagaccaacatggtcttgtttacgagttcatgcctaactcaagcctcgattgttttatactcgacccacacagagctgctcagctaaattgggagatgtgccgaaacattattgatggcatagctcgagggctacgttaccttcatgaagaatccgggttatgggtcgttcaccgcgacattaaacctggaaacattctattggattcagatttgaaaccgaaaatagtgggatttgaattggcgaggacgatgcaacaaggtgaaaacgcagctgaaacaactgaaattgtcggtaccgtagggtatttagatccggagtacatacgaagcggacgtgtttccgtcaaatctgacgtttatgcctttggagttacaatcttgacgatcattagcagaaggaaggcttggagtgtggacggagactctctaatcaaatatgttaggagatgctggaacagaggagaagccatagatgtgatccatgaagtgatgagggaagaagaaagagaatattcgataagcgaaatcttgagatacattcacattgctttgctatgtgtggatgagaatgctgagagaaggccgaatattgataaagttctgcattggtttagttgtttctctactcctttacctgatccaacatttggtaatagatttcttgtagaggaagaaacaaattggccctggtcgccatctttatctcctggtcacagctctgtcacgtcacccatatcttcacgttaa

SEQ ID NO: 7455 - protein, 354 aa, Arabidopsis thaliana
MAVTSLLDTVFRRRKKKSTEFISYTAVFEFDLDTIKAATNDFSELVGRGGFGFVYKGRLQNGQEIAVKILSTSSIRTERQFHNELIILSKLKHKNLINLLGFCTKRDQHGLVYEFMPNSSLDCFILDPHRAAQLNWEMCRNIIDGIARGLRYLHEESGLWVVHRDIKPGNILLDSDLKPKIVGFELARTMQQGENAAETTEIVGTVGYLDPEYIRSGRVSVKSDVYAFGVTILTIISRRKAWSVDGDSLIKYVRRCWNRGEAIDVIHEVMREEEREYSISEILRYIHIALLCVDENAERRPNIDKVLHWFSCFSTPLPDPTFGNRFLVEEETNWPWSPSLSPGHSSVTSPISSR

SEQ ID NO: 7456 - DNA, 1353 bp, Vitis vinifera
  CDS (1)..(1353)
atgtttgctattgaagaagtgaaagtaacagatttcaggaacttgtatggattggtgcagtgcactccagatatatctcaacatttctgtaatgtttgcttgagaaatgcattaggtgatattccaacgtgctgtggctggagggagggtggaagagttcttgcaccgagttgcactataagatatgaatcaggcccctttttcgaaaccaatggaacgacagtgccatcgtctcctcctgcgacttcatcttcgcagccaccaaccaacccaaccatcgctcctgagaaagttgaaagtaagttcataaagcttctcaccgaagatgatgaaattataagtgtggaatccttacaattcaactttaatactattaaagttgcaacaaacaatttttcaaatggtaatacgcttggaaggggtggattcggtgatgtttacaagggagtactttcaaatggacaagaaatagcggtgaagaggctatcaaagaaaactgatcaaggtgaaccagagtttaaaaatgaagttctactattggccaaacttcaacataggaatttgattagactcctaggtttttgcctagacggagaggagagacttctcatttatgagttcctgcccaattcaagccttgatcacttcatctttgatcctgctaatagggtatgtttggactgggagaggcgtcatagaatcataaaaggcattgcacgtggacttctatacttacatgaagattctcgtcttcgaatagtccattgtgatctcaaagctagcaacatccttctagatgaagatatgaatcctaaaatttcagattttggtatggcaaggttgttttcaatggatgaaactcatgctaatgcgagtcgaattgcaggaacctatggatatatggctccagaatatgcacatcaaggccacttctctactaagtcggatgtatatagttttggcgtattaattctagaaattgtaagtggccaaaagatttgttttgataatggagaggagttagagcaccttgtaacctatgcttggagacattggaatgaagggagggttgtagatattgtcgatccaattttggggactaatttaagaaatgaaataataagatgccttcacattgggttactatgtgtacaagaaagtgtagctaataggccaacaatggcattgattgtttccatgctcaacagctattatctccctcttcccagtccctcacgacctggatttttaatgcaaagtagcacacagatagcggggcatagttctcaaatgagaatctcaacccactttacggtgaatgaagtttcaattactgatttatatcctcgataa

SEQ ID NO: 7457 - protein, 450 aa, Vitis vinifera
MFAIEEVKVTDFRNLYGLVQCTPDISQHFCNVCLRNALGDIPTCCGWREGGRVLAPSCTIRYESGPFFETNGTTVPSSPPATSSSQPPTNPTIAPEKVESKFIKLLTEDDEIISVESLQFNFNTIKVATNNFSNGNTLGRGGFGDVYKGVLSNGQEIAVKRLSKKTDQGEPEFKNEVLLLAKLQHRNLIRLLGFCLDGEERLLIYEFLPNSSLDHFIFDPANRVCLDWERRHRIIKGIARGLLYLHEDSRLRIVHCDLKASNILLDEDMNPKISDFGMARLFSMDETHANASRIAGTYGYMAPEYAHQGHFSTKSDVYSFGVLILEIVSGQKICFDNGEELEHLVTYAWRHWNEGRVVDIVDPILGTNLRNEIIRCLHIGLLCVQESVANRPTMALIVSMLNSYYLPLPSPSRPGFLMQSSTQIAGHSSQMRISTHFTVNEVSITDLYPR

SEQ ID NO: 7458 - DNA, 1149 bp, Vitis vinifera
  CDS (1)..(1149)
atgggttggattgaacttgtgacttgtggtataacaggggaaagagaaatggaggaagctgcgctgcttgaattggcaacttcagacagctttggtgattcaaaagatgatgaacatgatggaaagaggggggctcatgatcttaaactgttcagttttgattctattgtggctgccacaaataacttttcacctgaaaataaacttggagagggtggttttggcccggtttataaggggaaattacttgaggggcaagaaatagcagtgaagagactttcaaggggctccagccaaggattggtggagttcaaaaatgagattagactgattgtcaaactccaacacatgaatcttgttagacttttgggttgctgcatcaagggagaagaaaagatgttaatctatgagttcatgcccaacaaaagcttggacttcttcctctttgatcctgctagaagaaagatattggactggaaaagacgtcacaatatcatagagggtattgcacaaggacttctttacttgcataaatattcaagactaagaattattcatagagatctaaaagcaagtaacatcctacttgatcatgacttgaaccccaaaatttctgattttggcatggccagaacttttgggcgaaatgcatcggaagcaaatacaaataggattgttggaacatatggttacatgccacccgagtatgccatggaaggaattttctcggtgaaatcagatgtttatagctttggggtcctactgttggagattgtgagcggccggaagaacaaaagctttcatcataaccacggtgcctttgccataaacctggcagtatacgcttgggatctatggaaagaaggtactagcttggagctagtggatccaatgctggaggattcctactcaacaacccaaatgttgagatgcattcatattgctctcttgtgcgtacaggagagagcagcagataggcctacaatgtcagctgttatctccatgctcaccaacgaaactgtacccctaccaaacccaaatctacccgcattttccacccatcataaagtgtcagagacagattcacacaaaggcgggccagagagctgttctggaagtgtaactatttcagagacggaaggtcggtaa

SEQ ID NO: 7459 - protein, 382 aa, Vitis vinifera
MGWIELVTCGITGEREMEEAALLELATSDSFGDSKDDEHDGKRGAHDLKLFSFDSIVAATNNFSPENKLGEGGFGPVYKGKLLEGQEIAVKRLSRGSSQGLVEFKNEIRLIVKLQHMNLVRLLGCCIKGEEKMLIYEFMPNKSLDFFLFDPARRKILDWKRRHNIIEGIAQGLLYLHKYSRLRIIHRDLKASNILLDHDLNPKISDFGMARTFGRNASEANTNRIVGTYGYMPPEYAMEGIFSVKSDVYSFGVLLLEIVSGRKNKSFHHNHGAFAINLAVYAWDLWKEGTSLELVDPMLEDSYSTTQMLRCIHIALLCVQERAADRPTMSAVISMLTNETVPLPNPNLPAFSTHHKVSETDSHKGGPESCSGSVTISETEGR

SEQ ID NO: 7460 - DNA, 1227 bp, Populus trichocarpa
  CDS (1)..(1227)
atgtatattgttttaaattccattatgatggaaaaaggcagtgtctcaacagttttaattatagccattgtcattccgattgctgtttctatcgcgcttttctgcatgtgtttctgtttcctgagaagggcaagaaagaccagagattatgtgccagaaaatgatgttggagatgagattaccaccgaggagtccttgcaatttgatttgagtactatagaagctgccacgaacaattgttcccctgataacaagttaggtgaaggaggatttggtgaggtttacaagggaacacttcctaatggacaacaaattgctgtgaagaggctatcaagaaattctggacaaggtgcagcagaatttaagaatgaggtggtattggtagccaagcttcaacacaggaatctagtgaggttgcaagggttttgcttggaaagagaagaaaagattcttgtctatgaatttgtcagcaacaaaagccttgactactttctatttgaccctgaaaggcaaggactgttggactggtccagacggtacaaaataataggaggcattgctcgaggaattctttatcttcacgaggactctcggctacgaattatacatcgtgacctcaaagctagcaatattctgctagatggagatatgaaccccaaaatctcagattttggcttggctaggattttcgtagtcgatcaaactcaagcaagtaccaatagaattgttggaacatatggttatatgtccccagaatatgcaatgcatgggcgtttctctgtcaagtctgatgtctatagctttggtgtcttaatccttgagattataaccggaaagaagaacagttctttctatcaaacaggcggtgctccagaccttgtgagctatgtttggaatcattggagagatgggacaccattggaagtgctggatccaactctgacagatacttattcaagaaacgaagtaattagatgcatccacattggattgttatgtgttcaagaagatccagctatcagacccgcaatggcaacaattgttctcacactcaatagttacttggttaccttaccatcacctcaagagcctgcattttttttccgtagcactataacagatgaagtgaacatttcaagcaaggaatttcttttagatcaatctaaaagaaagtctattgcttattctgtagatgaagtttcaattactgaagtatatcctcgatag

SEQ ID NO: 7461 - protein, 408 aa, Populus trichocarpa
MYIVLNSIMMEKGSVSTVLIIAIVIPIAVSIALFCMCFCFLRRARKTRDYVPENDVGDEITTEESLQFDLSTIEAATNNCSPDNKLGEGGFGEVYKGTLPNGQQIAVKRLSRNSGQGAAEFKNEVVLVAKLQHRNLVRLQGFCLEREEKILVYEFVSNKSLDYFLFDPERQGLLDWSRRYKIIGGIARGILYLHEDSRLRIIHRDLKASNILLDGDMNPKISDFGLARIFVVDQTQASTNRIVGTYGYMSPEYAMHGRFSVKSDVYSFGVLILEIITGKKNSSFYQTGGAPDLVSYVWNHWRDGTPLEVLDPTLTDTYSRNEVIRCIHIGLLCVQEDPAIRPAMATIVLTLNSYLVTLPSPQEPAFFFRSTITDEVNISSKEFLLDQSKRKSIAYSVDEVSITEVYPR

SEQ ID NO: 7462 - DNA, 1065 bp, Populus trichocarpa
  CDS (1)..(1065)
atggccattgtcattcccttcgctgtttctatcgcgcttttttgcatgtgtttctgtttcctgaggagggcaagaaagaccagagattatgtgccagaaaatgatgttggagatgagattaccaccgaggagtccttgcaatttgatttgagtactatagaagctgccacgaacaatttttccgctgataacaagttaggtgagggaggatttggtgaggtttacaggggaacacttcctaatggacagcaaattgctgtgaagaggctaccaagaaattctggacaaggtgcagcagaatttaagaatgaggttgtattggtagccaagcttcaacacaggaatctagcgagggtgcaaggattttgcttggaaggagaagaaaatattattgtctatgaatttgtctgcaacaaaagccttgactactttctatttgaccctgaaatgcaaggactgttggactggtccagacggtacaaaataataggaggcattgctctaggaattctttatcttcacgaggactctcggctacgaattatacatcgtgacctcaaagctagcaatattctgctagatggagatatgaaccccaaaatctcagattttggcttggctaggattttcgtagttgatcaatctcaagcaagtacaattagaattgttggaacatatggttatatgtccccagaatatgcgatgcatgggcgtttctctgtcaagtctgatgtctatagctttggtgtcttaatccttgagattataaccggaaagaagaacagttccttctatcaaacagggggtgctgcagaccttgtgagctatgtttggaaacattggagagatggaacacaattggaagtgctggatccaactctgacagatacatattcaagaaatgaagtaattagatgcatccacattggattgttatgtgttcaagaagatccagctatcagacccgcaatggcaacaattgttcttacactcaatagtaactcggttaccttaccatcaccgcaagagcctgctttttttatccaaccagaaaataaaaattga

SEQ ID NO: 7463 - protein, 354 aa, Populus trichocarpa
MAIVIPFAVSIALFCMCFCFLRRARKTRDYVPENDVGDEITTEESLQFDLSTIEAATNNFSADNKLGEGGFGEVYRGTLPNGQQIAVKRLPRNSGQGAAEFKNEVVLVAKLQHRNLARVQGFCLEGEENIIVYEFVCNKSLDYFLFDPEMQGLLDWSRRYKIIGGIALGILYLHEDSRLRIIHRDLKASNILLDGDMNPKISDFGLARIFVVDQSQASTIRIVGTYGYMSPEYAMHGRFSVKSDVYSFGVLILEIITGKKNSSFYQTGGAADLVSYVWKHWRDGTQLEVLDPTLTDTYSRNEVIRCIHIGLLCVQEDPAIRPAMATIVLTLNSNSVTLPSPQEPAFFIQPENKN

SEQ ID NO: 7464 - DNA, 1011 bp, Populus trichocarpa
  CDS (1)..(1011)
atggagctacccctattccagttcactacaatagccaaagccaccaacggcttttcattaaacaacaaaataggagaaggtggttttggacctgtgtacaagggtactctagaagatggccaagaaatagcagtaaaaacgctatcaaggagttctggacaaggattaaatgagttcaaaaatgaagttatactgatcacaaagcttcagcaccgaaatcttgtaaaacttcttggctgttgcattcaaggagaagagaaaattctggtttatgaatacatgcccaacagaagcctcgattccttcattttcgatcaaacaagaggcaaactattagactggtccaagcgtttcagcattatatgtggtattgccagggggcttctatatcttcatcaggattccagattgaggattgttcacagggatcttaaagcaagcaacgttttacttgataaggatatgaacccaaaaatctctgattttggtttggccagaatggttggtggagaccagacggaaggaaacacaaccagagttattgggacttatggttatatggctcctgaatatgctactgatgggctcttctcagtgaagtctgatgtttttagctttggaatcttaatgcttgagataataagtggaaagaagagtagaggattttatcatccagaccgtagcctaagccttactgcacatgcatggagattgtggaaagatggaaaacctttggacttaattgaggcgtttccaggagagtcacgcaatttatcagaagtgatcatgagatgcataaacattagtctcttgtgtgtgcagcatcatcctgatgataggccaagcatggccactgtggtttggatgctaggaggtgagaatacactgcctcagccaaatgaaccaggcttttttaagggtagcggtccgttcggaccatcttcttcatcaagcaatattgaattatattcgaacaatgaatttactgcctcactcttgtatcctcggtag

SEQ ID NO: 7465 - protein, 336 aa, Populus trichocarpa
MELPLFQFTTIAKATNGFSLNNKIGEGGFGPVYKGTLEDGQEIAVKTLSRSSGQGLNEFKNEVILITKLQHRNLVKLLGCCIQGEEKILVYEYMPNRSLDSFIFDQTRGKLLDWSKRFSIICGIARGLLYLHQDSRLRIVHRDLKASNVLLDKDMNPKISDFGLARMVGGDQTEGNTTRVIGTYGYMAPEYATDGLFSVKSDVFSFGILMLEIISGKKSRGFYHPDRSLSLTAHAWRLWKDGKPLDLIEAFPGESRNLSEVIMRCINISLLCVQHHPDDRPSMATVVWMLGGENTLPQPNEPGFFKGSGPFGPSSSSSNIELYSNNEFTASLLYPR

SEQ ID NO: 7466 - DNA, 1122 bp, Populus trichocarpa
  CDS (1)..(1122)
atgtgtttctgtttcctgaggagggcaagaaagaccatagattatgttccagaaaatgatgttggagatgagattaccaccgaggagtccttgcaatttgatttgagtactatagaagctgccacgaacaatttctccgctgataacaagttaggtgagggaggatttggtgaggtttacaagggaacacttcctaatggacaacaaattgctgtgaagaggctatcaagaaattctggacaaggtgcagcagaatttaagaatgaggttgtattggtagccaagcttcaacacaggaatctagtgagggtgcaagggttttgcttggaaagagaagaaaagattcttgtctatgaatttgtcagcaacaaaagccttgactactttctatttgaccctgaaaggcaaggactgttggactggtccagacggtacaaaataataggaggcattgctcgaggaattctttatcttcacgaggactcgcggctacgaattatacatcgtgacctcaaagctagcaatattctgctagatggagatatgaaccccaaaatctcagattttggcttggctaggattttcgtagttgatcaaactcaagcaagtacaattagaattgttggaacatatggttatatgtccccagaatatgcaatgcatgggcgtttctctgtcaagtctgatgtctatagctttggtgtcttaatccttgagattataaccggaaagaagaacagttctttctatcaaacagggggtgctgtagaccttgtgagctatgtttggaaacattggagagatgggacaccattggaagtgctggatccaactctgacagatacatattcaagaaatgaagtaattagatgcatccacattggattgttatgtgttcaagaagatccagcaatcagacccgcaatggcaacaattattctcacactcaatagttactcggttaccttaccatcaccgcaagagcctgctttttttttccatagtactataacagatgaagtgaacatttcaagcaaggaatttcttttagaacagtctaaaagcaagtctgttgcttattctgtagatgaagattcaattactgaagtatatcctcgatag

SEQ ID NO: 7467 - protein, 373 aa, Populus trichocarpa
MCFCFLRRARKTIDYVPENDVGDEITTEESLQFDLSTIEAATNNFSADNKLGEGGFGEVYKGTLPNGQQIAVKRLSRNSGQGAAEFKNEVVLVAKLQHRNLVRVQGFCLEREEKILVYEFVSNKSLDYFLFDPERQGLLDWSRRYKIIGGIARGILYLHEDSRLRIIHRDLKASNILLDGDMNPKISDFGLARIFVVDQTQASTIRIVGTYGYMSPEYAMHGRFSVKSDVYSFGVLILEIITGKKNSSFYQTGGAVDLVSYVWKHWRDGTPLEVLDPTLTDTYSRNEVIRCIHIGLLCVQEDPAIRPAMATIILTLNSYSVTLPSPQEPAFFFHSTITDEVNISSKEFLLEQSKSKSVAYSVDEDSITEVYPR

SEQ ID NO: 7468 - DNA, 1086 bp, Populus trichocarpa
  CDS (1)..(1086)
atgaaatcccaattggtgaagacccatctcctcctccatcgaaaggtatatatcctgaaaagtttagcatcattagtggaatccttgcaatataacttagaaatcattcaccttgcaacagaaaatttttctgaagttaataagcttggacagggtggatttggttctgtgtacaagggtacccttcccaacggacaatatatagccgtgaagagactatctagggattccacacaaggagagcaagaattcaagaatgaagtcctgctggtggccaaacttcagcacaagaatttggtcaggctcctaggctattgctttgaacaagaggaaaggcttcttatctacgagtttatgcctaactcaagcctcaacaacttcattttcgatcaaaccaagcgttcacaattggactgggaacgacgttacaagatcatagaaggcatttctcgaggacttctttaccttcatgaagattctcgtctccggatcattcaccgtgacctgaaacctagtaacattttgttagatgcagaaatgaatgctaagatatcagactttggcatggcaaggctgtttgcaggggatcaaacccaagaaagtacaagcagagttgttggaacctttggatacatgcctccagagtatgtaatgcgcggacacttctctgtcaaatcggatatctttagctttggtgtgcttgttttggaaattgtaagtggtagaaaaagaacttttatcaatgagggggagacgtgggaaaattggaatagcggaccaaatttagataagctgatagatgcgacattaagggctggctcaagaaatgaaatgttgagatgtatccacgttggtttactatgtgtgcaggaaaatgcacttgatagaccaaacatggcttcagttgttatcatgctaagttcttactccgtcactcttccagtacctcagaagcctgcattttttgctcgcggtacggtactgcctgggacatcatcaacttggaccgagtctgatcaatcccggagtgcatctgtcccattttcaatcaatgaggcttcaatctctgagctctaccctcggtag

SEQ ID NO: 7469 - protein, 361 aa, Populus trichocarpa
MKSQLVKTHLLLHRKVYILKSLASLVESLQYNLEIIHLATENFSEVNKLGQGGFGSVYKGTLPNGQYIAVKRLSRDSTQGEQEFKNEVLLVAKLQHKNLVRLLGYCFEQEERLLIYEFMPNSSLNNFIFDQTKRSQLDWERRYKIIEGISRGLLYLHEDSRLRIIHRDLKPSNILLDAEMNAKISDFGMARLFAGDQTQESTSRVVGTFGYMPPEYVMRGHFSVKSDIFSFGVLVLEIVSGRKRTFINEGETWENWNSGPNLDKLIDATLRAGSRNEMLRCIHVGLLCVQENALDRPNMASVVIMLSSYSVTLPVPQKPAFFARGTVLPGTSSTWTESDQSRSASVPFSINEASISELYPR

SEQ ID NO: 7470 - DNA, 1086 bp, Populus trichocarpa
  CDS (1)..(1086)
atgtatgtgattcctgagaaaacaggaggcaacagagaagaaaatgatcagatagatagtggaccaaaggaagacttggagctacccctattccagttcactacaatagccaaagccaccaacggcttttcattcaacaacaagctaggagaaggtggttttggacctgtgtacaagggtactctagaagatggtcaagaaatagcagcaaagacgcattcaaggagttctggacaaggaataaatgagttcaaaaatgaagttatactgatcacaaagcttcaacaccgaaatcttgtaaaacttcttggctgttgcattcaaggagaagagaaaattctggtttatgaatacatgcccaacaaaagcctcgattccttcattttcgatcaaacaagaggcgaactgttagactggtccaagcgtttcagcattatatgtggtattgctagagggcttctatatcttcatcaggattccagattgaggattgtacacagggatcttaaagcaagtaacgttttacttgataaggatatgaacccaaaaatctctgattttggtttggccagaatgtttggtggagaccagacggaaggaaacacaaccagagttgttggaacttatggttatatggctcctgaatatgctactgatgggctcttctcagtgaagtctgatgtttttagctttggaatcttaatgcttgagataataagcggaaagaagagtagaggattttatcatccagaccatagcctaagccttattggacatgcatggagattgtggaaagatggaaaacctttggacttaattgaggcgtttccaggagagtcacgcaatttgtcagaagtgatcatgagatgcataaacattagtctcttgtgtgtgcagcagcatcctgatgataggccaagcatggccactgtggtttggatgctaggatgtgagaatacactgcctcagccaaatgaaccaggcttttttaagggtagcggtccgttcggaccatcttcttcatcaagcaatattgaattatcttcgaacaatgaaattaccacctcactcttttatcctcggtag

SEQ ID NO: 7471 - protein, 361 aa, Populus trichocarpa
MYVIPEKTGGNREENDQIDSGPKEDLELPLFQFTTIAKATNGFSFNNKLGEGGFGPVYKGTLEDGQEIAAKTHSRSSGQGINEFKNEVILITKLQHRNLVKLLGCCIQGEEKILVYEYMPNKSLDSFIFDQTRGELLDWSKRFSIICGIARGLLYLHQDSRLRIVHRDLKASNVLLDKDMNPKISDFGLARMFGGDQTEGNTTRVVGTYGYMAPEYATDGLFSVKSDVFSFGILMLEIISGKKSRGFYHPDHSLSLIGHAWRLWKDGKPLDLIEAFPGESRNLSEVIMRCINISLLCVQQHPDDRPSMATVVWMLGCENTLPQPNEPGFFKGSGPFGPSSSSSNIELSSNNEITTSLFYPR

SEQ ID NO: 7472 - DNA, 1083 bp, Sorghum bicolor
  CDS (1)..(1083)
atggaatattttgagtccgagcgacttaatctagttgcgataagagctgcaacaaacaatttctcagatgaaaacaaacttggagagggaggttttggagaagtattcaagggtacgttacaggacggggaagagatagctgtgaagaggctttcacagaattcctcacagggtttccacgagcttaagaatgaactcgtgctggctgccaaactcaaacacaggaatctggtgcagctcctgggggtgtgcctgcaagaagagaagctactcatttatgagtacatgcccaacagaagcttagataccttccttctcgatccagtgagacggcagcagctggattggagcaagaggtttgccatcatctgcggtattgcacggggacttctctacctccacgtggagtcccgcctgaaggtcatccacagagatctgaagccgagcaatgtgttgctcgatgcagacatgaaccctaaaatttcagacttcggcatcgccagagctttccatggagaccaatctagggatataacaagacaacctgtcggaaccctcgggtacatgtctccggagtatgcctactgggggcacgtctcctccaagtcagacatgttcagcttcggtgttatagtcctggagatggtgaccggccgaaggaacaacagtgcatatgactctgaaatagactccgtgtctgtgctgagccatgtctgggagaagtggagagcaggttcgacagcagatgtggttgacccattgctggccgagtcagggtacccggaaactgaggtcctcaactgcattgaggtcgggctcctatgtgtccaggagaacccggccgatcggccggacgcttctgctgtggtgcttatgctcagcagtccgacctctacttccgatgacaggcgaaccccgtccaggccagccttcgccttcagctccggcttccctgctgctgcctcaggtggcccagcagccggttcttggagttctgacagtgtgctgattggcgatcagcagcgctcaacggccgcggtttcggagaacgagatgtccatctcagagcttcagccgaggtag

SEQ ID NO: 7473 - protein, 360 aa, Sorghum bicolor
MEYFESERLNLVAIRAATNNFSDENKLGEGGFGEVFKGTLQDGEEIAVKRLSQNSSQGFHELKNELVLAAKLKHRNLVQLLGVCLQEEKLLIYEYMPNRSLDTFLLDPVRRQQLDWSKRFAIICGIARGLLYLHVESRLKVIHRDLKPSNVLLDADMNPKISDFGIARAFHGDQSRDITRQPVGTLGYMSPEYAYWGHVSSKSDMFSFGVIVLEMVTGRRNNSAYDSEIDSVSVLSHVWEKWRAGSTADVVDPLLAESGYPETEVLNCIEVGLLCVQENPADRPDASAVVLMLSSPTSTSDDRRTPSRPAFAFSSGFPAAASGGPAAGSWSSDSVLIGDQQRSTAAVSENEMSISELQPR

SEQ ID NO: 7474 - DNA, 1263 bp, Zea mays
  CDS (1)..(1263)
atggcgcagcgccggctgttgggcacggcgccggcgcccgcgggcgatgcggcgtcgcacggctcgggctccagccccgacgcgatgcggatcatggtgggcgtgctggtaacggtcatcgtctgcacgctgctctactgcgtctactgctggcggtggcggaagcgcaatggtgaaactgcgctctgctgccatccgagatccctgctggacagcctatggcggcggtcgagctcggacctgccgctcatggacctcgcctccatcctcgctgccaccgacaacttctccaaggccaacaagctcggcgagggcggcttcggccccgtctacagaggcgtgctgagcggcggctccgagatcgccgtgaagcgtctgtcggcgcggtcgcggcagggcgcggcggagttccggaacgaggtggagctcatcgccaagctgcagcaccgcaacctagtgcggctgctgggctggtgcgccgagcgcgaggagaagctgctggtgtacgagtacctccccaaccgcagcctcgacgccttcctcttcgatccgagcaagagtgcgcagcttgggtggagcacccggcacaacgtgatcctgggcatcgcccgcggcctgctgtacctccacgaggactcgctgctgaaggtggtccaccgggacctcaaggccagcaacgtgctgctcgaccacaagatgagcccaaagatctccgacttcggcatggccaagatcttcgaggacgactccgacgcgatcaacacgggccgcgtcgtcgggacctacgggtacatggcgcccgagttcgcgttggacggcgtcttctcggtgaagtcggacgtgttcagcttcggggtcctcctgctggagatcttgagcgggcaacggaacggcgctttgtacctcgaggaacaccagcagtccctcatccaagacgcatggaagctgtggagtgaagaccgcgcggccgagttcatggaccagtcgctggggcggtcctactccaaggacgaggcgtggcggtgctaccacgtcggcctgctctgcgtgcaggaggaccccgacgtccgccccaccatgtccaacgtcctgctcatgctcatcagcgaccacaccaagttacccgagccagccatgccgcccttgttcgcgcggctcaggaacatctccttgctggcgccgccactcactaccaaaaccgagtccaccacgtctccgctgtcgatcaacgacgtctccatcaccatgatcgaaccgcgatga

SEQ ID NO: 7475 - protein, 420 aa, Zea mays
MAQRRLLGTAPAPAGDAASHGSGSSPDAMRIMVGVLVTVIVCTLLYCVYCWRWRKRNGETALCCHPRSLLDSLWRRSSSDLPLMDLASILAATDNFSKANKLGEGGFGPVYRGVLSGGSEIAVKRLSARSRQGAAEFRNEVELIAKLQHRNLVRLLGWCAEREEKLLVYEYLPNRSLDAFLFDPSKSAQLGWSTRHNVILGIARGLLYLHEDSLLKVVHRDLKASNVLLDHKMSPKISDFGMAKIFEDDSDAINTGRVVGTYGYMAPEFALDGVFSVKSDVFSFGVLLLEILSGQRNGALYLEEHQQSLIQDAWKLWSEDRAAEFMDQSLGRSYSKDEAWRCYHVGLLCVQEDPDVRPTMSNVLLMLISDHTKLPEPAMPPLFARLRNISLLAPPLTTKTESTTSPLSINDVSITMIEPR

SEQ ID NO: 7476 - DNA, 1167 bp, Zea mays
  CDS (1)..(1167)
atgttgagcgagcctaccgtagcgacgagcgcggatatgaattggtgttgtgttcctagggccaagagagaagagaacccttactccaacagcatcggcggcatctactccgagaagaacataaggctcttctcctatgccgagttaagatctgctaccgacaacttcaaccgcaccaacaaagtgggacgaggcggattcgggacagtttataagggaaccatccgaagcgggcgagaggtcgcggtgaaggtcctctccgccgagtccaggcagggcatcagggagttcctgacggagatcgacgtcatcagcaacgtcaagcaccccaacctcgtcgaactcatcggctgctgcgtcgagggaagcaaccggattctggtgtatgagtacctcaagaacagcagccttgaccgtgcgctgctggcttctaacagtgagcctgccgacttcacctggagcgtcaggtctgctatatgcctcggagtcgctcggggccttgcgtacctgcacgaggagatcgcggcgccgatcgtgcacagagacatcaaggccagcaacatacttctcgacaggaactacgtccccaagatcggggatttcggtctggccaagctgtttcctgacaatgtcacccacatcagcacccgcgtcgcgggaacaacaggctaccttgcgcctgagtacgcctggcatggccagctcaccaagaaagcggacatctacagctttggtgtccttgtcctggagatagtgagcggcactagtagctccaggagcatactcatggatgacaagattctcctagagaaggcatgggagctgtacgaagcgaagaggctcaaggaactggtggatccagcccttgtagactgccctgacgaagaagccatcaggtacatcatggtggccctcttctgcctacaggcggccgccgcgcgccggccgacgatgccccaggtcgtcaccatgctgtccaagcccgtccggatcaacgagagcgagctgacggcgccggggtacctccaggagtacagcaggcggagccccttgtccaaggccaccacttccaccgactccaggttcaagaacctggcgtcccaggaggactccaacatgttcagcacggtggtgccacccacggtgaccgagatgagccccaggtga

SEQ ID NO: 7477 - protein, 388 aa, Zea mays
MLSEPTVATSADMNWCCVPRAKREENPYSNSIGGIYSEKNIRLFSYAELRSATDNFNRTNKVGRGGFGTVYKGTIRSGREVAVKVLSAESRQGIREFLTEIDVISNVKHPNLVELIGCCVEGSNRILVYEYLKNSSLDRALLASNSEPADFTWSVRSAICLGVARGLAYLHEEIAAPIVHRDIKASNILLDRNYVPKIGDFGLAKLFPDNVTHISTRVAGTTGYLAPEYAWHGQLTKKADIYSFGVLVLEIVSGTSSSRSILMDDKILLEKAWELYEAKRLKELVDPALVDCPDEEAIRYIMVALFCLQAAAARRPTMPQVVTMLSKPVRINESELTAPGYLQEYSRRSPLSKATTSTDSRFKNLASQEDSNMFSTVVPPTVTEMSPR

SEQ ID NO: 7478 - DNA, 1104 bp, Glycine max
  CDS (1)..(1104)
atggctttttgcccaattttttgttgcggaaatagttcggatcgcaaaggacgagggaagaaacaacctccatggcgggtgttttctttgaaggaattacactccgctacaaataatttcaactatgataacaagctcggcgaagggggattcggcagtgtgtactggggccagctctgggatggatcgcaaattgcagtgaaaagattgaaagtttggagcaacaaagcagacatggaatttgctgttgaagttgagatattggctagagtacgacacaagaatcttctcagtctacgtggctattgtgctgaaggtcaggaacggttaattgtttatgattatatgcctaatttgagcctgctctctcatcttcatggacagcactcagcagaatcccttcttgattggaaccggcggatgaatatcgcaattgggtctgctgagggaattggatatctccacaaccagtcaatgccacatatcatccacagagatatcaaggcaagcaacgtgttgttggattcggattttcaggcacaggttgctgattttggttttgccaagttgatccctgatggggcaacacatgtgactacgagagttaaaggcaccctaggctaccttgcaccagaatatgctatgttaggtaaagcaaatgagagttgtgatgtctacagttttggaattctccttctagaacttgctagtggcaaaaaaccacttgagaaacttagttctgcggtgaagcgatcaataaatgactgggcactgccattggcttgtgagaagaaattcagtgaactagcagatccaaaacttgagggtaactatgcggaggaagagcttaaaagagtagttttaactgctctcttatgtgttcagagtcagccagagaagagacccaccatacttgaggtggtagagctactgaagggagaatccaaagataagttagcccaactggaaaataatgaactctttaagaaccctccagctgtaggacatactgatgatgggaccgttgctgctgaaggcagttcagatttcatctcagaagacaaggaatcaaaacctgagttggaagagaatactgagccataa

SEQ ID NO: 7479 - protein, 367 aa, Glycine max
MAFCPIFCCGNSSDRKGRGKKQPPWRVFSLKELHSATNNFNYDNKLGEGGFGSVYWGQLWDGSQIAVKRLKVWSNKADMEFAVEVEILARVRHKNLLSLRGYCAEGQERLIVYDYMPNLSLLSHLHGQHSAESLLDWNRRMNIAIGSAEGIGYLHNQSMPHIIHRDIKASNVLLDSDFQAQVADFGFAKLIPDGATHVTTRVKGTLGYLAPEYAMLGKANESCDVYSFGILLLELASGKKPLEKLSSAVKRSINDWALPLACEKKFSELADPKLEGNYAEEELKRVVLTALLCVQSQPEKRPTILEVVELLKGESKDKLAQLENNELFKNPPAVGHTDDGTVAAEGSSDFISEDKESKPELEENTEP

SEQ ID NO: 7480 - DNA, 1170 bp, Glycine max
  CDS (1)..(1170)
atgactagttgctttcatcttttcagaaagaaaggatcttcctcaggcacacagttgaccggagttgatatagatgtttcagaaattcagaatgtcaatatctacacttacagagaattgcgaattgccactgaaggttttagttctgcaaacaagatagggcagggagggtttggagcagtctataagggaaagctgagaaacggttctttggcagctataaaggttttatcagctgaatcaagacaagggatccgggagttcttgacagaaatcaaggtgatctctagtatagagcatgagaatctagtcaagttacatggatgctgtgtggaagacaaccacaggattttggtatatggctatcttgagaacaacagcctagcacaaacacttattggttcaggccatagtagcatccaattaagttggcctgtaaggaggaacatttgcataggtgttgcccggggccttgcattccttcatgaggaggttcggccacgcattatccatagagacataaaagcaagcaatgtactacttgacaaagatctccagcccaaaatttcagattttggccttgcaaagcttattccaccaaacctgacccatattagtactcgtgttgctggaacagttgggtatctagcacctgaatatgcaatccgaaatcaagtgactagaaaatcagatgtctatagttttggagttctactattagaaattgttagtgggagacctaacacaaacagacgtttgcctgttgaagaacagtatcttctcacaagggcttgggatttgtatgagagtggggaggcagaaaaattggtggatgcttttctagaaggagacttcaatattgaggaggcagtcagattttgtaagattggtctcctttgcacgcaggattctccgcagctccggccctctatgtccagtgtgcttgagatgcttttaggtgaaaaagacgtgaatgaggagaatgtgacaaaaccgggcatgatatttgaatttgtggaagccaaaagtgcaggtaaacaaaaatgcaaagctgaagtggatagtaaatctttgttggctgaagggaagcaagatgattcatcttcatcaggaaccatgagctcttttgctaccatgaccttcacagcaatttatgatagaagcgattag

SEQ ID NO: 7481 - protein, 389 aa, Glycine max
MTSCFHLFRKKGSSSGTQLTGVDIDVSEIQNVNIYTYRELRIATEGFSSANKIGQGGFGAVYKGKLRNGSLAAIKVLSAESRQGIREFLTEIKVISSIEHENLVKLHGCCVEDNHRILVYGYLENNSLAQTLIGSGHSSIQLSWPVRRNICIGVARGLAFLHEEVRPRIIHRDIKASNVLLDKDLQPKISDFGLAKLIPPNLTHISTRVAGTVGYLAPEYAIRNQVTRKSDVYSFGVLLLEIVSGRPNTNRRLPVEEQYLLTRAWDLYESGEAEKLVDAFLEGDFNIEEAVRFCKIGLLCTQDSPQLRPSMSSVLEMLLGEKDVNEENVTKPGMIFEFVEAKSAGKQKCKAEVDSKSLLAEGKQDDSSSSGTMSSFATMTFTAIYDRSD

SEQ ID NO: 7482 - DNA, 1155 bp, Hordeum vulgare
  CDS (1)..(1155)
atggggagctccgccagctgcctgtggggcggctccaagtcggggccaggtcaaaatggtctagcggccacgtcggcgtctcctcgttctggccatgtattatcaagatccgggcgaaatatacaagtcttctccctaaaagagttgaaatctgccacacggaattttcacacgacgaactgcattggccgtgggggttttggaccagtttataagggagacctgaaagatggcacccaagttgcaattaaaaggctttcagctgaatcaaagcaaggaactaacgagttcttgacagagatcgatgtcatatcaaatgtcaggcaccccaaccttgtaaagctcattggttgctgtgtcgaagggaataacagattattggtgtatgaatatgcagagaagaacagtttgtcaaatgctttgcttggaccgaagagtagatgtatccctttgaactggcaaacaagagctgccatttgtactggaactgcttctggtcttgcatttcttcacgaggaagcacaaccacgcatagtccaccgtgatatcaaggctagcaacatcttacttgataagacgctggttcctaaaattggagattttggactggccaagcttttccctgatgccatcactcacattagcacgcgtgttgcgggaacaatgggttacttggctccagagtatgcattattgggacagttaaccaagaaagcagacatatatagttttggggtgctgcttcttgaagttataagtggtgaaagcagcagcaaatcgacttggggggaagatatgcatgtccttgtggaatggacatggaagctgcgagaagaagggaggcttttggaaattgtagatccggacgtggaagaatacccagaggagcaagtacttcgtttcatcaaggtggcacttctgtgtacccaagcaacagcacagcagaggccatccatgaagcaggtggtccatatgctagctaatgaaacagaaattgatcttgagaacgccgtcccgccgggtgtgctgaaagaaccccgtcgtaaaatgggcagtttgggggatttggctctggacacgtcctcgagtcagagtaccagagccaacgcggctgggtccttgcaccacacagaccagagacatgaacagctgtaa

SEQ ID NO: 7483 - protein, 384 aa, Hordeum vulgare
MGSSASCLWGGSKSGPGQNGLAATSASPRSGHVLSRSGRNIQVFSLKELKSATRNFHTTNCIGRGGFGPVYKGDLKDGTQVAIKRLSAESKQGTNEFLTEIDVISNVRHPNLVKLIGCCVEGNNRLLVYEYAEKNSLSNALLGPKSRCIPLNWQTRAAICTGTASGLAFLHEEAQPRIVHRDIKASNILLDKTLVPKIGDFGLAKLFPDAITHISTRVAGTMGYLAPEYALLGQLTKKADIYSFGVLLLEVISGESSSKSTWGEDMHVLVEWTWKLREEGRLLEIVDPDVEEYPEEQVLRFIKVALLCTQATAQQRPSMKQVVHMLANETEIDLENAVPPGVLKEPRRKMGSLGDLALDTSSSQSTRANAAGSLHHTDQRHEQL

SEQ ID NO: 7484 - DNA, 1122 bp, Triticum aestivum
  CDS (1)..(1122)
atggattgctgctttatgttcggacggagatctcaacatgctgttgaaggcgatgagggtgaacatagtgtgagggtcttttcttacaacgagttgagaaaggcaactcaagacttcagtggggcaaacaagattggagagggtggttttggttccgtattcaggggaatgctcaaagacggcacactaatcgcagtgaaggttctgtcagccacttcaaggcaaggcgtccgagagttcttgactgaacttacagcaatttcagacatcaagcatgaaaacctcgtcacgcttgtcggctgctgtgctgaagggtcccataggatcctcgtttacaattatcttgagaaaaacagcctttcacagacattgctagggtctggctacagcagcatccagttcaactggagggctcgtgtcaaaattgccgtgggagttgcccgtggacttgcatttcttcatgaggaaatccgtcctcacattatccaccgcgacataaaagcgagcaacattcttctcgacaaggacctcaccccgaaaatttctgattttggattggcgaggctccttcctgccaatgcaactcatgttagcacccgggtggcaggcacattaggatacttggctcctgaatatgctatccgaggtcaagtgacgaagaagtctgacatctatagttatggggttcttctcttggaaatcgtcagtggcagatgtaacaccaacacaagattgccttgtgaagatcaattcctccttgagaagacatgggcattctatgagcaagagcgtctagaagagatcatagatgccgacatagacgaagacctggacatcgaggaggcatgccggttcctgaagatcggcctgctatgcacacaggacgcaatggcgcgccgcccccacatgcccaccgtcgtgaggatgctcacaggaagcaagagcgtctccatggagaagatcaccaggccagccatgatcaccgactttgcggagctcaaggtcagcaccaaaccgcacggagcgaaccaggcgcggtccaacacgtcgaggtccttctccaccacggaaatatctgagcccttctcgtcgtcggagaatcacacgcagacatctgtatga

SEQ ID NO: 7485 - protein, 373 aa, Triticum aestivum
MDCCFMFGRRSQHAVEGDEGEHSVRVFSYNELRKATQDFSGANKIGEGGFGSVFRGMLKDGTLIAVKVLSATSRQGVREFLTELTAISDIKHENLVTLVGCCAEGSHRILVYNYLEKNSLSQTLLGSGYSSIQFNWRARVKIAVGVARGLAFLHEEIRPHIIHRDIKASNILLDKDLTPKISDFGLARLLPANATHVSTRVAGTLGYLAPEYAIRGQVTKKSDIYSYGVLLLEIVSGRCNTNTRLPCEDQFLLEKTWAFYEQERLEEIIDADIDEDLDIEEACRFLKIGLLCTQDAMARRPHMPTVVRMLTGSKSVSMEKITRPAMITDFAELKVSTKPHGANQARSNTSRSFSTTEISEPFSSSENHTQTSV

SEQ ID NO: 7486 - DNA, 1269 bp, Triticum aestivum
  CDS (1)..(1269)
atggtggaatcgccgtaccgtcttcggcatcgccggctgatggacaccgcgcccgcaacggcgagcggtgatccagcgccaggacatggcggctccaacgggatgccgatcatggtctccatcctggtggtggtcatcatctgcaccctcttctactgcgtctactgctggagatggaggaagcgcaacgctgtgaagagggctcatctagagaggctgaggccgctctccaactcggacctgccggtgatggacctccccaccatcgccgccgccaccaacggtttctccaaggagaacaagctcggcgaaggcggcttcggccccgtctacaggggcgtgctggacggcggcgcggagatcgcggtgaagcggctgtcggcgcggtcgcggcagggcgcggcggagttccggaacgaggtggagctgatcgccaagctgcagcaccggaacctggtgaggctgctggggtgctgcgtggacatggacgagaagatgctcgtctacgagtacctccccaaccggagcctcgacgccttcctcttcggcaccagaaagacggcccacttggattggaagatgaggcagagcatcgtggtggggatcgcgcgcgggctgctgtacctccacgaggactcgtgcctcaagatcgtccacagggacctcaaggccagcaacgtgctcctcgacaataaaatgaaccccaagatctccgacttcggcatggccatgatcttcgaggacgaggagatcgaggtcgtcaacaccggccacgtcgtcggaacatatgggtacatggcgcccgagtacgcgatggggggcatcttctcggtgaagtcggacgtgtacagcttcggggtgctggtgctggagatcctcagcggccagcgcaacggcgcaatgtacctccaggagcaccagcacaccctcatccaagacgcatggaagatgtggagcgaggacaaggcggcggagttcatggacgcgtcgctggccgggtcgtacgccaaggaggaggcgtggcggtgctaccacgcgggcctgctgtgcgtgcaggagagcccggagctccggccgaccatgtccagcgtcgtgctgatgctcatcggcgaccaggcgcagctcccggcgcccgagcagcccccgctgttcgcgagtccgaagaagtccccggcgtcagaccagtcctcgctggcgatgaggtccgagacgacgtccaagacgcactccgtcaacgacgtgtccatcaccatgatccagccacgatag

SEQ ID NO: 7487 - protein, 422 aa, Triticum aestivum
MVESPYRLRHRRLMDTAPATASGDPAPGHGGSNGMPIMVSILVVVIICTLFYCVYCWRWRKRNAVKRAHLERLRPLSNSDLPVMDLPTIAAATNGFSKENKLGEGGFGPVYRGVLDGGAEIAVKRLSARSRQGAAEFRNEVELIAKLQHRNLVRLLGCCVDMDEKMLVYEYLPNRSLDAFLFGTRKTAHLDWKMRQSIVVGIARGLLYLHEDSCLKIVHRDLKASNVLLDNKMNPKISDFGMAMIFEDEEIEVVNTGHVVGTYGYMAPEYAMGGIFSVKSDVYSFGVLVLEILSGQRNGAMYLQEHQHTLIQDAWKMWSEDKAAEFMDASLAGSYAKEEAWRCYHAGLLCVQESPELRPTMSSVVLMLIGDQAQLPAPEQPPLFASPKKSPASDQSSLAMRSETTSKTHSVNDVSITMIQPR

SEQ ID NO: 7488 - DNA, 1146 bp, Zea mays
  CDS (1)..(1146)
atgagttgtttttctcactttttcaagagaaaaagggggccacaacaacaagacgatccatctgacaattatttcactggttctgagaatataacaagattcagctacagggaactggttagagccacaacaaattttgaccaaggcaataagattggtgagggcggctatggacctgtctacaagggaacactcaaggatgggacaattattgccgtaaaggttctgtctttacattctagacaaggggcaaaggagtttcttaatgagcttcttgcaatctctgatgtaacacatgagaatcttgtcaaactctatggctgctgtgtagaaggaaaccacaggatccttgtctacaattatcttgaaaataatagtcttgcacatacccttctagattcgcgacacagcaacatccagttcaactggagaactcgggtaaatatctgcatcggtgttgcccaaggattagctttcctccatggcagtgtcagccctcacattgttcaccgtgacatcaaggcgagcaatatacttcttgataaggatatgacgccaaaaatatctgattttggtctggcaaagcttctacctccggatgtatcacatgttagcacaagagtcgcagggaccctaggttacttggctcctgaatatgcaattcgaggacatgttacacggaaggcagatgtctacagctatggcgttctgcttatcgaaattgtgagcggaagatgcaacactgatacgaaattgccctatgatgaccagattctccttgagaagacatggagatactatggtcgcgggaatctggagaagatcatagacagctcccttggcgacgacctggacgttgacgaagcctgcaggtttctgaagatcgggctcctctgcacccaagacggcacgaaacgccggccgggcatgtctgcggtggtggccatgctgagaggcgaggcggacgtggacacggagacgatcagcaagcccgacgtgatcagggatttcggagacctgaagctgcggagcagggccacgtcgtccacgctgctgacctcgatcatggcgcggtcgtccccgctgtcgtctgaggagacgacgcgcacctccatcaccttcaccgagatatcggagcgcgactga

SEQ ID NO: 7489 - protein, 381 aa, Zea mays
MSCFSHFFKRKRGPQQQDDPSDNYFTGSENITRFSYRELVRATTNFDQGNKIGEGGYGPVYKGTLKDGTIIAVKVLSLHSRQGAKEFLNELLAISDVTHENLVKLYGCCVEGNHRILVYNYLENNSLAHTLLDSRHSNIQFNWRTRVNICIGVAQGLAFLHGSVSPHIVHRDIKASNILLDKDMTPKISDFGLAKLLPPDVSHVSTRVAGTLGYLAPEYAIRGHVTRKADVYSYGVLLIEIVSGRCNTDTKLPYDDQILLEKTWRYYGRGNLEKIIDSSLGDDLDVDEACRFLKIGLLCTQDGTKRRPGMSAVVAMLRGEADVDTETISKPDVIRDFGDLKLRSRATSSTLLTSIMARSSPLSSEETTRTSITFTEISERD

SEQ ID NO: 7490 - DNA, 1125 bp, Zea mays
  CDS (1)..(1125)
atggcctgctgctttctgtttggaaagaaagcgaaacaaaccactgaaggcgatgaagatctacatagcgtcaaggtattctcttacagcgagttgagaaaggctacgcaggatttcagcggcgcgaataagattggcgagggcggtttcggttctgtcttcaggggagtgcttaaagatgggacagtggtggcggtgaaagttttatctgctacttcaaggcaaggcatccgcgagtttttgactgagcttacggcgatatccgacatcaagcatgagaatctggtcactctgatcggttgctgcgccgaaggatctcgcaggatccttgtctacaactacctcgagaacaacagccttgcgcagacattgctaggatccaggcacagcaacatccggttcaactggcacgcccgcgccagaatcgctgtcggcgttgcccgtgggctcgcgtttctccacgaggagatccgtccccccatcatccacagggacataaaggcgagcaacattcttctcgacaaggacctcacccccaagatctccgacttcgggctggcaaggctcctgccgcccaacgcgacccatgtcagcacccgagtggcaggaacattagggtacttggctcctgaatacgcgatccgaggccaagtgacgaagaagtccgatatctatagctatggggttcttcttttagagattgtaagtgggagatgcaacaccaacacgagattacctagcgaggaccagttcctccttgagaggacatgggcactctacgagcaaggacgtctagaggacatcgtggacatggacatcggcggcgaccgggacgtcgaggaggcgtgccggttcctgaagatcggcctgctgtgcacgcaagacgcgatggcgcgccgtcccaacatgaccaacgtcgtccggatgctctcgggggagaggaggatcagcgtagagaagatcactaggcccgccatgatctccgatttcgcggagctcaaggtcagcagcaaggagcgaaggccgggcgaggcacgctcgcccacgacggctcccaccacgaaatcgttcaccaccacggagccgttctcgtcgtcggagacgcccacgcagtcgtccatgtga

SEQ ID NO: 7491 - protein, 374 aa, Zea mays
MACCFLFGKKAKQTTEGDEDLHSVKVFSYSELRKATQDFSGANKIGEGGFGSVFRGVLKDGTVVAVKVLSATSRQGIREFLTELTAISDIKHENLVTLIGCCAEGSRRILVYNYLENNSLAQTLLGSRHSNIRFNWHARARIAVGVARGLAFLHEEIRPPIIHRDIKASNILLDKDLTPKISDFGLARLLPPNATHVSTRVAGTLGYLAPEYAIRGQVTKKSDIYSYGVLLLEIVSGRCNTNTRLPSEDQFLLERTWALYEQGRLEDIVDMDIGGDRDVEEACRFLKIGLLCTQDAMARRPNMTNVVRMLSGERRISVEKITRPAMISDFAELKVSSKERRPGEARSPTTAPTTKSFTTTEPFSSSETPTQSSM

SEQ ID NO: 7492 - DNA, 1110 bp, Zea mays
  CDS (1)..(1110)
atgttcaattttcaagaaatgtcttgctgttttacgtgtgcgacgggcatggaacgaaataatgaaaacgaaggaggaagcaaggtgaggattttttcctacagtgagatgaggaaagctacgcatgattttagtggagcaaacaagattggcgagggcggtttcggctccgttttcagggggaagcttaaagatggaacgatcgtcgcggtgaaagtcctttctgctaattcaaggcagggtgttcgagagttcgtaaccgaacttacagcaatttcagatatcgtgcatgaaaacctaattacattggttggttgctgtgccgaagggtcccagaggattcttgtgtacaattatctcgagaacaatagtctttcatatacacttctaggttcgggccggagcaacattcggttcaactggagagcccgtgtcaagattgctgtaggcgttgctcgtgggcttgcttatcttcacgatggaattcggccccctataattcatcgagatataaaggcgagcaacattctccttgacaaggacctcaccccaaagatctctgatttcgggctggcaaggctcctccccccaaacgcaactcatgtgagcactagggttgcaggaacaataggatacctggctcctgaatacgctgtgagggggcaagtgacgaagaaatcggatatctatagtttcggcgttttgctactggaaattgttgctggtagatgtaactacaacagtagattgcctcagggagaccagtttctgcttgagaagacatgggcatactacgtgcagggaaagctagagaaggtcatagacgccgaagcaggggaggacctgaacgtcgaggaggcatgccgtttcttgaaggttggcctactatgcgcccaagacgcgatgaagctgcgtccgaacatggccagcgtcgtcctgatgctgataggagagaagggaatctccgtggacaggatcaccaagccagccgtgatcggtgacccgtacctcgaccggaggccaagcaacgcagactctaccacgatgaagtccttcgccacgaccgaagctttaacgtcatcagaggcaaacacggagtggtctctgtga

SEQ ID NO: 7493 - protein, 369 aa, Zea mays
MFNFQEMSCCFTCATGMERNNENEGGSKVRIFSYSEMRKATHDFSGANKIGEGGFGSVFRGKLKDGTIVAVKVLSANSRQGVREFVTELTAISDIVHENLITLVGCCAEGSQRILVYNYLENNSLSYTLLGSGRSNIRFNWRARVKIAVGVARGLAYLHDGIRPPIIHRDIKASNILLDKDLTPKISDFGLARLLPPNATHVSTRVAGTIGYLAPEYAVRGQVTKKSDIYSFGVLLLEIVAGRCNYNSRLPQGDQFLLEKTWAYYVQGKLEKVIDAEAGEDLNVEEACRFLKVGLLCAQDAMKLRPNMASVVLMLIGEKGISVDRITKPAVIGDPYLDRRPSNADSTTMKSFATTEALTSSEANTEWSL

SEQ ID NO: 7494 - DNA, 1146 bp, Zea mays
  CDS (1)..(1146)
atgagttgtttttctcactttttcaagagaaaaagggggccacaacaacaagacgatccatctgacaattatttcactggttctgagaatataacaagattcagctacagggaactggttagagccacatcaaattttgaccaaggcaataagattggtgagggcggctatggacctgtctacaagggaacactcaaggatgggacagttattgccgtaaaggttctgtctttacattctagacaaggggcaaaggagtttcttaatgagcttcttgcaatctctgatgtaacacatgagaatcttgtcaaactctatggctgctgtgtagaaggaaaccacaggatccttgtctacaattatcttgaaaataatagtcttgcacatacccttctagattcgcgacacagcaacatccagttcaactggagaactcgggtaaatatctgcatcggtgttgcccaaggattagctttcctccatggcagtgtcagccctcacattgttcaccgtgacatcaaggcgagcaatatacttcttgataaggatatgacgccaaaaatatctgattttggtctggcaaagcttctacctccggatgtatcacatgttagcacaagagtcgcagggaccctaggttacttggctcctgaatatgcaattcgaggacatgttacacggaaggcagatgtctacagctatggcgttctgcttatcgaaattgtgagcggaagatgcaacactgatacgaaattgccctatgatgaccagattctccttgagaagacatggagatactatggtcgcgggaatctggagaagatcatagacagctcccttggcgacgacctggacgttgacgaagcctgcaggtttctgaagatcgggctcctctgcacccaagacggcacgaaacgccggccgggcatgtctgcggtggtggccatgctgagaggcgaggcggacgtggacacggagacgatcagcaagcccgacgtgatcagggatttcggagacctgaagctgcggagcagggccacgtcgtccacgctgctgacctcgatcatggcgcggtcgtccccgctgtcgtctgaggagacgacgcgcacctccatcaccttcaccgagatatcggagcgcgactga

SEQ ID NO: 7495 - protein, 381 aa, Zea mays
MSCFSHFFKRKRGPQQQDDPSDNYFTGSENITRFSYRELVRATSNFDQGNKIGEGGYGPVYKGTLKDGTVIAVKVLSLHSRQGAKEFLNELLAISDVTHENLVKLYGCCVEGNHRILVYNYLENNSLAHTLLDSRHSNIQFNWRTRVNICIGVAQGLAFLHGSVSPHIVHRDIKASNILLDKDMTPKISDFGLAKLLPPDVSHVSTRVAGTLGYLAPEYAIRGHVTRKADVYSYGVLLIEIVSGRCNTDTKLPYDDQILLEKTWRYYGRGNLEKIIDSSLGDDLDVDEACRFLKIGLLCTQDGTKRRPGMSAVVAMLRGEADVDTETISKPDVIRDFGDLKLRSRATSSTLLTSIMARSSPLSSEETTRTSITFTEISERD

SEQ ID NO: 7496 - DNA, 1182 bp, Zea mays
  CDS (1)..(1182)
atggggagttcggtcggctgcttgggaggcggctccaagtcgaggcaagatcagaatggtcaggtcgtcgcgggttcgtctccccgttcaggtcatgaattatcaagacctggaaataatgtacatgtattctccctaaacgagttgaagactgccacacgaaactttcacatgttgaattgcattggccgtggggggttcggagcagtgtataagggaaacctgaaaaatggcactccaattgcaattaaaaaacttgcagctgagtcaaaacaaggaattagtgaattcttgacagagattaatgtcatatcaaatgttaggcacccaaaccttatcaagctgattggttgctgtgttgaagggagtaacagactattggtgtacgaatatgcagagaataatagtttggcgaatgctttgcttggaccaaagaacaaatgtatcccattggactggcagaaaagagttgctatatgtattggaactgcttctggccttgcttttcttcatgaggaagcacaaccacggattgtccaccgtgatatcaaggctagcaacattttacttgataagaagctgctgccgaaaattggagattttggattggcgaaactctttcctgatactgtcactcacattagcacgcgtgttgcaggaacaatgggttatttggcaccagagtatgccttgttgggacaattgaccaagaaagcagacatatatagttttggggtgcttcttcttgaaatgataagtggtgaaagcagcagcaagtcgacttggggacctaatatgcatgttctcgtggaatggacatggaagctgcgggaagaaggaaggctcttggaaattgttgatccagaactggaaaagtacccagaggagcaaatgcttcgtttcattaaagtggcactgctgtgtacgcaagccacgtcccagcagaggccgtccatgaagcaggtcgttaatatgctatctaaccaaacagaaattgatctgcaaaatgtagctccaccaggtgtgctgaaagaacctcggcagcgtaccggtggctttgggggtttgatagcagacacgtcctcaagccaaagcactaaaggcaacccagctgaatcatacagcacacagaccaacatgaacagctctcagtttagcacaactgatgtatcaccacggtga

SEQ ID NO: 7497 - protein, 393 aa, Zea mays
MGSSVGCLGGGSKSRQDQNGQVVAGSSPRSGHELSRPGNNVHVFSLNELKTATRNFHMLNCIGRGGFGAVYKGNLKNGTPIAIKKLAAESKQGISEFLTEINVISNVRHPNLIKLIGCCVEGSNRLLVYEYAENNSLANALLGPKNKCIPLDWQKRVAICIGTASGLAFLHEEAQPRIVHRDIKASNILLDKKLLPKIGDFGLAKLFPDTVTHISTRVAGTMGYLAPEYALLGQLTKKADIYSFGVLLLEMISGESSSKSTWGPNMHVLVEWTWKLREEGRLLEIVDPELEKYPEEQMLRFIKVALLCTQATSQQRPSMKQVVNMLSNQTEIDLQNVAPPGVLKEPRQRTGGFGGLIADTSSSQSTKGNPAESYSTQTNMNSSQFSTTDVSPR

SEQ ID NO: 7498 - DNA, 1125 bp, Zea mays
  CDS (1)..(1125)
atgggttgctgctttatgttcggaaagaaagctaagcaggccgttgaaggcgatgaagatctacatagcgtcaaggtgttttcttacaacgacttgaggaaggctacacaagatttcagtgacgcaaacaagattggcgagggcggtttcggttctgtcttccggggagtgcttaaagatgggacactagtggcagtgaaagttctatctgctacttcaaggcaaggcgtccgcgagtttctgactgaacttacagcaatatctgatatcaagcatgcaaatctcgtcactcttatcggttgctgcgctgaaggctctcacagaatcctggtttacaattacctcgagaacaacagccttgcgcagacattgctaggatccagatacagtaacattcggttcaattggcgggctcgtgtcaaaattgcagttggcattgcctgtggacttgcgtttctccatgaggaaatccgtcctcacattatccatagggacataaaggcaagcaacattcttcttgacaaggacctgaccccgaaaatttcggatttcgggttggcaaggctcctaccacccaacgcgacgcatgtgagcacccgagtagcaggcacattaggatacttggctcctgaatacgcaatccgtggtcaagtgacaaagaaatccgatatctatagttatggtgttcttcttttagaaattgttagtgggagatgcaacaccaacacaagattacctagtgaagatcaattcctccttgagaggacatgggcactctatgaggaagggcgtttagaagacatcatagatattgacatcggcgatgacctggatgttgatgaggcatgcaggttcatgaagattggcctgctatgcacacaagatgcgatggcgcgtcgtcccagcatgaccaatgtcgttcggatgctctcaggggagaagagaatcaacgtagaccagatcactaggcctgccatgatcactgattttgctgatctcaagatcagcaacaaggagcaaagaccaggcgagacacgctctcccacgacaactcctacgacgaaatcattcaccaccaccgaaccattctcgtcgtcagagacgcccacgcagtcatccatgtga

SEQ ID NO: 7499 - protein, 374 aa, Zea mays
MGCCFMFGKKAKQAVEGDEDLHSVKVFSYNDLRKATQDFSDANKIGEGGFGSVFRGVLKDGTLVAVKVLSATSRQGVREFLTELTAISDIKHANLVTLIGCCAEGSHRILVYNYLENNSLAQTLLGSRYSNIRFNWRARVKIAVGIACGLAFLHEEIRPHIIHRDIKASNILLDKDLTPKISDFGLARLLPPNATHVSTRVAGTLGYLAPEYAIRGQVTKKSDIYSYGVLLLEIVSGRCNTNTRLPSEDQFLLERTWALYEEGRLEDIIDIDIGDDLDVDEACRFMKIGLLCTQDAMARRPSMTNVVRMLSGEKRINVDQITRPAMITDFADLKISNKEQRPGETRSPTTTPTTKSFTTTEPFSSSETPTQSSM

SEQ ID NO: 7500 - DNA, 1134 bp, Zea mays
  CDS (1)..(1134)
atgggttgctaccctgtgttctggaggaagaagaactccagaagccaggttgtgcagcttgaccaagacatcccaatcgcgggcaacgtgaaaatctactcgtccaaggagctgaggaaagccacgggaaatttctgcccgggaagcaagcttggacagggttctttcggccgtgtatacctgggaaaactgaacaatggcgagaaagttgccatcaaggtgctctcctcagagtccaggcaagggacaaaggagttcttgaatgaactgagtgtcatatccaacataactcaccacaaccttgtcaaactgcatggctgctgcatcgacggaggccagaagatgctggtctacaactacgtggagaacaacagccttgcacaaacccttttcggtaattcccgcagcggcatcagatttgactggagaacaagggtggagatctgcgttggcgttgccgatgggctcacgtacctccacgaagaagtccgtccaccgatcgtccaccgcgacatcaaagcgagcaacatccttctcgacagaaatctgagacccaagatagcagactttgggctggcgaagttcttccctggcaacatgacacacatcagcaccagagttgcagggacgctaggatatcttgcgccagagtacgccatccgagggcagctgaccaagaaggccgacgtctacagctttggtgtactgctgctggagatcgtcagtggcagatgccacactgatcccacattacctcttgacgagcagttcctcctagaaaaggtctggacactctcggagtccgatgatcttgagagcatcatcgacggtaccatggagcgcgatttcgacaccgaggaagcacgtcggttgctgaaaataggtcttctgtgcacccaggatagccccaagatcaggccctccatgtcaatggttgccaagatgctgaagggtgagtgtgatgtgagtgaaaagatcatgcggcccagcctgatcacagacgtcatggacctgaaagtcaggacagtagagccgatccagttcagtttatccccatcgatgtcacctgcgctgagcagctcactggtgtccacacttgcattagctggtagcacagttgtagagagccgctga

SEQ ID NO: 7501 - protein, 377 aa, Zea mays
MGCYPVFWRKKNSRSQVVQLDQDIPIAGNVKIYSSKELRKATGNFCPGSKLGQGSFGRVYLGKLNNGEKVAIKVLSSESRQGTKEFLNELSVISNITHHNLVKLHGCCIDGGQKMLVYNYVENNSLAQTLFGNSRSGIRFDWRTRVEICVGVADGLTYLHEEVRPPIVHRDIKASNILLDRNLRPKIADFGLAKFFPGNMTHISTRVAGTLGYLAPEYAIRGQLTKKADVYSFGVLLLEIVSGRCHTDPTLPLDEQFLLEKVWTLSESDDLESIIDGTMERDFDTEEARRLLKIGLLCTQDSPKIRPSMSMVAKMLKGECDVSEKIMRPSLITDVMDLKVRTVEPIQFSLSPSMSPALSSSLVSTLALAGSTVVESR

SEQ ID NO: 7502 - DNA, 1233 bp, Zea mays
  CDS (1)..(1233)
atgccggccgcggcgcggtcgtggacgtggacctgcgggtgctgcgcgggcaggaggcggaccagcggcggcgctgcgggcgacacggccggcgcgtcggggcgcgccgccgaggagggggacgagtggagcctcttcatcgacctgcccgtcctcgaggccgccaccggcggcttctccgacgacaacctcctcggccgcggcggcttcggccccgtctacaagggggtgatggagaatgggcagcagatcgctgtgaagaggctgtctctggggtcacggcaaggcgtgcgcgagttcctgaacgaggtccggctcctgctcaaggtgcagcaccggaacctggtgtccctgcttggctgctgtgcttcctccggccacaagatgctcgtctatccctacttccccaatagcagcctcgaccacactctcttcgacaggaataagtgtgcggcgctagattggccaaaacggtaccatataatcgtgggactggcaagagggctcctctacctgcacgaagagtctccggtaaagatcatccaccgagacatcaaggcgagcaacgtgctcctggacgaccagctgaacccgaagatctcggacttcggcatggcgaggctcttcctggaggacgccacgcacgtgaacacgttcaggatctccggcacatatggttacatggctccagagtacgcgatgaacggctacctgtccgccaagaccgacgtcttcagcttcgggatcctggtgctggagatcgtgagcgggcggaagaacatcgtccggcatctggacgacgagaaggtcgacctgttgagctatacatggaagctattcggagaaggacggtccctggagatcgtggacccgtcgctgtccagccccgacagcgatcaggcgctgctgtgcatccagctcggcctgctgtgctgccaggccgcggtgtcggaccggcccgacatgcacagcgtgcacctgatgctgtcgagcgactcgttcacgctgcccaggcccgggaagccggccgtacacggcaggaccggccggtggacggcagcgacgacgacggcctcagggtccgcgtcggcgtcgagcgccaccaacaccaccagcacgttcgggttcggcaccgacacgaacacgaccagggcctctgcgctgctggccagtgtcgccgaggacgagtcccggaactccatctccatatccttcaccactgatggccggtag

SEQ ID NO: 7503 - protein, 410 aa, Zea mays
MPAAARSWTWTCGCCAGRRRTSGGAAGDTAGASGRAAEEGDEWSLFIDLPVLEAATGGFSDDNLLGRGGFGPVYKGVMENGQQIAVKRLSLGSRQGVREFLNEVRLLLKVQHRNLVSLLGCCASSGHKMLVYPYFPNSSLDHTLFDRNKCAALDWPKRYHIIVGLARGLLYLHEESPVKIIHRDIKASNVLLDDQLNPKISDFGMARLFLEDATHVNTFRISGTYGYMAPEYAMNGYLSAKTDVFSFGILVLEIVSGRKNIVRHLDDEKVDLLSYTWKLFGEGRSLEIVDPSLSSPDSDQALLCIQLGLLCCQAAVSDRPDMHSVHLMLSSDSFTLPRPGKPAVHGRTGRWTAATTTASGSASASSATNTTSTFGFGTDTNTTRASALLASVAEDESRNSISISFTTDGR

SEQ ID NO: 7504 - DNA, 1293 bp, Zea mays
  CDS (1)..(1293)
atgaagccgcgggcgttcctggagcgcctggcccgccccttctcctcctcccgccgctcctcctccgaccagtcccgccgcgacagggaggaggaggcggacctcgaggcgatcgcggcgcgggagcagcgcgcgttcaggtacgagaccctggcggcggcgacgcggagcttctccgagaagaaccggctcgggcagggcgggttcggccccgtgtaccggggccgcctggaggacggccgcgacgtcgccgtcaagcgcctgggcgccggctcgcggcagggcgcccgggagttccgcaacgaggccacgctgctgtcccgcgtgcagcaccgcaacgtggtcaacctcatcggctactgcgcccgcggggcggaggacaagctgctggtgtacgagtacgtgcccaacgagagcctcgacaagatcctcttctcctcctcctcctccgcccgctccagcagcaacagcgaccggtcacgacgagcggagctgacctggccgcggcggcacgaggttgtggtcggcgtggcgcgtggcctgctctacctccacgaggatgcgcacacgcccatcatccaccgtgacatcaaggccagcaacatcctcctcgacgaccggtgggtgcccaagatcgccgacttcggcatggcccgtctcttcccggaggccggcgatggccactcccgtgttcatacccgtgtcgccggcactaacgggtacatggcgcccgagtacctcatgcacggcgacctctccaccaaggccgacgtcttcagcttcggcgtggttgttctcgagatcgtctcaggccgcaagaactccgcctttatcccgcccccggacgccgaggccgacagcctcctggaatacgcatggaggctgtacaagaaaggtcggagcttggagttgcttgaccacgcggtcaagtcgtcggcggtgccggagcaggtcgagctgtgcgttcgcatcgggctgctgtgcgtgcaggctgacccgcggctgcggccggacatgaagcgcgtggtaatcatcctgtccaagaagcagagcacgctcgaggagccgacgcgtccgggggtgcccgggtcgcggtaccggcggaggccccacggcctgcgcggcacgcactactctgctgggtcatcgtccggcaccagcttgccgtctacgtccgcaacatcggacgcgtcagcgtcagcgtcagcgtcggtctccaacgccatgacgacgtcgagcacccacaccatgaggagccaaggcttgccctcgcaccgagaagaacacgagtag

SEQ ID NO: 7505 - protein, 430 aa, Zea mays
MKPRAFLERLARPFSSSRRSSSDQSRRDREEEADLEAIAAREQRAFRYETLAAATRSFSEKNRLGQGGFGPVYRGRLEDGRDVAVKRLGAGSRQGAREFRNEATLLSRVQHRNVVNLIGYCARGAEDKLLVYEYVPNESLDKILFSSSSSARSSSNSDRSRRAELTWPRRHEVVVGVARGLLYLHEDAHTPIIHRDIKASNILLDDRWVPKIADFGMARLFPEAGDGHSRVHTRVAGTNGYMAPEYLMHGDLSTKADVFSFGVVVLEIVSGRKNSAFIPPPDAEADSLLEYAWRLYKKGRSLELLDHAVKSSAVPEQVELCVRIGLLCVQADPRLRPDMKRVVIILSKKQSTLEEPTRPGVPGSRYRRRPHGLRGTHYSAGSSSGTSLPSTSATSDASASASASVSNAMTTSSTHTMRSQGLPSHREEHE

SEQ ID NO: 7506 - DNA, 21 bp, Artificial sequence
  primer
atggccgttacttcgcttctc

SEQ ID NO: 7507 - DNA, 20 bp, Artificial sequence
  primer
ttaacgtgaagatatgggtg

SEQ ID NO: 7508 - protein, 310 aa, Artificial sequence
  consensus sequence
  Variant (3)..(4): Xaa in position 3 to 4 is any amino acid
  Variant (6)..(7): Xaa in position 6 to 7 is any amino acid
  Variant (8)..(8): Xaa in position 8 is any or no amino acid
  Variant (10)..(11): Xaa in position 10 to 11 is any amino acid
  Variant (13)..(13): Xaa in position 13 is any amino acid
  Variant (18)..(18): Xaa in position 18 is any amino acid
  Variant (21)..(21): Xaa in position 21 is any amino acid
  Variant (23)..(23): Xaa in position 23 is any amino acid
  Variant (25)..(26): Xaa in position 25 to 26 is any amino acid
  Variant (28)..(30): Xaa in position 28 to 30 is any amino acid
  Variant (34)..(34): Xaa in position 34 is any amino acid
  Variant (37)..(38): Xaa in position 37 to 38 is any amino acid
  Variant (40)..(40): Xaa in position 40 is any amino acid
  Variant (43)..(44): Xaa in position 43 to 44 is any amino acid
  Variant (47)..(48): Xaa in position 47 to 48 is any amino acid
  Variant (50)..(57): Xaa in position 50 to 57 is any amino acid
  Variant (59)..(59): Xaa in position 59 is any amino acid
  Variant (62)..(63): Xaa in position 62 to 63 is any amino acid
  Variant (65)..(65): Xaa in position 65 is any amino acid
  Variant (67)..(67): Xaa in position 67 is any amino acid
  Variant (69)..(74): Xaa in position 69 to 74 is any amino acid
  Variant (75)..(76): Xaa in position 75 to 76 is any or no amino acid
  Variant (80)..(83): Xaa in position 80 to 83 is any amino acid
  Variant (85)..(85): Xaa in position 85 is any amino acid
  Variant (88)..(101): Xaa in position 88 to 101 is any amino acid
  Variant (102)..(113): Xaa in position 102 to 113 is any or no amino acid
  Variant (115)..(116): Xaa in position 115 to 116 is any amino acid
  Variant (118)..(119): Xaa in position 118 to 119 is any amino acid
  Variant (121)..(122): Xaa in position 121 to 122 is any amino acid
  Variant (124)..(124): Xaa in position 124 is any amino acid
  Variant (126)..(126): Xaa in position 126 is any amino acid
  Variant (129)..(130): Xaa in position 129 to 130 is any amino acid
  Variant (133)..(140): Xaa in position 133 to 140 is any amino acid
  Variant (144)..(144): Xaa in position 144 is any amino acid
  Variant (149)..(149): Xaa in position 149 is any amino acid
  Variant (153)..(156): Xaa in position 153 to 156 is any amino acid
  Variant (160)..(160): Xaa in position 160 is any amino acid
  Variant (164)..(164): Xaa in position 164 is any amino acid
  Variant (166)..(177): Xaa in position 166 to 177 is any amino acid
  Variant (178)..(180): Xaa in position 178 to 180 is any or no amino acid
  Variant (182)..(183): Xaa in position 182 to 183 is any amino acid
  Variant (186)..(186): Xaa in position 186 is any amino acid
  Variant (189)..(190): Xaa in position 189 to 190 is any amino acid
  Variant (195)..(196): Xaa in position 195 to 196 is any amino acid
  Variant (198)..(201): Xaa in position 198 to 201 is any amino acid
  Variant (203)..(203): Xaa in position 203 is any amino acid
  Variant (205)..(206): Xaa in position 205 to 206 is any amino acid
  Variant (212)..(212): Xaa in position 212 is any amino acid
  Variant (216)..(216): Xaa in position 216 is any amino acid
  Variant (219)..(228): Xaa in position 219 to 228 is any amino acid
  Variant (229)..(235): Xaa in position 229 to 235 is any or no amino acid
  Variant (237)..(237): Xaa in position 237 is any amino acid
  Variant (238)..(253): Xaa in position 238 to 253 is any or no amino acid
  Variant (255)..(279): Xaa in position 255 to 279 is any amino acid
  Variant (280)..(283): Xaa in position 280 to 283 is any or no amino acid
  Variant (285)..(289): Xaa in position 285 to 289 is any amino acid
  Variant (293)..(293): Xaa in position 293 is any amino acid
  Variant (295)..(299): Xaa in position 295 to 299 is any amino acid
  Variant (302)..(305): Xaa in position 302 to 305 is any amino acid
  Variant (307)..(309): Xaa in position 307 to 309 is any amino acid
ATXXFXXXNXXGXGGFGXVYXGXLXXGXXXAVKXLSXXSXQGXXEFXXEXXXXXXXXHXNLXXLXGXCXXXXXXXXLVYXXXXNXSLXXXXXXXXXXXXXXXXXXXXXXXXXXWXXRXXIXXGXAXGLXXLHXXXXXXXXHRDXKASNXLLDXXXXPKIXDFGXAXXXXXXXXXXXXXXXRXXGTXGYXXPEYAXXGXXXXKXDXXSFGVLXLEIXSGXXXXXXXXXXXXXXXXXLXXXXXXXXXXXXXXXXXWXXXXXXXXXXXXXXXXXXXXXXXXXXXXXRXXXXXLLCXQXXXXXRPXXXXVXXXL

SEQ ID NO: 7509 - protein, 34 aa, Artificial sequence
  protein pattern
  Variant (3)..(3): Xaa in position 3 is any amino acid
  Variant (6)..(6): Xaa in position 6 is Leu or Met
  Variant (7)..(7): Xaa in position 7 is Ala, Asp, Pro or Ser
  Variant (11)..(11): Xaa in position 11 is Ala, Ile or Val
  Variant (12)..(13): Xaa in position 12 to 13 is any amino acid
  Variant (15)..(16): Xaa in position 15 to 16 is any amino acid
  Variant (17)..(17): Xaa in position 17 is Ser or Thr
  Variant (18)..(18): Xaa in position 18 is any amino acid
  Variant (20)..(20): Xaa in position 20 is Ala, Ser or Thr
  Variant (22)..(22): Xaa in position 22 is Ile, Met or Val
  Variant (23)..(23): Xaa in position 23 is Phe or Tyr
  Variant (24)..(24): Xaa in position 24 is Ala or Ser
  Variant (25)..(25): Xaa in position 25 is Phe or Tyr
  Variant (27)..(27): Xaa in position 27 is Ile or Val
  Variant (28)..(28): Xaa in position 28 is any amino acid
  Variant (29)..(29): Xaa in position 29 is Ile, Leu, Met or Val
  Variant (30)..(30): Xaa in position 30 is Ile or Leu
  Variant (31)..(31): Xaa in position 31 is Glu or Thr
  Variant (32)..(32): Xaa in position 32 is Ile, Met or Val
  Variant (33)..(33): Xaa in position 33 is Ile, Leu or Val
  Variant (34)..(34): Xaa in position 34 is Ala, Ser, Thr or Val
GTXGYXXPEYXXXGXXXXKXDXXXXGXXXXXXXX

SEQ ID NO: 7510 - protein, 47 aa, Artificial sequence
  protein pattern
  Variant (2)..(2): Xaa in position 2 is any amino acid
  Variant (4)..(4): Xaa in position 4 is any amino acid
  Variant (5)..(5): Xaa in position 5 is Asp, Glu, Gly or Asn
  Variant (7)..(7): Xaa in position 7 is Ala, Asp, Glu, Gln, Ser or Thr
  Variant (8)..(8): Xaa in position 8 is any amino acid
  Variant (9)..(9): Xaa in position 9 is Ala, Ile or Val
  Variant (11)..(11): Xaa in position 11 is Ile or Val
  Variant (13)..(13): Xaa in position 13 is any amino acid
  Variant (15)..(17): Xaa in position 15 to 17 is any amino acid
  Variant (19)..(20): Xaa in position 19 to 20 is any amino acid
  Variant (21)..(21): Xaa in position 21 is Ala, Gly or Thr
  Variant (22)..(23): Xaa in position 22 to 23 is any amino acid
  Variant (24)..(24): Xaa in position 24 is Glu or Gln
  Variant (25)..(25): Xaa in position 25 is Phe or Leu
  Variant (26)..(26): Xaa in position 26 is any amino acid
  Variant (27)..(27): Xaa in position 27 is Asn, Thr or Val
  Variant (29)..(29): Xaa in position 29 is Ile, Leu or Val
  Variant (30)..(30): Xaa in position 30 is any amino acid
  Variant (31)..(32): Xaa in position 31 to 32 is Ala, Ile, Leu or Val
  Variant (33)..(33): Xaa in position 33 is Ala, Ser, Thr or Val
  Variant (34)..(34): Xaa in position 34 is any amino acid
  Variant (35)..(35): Xaa in position 35 is Ile, Leu or Val
  Variant (36)..(36): Xaa in position 36 is any amino acid
  Variant (38)..(38): Xaa in position 38 is any amino acid
  Variant (41)..(41): Xaa in position 41 is Ala, Ile, Leu or Val
  Variant (42)..(42): Xaa in position 42 is any amino acid
  Variant (43)..(43): Xaa in position 43 is Leu or Val
  Variant (44)..(44): Xaa in position 44 is any amino acid
  Variant (46)..(46): Xaa in position 46 is any amino acid
GXLXXGXXXAXKXLXXXSXXXXXXXXXEXXXXXXXXHXNLXXXXGXC
